United States Patent Application Publication US 2005/0153317 A1 - sequence listing, part 18

SEQ ID NO: 79076 - DNA, 600 bp, Chicken  19866894369592_2
ttgtcagactgatctttaaaaagcagatgctctctccgtaagtcagtatctgtggtaaggaaacggctgtctgtctgaattaggcagtgctgtgctaaaggtaatcagctggaataagaagggtagttgggaagtccagaatgttttactccaggggttcctttagcctaaagatatctcagcacaagttagcrtggctttcattagtttgaaattcagtgttgcaagccataattggcttattggagcaaattttgatgctgaatacatgtaacatcagattcgttatagagctttctsttgacttgctgatattttagaaactgaaaatctgactgggagttcatgaactgcagtgatttctgtaagaatttatggagggattggggagaactgagcttaagaagtttggtgccaaagaaaattagtttttgtattaagaatatattgcacgtatttatttttttctccaacatgtttgatgtgtgcagttaattttctcagtaataacgcacactcgttaaccagaacccacagcaaaactatatggacatggatcatgtcatgtgattgaacatcatacgtcacacatgtgattga

SEQ ID NO: 79077 - DNA, 600 bp, Chicken  19866894369601_1
aagcaggagagttggagaaagttagtaaagtcctgttggtgtgtaataccaagcattaataatttgggccttgatccagcaaagtacttaagtgtgctgcatttgggtccccgattgctctccctgggtgcgatgcagccagctctgctgggcacagccctggggctgcagcacctgggtgtgggatttcctgcaaggacaaaggcttcgaatcagtttttcagtcttgatgtcaccagaggtgatctctgggcgttgggctgcaatggcaaagcccaggctgcttgggaagctttgcaygggcagctccctcctgctgtaaccmcaaaatgccctgagctgtggctttggtgctgacccaactcagcacccctcacagcactcagttctgctcatgccctgcatgcttgatttaagcctatttctcttctaaatatagcccagccaggctatggaggctgatgccaccgtgccactgcagaagtgtgcatgttgctgggaggagggcttcacttcttttgcagtgttatgagttggttggtaaaggtgccatctgggttctctccttccgtgttggcggtgcagatgtcgcacctccca

SEQ ID NO: 79078 - DNA, 600 bp, Chicken  19866894369601_2
taaagtcctgttggtgtgtaataccaagcattaataatttgggccttgatccagcaaagtacttaagtgtgctgcatttgggtccccgattgctctccctgggtgcgatgcagccagctctgctgggcacagccctggggctgcagcacctgggtgtgggatttcctgcaaggacaaaggcttcgaatcagtttttcagtcttgatgtcaccagaggtgatctctgggcgttgggctgcaatggcaaagcccaggctgcttgggaagctttgcaygggcagctccctcctgctgtaaccmcaaaatgccctgagctgtggctttggtgctgacccaactcagcacccctcacagcactcagttctgctcatgccctgcatgcttgatttaagcctatttctcttctaaatatagcccagccaggctatggaggctgatgccaccgtgccactgcagaagtgtgcatgttgctgggaggagggcttcacttcttttgcagtgttatgagttggttggtaaaggtgccatctgggttctctccttccgtgttggcggtgcagatgtcgcacctcccactgcgcagcgctgttgtgtttgtgg

SEQ ID NO: 79079 - DNA, 600 bp, Chicken  19866894369601_3
aaagaatggtgcatggagaggtgccgacagcagagagtgtggggctgggggtcacgtttgtttggacctcctgcacggttgatagaataccctgcaagccacaggaacagtgctgcagaggagaacaaaaatgcattccctgtctgtaaagtttccaaatatctacagcttgagcataaccagaaagcagcccggagcctccttatctacaccaagggatgggagcagccccagcaggggtctgtggcaggctgagttgctgagcgtgagtttccatccccctgcagtgaggggattgcygcaaacagggtcaagttgctgggcggcattcccctgccttgcacccacacctggggccggctctgctggaaccgttgctcccaaaacatcggcggagcagaggggcacccactgccccctgcacagcgctgccctgggctccctaccccttccccacccgtcattggggcagcgcatctctgcgagcatccctcagctccagcctgggtttgtttcccagcgcagccctaaggatgcagggaaggagcaacgcgctctctgagctccacatcaaggacacagcagccccacgggaggctc

SEQ ID NO: 79080 - DNA, 600 bp, Chicken  19866894369602_1
aaaattctctgttaatacagtcctacttgctcagtattaacatgcagatggtcccacttcccaggaattatgaatatacgatctggaggtaggctcttactgggcccaagcatctctccagacaaggttaacaagtactttctcctttccagcactcttcctggttttgacaggtattcagctacagttcctttccacttcctagaatatgatgctctagcaagaagtatttgtgtcaaaactgttctgataatccttctgatcagtcgtgcctatagtccctgttttagtcatggtctsagtttctttattctaggagctaatatcctcagaagaaggtaaccattataaccagcaacctgcacagcatttcatctatccctagtcatagcacgatgggtaagttcacaagggaaaatcaggtaaaaactacttgacaaaaatgcctgtgtgtgcctgtgggacttgtcctgagatggtaacgttagcactgaaagtgtagggtaataggatcatgcattacttggagttcccagaggtcttggctctttattactatttttttttttccctaacatgtgctaacataatccaaatagc

SEQ ID NO: 79081 - DNA, 600 bp, Chicken  19866894369605_1
tcaaaactggtctttgtaatttccaaagcataataagaaaaaaattaccttctgatgataaattgccatgatcttgacttaagctgcattatgtttcctttgttggcatagccttcaaagaaagtaaacatgttgatgcttcattgtaaatgaagcacactgacgttctccaccataaaactacacaaacacattattaagctggcagagttttcccgagtcccagaactaggacttgaccacagaataaaagatgctcattttctatactagctgataacttcttataagattttaatwtacttaactgtgcctttgtgtcatttttaacaagtactaaccccaatcctgaaacacaaaaaattgttcaaattaatctctttgaattaacattatacccttcaagaacattaagcagctatttacactcaaatggcctaatgctctaagccctcttatgtaggacattggtgagtttgagttgttactcaactgttaagatttcattcaacgttcttggcaaaacttctccaaacaagagggaattagaaaagcaagaggatctcatttcttatgacttaaaaaacaaacaacaacaaa

SEQ ID NO: 79082 - DNA, 600 bp, Chicken  19866894369618_1
ccctcctggccccatgagtcagttcagtgctggggagcagtgataggacccatgcagggagaagccagacagagatgtccagtatccctttgaagacagaggtttctgatgactgagactactgaggaattgttcatgtaaaatcacacagcagtattgcacagcagtctaacccagctgtaaattacgtttggacagagaggcactgaaactgtacctgccataatacactctgagatgatattgctatttttctccatctgcttttgttctgcctcgtgacttgttagcaaatgtggkktttttttgtgcagaaagcactttgggggccagacagagcacaagttaaaggtgtacgtcgaatttatcagaacattgtttgaaaccaaagtcaatctttgtctgaattcacacgtcgagtgcatgaaggaagcaaacacattggattaaagtgccaagagctctgtgacccctcttatgacacatccctgttgtctgtatgagatctcagacactagcaagtttatctgtggcttaagacattgaataaccagtgtcaatgctggcttcttgctttaggtggaacaaaggacgaaggcg

SEQ ID NO: 79083 - DNA, 600 bp, Chicken  19866894369618_2
cctcctggccccatgagtcagttcagtgctggggagcagtgataggacccatgcagggagaagccagacagagatgtccagtatccctttgaagacagaggtttctgatgactgagactactgaggaattgttcatgtaaaatcacacagcagtattgcacagcagtctaacccagctgtaaattacgtttggacagagaggcactgaaactgtacctgccataatacactctgagatgatattgctatttttctccatctgcttttgttctgcctcgtgacttgttagcaaatgtggkktttttttgtgcagaaagcactttgggggccagacagagcacaagttaaaggtgtacgtcgaatttatcagaacattgtttgaaaccaaagtcaatctttgtctgaattcacacgtcgagtgcatgaaggaagcaaacacattggattaaagtgccaagagctctgtgacccctcttatgacacatccctgttgtctgtatgagatctcagacactagcaagtttatctgtggcttaagacattgaataaccagtgtcaatgctggcttcttgctttaggtggaacaaaggacgaaggcga

SEQ ID NO: 79084 - DNA, 600 bp, Chicken  19866894369626_1
gcagcccctgcagaaaatatcacttcccattttgtagatgggaaggctgaggcacataccaatgaaggtgccacaggcttaagaacagctggtgagcacctgccttactgttctgctcctccatcttcctttagggtcactttgcccaggtgttctgttgcaaatttgttgttgttcagatgcaaatgaaatagcaattgcatttcccttcacctctgatatttagttaagtcttgataaacgcatattgttttaacacttgtgatacatataattagggttctttatgtttcaataaamtgttccataataaacatttactgctctgtgaataaacatttaaatgaagctcctaatgggggttacatgttttgaagcagttcatggctttgctgaagtctctccctatagttaatgagagtcatttccataatctgtgcattattgcttaagccttcctttaggaatattttacaaagtaaaattctgtgaaatattatcagccaaaagagaaaatgttaagaggattatcaaattgtcccgttaaagggacagtacaagctttcattttccccatgagatgctaacattataatcaca

SEQ ID NO: 79085 - DNA, 600 bp, Chicken  19866894369628_1
ttctctgcagagaattttacttgctgttccactagcaaattttaatagagctttgcattcattaaccaaggctgatgctagatccaagagtttaaagaatctcagggctaaattgtgacctgaagtaactcatctgaatgccatttgagtcaatggagctgggttacacccaccaagaacgcagaccaaactgcccacgtcaagtcacaacacactgatgcctcaacaagaatgacttaacgtattcacctctgtcattcctgcaccaggcaacagtgaatgccacagcaacttgaaggratgggttgtaggaggccctagttcaaacaacgtttgtgttagaaagggtggctgagagttgctgtccctgcgactgtggttgccttcagcatattcgcagagctgctacatttgccatcatgcctcgctgatctaattgctgctgttatgaacacgttgaatgtaaaactatgtaaacagtgtgacgctctaacagccattcttgcttactgacctgtggaaaagtctattttgggcaactgctgtaggctgttgtggccgttgtaaagcagacaaggcagtgcacacacacttggaacc

SEQ ID NO: 79086 - DNA, 488 bp, Chicken  19866894369629_1
ttgttaagaactcaatgtgagacaccagttgttgtgtttcgaggaatcgtaaagatgaggtttttatgggacattctcttttgcttggggttcgttgtgctgatttgagaggagatgtttatgtgaagctataagcgaccattcaggattctgcaatgccattaatttattgtgttttgttttgttttgtttttttttctctctttcaattcagaaagagatgggagaaagaaaagaggaagaaaaaaaattgactaaaaatgccactccataggggaaataactgcagcgtgggtgggwttgggaaatgtactttaaaatgtttcctttgctgttctatccgagaggacattttatggtaccgctccttgtttaaatttcagtattatagagttgtatatttgccttggtaataggaaatttttggtctctctcgtttttatatatatataaatatatatttaaatgatttttatgatttaaaaaaa

SEQ ID NO: 79087 - DNA, 600 bp, Chicken  19866894369630_1
taagccaaaacagcaggaaaggctgaagccacagcagcccagctgcctgggttcagcatgcaaggcttgtcccacaggcaccgtgctgctctctgccctgtcactctgcttttgctgccaagggtctgacttttgactggaaccagacggaaacctgccccagggctctataccaagcccatagcttctggctgaggataagggcagcttgtggtgagacgtgtccatctgcattattcaaacatagcctcctgcccctcttagcatgtcctcgattggtgacattggctcctgcagagsctgctgttaggtgggtaggtcgcaccaggctgcaggcaatgctgaggtgctgcagaacttggggtgatgcaggaggctgcagagtgacttagctagaaaaagcaaaagccttggctggcatgcagtgtctgtaggacrgccttcatttgcccatgcccccatgaaggtgacttcagtccctgtgccaccagacagccactgtggcactggcaagatgtgagcctgctcagcatatgctcctcatcccatcgacgtggctgtgactcctcttgcatccaactcttcggagacagattgttt

SEQ ID NO: 79088 - DNA, 600 bp, Chicken  19866894369630_2
ggaaccagacggaaacctgccccagggctctataccaagcccatagcttctggctgaggataagggcagcttgtggtgagacgtgtccatctgcattattcaaacatagcctcctgcccctcttagcatgtcctcgattggtgacattggctcctgcagagsctgctgttaggtgggtaggtcgcaccaggctgcaggcaatgctgaggtgctgcagaacttggggtgatgcaggaggctgcagagtgacttagctagaaaaagcaaaagccttggctggcatgcagtgtctgtaggacrgccttcatttgcccatgcccccatgaaggtgacttcagtccctgtgccaccagacagccactgtggcactggcaagatgtgagcctgctcagcatatgctcctcatcccatcgacgtggctgtgactcctcttgcatccaactcttcggagacagattgtttcacagcacctgtgatttattaagctgcctatcggaacgctgcgttgcacagatttcctgtggctgcctgcacatctgctcggggagagcactcagtaaaagctgcctataaatacaaaggccagaggggaacgtgccc

SEQ ID NO: 79089 - DNA, 600 bp, Chicken  19866894369630_3
tcttcggagacagattgtttcacagcacctgtgatttattaagctgcctatcggaacgctgcgttgcacagatttcctgtggctgcctgcacatctgctcggggagagcactcagtaaaagctgcctataaatacaaaggccagaggggaacgtgccctgacaatgaaactaaacagaaaggggaagctctgggtgggggagacaaacagacaggagcagcgctgcaaaacagcattcaaagagcagtcacccaggagtgctgccgagctggctgggcactgcaagcagagccctgcagsggtcaggttctgttcagcctttttattaatggcagggatgatggacgagtgaatgcacttaagaatgtgtgggtgaaccttggctggaaggagggagctgccttggagagcagggctggaactcaacgctaaccactaaataacgatgcaaattaagtaagagaaaattcagcgaggataaacgcaaataaaagctcaggaaagagaaatcagtggtgggggaaagggggaaaaaaaaaaacaaacccaaacaaatggagaatgactgaagaaacagtgccacaggcaaagggtgcgagg

SEQ ID NO: 79090 - DNA, 600 bp, Chicken  19866894369634_1
atacccacaagcagcagctcccttctgcgctttgcaggagcagccaaactctgatcctacatctcagcattgctatgtatggagccagggctgggggaaggagcagacaggcagtctggagctcagtgctagcagggatgatcagtattcctgtgctggcacagagctgtcgggctgtagctctgcaaacagcttttgtctctgcttcctgaactgctgacagcttgccacactttcaggttttactttctctccctgccttagtgcaccattctgggaaattccccaaactgcacttcrtgctttcaaggcacagtgatttctccctttccaaatggcctggcttgagggatccaggcagaaacrtgtcttttacggtgtgaaaggcaaatctgaaatcaaggagtaattttgcatacgctgcctgacagatggctccaaccttcctccctctgctgagtttttttttttgttaagcagcaattgttcagctgctcagggatgctcatccccaacttcccagtgttctgaggctccattcaagttggcagagctctgatctatgcagctgtggaagaacacgatgttccagccttcagc

SEQ ID NO: 79091 - DNA, 600 bp, Chicken  19866894369634_2
gcattgctatgtatggagccagggctgggggaaggagcagacaggcagtctggagctcagtgctagcagggatgatcagtattcctgtgctggcacagagctgtcgggctgtagctctgcaaacagcttttgtctctgcttcctgaactgctgacagcttgccacactttcaggttttactttctctccctgccttagtgcaccattctgggaaattccccaaactgcacttcrtgctttcaaggcacagtgatttctccctttccaaatggcctggcttgagggatccaggcagaaacrtgtcttttacggtgtgaaaggcaaatctgaaatcaaggagtaattttgcatacgctgcctgacagatggctccaaccttcctccctctgctgagtttttttttttgttaagcagcaattgttcagctgctcagggatgctcatccccaacttcccagtgttctgaggctccattcaagttggcagagctctgatctatgcagctgtggaagaacacgatgttccagccttcagctgcagaaaagagcacgacagtcccttccacagcagtagcatctgggagactttgggttgcaatgat

SEQ ID NO: 79092 - DNA, 600 bp, Chicken  19866894369635_1
gcccactgaaagcaaaaagagagtaaaagagaaaggagaaagagggagggagggagggagggagaaaaagaaaccttcaaaggagatgggacaaaaagagaggagtaaattaaaggagcacacttaaagggtgagaagaacttaagacagtacaagataaaaaaaaaaaattccaaagaggtggaaggaaagcacaaaaaaaaaaaatctcatccatacatcctgatcacttctgggagcaaaagctcacatctgtttgcatctgttgtatcacacacctgcctcagtgctcaggaaccrctcaagagagttaataagaggaacyatgagggatggagctggaccactggagtcagracatctctgctttctcatctacatgtgcatacctgttccctgttcaacctcagcagctacaaggagttaacaccagacacagtctgragggaacacccccttgcttatgctatttcaatatgaggggtagtatcagaggaaaccatctctgaccagctgtattcactgctggtggaaaaggggmttcatgcctgtctccccataaaagatgtaaacatctgacaacaccagaaattgatacgg

SEQ ID NO: 79093 - DNA, 600 bp, Chicken  19866894369635_2
aaagagaaaggagaaagagggagggagggagggagggagaaaaagaaaccttcaaaggagatgggacaaaaagagaggagtaaattaaaggagcacacttaaagggtgagaagaacttaagacagtacaagataaaaaaaaaaaattccaaagaggtggaaggaaagcacaaaaaaaaaaaatctcatccatacatcctgatcacttctgggagcaaaagctcacatctgtttgcatctgttgtatcacacacctgcctcagtgctcaggaaccrctcaagagagttaataagaggaacyatgagggatggagctggaccactggagtcagracatctctgctttctcatctacatgtgcatacctgttccctgttcaacctcagcagctacaaggagttaacaccagacacagtctgragggaacacccccttgcttatgctatttcaatatgaggggtagtatcagaggaaaccatctctgaccagctgtattcactgctggtggaaaaggggmttcatgcctgtctccccataaaagatgtaaacatctgacaacaccagaaattgatacggggtggtggatgagcagtctccatta

SEQ ID NO: 79094 - DNA, 600 bp, Chicken  19866894369635_3
gagggagaaaaagaaaccttcaaaggagatgggacaaaaagagaggagtaaattaaaggagcacacttaaagggtgagaagaacttaagacagtacaagataaaaaaaaaaaattccaaagaggtggaaggaaagcacaaaaaaaaaaaatctcatccatacatcctgatcacttctgggagcaaaagctcacatctgtttgcatctgttgtatcacacacctgcctcagtgctcaggaaccrctcaagagagttaataagaggaacyatgagggatggagctggaccactggagtcagracatctctgctttctcatctacatgtgcatacctgttccctgttcaacctcagcagctacaaggagttaacaccagacacagtctgragggaacacccccttgcttatgctatttcaatatgaggggtagtatcagaggaaaccatctctgaccagctgtattcactgctggtggaaaaggggmttcatgcctgtctccccataaaagatgtaaacatctgacaacaccagaaattgatacggggtggtggatgagcagtctccattattcattcatttatttttcccactggggagcca

SEQ ID NO: 79095 - DNA, 600 bp, Chicken  19866894369635_4
agacagtacaagataaaaaaaaaaaattccaaagaggtggaaggaaagcacaaaaaaaaaaaatctcatccatacatcctgatcacttctgggagcaaaagctcacatctgtttgcatctgttgtatcacacacctgcctcagtgctcaggaaccrctcaagagagttaataagaggaacyatgagggatggagctggaccactggagtcagracatctctgctttctcatctacatgtgcatacctgttccctgttcaacctcagcagctacaaggagttaacaccagacacagtctgragggaacacccccttgcttatgctatttcaatatgaggggtagtatcagaggaaaccatctctgaccagctgtattcactgctggtggaaaaggggmttcatgcctgtctccccataaaagatgtaaacatctgacaacaccagaaattgatacggggtggtggatgagcagtctccattattcattcatttatttttcccactggggagccatgcttacrgtgcctgctgacactcracagcaggaaacgagcagtggaaaccatcattcatgctatggtaaacaatgaatataccaag

SEQ ID NO: 79096 - DNA, 600 bp, Chicken  19866894369635_5
aaagctcacatctgtttgcatctgttgtatcacacacctgcctcagtgctcaggaaccrctcaagagagttaataagaggaacyatgagggatggagctggaccactggagtcagracatctctgctttctcatctacatgtgcatacctgttccctgttcaacctcagcagctacaaggagttaacaccagacacagtctgragggaacacccccttgcttatgctatttcaatatgaggggtagtatcagaggaaaccatctctgaccagctgtattcactgctggtggaaaaggggmttcatgcctgtctccccataaaagatgtaaacatctgacaacaccagaaattgatacggggtggtggatgagcagtctccattattcattcatttatttttcccactggggagccatgcttacrgtgcctgctgacactcracagcaggaaacgagcagtggaaaccatcattcatgctatggtaaacaatgaatataccaagaaaaagggatctaattttctagtgccttctgtggattcaaaattagaggctttgatgcatcaccacttggcttccctcacatctcatagtcactgct

SEQ ID NO: 79097 - DNA, 600 bp, Chicken  19866894369635_6
gctttctcatctacatgtgcatacctgttccctgttcaacctcagcagctacaaggagttaacaccagacacagtctgragggaacacccccttgcttatgctatttcaatatgaggggtagtatcagaggaaaccatctctgaccagctgtattcactgctggtggaaaaggggmttcatgcctgtctccccataaaagatgtaaacatctgacaacaccagaaattgatacggggtggtggatgagcagtctccattattcattcatttatttttcccactggggagccatgcttacrgtgcctgctgacactcracagcaggaaacgagcagtggaaaccatcattcatgctatggtaaacaatgaatataccaagaaaaagggatctaattttctagtgccttctgtggattcaaaattagaggctttgatgcatcaccacttggcttccctcacatctcatagtcactgctaacagacagataggcaaaaggcaacttccttccctccagaggttcacatagagcagtgcaagcagcacacaactctaggattattaacctacaaagcagcagcaaagctttgctcttggaggca

SEQ ID NO: 79098 - DNA, 600 bp, Chicken  19866894369635_7
tgcatacctgttccctgttcaacctcagcagctacaaggagttaacaccagacacagtctgragggaacacccccttgcttatgctatttcaatatgaggggtagtatcagaggaaaccatctctgaccagctgtattcactgctggtggaaaaggggmttcatgcctgtctccccataaaagatgtaaacatctgacaacaccagaaattgatacggggtggtggatgagcagtctccattattcattcatttatttttcccactggggagccatgcttacrgtgcctgctgacactcracagcaggaaacgagcagtggaaaccatcattcatgctatggtaaacaatgaatataccaagaaaaagggatctaattttctagtgccttctgtggattcaaaattagaggctttgatgcatcaccacttggcttccctcacatctcatagtcactgctaacagacagataggcaaaaggcaacttccttccctccagaggttcacatagagcagtgcaagcagcacacaactctaggattattaacctacaaagcagcagcaaagctttgctcttggaggcaaaaatgatggcaaagca

SEQ ID NO: 79099 - DNA, 600 bp, Chicken  19866894369636_1
tgtactgtctattatttacaatatgactcttacagtattttccccttcaggagtataagcagagcttgaagtaattcatgctcttctttctcttccaattttagaaaatgtaaatgagttctcaggtacttccatacagatctccctccttttaaaaaataatctcacctctaaaacatttttatcaaaatatgtgataatgagacaattgggcaatttgctagcacttatgcaagggatgcagacaaaattttataacatcctaaacatggaaaatccatgtgggtgaacagttttctratgaaataaaggattgtaaaggaaaagtacggacaamgaacacaaactcattttcataaaataataagggatattgtctacacatattaacagtctgtgacacaaagtggtttaaacaactgaattacaaaataaaacatgtccacttaatgaaagcactggattatgaaattatcaactataaggagagagataacgttacaacaaaagtaactggaagggctgagcgataatcacagtaaacgctctctttccaagcatttcaaactcctgctttttcaccacagactgttccttgag

SEQ ID NO: 79100 - DNA, 600 bp, Chicken  19866894369636_2
ttttccccttcaggagtataagcagagcttgaagtaattcatgctcttctttctcttccaattttagaaaatgtaaatgagttctcaggtacttccatacagatctccctccttttaaaaaataatctcacctctaaaacatttttatcaaaatatgtgataatgagacaattgggcaatttgctagcacttatgcaagggatgcagacaaaattttataacatcctaaacatggaaaatccatgtgggtgaacagttttctratgaaataaaggattgtaaaggaaaagtacggacaamgaacacaaactcattttcataaaataataagggatattgtctacacatattaacagtctgtgacacaaagtggtttaaacaactgaattacaaaataaaacatgtccacttaatgaaagcactggattatgaaattatcaactataaggagagagataacgttacaacaaaagtaactggaagggctgagcgataatcacagtaaacgctctctttccaagcatttcaaactcctgctttttcaccacagactgttccttgagattcatggatggatggatgattttcaaaataattatc

SEQ ID NO: 79101 - DNA, 600 bp, Chicken  19866894369638_1
aatcttagtttagggtcaggtatgtacagtttagaataaaggacatttaagttgtttcatccgtgagatgttaatctctcaagaagaacgtctttttactgcccaggagaatatatgcagaaatgcaacacttttaaaattaattttaccacagcagctgaaagaaatcctctagtggtctttcaggaaagtaattttactgttcctatttgtatttgattcacatattcattgcactataatgaatagctagcatataaatatacacctctgtagataaaactgatgacctttaatatragcctcactcgctctgtcatcggaccttaaataaaagtatttcacttctactcactgcctttagtgttctggagggtttgcattaattggtttggtttaggttctgttggttaaagcagttaatcaaccactagttcccttcaggtaaataactttagatacataactttgatttactcagagttgggaggagagaataatactcgccataggaaacatctgataaagatgcaggtttgtataaaattgattaatagttggatgtgagcaaaggtctgttggaagactgatgcatattgc

SEQ ID NO: 79102 - DNA, 600 bp, Chicken  19866894369648_1
ccccaagggttaacaggacaggcgttcacggagcggggagggtttctggctgaccttggctgggaagcagcgtggcgtcgctcagcccggcccccggagtgtgagccggtggtcggagcgctccctgagcctgggtggaggtagatccagaggaaactccacctccgcgggagccaacctgctattgcaggaattcccagcgaaattcccgcttgggctgatctgtcagcggatccgtgaactttcctttacctcttgtgaaagcagctactcgaatgtgctaaaaacagagcgcggggygaaacgatggctggagctggacttggaggaaaggctgggagggggctttgtgaccccggcatgcctgagaggcacctccatgcgtgctgcctcgctcacaggctccagggagaagagtctgttgtgaagggcaaacccaaaatatctcacctggttttgctgctgggctccagtgtttcccaaacggcacgcagatttagcacttggcatatgggcggatgagatttcccgaatgccagtggattcagatcaccataattcatgccaaaaagcattttttcccttgctcccacgtgcttt

SEQ ID NO: 79103 - DNA, 600 bp, Chicken  19866894369648_2
ggctcctggatgagatgttgagcctcttgcatgacacccatctcgggatgcacagcaaggagacataagaccccatgccatcacccagctgggagatgggaacagctgctataggctctgcttttgggaaggggtttttctgcatctcctgtctctgccacccttgtgagcctgccttggcagcagctcgatgctcctggccttgctggctgtttgcttttggctctgggctggttccacctggctgcatgcatcggtgccagtcctctgctgccctcttcactggtagccaagccgttymcagcacagagctgctctgtgattcctcccttagtccagggcagctcctatttgggagaggaaaaggaaagagatgggggagctgacccctgagagacatgagcttgtagcaacccaagcaaggatccctctcctttctccaaatgcccgatgtcctcaggctcctaggcttggcgctaggaacacgcgagcctggaggccaaaattctccatacaaacactttagaaatctagagaatttggctcacatggtgacttgcattgcttgtcttgcagaacgtcctctgagaagccaaggga

SEQ ID NO: 79104 - DNA, 600 bp, Chicken  19866894369648_3
gctcctggatgagatgttgagcctcttgcatgacacccatctcgggatgcacagcaaggagacataagaccccatgccatcacccagctgggagatgggaacagctgctataggctctgcttttgggaaggggtttttctgcatctcctgtctctgccacccttgtgagcctgccttggcagcagctcgatgctcctggccttgctggctgtttgcttttggctctgggctggttccacctggctgcatgcatcggtgccagtcctctgctgccctcttcactggtagccaagccgttymcagcacagagctgctctgtgattcctcccttagtccagggcagctcctatttgggagaggaaaaggaaagagatgggggagctgacccctgagagacatgagcttgtagcaacccaagcaaggatccctctcctttctccaaatgcccgatgtcctcaggctcctaggcttggcgctaggaacacgcgagcctggaggccaaaattctccatacaaacactttagaaatctagagaatttggctcacatggtgacttgcattgcttgtcttgcagaacgtcctctgagaagccaagggat

SEQ ID NO: 79105 - DNA, 599 bp, Chicken  19866894369649_1
  misc_feature (1)..(214): n is any nucleotide
nnnnnnnnnnnnnnnnnnnnnnnnnnnnnnnnnnnnnnnnnnnnnnnnnnnnnnnnnnnnnnnnnnnnnnnnnnnnnnnnnnnnnnnnnnnnnnnnnnnnnnnnnnnnnnnnnnnnnnnnnnnnnnnnnnnnnnnnnnnnnnnnnnnnnnnnnnnnnnnnnnnnnnnnnnnnnnnnnnnnnnnnnnnnnnnnnnnnnnnnnnnnnnnnnnnnnnttctgatcagcatttgcagtgtttcctcccattaaagggcagcttatgtgtctgtatcttttcagcacaccttggaacacacataraattgcatcagtactctgctgtaaaacatyaattagtacagctggcttagaagaacccttttcctttctctcagatcatcgtttcccttttattttgaagagtagaggactgaacagatacaacatattatggacaactgctgtygttcctgtgatatgttgtagctttgagttctatttgattttttcagacacaaatcatctgtggcacttgccaagttacctttgactcttccgttgcttccacctgtgcaaaagaagcagttatttctcaatcaaaagwtgcttatcacttagcc

SEQ ID NO: 79106 - DNA, 599 bp, Chicken  19866894369649_2
  misc_feature (1)..(184): n is any nucleotide
nnnnnnnnnnnnnnnnnnnnnnnnnnnnnnnnnnnnnnnnnnnnnnnnnnnnnnnnnnnnnnnnnnnnnnnnnnnnnnnnnnnnnnnnnnnnnnnnnnnnnnnnnnnnnnnnnnnnnnnnnnnnnnnnnnnnnnnnnnnnnnnnnnnnnnnnnnnnnnnnnnnnnnnnnnnnnnnnnnnnnnnnttctgatcagcatttgcagtgtttcctcccattaaagggcagcttatgtgtctgtatcttttcagcacaccttggaacacacataraattgcatcagtactctgctgtaaaacatyaattagtacagctggcttagaagaacccttttcctttctctcagatcatcgtttcccttttattttgaagagtagaggactgaacagatacaacatattatggacaactgctgtygttcctgtgatatgttgtagctttgagttctatttgattttttcagacacaaatcatctgtggcacttgccaagttacctttgactcttccgttgcttccacctgtgcaaaagaagcagttatttctcaatcaaaagwtgcttatcacttagccaattttaattttaaaagacctctgttgcct

SEQ ID NO: 79107 - DNA, 599 bp, Chicken  19866894369649_3
  misc_feature (1)..(69): n is any nucleotide
nnnnnnnnnnnnnnnnnnnnnnnnnnnnnnnnnnnnnnnnnnnnnnnnnnnnnnnnnnnnnnnnnnnnnttctgatcagcatttgcagtgtttcctcccattaaagggcagcttatgtgtctgtatcttttcagcacaccttggaacacacataraattgcatcagtactctgctgtaaaacatyaattagtacagctggcttagaagaacccttttcctttctctcagatcatcgtttcccttttattttgaagagtagaggactgaacagatacaacatattatggacaactgctgtygttcctgtgatatgttgtagctttgagttctatttgattttttcagacacaaatcatctgtggcacttgccaagttacctttgactcttccgttgcttccacctgtgcaaaagaagcagttatttctcaatcaaaagwtgcttatcacttagccaattttaattttaaaagacctctgttgccttaaaaccttcttggctgtaggttttcaaggaatttgatttcttagttcttctttctcaycctaagtattcatttaactcgaaagaattgaactatttgaatccttgctttttaac

SEQ ID NO: 79108 - DNA, 600 bp, Chicken  19866894369649_4
ccttggaacacacataraattgcatcagtactctgctgtaaaacatyaattagtacagctggcttagaagaacccttttcctttctctcagatcatcgtttcccttttattttgaagagtagaggactgaacagatacaacatattatggacaactgctgtygttcctgtgatatgttgtagctttgagttctatttgattttttcagacacaaatcatctgtggcacttgccaagttacctttgactcttccgttgcttccacctgtgcaaaagaagcagttatttctcaatcaaaagwtgcttatcacttagccaattttaattttaaaagacctctgttgccttaaaaccttcttggctgtaggttttcaaggaatttgatttcttagttcttctttctcaycctaagtattcatttaactcgaaagaattgaactatttgaatccttgctttttaacttcacctcaggtccagaaacatgaatgtcaagattactacttcagacaggtgacagctttcacttcacagayctattgtaatattttctttcttcattatacacaatcacattcaacagaaaatcccgtacactaggca

SEQ ID NO: 79109 - DNA, 595 bp, Chicken  19866894369649_5
tttattttgaagagtagaggactgaacagatacaacatattatggacaactgctgtygttcctgtgatatgttgtagctttgagttctatttgattttttcagacacaaatcatctgtggcacttgccaagttacctttgactcttccgttgcttccacctgtgcaaaagaagcagttatttctcaatcaaaagwtgcttatcacttagccaattttaattttaaaagacctctgttgccttaaaaccttcttggctgtaggttttcaaggaatttgatttcttagttcttctttctcaycctaagtattcatttaactcgaaagaattgaactatttgaatccttgctttttaacttcacctcaggtccagaaacatgaatgtcaagattactacttcagacaggtgacagctttcacttcacagayctattgtaatattttctttcttcattatacacaatcacattcaacagaaaatcccgtacactaggcaagaatatgggatttcaaaagcagcttaggcagtctgtatactttctagttctagtccgctgcataaagtctttttttctttgaacaaaaccatattttat

SEQ ID NO: 79110 - DNA, 467 bp, Chicken  19866894369649_6
aagttacctttgactcttccgttgcttccacctgtgcaaaagaagcagttatttctcaatcaaaagwtgcttatcacttagccaattttaattttaaaagacctctgttgccttaaaaccttcttggctgtaggttttcaaggaatttgatttcttagttcttctttctcaycctaagtattcatttaactcgaaagaattgaactatttgaatccttgctttttaacttcacctcaggtccagaaacatgaatgtcaagattactacttcagacaggtgacagctttcacttcacagayctattgtaatattttctttcttcattatacacaatcacattcaacagaaaatcccgtacactaggcaagaatatgggatttcaaaagcagcttaggcagtctgtatactttctagttctagtccgctgcataaagtctttttttctttgaacaaaaccatattttat

SEQ ID NO: 79111 - DNA, 600 bp, Chicken  19866894369651_1
cttctcttggctgaagagcttcaactcagtctgtcctcataggggagttgctccagccatctgatcatctttgtgatcctcctttggatccactccaacagctccatgtccttcttgttctgggagctccagaactggacacagtacagcaggcgtggtctcacgagagtggagtaggacagaatgagcttccttaacccgctggtcacagttctcttgttgcaacacaggatatggttagccttccggactgcaggttcacattgctggctgatgttgaatctttcatcaaatccctcmcaaatccttctactcagggctgccctcaggcacccagtccatatctgtgtttgggattgccctgacttggatgcaggaccttgcacttggccttgttgaacttcatgaggttggcataagcccacctctcaagcctgtccaggtctctctgaatcataaccctttcctatggtgtatcaatggcaccactcagcttggtgtcgtttgtaaacttgttgagggtgcgctcaatcccaatcactgtccatgtcacctaccaagatgttaaataacactaatgccagcaccgattcttgagta

SEQ ID NO: 79112 - DNA, 600 bp, Chicken  19866894369660_1
acctaggcaatgaaaaactgaaaggaaagacgcagatcacttaccaaatacctagactgtgagtcaatatatttttggatgcctcaagttttaccagtgtgtgatggaaattactaaaattgagggcagcatagctactgctggtaaattatggtttagaattaaaccaaatgattcaaaccttaaattagcaaatcagtaaaatggtaagaaagcctaaataaataaataaataaatgcacacattataaagaatgagagaaagaatgagttttaaaaggcatctgttcacagcaatgrgatttaaaaaataacaggatccataatcttaccttgtcactaaatagactttcagacaacttctgactaaagtgacttgtctaattcattcaccatttttatcacttgacgtcttgtgctgtgtttcacagctggagagtaaacctgccaaaatttgacactctaagtagttctgaatatatttatgtcccaaacatattttctgagcaaattgcaaatttggcttctccatttaagaagataccaaagggcatgtggctcggccagtctccaaactggctgtgatacctaggaggaatt

SEQ ID NO: 79113 - DNA, 600 bp, Chicken  19866894369660_2
gatccataatcttaccttgtcactaaatagactttcagacaacttctgactaaagtgacttgtctaattcattcaccatttttatcacttgacgtcttgtgctgtgtttcacagctggagagtaaacctgccaaaatttgacactctaagtagttctgaatatatttatgtcccaaacatattttctgagcaaattgcaaatttggcttctccatttaagaagataccaaagggcatgtggctcggccagtctccaaactggctgtgatacctaggaggaatttacctcaaactaattcytttgtatggtcagctggcaatctgagattggtagtaatatttttggagatcctgattttgatccactatagaaaaaagttaatgagtttagcagtgttaaatcaaaagttgctggaaagatatcaacaaaccagttcagcaaggaaatattttcttgttggcttaaaccctttagcttcccttgaaaaagaaaaaaatatgaccatttatttaatatacaattaatggtggtctcaattacttcttataatttaacatgcttaatcatgtctctgatgattaaagccattaaagaatggc

SEQ ID NO: 79114 - DNA, 600 bp, Chicken  19866894369667_1
cttgtgaaatgagctaagcctttgttgttgacagcaaactacaaaccaaatgcttattcgttgcttttttgaatatgagcatacaatacaactttcaacattgctttgaaaagggaaaaggagaaagtaatagtttttatagtttagttttaatagtttgaaagccccaagaatgcctgccagtctgggcaaactgatgctccctagaaaattcagacaggtacagaaaaaaattcaaatcctgatgctgctggtgcagtgatgttgttttttgttgttgctttgttcatgccatcatcraacaaaaagaaaaagaaaaaaaaatcaaaagtatttggaacccacccaatctgaagagatgactggtgcgctgtgccttgcaacagccaacagcagcagctgcaagttcctgtccctaaatgggaaagcctcttcttcctcacgctgctgcatttattttagacagtagattccatttcttgctagggttcaaagcaccttgaagtctctgtcctgcaaataccacacctgtgttttggtcatatataaaacagaactttgtttcagttttacttatctatatgttgaagagctttgttt

SEQ ID NO: 79115 - DNA, 600 bp, Chicken  19866894369670_1
ctgctgctcactgcagcgggacccaaccctgcagggctcagcacagtgctgtgctcccagggagagctgagctgcgctgctctgtgcaagtgctacaaacatgcacgacctttacattcaggctgaaacaaaaagatctgttgctaactaggagtccggggttgctttcatatgtctgagcattcagggaatagatgtagcttaaaatgcaaatgtggtactttctgcagagcatctctgcttttcaagatccctcatttcatgctgttaccgtgcactgccctgctgttcctatgaaargagcctctctaaggaagagattcccacggacagaaatccaactgatgtggttaaaaaaaaaaaaagtaaaacatgtattttaatttctaaaaggcatgatgcccatctgaaacttggcaatcagcatcttctcgggcgcgtagaaatcagccaatcactcccttggttttctgggcatgcatctcatwcagtggtcctcatccatgtgagcgagtagatgctgaagttttygcatagatcctgaagttttcactgtagggtttccctctgagagcagtgatgctccagggcctgttggca

SEQ ID NO: 79116 - DNA, 600 bp, Chicken  19866894369670_2
gaatagatgtagcttaaaatgcaaatgtggtactttctgcagagcatctctgcttttcaagatccctcatttcatgctgttaccgtgcactgccctgctgttcctatgaaargagcctctctaaggaagagattcccacggacagaaatccaactgatgtggttaaaaaaaaaaaaagtaaaacatgtattttaatttctaaaaggcatgatgcccatctgaaacttggcaatcagcatcttctcgggcgcgtagaaatcagccaatcactcccttggttttctgggcatgcatctcatwcagtggtcctcatccatgtgagcgagtagatgctgaagttttygcatagatcctgaagttttcactgtagggtttccctctgagagcagtgatgctccagggcctgttggcatctcttttctctgtgtgtaagttccatgcaggtgcaatgttaggtgtcctgcacacgaagagaatcaggcccaaatgcttctattcacattaccaatgagaaatgtctgcagtgcccatgaggagcagctgcatggtgagtctgttccctggaggttacacgtgttcctgtgatgcaccaccagtccg

SEQ ID NO: 79117 - DNA, 600 bp, Chicken  19866894369670_3
gcatctctgcttttcaagatccctcatttcatgctgttaccgtgcactgccctgctgttcctatgaaargagcctctctaaggaagagattcccacggacagaaatccaactgatgtggttaaaaaaaaaaaaagtaaaacatgtattttaatttctaaaaggcatgatgcccatctgaaacttggcaatcagcatcttctcgggcgcgtagaaatcagccaatcactcccttggttttctgggcatgcatctcatwcagtggtcctcatccatgtgagcgagtagatgctgaagttttygcatagatcctgaagttttcactgtagggtttccctctgagagcagtgatgctccagggcctgttggcatctcttttctctgtgtgtaagttccatgcaggtgcaatgttaggtgtcctgcacacgaagagaatcaggcccaaatgcttctattcacattaccaatgagaaatgtctgcagtgcccatgaggagcagctgcatggtgagtctgttccctggaggttacacgtgttcctgtgatgcaccaccagtccggcagcagtgtttgcttggcacttgttgaggcttcctggacatt

SEQ ID NO: 79118 - DNA, 600 bp, Chicken  19866894369676_1
ttctctgtctccctccccaggttaaatttcttgatacaataccatactttcaatttattccactgttaaatctatgaatgatcagagccaaggtggaaggacagcatttactggctcttctccaccaccttcattctagcaactgtgttactagagcacacttcagttctctgaagctctctggtaaacactacttcacagcaaaatgtttctttacagtgaagtgaagcacagttcacttcagtctggtcaaaaccttcctttctttcattactcaagatggaaaagttactttaattrcattaagatctgtgcgtggctactagatgatcattatcatgcttttcaacccaggccaccctatgattctatatttaatatatacaaggtatttcttggcagtattttacagtagttaagacacaagaaaattaagctgatgagttggcctttttcttaggccatacaatgcactgagacccactgcagtagccaaatattgtgtaagctttcaaacattcaaacaggatcttgatcaagatgcttcttgaaaagttaatgtaccctttccgaaatttaaagacataactaaaatctctg

SEQ ID NO: 79119 - DNA, 600 bp, Chicken  19866894369682_1
taatgcacagacatgtgctagcattatacaataaattaacacaatatttaagaagaaattgctatgtgcatttgaaaaggtttctcttaatagggcaaaacatatttttcaaacagtcggagcttgattgcaggtttcaatgattaggaagttattagaaaatactgagaagatagtaatggtagctttgtgaagatccaaatgagaaatatgaagtggaacacaaaaaaatgaacattttcactctctttcagttcttctgttcttaggaaaattcaaacaataggatttacagggagmagaggtgctgcaccagcttttgccatccaagtgaataattgtgttgaatgctgatgtatggctttgctgtaaagaaaaaccaccacgctcaccagaattgctatcaaagatgaattatgtgactgatattctggctgatgtccattaaatgggggcagacacacgtttctctttatagattctaatacatccctcctaggtaagcacctattatattcacccaccaagcctcctactctcttataacacacctttagctcaatgtcaaaaatatctctggagttcaagtgatttattttt

SEQ ID NO: 79120 - DNA, 600 bp, Chicken  19866894369698_1
gagcagaacacacaaaggaatgcatttggtttatgagctccagaagagaatattccctctccccccgccccccttttgtagaacctcaaacttgataaggtaaattttctggggctctcaaaggaaacttattcatcatgtccaacctgcggagatcttttgttactccgtagaagtaattttcagaaaggcagctattgctggatgccaatattttctttcattataatttcaaagtgtgcttggctcctatgaaaagcaccattcatagcatcaatgcccagggatctctatctaccraacaggcacaacacaggcaattgtccaacaatgggaatgcttcccagtttagaggggctggctttggggaaggaagggggggagcaaggaggatatttgctctccttgcagggtcgtctgttggtcttacccatccacaatccctaagagctcacactgagggctgtgctttcacgggagcaatatttgcacccttcagtcacagatgacctaagccttttctgacccaatttgagatgaaagatgtctggtggaaagcctctgcggggccctgagttcgggctgtgcttgcatgcactg

SEQ ID NO: 79121 - DNA, 600 bp, Chicken  19866894369700_1
aaagtaaattatagcagcttgtaacaatggcacagaccttgccaatttctttgaatactggttttatccacaagaaacaccaactcctgcctataaataccaacttctcacttaagaaatgcactttttaatgtaattacactactaataatgtgaccgtggattaacatattcaggtcactcaacttaaagcaagaatttcacgagatattgtctgtcaaaacagacttcttttctttttaaaaagagtgctttatgctcaaatttgaaaattaagttgacctgtttatgccaggcagyatgaatgtatgaatactgtcctctctccctactagttactactacaacttcacaggcatacttagaggaatgattcacaactactaaggatcagaaaacagaagctaagtaaatgacagaaggaagagtccgaatccctaatcacaagcaaggataagctcaaaagaaaaagagctgtaatacttactgagtcaagtcctggccacattctgcacacaaacctttcataaccactggatggctacatccttccagtctcaccaagacacccctggaaaagagatacaggcatccagttta

SEQ ID NO: 79122 - DNA, 600 bp, Chicken  19866894369706_1
atcaaaatcaagttagccagtttgtgtttgtagagctacatcaggtgtttgcaaattgagtaggtaagataaaaccagaggagtggccaaggctttggcaaggcatgcatagcctgtcttctgaaacctttgtaacatgcacaaaataatttgacatgtattcttgaataacttcagtattaagccatcttgccagaagagtcagtgtgtcaattctcttaaaaacaacaacaacaaaaaaggagtagaattttgctgccctgaattgtaatgccttgttgtatgaaaagccttgcacaygtttctgattcaggaaaaaactaccagaaatggttgtatagtttccgtataatttttatttgaagatgattgctttaaatctggcattatcttaaggaaacgtgggcagttagggaggaacattatcttctctctacttctgaagcaaacttatgcaggagaaaagaattgatgattttttgtatgaaatgaaaaaggcattggcgtattcagaatcatcagtttaacttcagtgattatgacagtgaactgtacttcatagaatcatagaatcacaaggttggaaaggacctacaagat

SEQ ID NO: 79123 - DNA, 600 bp, Chicken  19866894369715_1
tataatgaacaggtaaaatgactgcatagagaacaccccaataactgactagttaattctagttaattctgtctagtcaattttgacttgaaatttcaattttgacttttgaaatttctagtcaattctgacttgaaatttttacatagaaatttatacagtgactttaaggttgcagagaagacacacatagcatcttctgactgtacgtatttcacattacctcactgaagtctttgtcagaatgtgtagtgaaagagaaaaacaagcttttagaacacacagatttatatgattttyatttattgatatatttttaaatttatgatgcatctataataagaaatatgtttattaatggagaaaattctttatttctctctatattcaattttttttattaagcaactgtcagagaaacaagttctgttaggctaaagaatggtcggaggtgtaactaaagagaggacctttgcatatttcactttaacctttataagccattagtgagtaaaaagtggagcatttttggtatgaaaatgaaaattttgatagtgttgtataaatctgcatagaaaaaggcaattaagatttcctcct

SEQ ID NO: 79124 - DNA, 600 bp, Chicken  19866894369716_1
taccgaccaggcagtgaaacatgcagtaaatgcagctgaagaattatactccaataaattttagatgagctttatttaacaataaactgtaaggaaacgcatcccaatgagaggacgtgttttgtagccactgtaaatgttttagtgcgtttcttaagaaataagtgcagcacttatgttttcacactgaaaagcacatcagacatgggcaaaaattgggaatgcctgcagggttcagatgcgcagtgtgtgtgtgagatggtggctcccagcactgcctttatctattgaatgtggaargctgtaggagtgatgggtggggatttggggtccctgtggccacccagctgctgggtttctggagctgaagctgtctggtgcacggtgagccgtggtgttgcatcctcctctgccagggctgcatcgtgggggcattgctgcctgatggagaccgtcttaaacagtgcagctggtggctgtattttagggcagctctacctggaacacacttagggtgttttactgagcttttccgagtgggtttttgggacagtaacttccagaaggtatctggattgcttttcacagctcagggcagac

SEQ ID NO: 79125 - DNA, 599 bp, Chicken  19866894369719_1
  misc_feature (1)..(162): n is any nucleotide
nnnnnnnnnnnnnnnnnnnnnnnnnnnnnnnnnnnnnnnnnnnnnnnnnnnnnnnnnnnnnnnnnnnnnnnnnnnnnnnnnnnnnnnnnnnnnnnnnnnnnnnnnnnnnnnnnnnnnnnnnnnnnnnnnnnnnnnnnnnnnnnnnnnnnnnnnnnnnnnnnntccatagggaactgaaagagtacccaaactccttgactgctagttcagaacagaagtgagccaaggctggaaatggttatgcaaacgatcccaaatactggatttgttggtaagataggatttatactcaggccaccygctctttgtttctgcaaaaccaaaaatcagacagtcatttcctccaaaacagccagatgtttctatgtcttcttcatttccacgtttcgattccctgctttgccatccagcccacacagcatccttccacacttccaacatttaaactattaaattgcattggccacataagaagagttctcctttctattcaaatcaaaatcttatcttgacgcctgtacaaaacaatggtataggacaaatggacatttacagatattccagtgagatactggaaaaaatacagttgctttctttga

SEQ ID NO: 79126 - DNA, 399 bp, Chicken  19866894369720_1
cctccccggctgggaaagacgcattaagattctcaagtgatgaatgtgtgttttaaagaggggagtggatatttttctgctggtctcagttggatttttaaacattgcaggctgaagacaaatcagctgctaaagctctgcttgttagtgtgtgacagcccctaggcatttgtttaatgatctgtattttcccggagacgttttcccctctacctgggcatcctggcacctccggcacggggtggcactggctttgctcaggggtacacgtgggagctggggctattgtgtggggcacgkggcggatgggactggtgaccccaagmactttgcgcccaggcaccgttgaggttttggctctccgtggcctcggtgaagcaggcacgacccgtgtgcttg

SEQ ID NO: 79127 - DNA, 373 bp, Chicken  19866894369720_2
agattctcaagtgatgaatgtgtgttttaaagaggggagtggatatttttctgctggtctcagttggatttttaaacattgcaggctgaagacaaatcagctgctaaagctctgcttgttagtgtgtgacagcccctaggcatttgtttaatgatctgtattttcccggagacgttttcccctctacctgggcatcctggcacctccggcacggggtggcactggctttgctcaggggtacacgtgggagctggggctattgtgtggggcacgkggcggatgggactggtgaccccaagmactttgcgcccaggcaccgttgaggttttggctctccgtggcctcggtgaagcaggcacgacccgtgtgcttg

SEQ ID NO: 79128 - DNA, 600 bp, Chicken  19866894369721_1
ggtaggggggccttttgctcctgaaggaacacacggtcctgttacacatgaggacagccccaggagggacatggtgatatgccatcacgtggctctgtactccaggacccagccagccgccctgccctgaggtgcgcagtgtgtccattgtgcccacagacacatccccgttttgtccccattgctctgagtatcctcctgcatcctccctgagtgcagggagggggaggcaatctgtgctgctcagggagagcggccctcgggacaccacagctctgcagctccagggctcagccctgmaggaagggacttggattttccactgctggcacacaccttcctccagcagaggaagcgctcctggcagcctggcagctccttgttgtgctgtcagggccaatgtttgcatcctcatccctccctgtggcggcacacagggtgccagccccgtgcacgaggggctgcagggctcagcctggccacccctgccccagcaaggcagcgcatctcctacccaagcactgctgtcccctccatggaagaaatgcggtgccagcgctccaagggccacccctctccctgccccatcccatttcctgc

SEQ ID NO: 79129 - DNA, 600 bp, Chicken  19866894369724_1
ttcttcatccattgcaatcttctttatatgtgttcctacctacaaaaaaaatatgggtaatgcaaatttttattgtcacgtagagaaaaacagaacaggaacagcagaaatgccgagtggccagagaagcagtattcagactatgcacacattggccctcatggtaaatcatgctggcctctttttgtccagtacatttcctcttgcctgtttttgaagagagataggcacatacctggatagagccaatagctgttttgctacacatatctggcagatatgttctttactgtcaacacsgatctattgctcatcagttagttgttacattagcaaaaatgctccaaagtagcaggatagcagctacggaaccagatggggccaaggagcaattagggtgagcaaaccttagactggtcctagaaaaagttagagctgctgttgacctgctttgacttgtttcagtttgccatgactccacaaggatgctcccactgatgcacactcacatcatatctctcaaaacacctcctgagcgggacgtcaggagcaaaatattttcatagaaatgcttcttcattgtgtggtttctaggagtgt

SEQ ID NO: 79130 - DNA, 600 bp, Chicken  19866894369727_1
tcatcattgcctctgctgaaattaacccatcaagcctgcaaacgcttctatttcctgggatttctgaaacagccaaagctgtatgtgcaacccagctttgatactatggtcagatatactgaagacatttgcacttttacagtgcctatgaacatcttgagccaaataaaatggcccacatttataataaaaactcccaggtttcactgcaacacctgtgaccccagtttaagcagctggctaaagcagcatgtgatgcttttgaaccataggagcggtgcagagcagctgggatacccyggtgtatatgacctgttctactagcatgcattacaatttgattaggagctttctttggttgctgctgatggaaaatatctgtcaccaccatttgcccctgctcccattaaagacaggagcattagaagacaggattagtaacataactcctccaaggctgcattcagaggcaaccacctacacatctcctgctgcttgctcctttattcccaaggcaggagcaccacacctacctcagtaatgtcaacctcaggctgacggtctcttcaggactacattttaactcaagttttaggttat

SEQ ID NO: 79131 - DNA, 600 bp, Chicken  19866894369727_2
gtcaacctcaggctgacggtctcttcaggactacattttaactcaagttttaggttataaaagctttcagtgttcaacccaatagtatcagagccttcaaaggctaaccaagtgcacataagagccctcttggctggccaaactaaataaaaaataaaaggtgaagaagaaattgttgtcgagaaatagtttttgaatagcaaattcaaaacaaacaactaaatatgccttgtacactgtcatgacaaaccatcatttgggagcctactgggaaagctagccatttttcagtctactcayggtgtctgagaggatatgatgtgcactagtggcaatgtagcccgtactgctcacatgggcagagaaacaaaatacataatactggggaaagtgtctgtcagttccctttaaaataatgtacctgttgctacagaaagaaagcaaaatatggttttatcacatacaagccaaataaatcacaaactaaatttagttctgaaattgtggcaataattaacaaatgatggcaatttctttgtaacagaatggtatgagagctgtgtgtattcattttggggtatccaaatgcatacagaaagt

SEQ ID NO: 79132 - DNA, 599 bp, Chicken  19866894369734_1
  misc_feature (1)..(31): n is any nucleotide
nnnnnnnnnnnnnnnnnnnnnnnnnnnnnnnttgcactaatgggtgatgttaactcccttactctcgtgaaggatttcaaagtataggactccagagagccagaggggctgtttctatatgctgatctgtagttgtgaatataggggaatgtgtagcagggctgattgcatctcatcacaattggccttgagccttagaagaactgtaaggtcttgtctaatcctgttgaactaataaccgtgtaaattgtcatgcagattagtgaaggcttgtttaattaactccttgcattaagtgaragaggcttcatggcaatgcggagactaaatatgaagcgtctgtcatttaaaatgtattaaatctgcttattgtgtttgaattaattatttccagcaccaacctaggtccaaaatagtttgataaaaactactctgaaaaccaaaagcagtgcttctcactctgtttaataagtccatcatttatatttcagtttactgcagtagcggtaattgagatttttgtattaagttaacaatgagaggccccactgagtttcacaggacaaagtgggttggttgcactgcatggtttctacaca

SEQ ID NO: 79133 - DNA, 600 bp, Chicken  19866894369745_1
gacacacagctaacgcccagctgccacatcttttcctgacaattgaacacagcctgcaacattctggcagtgacaggagatggcatttcaggcatactgggtaaacatgcctgtgccatcttctgctatgctgacagtaatttgtgaggaacccacccagcacattgcctcagccagggactaagctgtgtctccttggcacaggctttaagcagggagctgtgcaaaaccaggctttgttgtgagaatgaatacaccactcttccccattcccctgaccattctcttaaccccgaggamgatttaactcgtggctgtgctgctccttgggaaattctcccccattactcttaccgacatcccctcacagatcagggaaccagcaacagtgactatgttggaaatttcgtcagtctctagctgtcttgtttgaggatcttctgttctaaaagacttttcctatcagatacatggattctttgaaatctctgctgaatggagctgctatggagcatttctgtatgctgcaaaaaaaaaaaaaacccaaaaaaaaaaacccacaaccatggaatatttccccctgtaaagcagtagcaaatt

SEQ ID NO: 79134 - DNA, 600 bp, Chicken  19866894369747_1
atgcagtgactgcattgaaaaaatagctttttttgtagctaagatgctgctctatcaagtagtgttattgtgctctttgcatctgttgtagtttcccatggaaataaataagaggcattggttttggagcaacataaagtacttgtgctggtgtatgaagcctaagaagggtattttgtgagctaagtaccagtgtactgaacaaggatctcaaagatgtaggtacgttatttttccccaacgttccttccaaacactttaaagtatttacaatgcaaattagctaacactgggggtgcrtttcatctagaagcaatataagctttcttctccacagcctccaacatcacactcctctgctttcttaagtcttcaaaagagatcctttccttgaagagtgaaggatttctttcacaaccgtgatgtagcccataatgaaatatacattcctatggtttcttgccttaacttcttaagaatactcctcttttaggctacattaaccactgatttttatatttaagtaaatcctaaatggataacagctggtgatctttgatttactttaaaaaaaatcttcttgattactctctaaagtgt

SEQ ID NO: 79135 - DNA, 581 bp, Chicken  19866894369757_1
tttctaatgagatatctaacaaaagagtatatggtagacaaatgaatagcagtacttcctttcttccatggtaatgcaaatttcatttagaagtggcctcagattacacttaagaatacaattatactttatgctttttgctttacggacagagagaaaataattatttttatgttcaaaatgaggactctgattaccacttataccaaaaccattttaaacaatattggtaccaaacgggctttaaattacacgtatgcttattttatgccctcaattacactggctgaatgatgcagygtggattttgaataaatgaaaattaaggtcaaagtgtgttaaaaaaagaaaagcagaaacaaaaaacaacacaggaagtagttccttttctggatcaaatctgagagaatcgcaagaaaataactaatccatggtactctatagcaactgatagggacttacaaaagatcatcagacaatagaactgttgagatacaggtgtatggctgacgactggtcttttgctcataacgacctgagctaaatagtcatcttcttagataaaagtacctttaccctag

SEQ ID NO: 79136 - DNA, 600 bp, Chicken  19866894369763_1
tgggtgtagaagagacagtaaaaaatgtagaaaagacagaatatcatgttctctgatgttctgtcacaaagacacaagtacagctatgtatttcatgtattatctgtttctgtttctaactggtgacaagacaatgtaaagctttagaaacttgtagtttgacatatatatatatttttcctacctctgtgacatccattcagtcctttcagtctaaacaactaaactttagctgtcattagttgctgtgtgcagtgtgatgtgcaaacacttcaagcacatggggctttcttatatatraaagttacttgaactcgttttccttctttaatgtgcagtcatgaaaaatggaaatacactgrgaaattgcaaagccccagggagtgccagcaaatgaggacaacgtgagaaaacatctccatctagtggtgtttgccaggggttgttctcttactgaggtcttaactgcgtaagttaaaacagcagtgcagttttaaaggatggatctagaggacacagaaactcctcttttcttatgacatccaccagccagcagtagggtttctgtaggaagcaggctgttcacacttcacagcattg

SEQ ID NO: 79137 - DNA, 600 bp, Chicken  19866894369763_2
gtcacaaagacacaagtacagctatgtatttcatgtattatctgtttctgtttctaactggtgacaagacaatgtaaagctttagaaacttgtagtttgacatatatatatatttttcctacctctgtgacatccattcagtcctttcagtctaaacaactaaactttagctgtcattagttgctgtgtgcagtgtgatgtgcaaacacttcaagcacatggggctttcttatatatraaagttacttgaactcgttttccttctttaatgtgcagtcatgaaaaatggaaatacactgrgaaattgcaaagccccagggagtgccagcaaatgaggacaacgtgagaaaacatctccatctagtggtgtttgccaggggttgttctcttactgaggtcttaactgcgtaagttaaaacagcagtgcagttttaaaggatggatctagaggacacagaaactcctcttttcttatgacatccaccagccagcagtagggtttctgtaggaagcaggctgttcacacttcacagcattgctcttgtcacacacagaacgactctagctcagggaatcctctcatatcacaatgttgaagca

SEQ ID NO: 79138 - DNA, 600 bp, Chicken  19866894369767_1
tattaaaacttaacagttaagaaaattttactttcaatatggtttgagattcacaaaaggctggattatctaacccaccttacatgctttcttaatatttttcacttcctgtctaacaggaaaaaaaaagctgcactggaaagggacagttacttgcactccaaacactggataacagtaggtttctgcaccacacaggaaaatcattaatgtctggccacttctttaccagatctcacggatcttattcagcagatactatgctgttattaaagtctgttttactttcgatgtttcttstggggagacctgctaaagcagacctgtaaaacactcagggttgtggatggcatgcagcacacaaaccccgttctgtgctgcattgcactgtacttgcacagtggctacactgtctatgtgrccatcttataaagtggactgacaatgcagatatcagtcagaaataaatgaatattttctttaaaatatttattctaattcagaggaattataggcttttactttttggagaatgtcttttatttttatttgaaattcggtggagtgctactactccctcagcatatctagtcaccagac

SEQ ID NO: 79139 - DNA, 600 bp, Chicken  19866894369767_2
aaaaaaaagctgcactggaaagggacagttacttgcactccaaacactggataacagtaggtttctgcaccacacaggaaaatcattaatgtctggccacttctttaccagatctcacggatcttattcagcagatactatgctgttattaaagtctgttttactttcgatgtttcttstggggagacctgctaaagcagacctgtaaaacactcagggttgtggatggcatgcagcacacaaaccccgttctgtgctgcattgcactgtacttgcacagtggctacactgtctatgtgrccatcttataaagtggactgacaatgcagatatcagtcagaaataaatgaatattttctttaaaatatttattctaattcagaggaattataggcttttactttttggagaatgtcttttatttttatttgaaattcggtggagtgctactactccctcagcatatctagtcaccagacctcacattttgtttcaagagtacgcgtcagttgtacagtcttttcccacagctgtacagaataataaaaggagctgaaaataataactcattcacttcactatagattccgagaaagggca

SEQ ID NO: 79140 - DNA, 600 bp, Chicken  19866894369768_1
tgctgaaagtctgattgctaatcagcaagaagcacccctgctctggctgtataagggaccagggtcatgaggatacatcttgggtatcccaagaggatgaaggaagtcaagcattgctgctttctccccagcagggctcatggcattgggtgtgagaaagcacctggcaatctgggcctgaaaaataaaaagatcctgcaggatgccaagtcctgctctaagtgcttgctggctcacttagcaccacgcaggtgcaggagtcttgagtctcttttgttagcagaacaggataaggaatcrtgttttacacgctccattgtggatccatgaatggctttacaggacacaatgcgcaaggactgttcagggtgccagcaagcatctctgcatcctggaggtacaacagccctgaagagccaaggtagcttyggataagtcccacayactgcaatcaagggacagctggatccctccctaggagaggggctgccattcagctgctgcctttttgttgttcttttggcataagacttgcctgtgagcaagaaatggaagttcctagtatttctattagagtgacaagacatcaagcctccttcc

SEQ ID NO: 79141 - DNA, 600 bp, Chicken  19866894369768_2
agcagggctcatggcattgggtgtgagaaagcacctggcaatctgggcctgaaaaataaaaagatcctgcaggatgccaagtcctgctctaagtgcttgctggctcacttagcaccacgcaggtgcaggagtcttgagtctcttttgttagcagaacaggataaggaatcrtgttttacacgctccattgtggatccatgaatggctttacaggacacaatgcgcaaggactgttcagggtgccagcaagcatctctgcatcctggaggtacaacagccctgaagagccaaggtagcttyggataagtcccacayactgcaatcaagggacagctggatccctccctaggagaggggctgccattcagctgctgcctttttgttgttcttttggcataagacttgcctgtgagcaagaaatggaagttcctagtatttctattagagtgacaagacatcaagcctccttccagcagcattattttacctaaatggatactcactttatgctctctggtattaataaggaatcatttgtcagtcagagctgacaatgcaggctcggataaaacaaaaagccatttcccccacatctccctc

SEQ ID NO: 79142 - DNA, 600 bp, Chicken  19866894369768_3
attgggtgtgagaaagcacctggcaatctgggcctgaaaaataaaaagatcctgcaggatgccaagtcctgctctaagtgcttgctggctcacttagcaccacgcaggtgcaggagtcttgagtctcttttgttagcagaacaggataaggaatcrtgttttacacgctccattgtggatccatgaatggctttacaggacacaatgcgcaaggactgttcagggtgccagcaagcatctctgcatcctggaggtacaacagccctgaagagccaaggtagcttyggataagtcccacayactgcaatcaagggacagctggatccctccctaggagaggggctgccattcagctgctgcctttttgttgttcttttggcataagacttgcctgtgagcaagaaatggaagttcctagtatttctattagagtgacaagacatcaagcctccttccagcagcattattttacctaaatggatactcactttatgctctctggtattaataaggaatcatttgtcagtcagagctgacaatgcaggctcggataaaacaaaaagccatttcccccacatctccctcagggtgctgggctga

SEQ ID NO: 79143 - DNA, 600 bp, Chicken  19866894369778_1
tcccagctctctgtcaactgcacattgatgcttctgttcctccccctgccctgaatgatgccagtataataggtgtgaaggagatgatgcagtcaatacaaaattatttctctttctatctttcttttcacacttttcgtcctctccagtgtggtctgtccataggctgaagtcctatgggaaatatcctttttgtctggtgtagtcttcttcacaggctgtggtgtggatatctgctttgggacctggagcatgtgctctttttccttctctgatcttggagatcacactgctgtttcyctctggttttcctccttctcttctgcttgtgtggcttttttttttctttttctttttttttctgcctttcttatatgtgtttgcccagaggtgccacacctatggtttatcgccctgtgccgtgtagtggggttgctggaggcagctggaactggctgtgcccaacatggggcagccctgactgcttcttacagaaaccaccctgcaaagccccagtgacaactcctggccacctacgcccaatacaaaattctttacccatcctctctcttgaaatacttttttaagtctatgtttcta

SEQ ID NO: 79144 - DNA, 600 bp, Chicken  19866894369788_1
gctcagctggaaggcatgctcaaagaccatctagtccaactgtctgaccacttcagggctaaccagaagttacagagattactgtgggtgttgtcccaatacctctcgaacactgacaggcatggggtgccagatcacctccaggaagtccgctccagtgtttgaccacactcacagcaaagagatttttcctaatatccagtcttccccaggcatactcaaagacaggcagaacatcccaaaaatgcagttaatcccaccgatgggtatttgagtcttctaaccaagccaaatttttcwgacagccaagtagcctcttgtcttcagaacctttctaccttcaaaaccagaagacaaaaaagcatgactttaacacttgcaaagtgtttttttagccactgctgcagcaatttcaatggctctttccagaacctttctataaacaacctactggatgaagccactggtgcgaggagtttggtggccaaggacaaggatccaggagcagaggcgccaagaagcactgcgcaaagttaagacctcacaagcagatgaggggatggggctggggctctcttatcacacacaccaggcccaata

SEQ ID NO: 79145 - DNA, 599 bp, Chicken  19866894369801_1
  misc_feature (1)..(121): n is any nucleotide
nnnnnnnnnnnnnnnnnnnnnnnnnnnnnnnnnnnnnnnnnnnnnnnnnnnnnnnnnnnnnnnnnnnnnnnnnnnnnnnnnnnnnnnnnnnnnnnnnnnnnnnnnnnnnnnnnnnnnnnnncaatagagggttttaaagaattgcttgtagaagagatcagtcatgcacagtttacagaggatgtaatggttaacttaattctattggaaaattcatgttgttttctatatttttaccactaagacaaagtttctctctagatcacgtctgatctctgctcagaccctcttttcctgacrtctaatcagggtatttaatccccttcgcaaaatatgctggtactcaaatatgtataaggtaaaatattaagtaaataataaatagataagggcagtcaagtttcaaatgagagaaatcctttcctttcttcctagagaagaaagaactttaaagccaggcgactgcatgtgaacagatgatcttgggtaaaacttgaactcaagtttgtaaaaggaaggtacccatggggtcctgacataactgtaatatttagtcatttagtgcttgaatttctctaggcctcagyagaatatagatg

SEQ ID NO: 79146 - DNA, 600 bp, Chicken  19866894369801_2
tcttttcctgacrtctaatcagggtatttaatccccttcgcaaaatatgctggtactcaaatatgtataaggtaaaatattaagtaaataataaatagataagggcagtcaagtttcaaatgagagaaatcctttcctttcttcctagagaagaaagaactttaaagccaggcgactgcatgtgaacagatgatcttgggtaaaacttgaactcaagtttgtaaaaggaaggtacccatggggtcctgacataactgtaatatttagtcatttagtgcttgaatttctctaggcctcagyagaatatagatggtaaatgtcttttacaaatacatgaagtaattcatgtataagacaagctcagtctctaattttctgacacagaattttatttacaaagcaaaacaagaactgaaacctgaatttgactcctaaggccaaaaacaacagtatactgtaaatgtctgctgttacagatgccttttcaatccatccaacaaatagtgtggttgtcagcttctctcctggaaaatccttgatataattatagttagaggtcagaaattccaaggagtgttgccatggctgctctgggtggag

SEQ ID NO: 79147 - DNA, 600 bp, Chicken  19866894369807_1
gggagctgacttgatagatggtgtttttggaggggattggcacatgtgtttgacataacagatgagagtggagggcagtgcaagcacgcccactctgtgcaggctcagttgtggcttgctgggctgttcccagagcagagcttgacacgtggttgccatgggagagcttctaatcttgcttttggtcaagtaagcgcctgtggaaaacagccccattgcaaagttgcctttgtggcccttctctggccggaatcccatcgcaggtgacgactggagaagtaaacctgtctccatcacagrgcaaagccacgccacacacgtgcctgctgcaccccgggcttcctgctcctgtgcctcaccttgctggaggcaaatgggccgtgcctttgtcaccaagcgctggggctgtgctggggaagggagtggctgtgcacgaagcagagagcagcgcggggagaccttgcatcagcatccagctgtaaacaggaagggcaggagcggcggtggcagtggctggtgtgtaaataatggaaataatagagatgcacagaatcctttgggcggcttccaagctgtggcttttttcctcggcctcatttg

SEQ ID NO: 79148 - DNA, 600 bp, Chicken  19866894369807_2
cctcaccttgctggaggcaaatgggccgtgcctttgtcaccaagcgctggggctgtgctggggaagggagtggctgtgcacgaagcagagagcagcgcggggagaccttgcatcagcatccagctgtaaacaggaagggcaggagcggcggtggcagtggctggtgtgtaaataatggaaataatagagatgcacagaatcctttgggcggcttccaagctgtggcttttttcctcggcctcatttgcttgtaatggctcattagggctggtcaagttcttcatttctcatccagctcasgtgttcctgtggcaagatgtgcacactggtgaggggagaagagtcacaaagtaacaataaggtaaagcagaggcctccgggtatgctctcctggcagtccctgttaagaagagatgatcataaccagatgacgaacatcatctatggagatccctagcacagatctgccacagccccccagtcagctgccagtgggggtttttactcctagctgccacctctctgcatccactgctgcatcacacccattttcatttgaagcctgagacgttctttccagggctgtgcaccatctccctc

SEQ ID NO: 79149 - DNA, 600 bp, Chicken  19866894369821_1
ggtatggcagaggacttggcaaggagttccctacaaacattaagcaggggtcttcttgggccagcatgatgaatcatgaaggaggaaactttcactgacccaggtcccaggtttccctaagtctaacttgcacctgaatccaaaaattacaaaaagaaatgaggcttcagcgtcagtttggatctgaagaattataggattataaagcttgcaatactatataaatgaaaattcaaggaaatatatataggtgtcaacctcctctctgtcttcctccacacacacattgtttgattcacwcagggagcataggaactgccttttcacgtggctgatgtgagaacatatctgctctcagtgttttaccttctctctgaactagaattccagttgtttttttttttttcttggatgtttactcttcagctaaagttactgtgcagggcagtcgtaccataattattatacgccctttctcttttattagttttcatggatggtggctctatacaattgctgcatctgggtcagtcaccccatggcagtgctggaggatgaggtatgttaaagcatagaacagcaagtcaggatcaaatgtag

SEQ ID NO: 79150 - DNA, 600 bp, Chicken  19866894369822_1
tgggtgcacgcttgggagcgagcagtaaggaagggacacgcaggagccacccagcccctcctgcaccccgatacctctccccatcccatctgtcccagcacggtgacagcggccagggtgtgaggtggagccttttagggcagcttgaagctcacctggggcaatggggtcaggggcactggggctcagcgaggcgggcagctcctccagcagcagcctggaggtagcagcgaggatctcattcatgggttccaccacaacagccgcattgaactccaccagcggtggcacctccctgcyccgcggggtcaggagctgcgggaactcctgcagacggacacacggatatctggggaggcgccgcagccccaaaacctgcacaggcagccccaaaatgcccattttccatccttacgggtgggatttggggtgtactgacagtacctcgaggaagacctggtggtcactgcagtccagcaggtactgtgcccggtcccggtgctgcccaagggcctccagatgatccttcaatgcgttccggtccttttctatgtgtcccagagccaccagctcctcctgcttcactttggccaccatctg

SEQ ID NO: 79151 - DNA, 600 bp, Chicken  19866894369831_1
ctgaatacgagaaagtaagaaacgtgaaccaaagcacttcttactaaacacttctttgagctcttaaatttagggttacgagatcctggggacagaaatcctttggttggagttgtaatatgctggatagaaaaagaggaaaaaaaaaatctctcagcactgtaagaattcaattcatttcatctttttagctacctagcttacagcacgttggcctgcagagcaacagaacgagccacagaataaaccagttccagctagttcttaaactcacccattttctactctttgctcttacarctgtttgcaaggagctacaggcacatgacacagctagctatgtcactgaggaactggagacttatgacatgcaaaagaatatctaaaaagttaccttagtctgaatattagataagattttaagacttcgtgaagacggtgaagaatgggatctaatgacaggacttctcctgtctatgtcgtcagccagtccttcctgatagatgggattggcaaaagagacccgacgaatctgttgtcagagagaagcagtttttatagcatgaaccacaacagtgtgctgaagggagcctgaagtga

SEQ ID NO: 79152 - DNA, 600 bp, Chicken  19866894369831_2
agacttcgtgaagacggtgaagaatgggatctaatgacaggacttctcctgtctatgtcgtcagccagtccttcctgatagatgggattggcaaaagagacccgacgaatctgttgtcagagagaagcagtttttatagcatgaaccacaacagtgtgctgaagggagcctgaagtgacaaaacaactgtttgaaatggataaggtcactgaaattcctgaacgacaccattcacccaagggctgaagccacgattacaacggcttctgccaaaggaaacactgtgttccccaaaaatcyattggtaagatcctgattttgcagtggcattcgttccattgcaactcctgcaggcagagcagagcagagcagccattggggctgttctgacaacaaacctcccaagctcccagtaatacgagcctgctgatgtctgtgcactacacaaatatctacaggtccttatcctcaaygtaccttcattcacaagtgacaaaattaaggggataactgcacatgtttggaactcactgcactacaggcagtgttactgctgcattagaacagaaggaaccgtatcacagaacaaattgcacagta

SEQ ID NO: 79153 - DNA, 600 bp, Chicken  19866894369831_3
agtgacaaaacaactgtttgaaatggataaggtcactgaaattcctgaacgacaccattcacccaagggctgaagccacgattacaacggcttctgccaaaggaaacactgtgttccccaaaaatcyattggtaagatcctgattttgcagtggcattcgttccattgcaactcctgcaggcagagcagagcagagcagccattggggctgttctgacaacaaacctcccaagctcccagtaatacgagcctgctgatgtctgtgcactacacaaatatctacaggtccttatcctcaaygtaccttcattcacaagtgacaaaattaaggggataactgcacatgtttggaactcactgcactacaggcagtgttactgctgcattagaacagaaggaaccgtatcacagaacaaattgcacagtaccttattagcaggtgacaaggaatcgtcctcgtggtgcctttttacacctctcttcaaaatgctggtggatggggaagctgaaggagaccacgtgcagcgtgcctgcacaccgctggggctcccattgaccgaggtgaaagaatccaggccttctggcttctgaggcgaatcc

SEQ ID NO: 79154 - DNA, 600 bp, Chicken  19866894369834_1
ggtatttcactcccatgaatgtttcacttaaagctatgatcacaactcaaatgatagctctgtttaagatgtttgaaaacattccttgtatttgagttttactctgatgctaactaccaggcaatggatatgtggatgattcttctggccctgggtttactctaaatcactatgcagctctgtagatggaggtaatctagtcctaaatgattccatcatttcccacaataaaatgttgaggtatattaatatctcatgcaagtatggataaatctcacatgaatattagatgcatcattkctttagggattttctagaaaatattcatagatatagatactacttttttcactggaaaattatttaatgtgtttaaagagcttgactatgtatttatatggatattgccattttgcaatctaacaatgttatgtacaacaccttaaaaaaaaaaatagaagcaaataatatcttttatgcttgttagcagacctttggaatgtgacatatttaatggaactttcctacttaaaatatagatgacacactaaaaccacccaatcattttatctcgcttaaagtatttgacctcatgaggtg

SEQ ID NO: 79155 - DNA, 600 bp, Chicken  19866894369835_1
ctccacaacgggctcttggctttgctgtttgaaaggagctgcatcttcacacaggcttttttcttacatttcctgagagtaaatgtcaacttcccatcgggtttccttgaattacatagccagctttttctctgcccctactccaacatctttatctaatgactgcttgtttatactgcaagcgtttccttgtccacagcaagtaatactttgacacgtcaggaagaaatcagaggcacaaatcaggaggaaaaagcacccgaacagcccagagttctccaaagcagaggtctgttctcscacacctggctttttgaacagacgtggcaacagtgtcttagccacagctctgggcacttccttagcaagcactactgcggcaccttgccttgcttcacagggaagcaaggatgatcgtggtatgtcgtttcccttgaagctccccctgttaagaagtggtttgttagcaccacgctctgtaggagaaacactgtatacacttgatgtgtacacaatacacttgctgcctggtaggaacattctgtgtgtatgtaccgaggctgtacacccagaagagcgacacagacgcaggatgctatt

SEQ ID NO: 79156 - DNA, 600 bp, Chicken  19866894369866_1
cttgtccacagagcccggctgtgtgccgtcccctgcccatcccactgcctgcaggcacggccgcatcccttcctcccagcccaacctttgcgcagtgcctgcagcaaagcccctggccaacaacctgccggctcacgtggggaaactcccgcgcccgtccctgctgccaaatcagctctcggggagcgcctggcgaatccgcgggcctttgtctgctgcgggcgctcccagacttttccctggcatccactgggacggccataaatctccgctactgcctccgagtcgaacatttcctcygagccccattattaattttctgaaagatctcataaacccccagatggaaaaatacggagatatttgcacatgtgtcgtaaaacacattgcccatctatttcaaatggatgtggcaatatataaaacatacttcgggcatgagccaggtttcacggtatttaaacaaggcagcatgatgtaattggaatttacagtgcagaagcagattgaggctgggactcggttgcatgccatatatcttcgacctcctgaaaatttggcctgctttatgacgccaaatgccttttgtacttgtcacct

SEQ ID NO: 79157 - DNA, 600 bp, Chicken  19866894369866_2
acggagatatttgcacatgtgtcgtaaaacacattgcccatctatttcaaatggatgtggcaatatataaaacatacttcgggcatgagccaggtttcacggtatttaaacaaggcagcatgatgtaattggaatttacagtgcagaagcagattgaggctgggactcggttgcatgccatatatcttcgacctcctgaaaatttggcctgctttatgacgccaaatgccttttgtacttgtcacctacgtcctaagcagacgaacagctccttttgcgacatacaatggttggaaaaamtaacaggtattttttttccatccaaatctcgcagcctctgagatctgccccatgcctgctgctaaaagctgagctggcaggtgtcagcccttcgcatcccaccccagcccaccatggggccatggcgcggccatccccgggctgtccctaccacaggcagcccgagcacaggcagaccagcacagagctggggctggggtctggcagcctggatcctccagcaaggcatgccccttcaggcgctatggggctggggatatgcagtttgctctcctcctgggggaggccgccccggagcag

SEQ ID NO: 79158 - DNA, 600 bp, Chicken  19866894369870_1
gccccatgggagcactgcatggttcctgaagctcctgctagtgtagggtgcgcctgccttgttttttaaactctcacctttctttaggtgaaaacttagcagaaggtggtctgtgcagcagtgccaaagctgtccatcacaggctctggttgtgtagcatgtgctttcccctgtacagatagataattaattcattagtattggcaagggaggtaaatgcatggcaagaacctgagcttatggtaacctaagggtatgtatggcatctttttctttctggtgatgtgctttctttgttgmgagtttccaaaattcactagtagtcatctatcagaatatttactggcttgaacaggaagggatacctgcatacaggttctgaaggcaatgaatrgaggaacagagctttagtagtccaaggtacaaaagttttctcctcaaaagaaggaatttgtgtccattaaagaaacttcatggaaatcttagttaaagctggcaacaggctactagcgttgtttgttgataaaactgaatagaactgacttcatccttgatgggatctagaaaayrctttctatttcctagcagtctcatgctcat

SEQ ID NO: 79159 - DNA, 600 bp, Chicken  19866894369870_2
cttagcagaaggtggtctgtgcagcagtgccaaagctgtccatcacaggctctggttgtgtagcatgtgctttcccctgtacagatagataattaattcattagtattggcaagggaggtaaatgcatggcaagaacctgagcttatggtaacctaagggtatgtatggcatctttttctttctggtgatgtgctttctttgttgmgagtttccaaaattcactagtagtcatctatcagaatatttactggcttgaacaggaagggatacctgcatacaggttctgaaggcaatgaatrgaggaacagagctttagtagtccaaggtacaaaagttttctcctcaaaagaaggaatttgtgtccattaaagaaacttcatggaaatcttagttaaagctggcaacaggctactagcgttgtttgttgataaaactgaatagaactgacttcatccttgatgggatctagaaaayrctttctatttcctagcagtctcatgctcatgtgtaaagaacagtagcatattgcctgagacgagtatccctgtccatctcttctgcacagaatgcaggaagtcacagttccctggtgattctcc

SEQ ID NO: 79160 - DNA, 600 bp, Chicken  19866894369870_3
tttctttctggtgatgtgctttctttgttgmgagtttccaaaattcactagtagtcatctatcagaatatttactggcttgaacaggaagggatacctgcatacaggttctgaaggcaatgaatrgaggaacagagctttagtagtccaaggtacaaaagttttctcctcaaaagaaggaatttgtgtccattaaagaaacttcatggaaatcttagttaaagctggcaacaggctactagcgttgtttgttgataaaactgaatagaactgacttcatccttgatgggatctagaaaayrctttctatttcctagcagtctcatgctcatgtgtaaagaacagtagcatattgcctgagacgagtatccctgtccatctcttctgcacagaatgcaggaagtcacagttccctggtgattctccacatgcatctgcactctgatatgcctgatgctactttggtgtgcagaaagcaaacaaaaaaatccttgttgctaaagtaccaacctgtggaagataaattttaaccaagggctgtgacccactgcttatcaaagctctgcttttgaaagttcatcactttcctccagcttcatct

SEQ ID NO: 79161 - DNA, 600 bp, Chicken  19866894369870_4
ttctttctggtgatgtgctttctttgttgmgagtttccaaaattcactagtagtcatctatcagaatatttactggcttgaacaggaagggatacctgcatacaggttctgaaggcaatgaatrgaggaacagagctttagtagtccaaggtacaaaagttttctcctcaaaagaaggaatttgtgtccattaaagaaacttcatggaaatcttagttaaagctggcaacaggctactagcgttgtttgttgataaaactgaatagaactgacttcatccttgatgggatctagaaaayrctttctatttcctagcagtctcatgctcatgtgtaaagaacagtagcatattgcctgagacgagtatccctgtccatctcttctgcacagaatgcaggaagtcacagttccctggtgattctccacatgcatctgcactctgatatgcctgatgctactttggtgtgcagaaagcaaacaaaaaaatccttgttgctaaagtaccaacctgtggaagataaattttaaccaagggctgtgacccactgcttatcaaagctctgcttttgaaagttcatcactttcctccagcttcatctg

SEQ ID NO: 79162 - DNA, 599 bp, Chicken  19866894369871_1
  misc_feature (1)..(210): n is any nucleotide
nnnnnnnnnnnnnnnnnnnnnnnnnnnnnnnnnnnnnnnnnnnnnnnnnnnnnnnnnnnnnnnnnnnnnnnnnnnnnnnnnnnnnnnnnnnnnnnnnnnnnnnnnnnnnnnnnnnnnnnnnnnnnnnnnnnnnnnnnnnnnnnnnnnnnnnnnnnnnnnnnnnnnnnnnnnnnnnnnnnnnnnnnnnnnnnnnnnnnnnnnnnnnnnnnnctgagtgaaacataggtagtcagataatgtcttacttacacacaatgaaaatcacactaagtggaaatattgaagaaaattaataatttytgtgctctgagttttggcactgtctttactggtatggtttccttggccaccttttctaaattttccttctaataatatttgatgagtatctgctaatgtatttcttcactagaaaatcatttaattaagaataaattctaacatataaattatgcctttttccattcacacaaattttccaagcccttctatttataatttttagctttataatattttgttctcagaaaatatggatgagttgttarggagagatatatctcctatttttgtataaacttcattaagcaaaccaggct

SEQ ID NO: 79163 - DNA, 600 bp, Chicken  19866894369871_2
cacacaatgaaaatcacactaagtggaaatattgaagaaaattaataatttytgtgctctgagttttggcactgtctttactggtatggtttccttggccaccttttctaaattttccttctaataatatttgatgagtatctgctaatgtatttcttcactagaaaatcatttaattaagaataaattctaacatataaattatgcctttttccattcacacaaattttccaagcccttctatttataatttttagctttataatattttgttctcagaaaatatggatgagttgttarggagagatatatctcctatttttgtataaacttcattaagcaaaccaggctaaaaacaaatcaccaatgcagtcttagctctaaagattaaagagtttcctctgtgatatactgcatccttcttattaattatatatagatttagttaagttgtatacacattatccacctgtaaggtttgacttaccctggcatatggatctataagtgttataagtgtttttttggaaaaaaaaaaaaacaaaaacaaaagcacaaaaccaaacattattaaatatttcagtatgggaagttaaaaaa

SEQ ID NO: 79164 - DNA, 600 bp, Chicken  19866894369873_1
tgagccctcaaggttctcatcagctatttttgatcttatttttctcttccagtacttcatccccgaaagcagttgatcaaaaatgaatgtactgtcaaaaaaagctgacaagaataaggcatgattgtgaagtgaaggatattcttctctggtaagagacatcggccttctccattacactccattgtcacccatatagactgcactcaagctacatgcaatcaactcttcaaaaatattgctaaaaatcacataataatgttaaaagtttatgctatacatgtggcccatggatcacaygttggacatgcctgacttacaacttctttggagcaaggcccaggctgcctgtgtccttcctgagagtgcttcggagacatttaatcytgtgttgttttgttaccttgggcctaagtatttgtagcaccaacagtgaaagcagattgacttgtcctrtcatagtgcgcagtggagggacatactggagtgagttgcatggttttgtaagttaaatgggaagaaagastttaactggcattctcccacaccaagggtgttaaacctaaaaatgctggggacttttggatacctgtggtctat

SEQ ID NO: 79165 - DNA, 600 bp, Chicken  19866894369873_2
tgtactgtcaaaaaaagctgacaagaataaggcatgattgtgaagtgaaggatattcttctctggtaagagacatcggccttctccattacactccattgtcacccatatagactgcactcaagctacatgcaatcaactcttcaaaaatattgctaaaaatcacataataatgttaaaagtttatgctatacatgtggcccatggatcacaygttggacatgcctgacttacaacttctttggagcaaggcccaggctgcctgtgtccttcctgagagtgcttcggagacatttaatcytgtgttgttttgttaccttgggcctaagtatttgtagcaccaacagtgaaagcagattgacttgtcctrtcatagtgcgcagtggagggacatactggagtgagttgcatggttttgtaagttaaatgggaagaaagastttaactggcattctcccacaccaagggtgttaaacctaaaaatgctggggacttttggatacctgtggtctattttattttattttaatsctccacttccttttcttttggtaacacagaaaagaaaaagctagaggtagaaaagtattttgttcagtcc

SEQ ID NO: 79166 - DNA, 600 bp, Chicken  19866894369873_3
agacatcggccttctccattacactccattgtcacccatatagactgcactcaagctacatgcaatcaactcttcaaaaatattgctaaaaatcacataataatgttaaaagtttatgctatacatgtggcccatggatcacaygttggacatgcctgacttacaacttctttggagcaaggcccaggctgcctgtgtccttcctgagagtgcttcggagacatttaatcytgtgttgttttgttaccttgggcctaagtatttgtagcaccaacagtgaaagcagattgacttgtcctrtcatagtgcgcagtggagggacatactggagtgagttgcatggttttgtaagttaaatgggaagaaagastttaactggcattctcccacaccaagggtgttaaacctaaaaatgctggggacttttggatacctgtggtctattttattttattttaatsctccacttccttttcttttggtaacacagaaaagaaaaagctagaggtagaaaagtattttgttcagtcctaagtataacattttttcacccccaaccgataaatacatttttcttggaaatctcaactgaaacctttt

SEQ ID NO: 79167 - DNA, 600 bp, Chicken  19866894369873_4
tcttcaaaaatattgctaaaaatcacataataatgttaaaagtttatgctatacatgtggcccatggatcacaygttggacatgcctgacttacaacttctttggagcaaggcccaggctgcctgtgtccttcctgagagtgcttcggagacatttaatcytgtgttgttttgttaccttgggcctaagtatttgtagcaccaacagtgaaagcagattgacttgtcctrtcatagtgcgcagtggagggacatactggagtgagttgcatggttttgtaagttaaatgggaagaaagastttaactggcattctcccacaccaagggtgttaaacctaaaaatgctggggacttttggatacctgtggtctattttattttattttaatsctccacttccttttcttttggtaacacagaaaagaaaaagctagaggtagaaaagtattttgttcagtcctaagtataacattttttcacccccaaccgataaatacatttttcttggaaatctcaactgaaaccttttctgaaatggtgctttcttacctggtgctattgacactcagattttaagggaaatcactgtcctttcccct

SEQ ID NO: 79168 - DNA, 600 bp, Chicken  19866894369873_5
tacaacttctttggagcaaggcccaggctgcctgtgtccttcctgagagtgcttcggagacatttaatcytgtgttgttttgttaccttgggcctaagtatttgtagcaccaacagtgaaagcagattgacttgtcctrtcatagtgcgcagtggagggacatactggagtgagttgcatggttttgtaagttaaatgggaagaaagastttaactggcattctcccacaccaagggtgttaaacctaaaaatgctggggacttttggatacctgtggtctattttattttattttaatsctccacttccttttcttttggtaacacagaaaagaaaaagctagaggtagaaaagtattttgttcagtcctaagtataacattttttcacccccaaccgataaatacatttttcttggaaatctcaactgaaaccttttctgaaatggtgctttcttacctggtgctattgacactcagattttaagggaaatcactgtcctttcccctccagggcaaacaggctgatactgccaaggatacatttgacagcagcagtgtgggagctcacacccagcaagcaargaaaattacacagggt

SEQ ID NO: 79169 - DNA, 384 bp, Chicken  19866894369873_6
ttattttattttaatsctccacttccttttcttttggtaacacagaaaagaaaaagctagaggtagaaaagtattttgttcagtcctaagtataacattttttcacccccaaccgataaatacatttttcttggaaatctcaactgaaaccttttctgaaatggtgctttcttacctggtgctattgacactcagattttaagggaaatcactgtcctttcccctccagggcaaacaggctgatactgccaaggatacatttgacagcagcagtgtgggagctcacacccagcaagcaargaaaattacacagggtaatgggtgtggcttttctgcatagagttccgttggccagttgtaaatgaaatagctgcaacagcccag

SEQ ID NO: 79170 - DNA, 599 bp, Chicken  19866894369875_1
  misc_feature (1)..(44): n is any nucleotide
nnnnnnnnnnnnnnnnnnnnnnnnnnnnnnnnnnnnnnnnnnnnaagctgttttttaaatattgtagaactttactctctttttttctttccagtaggtttgcagcaaaatcagccaaattatattagttatgctttaaattccaatttccacagttctttcgttctgtatctccctccttttttcatctcaacacctcacttccttagatttttagtgtaacgaatctcagactccagtgaataaagtgaaatagaaaaagaggaagctatcatgagcttctgaatttgtgtttcccakgttcagaaagttttctggggtttgatgatatcccagccatttctgtagttattagctgctgttgctgctttatacagtctttcttattttgtccatcaatagttattgacyctagaaaacaacagtggtgaaaatgaaaaaataaacaaacaaaagaagctgataatatgtacgggttctgctttcttaaaatgttttgagaacactgatgccacgacgtctgaaagcttctagtaagtgcacaaataggccctatcacattgttacattaacakttgttcaaaattagaacaaaatta

SEQ ID NO: 79171 - DNA, 600 bp, Chicken  19866894369875_2
cagccaaattatattagttatgctttaaattccaatttccacagttctttcgttctgtatctccctccttttttcatctcaacacctcacttccttagatttttagtgtaacgaatctcagactccagtgaataaagtgaaatagaaaaagaggaagctatcatgagcttctgaatttgtgtttcccakgttcagaaagttttctggggtttgatgatatcccagccatttctgtagttattagctgctgttgctgctttatacagtctttcttattttgtccatcaatagttattgacyctagaaaacaacagtggtgaaaatgaaaaaataaacaaacaaaagaagctgataatatgtacgggttctgctttcttaaaatgttttgagaacactgatgccacgacgtctgaaagcttctagtaagtgcacaaataggccctatcacattgttacattaacakttgttcaaaattagaacaaaattactttatctgctttcaaaagcattttactgcactctagtctccctagaagtatttgggaaatggttcccaaactgtcccaaagacagttttctctgtcttattgtgaaaataa

SEQ ID NO: 79172 - DNA, 596 bp, Chicken  19866894369875_3
gagcttctgaatttgtgtttcccakgttcagaaagttttctggggtttgatgatatcccagccatttctgtagttattagctgctgttgctgctttatacagtctttcttattttgtccatcaatagttattgacyctagaaaacaacagtggtgaaaatgaaaaaataaacaaacaaaagaagctgataatatgtacgggttctgctttcttaaaatgttttgagaacactgatgccacgacgtctgaaagcttctagtaagtgcacaaataggccctatcacattgttacattaacakttgttcaaaattagaacaaaattactttatctgctttcaaaagcattttactgcactctagtctccctagaagtatttgggaaatggttcccaaactgtcccaaagacagttttctctgtcttattgtgaaaataaatttcaaagttgcatttgcagatacctgaagctctcaggtaatgcatttacacaaaatatccagatgattttttcagaagtgaaatgcacagtctcaccagtattactattccaggggggagctcattaccacactgcagaaaccctgatctgctgtcct

SEQ ID NO: 79173 - DNA, 600 bp, Chicken  19866894369883_1
ctgcctctccaacagggctccgtcagccaacatctcgcagactgttaatcagagctctgtaagtgattcctcccctcgggtggatgccataagtaggtgtatttccacacatgtcctacgtgccggccgcgttttgcttcagtttggtggccctgcacccagatacctctgctgaaacctcaggagctgccttgagtgggctgagctcaaaaaactaaaaaataaatgaaaaaaaaataaagggggggaacagagaaaaggcatcagtttggctcagggaacaaaatccgtgagcattcrtgattgtaatacataaaagggaggtgtctggatgcgtayacagaacrtcatagcctatatctgtatctaccttaacagatttaaggagagatyttcttttttactttattttgctctgtgagttttgcaatagtgagttggtaacaactgaggcagtttgtttttatgatagatgccgctagatagaggcacagccagggaggtaaactggtaaatctgaacaaactgaggaatggtggctgtgggcttctggccccgttatcaaacttgctgcataaggcagagtttatgcactgtgat

SEQ ID NO: 79174 - DNA, 600 bp, Chicken  19866894369883_2
gactgttaatcagagctctgtaagtgattcctcccctcgggtggatgccataagtaggtgtatttccacacatgtcctacgtgccggccgcgttttgcttcagtttggtggccctgcacccagatacctctgctgaaacctcaggagctgccttgagtgggctgagctcaaaaaactaaaaaataaatgaaaaaaaaataaagggggggaacagagaaaaggcatcagtttggctcagggaacaaaatccgtgagcattcrtgattgtaatacataaaagggaggtgtctggatgcgtayacagaacrtcatagcctatatctgtatctaccttaacagatttaaggagagatyttcttttttactttattttgctctgtgagttttgcaatagtgagttggtaacaactgaggcagtttgtttttatgatagatgccgctagatagaggcacagccagggaggtaaactggtaaatctgaacaaactgaggaatggtggctgtgggcttctggccccgttatcaaacttgctgcataaggcagagtttatgcactgtgataatgctaatgaccagcagagccaatgatgcatgactgga

SEQ ID NO: 79175 - DNA, 600 bp, Chicken  19866894369883_3
atcagagctctgtaagtgattcctcccctcgggtggatgccataagtaggtgtatttccacacatgtcctacgtgccggccgcgttttgcttcagtttggtggccctgcacccagatacctctgctgaaacctcaggagctgccttgagtgggctgagctcaaaaaactaaaaaataaatgaaaaaaaaataaagggggggaacagagaaaaggcatcagtttggctcagggaacaaaatccgtgagcattcrtgattgtaatacataaaagggaggtgtctggatgcgtayacagaacrtcatagcctatatctgtatctaccttaacagatttaaggagagatyttcttttttactttattttgctctgtgagttttgcaatagtgagttggtaacaactgaggcagtttgtttttatgatagatgccgctagatagaggcacagccagggaggtaaactggtaaatctgaacaaactgaggaatggtggctgtgggcttctggccccgttatcaaacttgctgcataaggcagagtttatgcactgtgataatgctaatgaccagcagagccaatgatgcatgactggaggaaatca

SEQ ID NO: 79176 - DNA, 600 bp, Chicken  19866894369883_4
taggtgtatttccacacatgtcctacgtgccggccgcgttttgcttcagtttggtggccctgcacccagatacctctgctgaaacctcaggagctgccttgagtgggctgagctcaaaaaactaaaaaataaatgaaaaaaaaataaagggggggaacagagaaaaggcatcagtttggctcagggaacaaaatccgtgagcattcrtgattgtaatacataaaagggaggtgtctggatgcgtayacagaacrtcatagcctatatctgtatctaccttaacagatttaaggagagatyttcttttttactttattttgctctgtgagttttgcaatagtgagttggtaacaactgaggcagtttgtttttatgatagatgccgctagatagaggcacagccagggaggtaaactggtaaatctgaacaaactgaggaatggtggctgtgggcttctggccccgttatcaaacttgctgcataaggcagagtttatgcactgtgataatgctaatgaccagcagagccaatgatgcatgactggaggaaatcagtggtataatcggagaaagttatcaggtttttgtcattaaatatta

SEQ ID NO: 79177 - DNA, 600 bp, Chicken  19866894369886_1
aactatatggcaattttatatgctatactaatagatttagcatatgtgagtaagaattttcaattctaagaagggtagatttacagaaaaaaacattgactatgcacatattacatatcacgcatatgcatacaaattggtgcctcagtcaattcccagatcccgctgtctctccagcagctggcttgtgcttccatcaggcagctcctccacagatgcatatatttggcctagccttgcaacttcagtacctggctcacgggctacttaaccttatctctacctaatacagtttgatawttgctgccgatcacacamtgacttgcatgccttgatccttccagttgccagacccacacagacatgaattggatgattctcagttygactgcagttgctggtacctaaacrtccattagcacagaygaatacaaaacagagatccccttactcatccaagaaaatacaaagtgagttagtgggagaaagcagactgcagtgatcaaatgtgggacatgaaggcaagtactcaccagttcaagtctattgactttacacacagagggagaaatattcctcaagtatctaattatgtcacat

SEQ ID NO: 79178 - DNA, 600 bp, Chicken  19866894369886_2
tatgctatactaatagatttagcatatgtgagtaagaattttcaattctaagaagggtagatttacagaaaaaaacattgactatgcacatattacatatcacgcatatgcatacaaattggtgcctcagtcaattcccagatcccgctgtctctccagcagctggcttgtgcttccatcaggcagctcctccacagatgcatatatttggcctagccttgcaacttcagtacctggctcacgggctacttaaccttatctctacctaatacagtttgatawttgctgccgatcacacamtgacttgcatgccttgatccttccagttgccagacccacacagacatgaattggatgattctcagttygactgcagttgctggtacctaaacrtccattagcacagaygaatacaaaacagagatccccttactcatccaagaaaatacaaagtgagttagtgggagaaagcagactgcagtgatcaaatgtgggacatgaaggcaagtactcaccagttcaagtctattgactttacacacagagggagaaatattcctcaagtatctaattatgtcacatttcagtctggatgatgaa

SEQ ID NO: 79179 - DNA, 600 bp, Chicken  19866894369886_3
aaaaaaacattgactatgcacatattacatatcacgcatatgcatacaaattggtgcctcagtcaattcccagatcccgctgtctctccagcagctggcttgtgcttccatcaggcagctcctccacagatgcatatatttggcctagccttgcaacttcagtacctggctcacgggctacttaaccttatctctacctaatacagtttgatawttgctgccgatcacacamtgacttgcatgccttgatccttccagttgccagacccacacagacatgaattggatgattctcagttygactgcagttgctggtacctaaacrtccattagcacagaygaatacaaaacagagatccccttactcatccaagaaaatacaaagtgagttagtgggagaaagcagactgcagtgatcaaatgtgggacatgaaggcaagtactcaccagttcaagtctattgactttacacacagagggagaaatattcctcaagtatctaattatgtcacatttcagtctggatgatgaagtaccttaagcaggaacaactgcttttggctactgctatgaatgcagtaagaccttgtaaaacttaaa

SEQ ID NO: 79180 - DNA, 600 bp, Chicken  19866894369886_4
tacatatcacgcatatgcatacaaattggtgcctcagtcaattcccagatcccgctgtctctccagcagctggcttgtgcttccatcaggcagctcctccacagatgcatatatttggcctagccttgcaacttcagtacctggctcacgggctacttaaccttatctctacctaatacagtttgatawttgctgccgatcacacamtgacttgcatgccttgatccttccagttgccagacccacacagacatgaattggatgattctcagttygactgcagttgctggtacctaaacrtccattagcacagaygaatacaaaacagagatccccttactcatccaagaaaatacaaagtgagttagtgggagaaagcagactgcagtgatcaaatgtgggacatgaaggcaagtactcaccagttcaagtctattgactttacacacagagggagaaatattcctcaagtatctaattatgtcacatttcagtctggatgatgaagtaccttaagcaggaacaactgcttttggctactgctatgaatgcagtaagaccttgtaaaacttaaagacctggacactgtgatattgactt

SEQ ID NO: 79181 - DNA, 600 bp, Chicken  19866894369886_5
tgcatacaaattggtgcctcagtcaattcccagatcccgctgtctctccagcagctggcttgtgcttccatcaggcagctcctccacagatgcatatatttggcctagccttgcaacttcagtacctggctcacgggctacttaaccttatctctacctaatacagtttgatawttgctgccgatcacacamtgacttgcatgccttgatccttccagttgccagacccacacagacatgaattggatgattctcagttygactgcagttgctggtacctaaacrtccattagcacagaygaatacaaaacagagatccccttactcatccaagaaaatacaaagtgagttagtgggagaaagcagactgcagtgatcaaatgtgggacatgaaggcaagtactcaccagttcaagtctattgactttacacacagagggagaaatattcctcaagtatctaattatgtcacatttcagtctggatgatgaagtaccttaagcaggaacaactgcttttggctactgctatgaatgcagtaagaccttgtaaaacttaaagacctggacactgtgatattgacttacataacacccacaa

SEQ ID NO: 79182 - DNA, 599 bp, Chicken  19866894369893_1
  misc_feature (1)..(35): n is any nucleotide
nnnnnnnnnnnnnnnnnnnnnnnnnnnnnnnnnnnaattagtaatgtagtgggaaaaaaaccagcgtttgcattttatgaactcaaattgcagatatagcctctgatctttaggtctaaaattatcaactgtgcacaagatagtttatttaagaaaataactgcaggagatattcaaaatggattaaaaaatctgtgactcagtatgacatattcttctactaaatactgaaaaaacatgtgaaagacacgcctactttatgaagccactatgagataggatttttcttcaggttgtatygtgttttgatayattcatttgtcaactgttgataagataatttgtccaaatggttaaaacagaaatgtttactgcaatttgtactgagtacagtacaagataagaaggctacatataaattccctacattctgcatgcaatgtaagtagttgtgatcctcttcaaatacattgtgawattggactatgcggtttattctaaacccacccagatacgtcatgttagatgaggaaagaaacacaaaaaaatcctagaaaacttgagaatctgcaactatctaatttatcgggggaaaatat

SEQ ID NO: 79183 - DNA, 599 bp, Chicken  19866894369893_2
  misc_feature (1)..(23): n is any nucleotide
nnnnnnnnnnnnnnnnnnnnnnnaattagtaatgtagtgggaaaaaaaccagcgtttgcattttatgaactcaaattgcagatatagcctctgatctttaggtctaaaattatcaactgtgcacaagatagtttatttaagaaaataactgcaggagatattcaaaatggattaaaaaatctgtgactcagtatgacatattcttctactaaatactgaaaaaacatgtgaaagacacgcctactttatgaagccactatgagataggatttttcttcaggttgtatygtgttttgatayattcatttgtcaactgttgataagataatttgtccaaatggttaaaacagaaatgtttactgcaatttgtactgagtacagtacaagataagaaggctacatataaattccctacattctgcatgcaatgtaagtagttgtgatcctcttcaaatacattgtgawattggactatgcggtttattctaaacccacccagatacgtcatgttagatgaggaaagaaacacaaaaaaatcctagaaaacttgagaatctgcaactatctaatttatcgggggaaaatatgaacggtggtcc

SEQ ID NO: 79184 - DNA, 563 bp, Chicken  19866894369893_3
aatggattaaaaaatctgtgactcagtatgacatattcttctactaaatactgaaaaaacatgtgaaagacacgcctactttatgaagccactatgagataggatttttcttcaggttgtatygtgttttgatayattcatttgtcaactgttgataagataatttgtccaaatggttaaaacagaaatgtttactgcaatttgtactgagtacagtacaagataagaaggctacatataaattccctacattctgcatgcaatgtaagtagttgtgatcctcttcaaatacattgtgawattggactatgcggtttattctaaacccacccagatacgtcatgttagatgaggaaagaaacacaaaaaaatcctagaaaacttgagaatctgcaactatctaatttatcgggggaaaatatgaacggtggtcctctgacaattacagcacggaaggtaggatatatttgcagagtactggtattttaattagtgtagatttctgtgtaatttgggggaagaaaaatttaaatcacatattaaattgcttttcagaaacaatt

SEQ ID NO: 79185 - DNA, 600 bp, Chicken  19866894369897_1
gaatgcacccaagccaaattctggatgacgccaaagctggggggcttgtttctgcctgggacttggaacaggcacctctagagatctgctccagtctcatttatcccctggttttctgatgactcctttaaatataaaacacagaacttcactgcatcaccaggcagcaggtgagagctgagtgtaaaccatcaccagtccattgaactcagctatgaagcaatgggagaggagatgctgaagtccatgccagctctatatggcatcaagacattttgccactctcagcaggagacacartccaaatgtctctttattccagagctgttcagaataatcacacaccwttctcaccttcctcagtgagaaaaataagaaactgccttggtctgagaaaactscttagcctagtgaagtattccttttaattgacctttaataaggaaaaggtacggacctgaggatgggcagcagaggatagtctgaaaacagagagatggatttcaatccatcatgtcacagatggaggtgacttctgcyacatgggctgacatgagcattcacggagctatgagatatacattaattctctttgcattt

SEQ ID NO: 79186 - DNA, 600 bp, Chicken  19866894369897_2
gtttctgcctgggacttggaacaggcacctctagagatctgctccagtctcatttatcccctggttttctgatgactcctttaaatataaaacacagaacttcactgcatcaccaggcagcaggtgagagctgagtgtaaaccatcaccagtccattgaactcagctatgaagcaatgggagaggagatgctgaagtccatgccagctctatatggcatcaagacattttgccactctcagcaggagacacartccaaatgtctctttattccagagctgttcagaataatcacacaccwttctcaccttcctcagtgagaaaaataagaaactgccttggtctgagaaaactscttagcctagtgaagtattccttttaattgacctttaataaggaaaaggtacggacctgaggatgggcagcagaggatagtctgaaaacagagagatggatttcaatccatcatgtcacagatggaggtgacttctgcyacatgggctgacatgagcattcacggagctatgagatatacattaattctctttgcatttcagatctgtaagaatcagtactgaatccagagctacgtgaatctaca

SEQ ID NO: 79187 - DNA, 600 bp, Chicken  19866894369897_3
tatcccctggttttctgatgactcctttaaatataaaacacagaacttcactgcatcaccaggcagcaggtgagagctgagtgtaaaccatcaccagtccattgaactcagctatgaagcaatgggagaggagatgctgaagtccatgccagctctatatggcatcaagacattttgccactctcagcaggagacacartccaaatgtctctttattccagagctgttcagaataatcacacaccwttctcaccttcctcagtgagaaaaataagaaactgccttggtctgagaaaactscttagcctagtgaagtattccttttaattgacctttaataaggaaaaggtacggacctgaggatgggcagcagaggatagtctgaaaacagagagatggatttcaatccatcatgtcacagatggaggtgacttctgcyacatgggctgacatgagcattcacggagctatgagatatacattaattctctttgcatttcagatctgtaagaatcagtactgaatccagagctacgtgaatctacaggaagattggaaacaacatcaactatccatcagctgattcttttgtcatatcaa

SEQ ID NO: 79188 - DNA, 600 bp, Chicken  19866894369897_4
aagtccatgccagctctatatggcatcaagacattttgccactctcagcaggagacacartccaaatgtctctttattccagagctgttcagaataatcacacaccwttctcaccttcctcagtgagaaaaataagaaactgccttggtctgagaaaactscttagcctagtgaagtattccttttaattgacctttaataaggaaaaggtacggacctgaggatgggcagcagaggatagtctgaaaacagagagatggatttcaatccatcatgtcacagatggaggtgacttctgcyacatgggctgacatgagcattcacggagctatgagatatacattaattctctttgcatttcagatctgtaagaatcagtactgaatccagagctacgtgaatctacaggaagattggaaacaacatcaactatccatcagctgattcttttgtcatatcaagcgtcgggattttttgccataccaagttttacgtaaagyatcttgaggatattagaagaaagcaaagcaaaacagcgctgttatgatgggatgcccacctccagctcagtaggtctttagtgagcatatcatggcaccy

SEQ ID NO: 79189 - DNA, 600 bp, Chicken  19866894369897_5
aaggaaaaggtacggacctgaggatgggcagcagaggatagtctgaaaacagagagatggatttcaatccatcatgtcacagatggaggtgacttctgcyacatgggctgacatgagcattcacggagctatgagatatacattaattctctttgcatttcagatctgtaagaatcagtactgaatccagagctacgtgaatctacaggaagattggaaacaacatcaactatccatcagctgattcttttgtcatatcaagcgtcgggattttttgccataccaagttttacgtaaagyatcttgaggatattagaagaaagcaaagcaaaacagcgctgttatgatgggatgcccacctccagctcagtaggtctttagtgagcatatcatggcaccytctccatagagaggatcagagtggaaaatggcatcaaactgtgctgcccttccattcccctgttcctgctcttctgaaatcatagaatcatagaatggcttgggttgaaaaggcccacagtgctcatctgctttcaacccccctgctatgtgcaaggtcaccaaccaccagaccaggctgcccagagccacattcaccct

SEQ ID NO: 79190 - DNA, 600 bp, Chicken  19866894369897_6
acatgggctgacatgagcattcacggagctatgagatatacattaattctctttgcatttcagatctgtaagaatcagtactgaatccagagctacgtgaatctacaggaagattggaaacaacatcaactatccatcagctgattcttttgtcatatcaagcgtcgggattttttgccataccaagttttacgtaaagyatcttgaggatattagaagaaagcaaagcaaaacagcgctgttatgatgggatgcccacctccagctcagtaggtctttagtgagcatatcatggcaccytctccatagagaggatcagagtggaaaatggcatcaaactgtgctgcccttccattcccctgttcctgctcttctgaaatcatagaatcatagaatggcttgggttgaaaaggcccacagtgctcatctgctttcaacccccctgctatgtgcaaggtcaccaaccaccagaccaggctgcccagagccacattcaccctggccttgaatgcctccagggatggggcatccacagcctccttgggcaacctgttccaagtgtgtcaccacccatgatgatgaaatctgatgttccctctt

SEQ ID NO: 79191 - DNA, 600 bp, Chicken  19866894369905_1
tgctaaggctatggaagcacaaggaatcagagcatcaaacaactgttagagacagtggaagtacttagaagaaaatcctttatctttagatttacaattctcttttccactcacctattcatttcagaattctctattgccataacgttcaactgtaatacacaaaatgaagcagttgtataatggcagcttctctgacactctctgtgctatgacgtctttctgaagaatcttttcaggggttgatatgaagggaacatctctaggccaagtgatattcctttttttaaactgagaaaragccttcaaagagaaacatacactgcaktaaagctctcctaaagtgtcaaagcagagattttctgagcttagtcttgcaaagacagtgacaaatgagcacctgaaattttagcacagagtttcaggatagcatcacrtgcggcccagtgacagcatcrtggggatgggtggtgagatctggcagcaggattagaaagaggttgttcatgcacatagctaccagaacgtaaccagcacacagataccagaagggtaatatatcattaatcttttgttgacaaactttcttacagatctccc

SEQ ID NO: 79192 - DNA, 600 bp, Chicken  19866894369905_2
agagcatcaaacaactgttagagacagtggaagtacttagaagaaaatcctttatctttagatttacaattctcttttccactcacctattcatttcagaattctctattgccataacgttcaactgtaatacacaaaatgaagcagttgtataatggcagcttctctgacactctctgtgctatgacgtctttctgaagaatcttttcaggggttgatatgaagggaacatctctaggccaagtgatattcctttttttaaactgagaaaragccttcaaagagaaacatacactgcaktaaagctctcctaaagtgtcaaagcagagattttctgagcttagtcttgcaaagacagtgacaaatgagcacctgaaattttagcacagagtttcaggatagcatcacrtgcggcccagtgacagcatcrtggggatgggtggtgagatctggcagcaggattagaaagaggttgttcatgcacatagctaccagaacgtaaccagcacacagataccagaagggtaatatatcattaatcttttgttgacaaactttcttacagatctcccttctttttcccaggcaaatcacattgta

SEQ ID NO: 79193 - DNA, 600 bp, Chicken  19866894369905_3
tgccataacgttcaactgtaatacacaaaatgaagcagttgtataatggcagcttctctgacactctctgtgctatgacgtctttctgaagaatcttttcaggggttgatatgaagggaacatctctaggccaagtgatattcctttttttaaactgagaaaragccttcaaagagaaacatacactgcaktaaagctctcctaaagtgtcaaagcagagattttctgagcttagtcttgcaaagacagtgacaaatgagcacctgaaattttagcacagagtttcaggatagcatcacrtgcggcccagtgacagcatcrtggggatgggtggtgagatctggcagcaggattagaaagaggttgttcatgcacatagctaccagaacgtaaccagcacacagataccagaagggtaatatatcattaatcttttgttgacaaactttcttacagatctcccttctttttcccaggcaaatcacattgtaatggttagttttgaggagacagaggtttatacaccatgcctgtcctcagtgaaggctagacaggagtagaagttcaccgtccttgctgagattctgctatcacatactg

SEQ ID NO: 79194 - DNA, 600 bp, Chicken  19866894369905_4
tacacaaaatgaagcagttgtataatggcagcttctctgacactctctgtgctatgacgtctttctgaagaatcttttcaggggttgatatgaagggaacatctctaggccaagtgatattcctttttttaaactgagaaaragccttcaaagagaaacatacactgcaktaaagctctcctaaagtgtcaaagcagagattttctgagcttagtcttgcaaagacagtgacaaatgagcacctgaaattttagcacagagtttcaggatagcatcacrtgcggcccagtgacagcatcrtggggatgggtggtgagatctggcagcaggattagaaagaggttgttcatgcacatagctaccagaacgtaaccagcacacagataccagaagggtaatatatcattaatcttttgttgacaaactttcttacagatctcccttctttttcccaggcaaatcacattgtaatggttagttttgaggagacagaggtttatacaccatgcctgtcctcagtgaaggctagacaggagtagaagttcaccgtccttgctgagattctgctatcacatactgatatcaccatagaagcagatg

SEQ ID NO: 79195 - DNA, 600 bp, Chicken  19866894369907_1
tcactctccataatgacctgaaagttggtgggggccggactcttctcctaggtcacagagataggatgagaagtaacaacctcaagttgcaccaggggaggctcaggttggatgtttggaagaatttcctctcagaaagagtggtgctgcagtagcacaggctgcccatggaggtggtggagtcaccatccctggaggtgttcaagaaccatgtgtatgtggcacggagggtttagagggcaatactggtggtaggcagacagctggactagatgatcttagtggtcttttccaactttwatgattctatgtttcagtatttgagagaaacctgacaaagatgcttgtagttcactctaacctaggaaagcaaacmcagctgctgctaccasagctggcactcagggctaccagacccagtgaaggctgcactatttatgtcacatgtcctgtgcagagctatgacaaggaggcctgcggaggaagaaggacaacaaagtggaagcgtgacacagtggatccagtattactactagaattctaacttcagttctctcatttattctgagaaaaataaagaaatcaaactttgccttccaa

SEQ ID NO: 79196 - DNA, 600 bp, Chicken  19866894369907_2
caacctcaagttgcaccaggggaggctcaggttggatgtttggaagaatttcctctcagaaagagtggtgctgcagtagcacaggctgcccatggaggtggtggagtcaccatccctggaggtgttcaagaaccatgtgtatgtggcacggagggtttagagggcaatactggtggtaggcagacagctggactagatgatcttagtggtcttttccaactttwatgattctatgtttcagtatttgagagaaacctgacaaagatgcttgtagttcactctaacctaggaaagcaaacmcagctgctgctaccasagctggcactcagggctaccagacccagtgaaggctgcactatttatgtcacatgtcctgtgcagagctatgacaaggaggcctgcggaggaagaaggacaacaaagtggaagcgtgacacagtggatccagtattactactagaattctaacttcagttctctcatttattctgagaaaaataaagaaatcaaactttgccttccaagaggggaaaagaaaaaggtgcacattttcagccatcgagttcagggctcaaagcagagccccaaaaccacagcaca

SEQ ID NO: 79197 - DNA, 600 bp, Chicken  19866894369907_3
caggggaggctcaggttggatgtttggaagaatttcctctcagaaagagtggtgctgcagtagcacaggctgcccatggaggtggtggagtcaccatccctggaggtgttcaagaaccatgtgtatgtggcacggagggtttagagggcaatactggtggtaggcagacagctggactagatgatcttagtggtcttttccaactttwatgattctatgtttcagtatttgagagaaacctgacaaagatgcttgtagttcactctaacctaggaaagcaaacmcagctgctgctaccasagctggcactcagggctaccagacccagtgaaggctgcactatttatgtcacatgtcctgtgcagagctatgacaaggaggcctgcggaggaagaaggacaacaaagtggaagcgtgacacagtggatccagtattactactagaattctaacttcagttctctcatttattctgagaaaaataaagaaatcaaactttgccttccaagaggggaaaagaaaaaggtgcacattttcagccatcgagttcagggctcaaagcagagccccaaaaccacagcacaagtgaggaatggcaat

SEQ ID NO: 79198 - DNA, 600 bp, Chicken  19866894369909_1
ctgagtcctcttttccctcatggcttttcatgaagacgcttgtctgcattacattccttgggactacggctctgtggttatcatggactgctcggcccggattggtttagagtactcacacagaaaagctaagaagcattttccgttttaatatgttcagtgaaatcaactttgagaaatggaacacagaaatggaacactgtaaaactacagtctgacaggcgagtggtgttcccctcagtgtcaccatctccatttgagttagcattcttatgctccctttggggatacaagtatttytagctactgggtggtctgcttcacttgtagacgcatagagtggtttggtcagattaacccactacaggcacccctatcatgttctaaaataattatttcatacttcagccaaagaatgttagtatttatagagctatttgaaaacacttcagagagtcaggtgctcaacttagactgaaattctgtgggatatggacataatactaacgtgggggccccttggagattcctaacttgtgagttatctagaagtaaatttattagagatatgtgtttttctctgagaattatgttttcaaa

SEQ ID NO: 79199 - DNA, 600 bp, Chicken  19866894369910_1
attccataatgccttctttattgccatttaaaaattactcccatctttaagcattacccatttttattatttcaatacacttctatcagtttcaaattgtatttttgcatattcaagggtaataataggatttttattcaccagactgtccgtcacacctgcactgagcaacaaagaacagcacagaggtaggtgggctggcccttccaggctaatcagggctgtactatggccagactgtggctccctcccaaatagggctgagctgtagaggcagcacagggctccacaccagtaggyaatatcacctggagcctactgacagtgtgctgacacacagtgcgtccatagagggtacagtctcyagctrgttggtgcacaytatgccccatagcatatagtctctcttaccttagagccaggcctggcccagagtgcaaagttatccactgtatccccagaatatctgtggcaataaagcacgggaaagaacagaagcctaatctttgggttttaaaccaatccccaggattagggattaacagcatagactttcagagcacaggcaaacaatccattttggtgagtttgaacttgagg

SEQ ID NO: 79200 - DNA, 600 bp, Chicken  19866894369910_2
attatttcaatacacttctatcagtttcaaattgtatttttgcatattcaagggtaataataggatttttattcaccagactgtccgtcacacctgcactgagcaacaaagaacagcacagaggtaggtgggctggcccttccaggctaatcagggctgtactatggccagactgtggctccctcccaaatagggctgagctgtagaggcagcacagggctccacaccagtaggyaatatcacctggagcctactgacagtgtgctgacacacagtgcgtccatagagggtacagtctcyagctrgttggtgcacaytatgccccatagcatatagtctctcttaccttagagccaggcctggcccagagtgcaaagttatccactgtatccccagaatatctgtggcaataaagcacgggaaagaacagaagcctaatctttgggttttaaaccaatccccaggattagggattaacagcatagactttcagagcacaggcaaacaatccattttggtgagtttgaacttgaggtaaagaagtgagaaaccaataattggtttctgaagactttgcaataatgggagttttcttcagac

SEQ ID NO: 79201 - DNA, 600 bp, Chicken  19866894369910_3
ttcaatacacttctatcagtttcaaattgtatttttgcatattcaagggtaataataggatttttattcaccagactgtccgtcacacctgcactgagcaacaaagaacagcacagaggtaggtgggctggcccttccaggctaatcagggctgtactatggccagactgtggctccctcccaaatagggctgagctgtagaggcagcacagggctccacaccagtaggyaatatcacctggagcctactgacagtgtgctgacacacagtgcgtccatagagggtacagtctcyagctrgttggtgcacaytatgccccatagcatatagtctctcttaccttagagccaggcctggcccagagtgcaaagttatccactgtatccccagaatatctgtggcaataaagcacgggaaagaacagaagcctaatctttgggttttaaaccaatccccaggattagggattaacagcatagactttcagagcacaggcaaacaatccattttggtgagtttgaacttgaggtaaagaagtgagaaaccaataattggtttctgaagactttgcaataatgggagttttcttcagacagcat

SEQ ID NO: 79202 - DNA, 600 bp, Chicken  19866894369910_4
ctatcagtttcaaattgtatttttgcatattcaagggtaataataggatttttattcaccagactgtccgtcacacctgcactgagcaacaaagaacagcacagaggtaggtgggctggcccttccaggctaatcagggctgtactatggccagactgtggctccctcccaaatagggctgagctgtagaggcagcacagggctccacaccagtaggyaatatcacctggagcctactgacagtgtgctgacacacagtgcgtccatagagggtacagtctcyagctrgttggtgcacaytatgccccatagcatatagtctctcttaccttagagccaggcctggcccagagtgcaaagttatccactgtatccccagaatatctgtggcaataaagcacgggaaagaacagaagcctaatctttgggttttaaaccaatccccaggattagggattaacagcatagactttcagagcacaggcaaacaatccattttggtgagtttgaacttgaggtaaagaagtgagaaaccaataattggtttctgaagactttgcaataatgggagttttcttcagacagcatccagctgcacat

SEQ ID NO: 79203 - DNA, 600 bp, Chicken  19866894369915_1
actgtaaatctctgctattcattcagacttttgctcttgagcattcagtgagaaaattcagtataggggactccatgtggtttagatgaagttattcaatcttctttaatttgtcatatatgaacataaagctcattgcctgaaaatactttatacatcgggaatactatgcaaacaaattcgaatggttttaaaggtgaaaatgagttttattttatccctgtttgcacaactcaggtacaccactaaaaggaacttacttagtatattggatgttattactaatttttgccgcagtcrtagctttccgattattatgtctatggtgacagagattctcgctgatgatagtagccaggcaaagcatagttttatgtgttctgtgccaaatacttctctagaggttgttctgttcctgatgtcagttacctttacaacacagacttgcttgtgcagctggtcatgcttgggtgagagtccaaaggacatcttgtagcttctcatacagtgagaagagggcagatttcagctcatgaaagatggagctacctgtgcagtatgccagtaaacagtattggtttctttatggcactggagtca

SEQ ID NO: 79204 - DNA, 600 bp, Chicken  19866894369915_2
tctcgctgatgatagtagccaggcaaagcatagttttatgtgttctgtgccaaatacttctctagaggttgttctgttcctgatgtcagttacctttacaacacagacttgcttgtgcagctggtcatgcttgggtgagagtccaaaggacatcttgtagcttctcatacagtgagaagagggcagatttcagctcatgaaagatggagctacctgtgcagtatgccagtaaacagtattggtttctttatggcactggagtcagggtgacagtagaagataagatactatggcaggtcwctagtttgaagtgagatggtgttaragcatcctgtacctgtaaaagaagaagttaaatgaaagtagactatgggagttgttgaaccatactgacaacatctaattcactagatgtttgaccaggtcagaatgtggatttgtatttctgacaggctgcagtctggatggcactgcaattttcagtctgcagtagagctggaggcagccacaaagtttgaatcaatgtctcagcactcttccctttccacttctttctttctctgcctctatctctcataagcacacatacacactcataca

SEQ ID NO: 79205 - DNA, 593 bp, Chicken  19866894369915_3
aagcatagttttatgtgttctgtgccaaatacttctctagaggttgttctgttcctgatgtcagttacctttacaacacagacttgcttgtgcagctggtcatgcttgggtgagagtccaaaggacatcttgtagcttctcatacagtgagaagagggcagatttcagctcatgaaagatggagctacctgtgcagtatgccagtaaacagtattggtttctttatggcactggagtcagggtgacagtagaagataagatactatggcaggtcwctagtttgaagtgagatggtgttaragcatcctgtacctgtaaaagaagaagttaaatgaaagtagactatgggagttgttgaaccatactgacaacatctaattcactagatgtttgaccaggtcagaatgtggatttgtatttctgacaggctgcagtctggatggcactgcaattttcagtctgcagtagagctggaggcagccacaaagtttgaatcaatgtctcagcactcttccctttccacttctttctttctctgcctctatctctcataagcacacatacacactcatacacataaaatgcatgtaaag

SEQ ID NO: 79206 - DNA, 600 bp, Chicken  19866894369917_1
cacaaactgtgctttataaaacagggcagaatctagctgcaactcagggtgttcagaacagtaccaaggtttgttttgcccaactgagatatgagtctgggtcctgacacagcagaccaaaatctgttcttctgctgtggttgggagaggccaggaagagggcaggctgcagtgttgggagagacctactgacatcctgctccttgctgcctgactcctcttcctcctcgctggattccccaggcctggatgcagcagtgcaggtggggcctcaccccctgcttcaggagcatcacccgrcatgtgatggagggacagsatttactcagccagactttgttcttgctgcctcccatctgcagatccctccctgctagcacagccttaccctggggcagcagggtacagaacagtaccagaacattatacagaacatttcagtggtgcactgttggaaggggctggaagagatggtaaagtccccacactggagacacgagagccatggaggtatcagacagcatgggacaatrgcagctcaccgtcttttgcagggatggggctgggagctgccccatgcctgcgccccttcgggacacc

SEQ ID NO: 79207 - DNA, 600 bp, Chicken  19866894369917_2
aacagggcagaatctagctgcaactcagggtgttcagaacagtaccaaggtttgttttgcccaactgagatatgagtctgggtcctgacacagcagaccaaaatctgttcttctgctgtggttgggagaggccaggaagagggcaggctgcagtgttgggagagacctactgacatcctgctccttgctgcctgactcctcttcctcctcgctggattccccaggcctggatgcagcagtgcaggtggggcctcaccccctgcttcaggagcatcacccgrcatgtgatggagggacagsatttactcagccagactttgttcttgctgcctcccatctgcagatccctccctgctagcacagccttaccctggggcagcagggtacagaacagtaccagaacattatacagaacatttcagtggtgcactgttggaaggggctggaagagatggtaaagtccccacactggagacacgagagccatggaggtatcagacagcatgggacaatrgcagctcaccgtcttttgcagggatggggctgggagctgccccatgcctgcgccccttcgggacaccccagcatcaggaatgccac

SEQ ID NO: 79208 - DNA, 571 bp, Chicken  19866894369917_3
gattccccaggcctggatgcagcagtgcaggtggggcctcaccccctgcttcaggagcatcacccgrcatgtgatggagggacagsatttactcagccagactttgttcttgctgcctcccatctgcagatccctccctgctagcacagccttaccctggggcagcagggtacagaacagtaccagaacattatacagaacatttcagtggtgcactgttggaaggggctggaagagatggtaaagtccccacactggagacacgagagccatggaggtatcagacagcatgggacaatrgcagctcaccgtcttttgcagggatggggctgggagctgccccatgcctgcgccccttcgggacaccccagcatcaggaatgccaccaggctgaggtcatgaggcctgaaatactgagaggggacagccaccagcactacaaagtgttaaaaagagggcaaaccaggcaaaggcattgtgcagtgggatcctggcccagtcctgctcctccagcccctcgcaggggacagtgtgggtaccaggtgctacacacactgtgctgggggctttt

SEQ ID NO: 79209 - DNA, 600 bp, Chicken  19866894369925_1
ttcggtggcacacgatgttcccaggggatgtaacttaagatctttctgaaaagacttacttttgctctggaccttgaacaactaaagcacgctcagagcatggggagttcataaacgtcacaaaagtgtctgtgtttcagacctgacctggtgtgcacaatcctgatgaagctgggcgttgtgccgcctgctttctgtgtaattcctgactatcgtcatgcacgttggctttgttgtctaaaatatgataattagaaccattaaaggtagtgaattcagaagtaacgttctctgtcagtrggttaggaaaagcatggggctaccggtcttgcagaggaagctgtttcagtgtgtcttttctctcctgtagaaagtggaagtgaagtagtgcttaaataacttaatattttaagttacataagtttaaaaaaagaaatcaccatttgcaatggaatcttgggtcatcctaagrtgstgtcagtcccttttctcatgtgtgcttgggtttttatgccctgtagtgcctggagcaccagggaaatctggggcaggagtttgctgttcctgtgtcttggaagagcagaagatggttgaagttcc

SEQ ID NO: 79210 - DNA, 600 bp, Chicken  19866894369925_2
tgggcgttgtgccgcctgctttctgtgtaattcctgactatcgtcatgcacgttggctttgttgtctaaaatatgataattagaaccattaaaggtagtgaattcagaagtaacgttctctgtcagtrggttaggaaaagcatggggctaccggtcttgcagaggaagctgtttcagtgtgtcttttctctcctgtagaaagtggaagtgaagtagtgcttaaataacttaatattttaagttacataagtttaaaaaaagaaatcaccatttgcaatggaatcttgggtcatcctaagrtgstgtcagtcccttttctcatgtgtgcttgggtttttatgccctgtagtgcctggagcaccagggaaatctggggcaggagtttgctgttcctgtgtcttggaagagcagaagatggttgaagttcctctcgtgcgctaaaacagcaactaacaaaatacctccacgtaattggagtcctcaagttattccttctttaccttgaatatgtttcctagtaagcgtggaggaaggattagcagatgcgaagcagttaagcaaggaggacaaaggtgtgcatgtggatgtttactatttatc

SEQ ID NO: 79211 - DNA, 600 bp, Chicken  19866894369925_3
gcgttgtgccgcctgctttctgtgtaattcctgactatcgtcatgcacgttggctttgttgtctaaaatatgataattagaaccattaaaggtagtgaattcagaagtaacgttctctgtcagtrggttaggaaaagcatggggctaccggtcttgcagaggaagctgtttcagtgtgtcttttctctcctgtagaaagtggaagtgaagtagtgcttaaataacttaatattttaagttacataagtttaaaaaaagaaatcaccatttgcaatggaatcttgggtcatcctaagrtgstgtcagtcccttttctcatgtgtgcttgggtttttatgccctgtagtgcctggagcaccagggaaatctggggcaggagtttgctgttcctgtgtcttggaagagcagaagatggttgaagttcctctcgtgcgctaaaacagcaactaacaaaatacctccacgtaattggagtcctcaagttattccttctttaccttgaatatgtttcctagtaagcgtggaggaaggattagcagatgcgaagcagttaagcaaggaggacaaaggtgtgcatgtggatgtttactatttatctgt

SEQ ID NO: 79212 - DNA, 600 bp, Chicken  19866894369932_1
agaggaacattcttctgaccattctcttgggtagtagtcatggtgctgtgtggcaccagcacctgctaaccagcccacatgtgccctgtatgaatgagaacctcagtggcattcctgaaatggcatagctcatccctgagggtttgtcacattagcccacaaagtaaggctgctgagagattttgtatctgtgcatatagttaggtctggcttctagtgactaccacaaagaagtgagaggcatctttgctgtaaataccagctgaaggttgacgaagagtgagttgtttcaccaaaacktgtcagaggagacactcratcagcagaagtatttacctctcagaatactcatttctgtagtgtagccacgacctacacattttcaaaacgtattaggaggataatttctgatccacctttttcatctaccacttttattttcccttcttttacaggttcactgaatggtttttcccatgtctattctgcaaaatgccattcattcacagtcaccatagacactgtagtttatcactacgagtacaaaccacagtgagcacaattactctagaaagaagggagctctcagggtgggtttgt

SEQ ID NO: 79213 - DNA, 600 bp, Chicken  19866894369932_2
ccattctcttgggtagtagtcatggtgctgtgtggcaccagcacctgctaaccagcccacatgtgccctgtatgaatgagaacctcagtggcattcctgaaatggcatagctcatccctgagggtttgtcacattagcccacaaagtaaggctgctgagagattttgtatctgtgcatatagttaggtctggcttctagtgactaccacaaagaagtgagaggcatctttgctgtaaataccagctgaaggttgacgaagagtgagttgtttcaccaaaacktgtcagaggagacactcratcagcagaagtatttacctctcagaatactcatttctgtagtgtagccacgacctacacattttcaaaacgtattaggaggataatttctgatccacctttttcatctaccacttttattttcccttcttttacaggttcactgaatggtttttcccatgtctattctgcaaaatgccattcattcacagtcaccatagacactgtagtttatcactacgagtacaaaccacagtgagcacaattactctagaaagaagggagctctcagggtgggtttgtttgttttctttctatgag

SEQ ID NO: 79214 - DNA, 600 bp, Chicken  19866894369932_3
actcatttctgtagtgtagccacgacctacacattttcaaaacgtattaggaggataatttctgatccacctttttcatctaccacttttattttcccttcttttacaggttcactgaatggtttttcccatgtctattctgcaaaatgccattcattcacagtcaccatagacactgtagtttatcactacgagtacaaaccacagtgagcacaattactctagaaagaagggagctctcagggtgggtttgtttgttttctttctatgagtcagatatacctttgatgttggtaatamgtgggcaagtgatcaaatgaatcaaaagagaatactccatcactgtccaaaacaatttactgttgtgatttttaagatatgagaagactttatcccaatggacaagataagaataaacagatttgatttagagaaaggaaaaagataatgacagaaggagaaaggttttggtgtgcttagaaatgaagcataaaaatctagttcattatctctttaatacagaagtctgggaaaacaaggagctagattggggaaactaaatccagcaaattctctttttgttttttaagatgccctaac

SEQ ID NO: 79215 - DNA, 600 bp, Chicken  19866894369941_1
cactgagttaaatgtacaaattcttaacttgagaaatttaacaaaacaataactttatcaatcagaagaagtcaaggaagaaagatcataaattcatatttaatctagaagatatatttttccttacctgagaattgctggagttttaacaaaattcatatctaaaacttaaaatctgtgcctggaactcatctatgacttcttaatgtattttgttaaaggtagttttaatgaaatcacatttagataactgattgaaaagtaaacaggaggaagtaattctaggtacctttaatcacrttacaataccaatgttctccgaggcagagtcctcggagaagaactctcttaatcaccttcctgcttgggtaggtgggttgccatggtgaggtgatgcaaaaaaaatatccacatcctctttgaagtagtgattagccaactttaaaagacataatcattcaggtaaaaataccagtactttgcaactgcattggctctttcactgcagagcctcacatagctaaattagcacatagcattaggtttattagataggaaaattatttctgggaatgctcagtactacgaagcaaaaaaaaa

SEQ ID NO: 79216 - DNA, 600 bp, Chicken  19866894369942_1
gacaaaaggaaatgcaaggggtacctgtgctgagtgatggaaagcagggaaggtttccctgtaacgtaggtgaatgtgcccagaaagcctcccagtgctactccagacagctgcattacccacaaattaatacagcatgtctgtggaactgaatggcccaggatctattggatttgttactcactttacaactgctccgtggataactgatgaagtatcagataaagagcactttgcacagtgaaatcttattaaaaatgaaaggtgatttgagtagttcagcttgctgtgcatctatcrgagggagaagcaagaagtaaagcaacacctataatgctgtagggagcttcagaggtacagcacaactgttayacagctcagcagcacgctgaggagccaggcttcacacactgcaagacacgaggktgagcttccctttagcacagcctaaccttacagagactgcaagcaaaggctgcaaagaggacaagagttttaagaagcaacagaaaacgtctgcaatagctcaccatttgggccaactgcaaagcagagtgaacagacagcacaaaaatcagaatgaacttcaatccagctgcc

SEQ ID NO: 79217 - DNA, 600 bp, Chicken  19866894369942_2
aatgtgcccagaaagcctcccagtgctactccagacagctgcattacccacaaattaatacagcatgtctgtggaactgaatggcccaggatctattggatttgttactcactttacaactgctccgtggataactgatgaagtatcagataaagagcactttgcacagtgaaatcttattaaaaatgaaaggtgatttgagtagttcagcttgctgtgcatctatcrgagggagaagcaagaagtaaagcaacacctataatgctgtagggagcttcagaggtacagcacaactgttayacagctcagcagcacgctgaggagccaggcttcacacactgcaagacacgaggktgagcttccctttagcacagcctaaccttacagagactgcaagcaaaggctgcaaagaggacaagagttttaagaagcaacagaaaacgtctgcaatagctcaccatttgggccaactgcaaagcagagtgaacagacagcacaaaaatcagaatgaacttcaatccagctgccacccagccatgcaacacacatgcagaaccaatggagactgcaacccgcagcgtgccaggcagcacaccatgc

SEQ ID NO: 79218 - DNA, 600 bp, Chicken  19866894369942_3
ttaatacagcatgtctgtggaactgaatggcccaggatctattggatttgttactcactttacaactgctccgtggataactgatgaagtatcagataaagagcactttgcacagtgaaatcttattaaaaatgaaaggtgatttgagtagttcagcttgctgtgcatctatcrgagggagaagcaagaagtaaagcaacacctataatgctgtagggagcttcagaggtacagcacaactgttayacagctcagcagcacgctgaggagccaggcttcacacactgcaagacacgaggktgagcttccctttagcacagcctaaccttacagagactgcaagcaaaggctgcaaagaggacaagagttttaagaagcaacagaaaacgtctgcaatagctcaccatttgggccaactgcaaagcagagtgaacagacagcacaaaaatcagaatgaacttcaatccagctgccacccagccatgcaacacacatgcagaaccaatggagactgcaacccgcagcgtgccaggcagcacaccatgcagaaggagcagttccttcagagcactgatcattccttcctgtcttccttggaga

SEQ ID NO: 79219 - DNA, 600 bp, Chicken  19866894369942_4
tttagcacagcctaaccttacagagactgcaagcaaaggctgcaaagaggacaagagttttaagaagcaacagaaaacgtctgcaatagctcaccatttgggccaactgcaaagcagagtgaacagacagcacaaaaatcagaatgaacttcaatccagctgccacccagccatgcaacacacatgcagaaccaatggagactgcaacccgcagcgtgccaggcagcacaccatgcagaaggagcagttccttcagagcactgatcattccttcctgtcttccttggagagatgaccacyacagagtgaaaarcaatcrtggaatgagagtgcagtcagaaagaggggaaacaaagagctccctgggccagaattacttgcagaggatgcaaacatgcacagggggaacaacagccaaaaaagcaaacatctgagtatgtaatcaaccagtgaggtttctgcaagaaaygagaaggaagaagccaatacaatcattaaaaataatagtaattaaaagaaaccttggctcaatgcaaagtaaaaacaaaaactgatagaataaccatccctgcatggttgggaatcaaaccagagctcggt

SEQ ID NO: 79220 - DNA, 600 bp, Chicken  19866894369942_5
aaccttacagagactgcaagcaaaggctgcaaagaggacaagagttttaagaagcaacagaaaacgtctgcaatagctcaccatttgggccaactgcaaagcagagtgaacagacagcacaaaaatcagaatgaacttcaatccagctgccacccagccatgcaacacacatgcagaaccaatggagactgcaacccgcagcgtgccaggcagcacaccatgcagaaggagcagttccttcagagcactgatcattccttcctgtcttccttggagagatgaccacyacagagtgaaaarcaatcrtggaatgagagtgcagtcagaaagaggggaaacaaagagctccctgggccagaattacttgcagaggatgcaaacatgcacagggggaacaacagccaaaaaagcaaacatctgagtatgtaatcaaccagtgaggtttctgcaagaaaygagaaggaagaagccaatacaatcattaaaaataatagtaattaaaagaaaccttggctcaatgcaaagtaaaaacaaaaactgatagaataaccatccctgcatggttgggaatcaaaccagagctcggtaggaagagcaagt

SEQ ID NO: 79221 - DNA, 600 bp, Chicken  19866894369942_6
acagagactgcaagcaaaggctgcaaagaggacaagagttttaagaagcaacagaaaacgtctgcaatagctcaccatttgggccaactgcaaagcagagtgaacagacagcacaaaaatcagaatgaacttcaatccagctgccacccagccatgcaacacacatgcagaaccaatggagactgcaacccgcagcgtgccaggcagcacaccatgcagaaggagcagttccttcagagcactgatcattccttcctgtcttccttggagagatgaccacyacagagtgaaaarcaatcrtggaatgagagtgcagtcagaaagaggggaaacaaagagctccctgggccagaattacttgcagaggatgcaaacatgcacagggggaacaacagccaaaaaagcaaacatctgagtatgtaatcaaccagtgaggtttctgcaagaaaygagaaggaagaagccaatacaatcattaaaaataatagtaattaaaagaaaccttggctcaatgcaaagtaaaaacaaaaactgatagaataaccatccctgcatggttgggaatcaaaccagagctcggtaggaagagcaagtaagaag

SEQ ID NO: 79222 - DNA, 600 bp, Chicken  19866894369942_7
gccatgcaacacacatgcagaaccaatggagactgcaacccgcagcgtgccaggcagcacaccatgcagaaggagcagttccttcagagcactgatcattccttcctgtcttccttggagagatgaccacyacagagtgaaaarcaatcrtggaatgagagtgcagtcagaaagaggggaaacaaagagctccctgggccagaattacttgcagaggatgcaaacatgcacagggggaacaacagccaaaaaagcaaacatctgagtatgtaatcaaccagtgaggtttctgcaagaaaygagaaggaagaagccaatacaatcattaaaaataatagtaattaaaagaaaccttggctcaatgcaaagtaaaaacaaaaactgatagaataaccatccctgcatggttgggaatcaaaccagagctcggtaggaagagcaagtaagaagtcttccaattaattacttttcttcctttaaatgtggtcattaaaccctgctgcaggaagatggaggggaacgcacagctctgctcttctggcagtttttcccattcctgaacaattcctccttcagatgcacagccacagaggttcaaag

SEQ ID NO: 79223 - DNA, 599 bp, Chicken  19866894369953_1
  misc_feature (1)..(16): n is any nucleotide
nnnnnnnnnnnnnnnncttaactattctaggtttgtaaaaagcataagtttatagaacatctttggttaaattaggaacgtggtgattcggtatcagatgcatcttttgcttatgctcctgaattaaaaacaggcaaaacagacaatccttgtgtctccagtaaatgttaattgggttgcttttttcccattgctcagatagaagtgaaagcaactacaggcctcttcactgtgatgttcagttgtctgtattcctaagtcatgtcttctgctcatgcatgcttgaagaaacacagatgygtttatctcctagaagtttcaaaatatttgtactctatgttggagagcatctgaaatatctagtttagagtgggataaaagatagaaaaacagagttgaaaatatttcccagcccaacaacccaagatcaccttagtatcaaacatataagccctgtatacagtgtaataatacttgcagatagtactaataatatccagttttcactacacatgttaattgtctctccttccagagcctgcagtcattgtagagaaggcagagccaatgagggttactataggagatgcctgtacttt

SEQ ID NO: 79224 - DNA, 599 bp, Chicken  19866894369958_1
  misc_feature (1)..(28): n is any nucleotide
nnnnnnnnnnnnnnnnnnnnnnnnnnnntttctctctctcctacataatttaattaatacaaattgattcacaattatagggctgtatgggaatgatcaagagtttccttttatttaatctgaaaagacttggattgaaaatcccagcagaggcagccactgatacccatataaaggagcatttgtataataacagacagctggcaatgtcttgttattccctaactcccagggagaaacctaatgtcttgcagagcaccactgcagaaccatttcttcttcctacttacagttcatccrctgactcctcaacactcagctctttcctttatatgtttkgctttgcagacacaagtaagcattatgtttaaggaaatgaaagtacttaattgtggtaactagcaggtcagtgaaaccatcaggaagattaacttaaattatcttacgtgcaatttctgcatacctcccttctgttggtgtggagtaaattattgtctcgagagccattttactcattattgctttttctctgcaaagagacgcagctgtttcttctctattttgcattgtgtggtacattcaattccatttcatggatg

SEQ ID NO: 79225 - DNA, 600 bp, Chicken  19866894369958_2
cctacataatttaattaatacaaattgattcacaattatagggctgtatgggaatgatcaagagtttccttttatttaatctgaaaagacttggattgaaaatcccagcagaggcagccactgatacccatataaaggagcatttgtataataacagacagctggcaatgtcttgttattccctaactcccagggagaaacctaatgtcttgcagagcaccactgcagaaccatttcttcttcctacttacagttcatccrctgactcctcaacactcagctctttcctttatatgtttkgctttgcagacacaagtaagcattatgtttaaggaaatgaaagtacttaattgtggtaactagcaggtcagtgaaaccatcaggaagattaacttaaattatcttacgtgcaatttctgcatacctcccttctgttggtgtggagtaaattattgtctcgagagccattttactcattattgctttttctctgcaaagagacgcagctgtttcttctctattttgcattgtgtggtacattcaattccatttcatggatggctacagcactaaccttggtaccagaaagtataagatctg

SEQ ID NO: 79226 - DNA, 599 bp, Chicken  19866894369961_1
  misc_feature (1)..(93): n is any nucleotide
nnnnnnnnnnnnnnnnnnnnnnnnnnnnnnnnnnnnnnnnnnnnnnnnnnnnnnnnnnnnnnnnnnnnnnnnnnnnnnnnnnnnnnnnnnnnnacattgtggctgtaagtagacagctgcccgtatatttagaaaaaaaaaagaagaaaaaaatggctagcagctgacaaatgcagtttactgcacaaaatgaaaactgaaaaacaccaccaacaaaaaacttgatgaagttttgtggcagctatcgtggtctacagaaacaaagcaaggctcctagggagagggagcacatcttttatyggaccaagcagtactgttaggaataaaaacaaaagcagacctgcttttggatgcagatatcttgaagagcttagagggaacatctctttgatctaaaatattattattcttactccagaactgaaagcgattagaagaaagacagtgaggcaggagaagggggcaaggatctgggtttggaacaactgatattgctgaatcaaacccagcgaacttgaaaagcttttgtgcctgaatgcacatcaaacgatacaacccaagttttacatcaaagtctgtttatttttaagtgaaggcac

SEQ ID NO: 79227 - DNA, 600 bp, Chicken  19866894369967_1
ccaaagagaatttcaattctttcctcagaagattctgcaaaatatatgaaatgatcctatttttattactactattatacaaattcataatattcagcaatttaattttagatataaagaaataaaggaaagattgtaacatcaggggtcctagaaaattaagaaaaacagtcagctgaggaggataatcttctcggttaccatccatgtgatcatgaacataaaaacatgtcatcaggaaaaatactatcgctcagcataaatctctgtgacttgcaatttaaatgttctttcaaacartggtctttcacaggtctttatctcttcattcactttatccctttgatcagctctgctaagaactcttactactaagcaagcatagccactatggcaatgtgcagcaatctgtagcaaataagatcttgatgtgaccaaacaactcactggttttgaactgtcatcactaaacataaatttattaaagagcagatttctaactttgaaaaactcccactgcacacgagccaatgtaagaccgtcttgtttaaacaagctacagtatagtcagtgaagtgatcttaagtaatactttccttg

SEQ ID NO: 79228 - DNA, 600 bp, Chicken  19866894369975_1
acatctctggggcacagcaggccaaacatcagaaaaagaaaactatctgggagtgggaatgctccctgccaatggctgctaagcaggaggcagctggtaattttcaactgctggccaagcatctgctggtggacatgaaggcaaagcagatgccctggctgtgcctgctgtgccggagcagcagggcagacttctatgactgcacagcagcactaggaaaattaatttccagccactacttctgctctggccagagaacctaacccagagcctgaaggcagcagcagaaagccatgggamagcaaccgacactgctttacgcacagtcaagacaaagcaaaggaaattgttactcatttcaagcaccgaaaaggcaacagacagcactttcccaggaaggggagcacagcaggcactccggccctcaccagttcaagttctccaagctctccttgaagagagacatctcattcagggatgcgcactgtgcccgtgtgagatgacagtgagttttcattaccatgtttctcttctgcatacaaagccaaggttcttcttctcacaaatgagaaaggaaggactgccactgggagagataca

SEQ ID NO: 79229 - DNA, 600 bp, Chicken  19866894369984_1
aatggaagcttgatttgatttccatcaaggcaggttgttggaagctgtggctgccacctgagctcctgattgcaatgacaaagtgtgcgtctcccctgaagtcaaccaacatcttgttttgcacctgcagaagggatggcccaataacctgcctgcatttcatcctccttgccacagctactcagactctgtgagaggttactcaatccaggtgcttctttagctggagtggtgtctaagcataagaggcaatgtatggaaacaagcacacacatacagagctaagcaaagtatgaaagkcagttcctgaacttggctacagcagtggaaatgtgaaagttcccctgcacagatcaaaatatttactgtagaacagagtggtgtaattgatgtgaaataccagccctgggtgtattcactgctagtttcactaggataacatcaagggaaagcaagtaaaggcagcaatgattctactgttcgtgctgtttggtagttatgaaatttgtagtgatgtaatgtttcctcaaaggcaaattctgtatttcctgtaccaatcacatcaaaaccacaacttgctctccatcttcaggtatagca

SEQ ID NO: 79230 - DNA, 600 bp, Chicken  19866894369984_2
gctgtttggtagttatgaaatttgtagtgatgtaatgtttcctcaaaggcaaattctgtatttcctgtaccaatcacatcaaaaccacaacttgctctccatcttcaggtatagcagggctctgtacagactacacctcattacacccacaaacagcacttccagcccctcctgccttcctcagttggagaccctcactgcatctcactcacccctctggccagacttcccctggctattccatatcccttcccttctgtcctggagtacagctctaacttctatctctgagaagtgctsccaagcagatgaacacatcattctccctctaaggactcctgtccaacactaactatgcattaaatggggagtccaagcccttgcctgttcatccagtgtctaaagctcacaggaaaaacaacttatttttgctggcagccaccctgacatcagcttcacctctcaaaggctgtgcaggagacttgcctcacctttctaactatatcttcccacaaaaacttctggtttctgccacccacctttcccaggggctgctcttcctcaaagcccctcatgggacagagcctcttcctcatgccc

SEQ ID NO: 79231 - DNA, 600 bp, Chicken  19866894369989_1
tcatcattcatctccaaagcacatgcacaattgacatctgtatggacgaataagaccttatataaaattcagcatgtacatggccatctagctacttagcaggctatatgaatgtagaaatacgcaattcaaagatgaagattggatatttgtatatggaaacaatatatgctttcatcctactttttttcaatatttcagtagaactgcaccactagcaaattttgcctattttattataacatcacctctgtttacaatggatccaaatacttcagcatgcagttctgaaaagtctayctgtaaaactatgccatgagactgccatggggcaaggtactttttctcctgagccctgaaagcaaccaataatctgaaaatgcaatgtgcatttctcagagacagcaggaacaatgccattcaataaatttgacacaaaaataagtgtctgttgagaagtagttacttccactttaagacagatattgcataagcccagtcaggctaccagctcatttcaagcttgctgctgaatttatattgagtgctaatgatttccagctaattctaaattggagttaggagyttacaacagaaact

SEQ ID NO: 79232 - DNA, 600 bp, Chicken  19866894369989_2
tctgaaaagtctayctgtaaaactatgccatgagactgccatggggcaaggtactttttctcctgagccctgaaagcaaccaataatctgaaaatgcaatgtgcatttctcagagacagcaggaacaatgccattcaataaatttgacacaaaaataagtgtctgttgagaagtagttacttccactttaagacagatattgcataagcccagtcaggctaccagctcatttcaagcttgctgctgaatttatattgagtgctaatgatttccagctaattctaaattggagttaggagyttacaacagaaactgaccctcactgccccaatggaaaagtggaagtgaaatgattatttcaggctatttgttaggtttgaaaactcacttaatgtaccaataaatcaaacagtgaaagaagctggtattgaaagtaggtgtgtggattttggtactaagtaggtgtttcatgygagggaatggtgagtgttactacagactgaataaaatcatctgaatcctgcaaatctccaaagcagtatgacatttgggtctaactttgctatcattgctcttgcaaatattcagtaaaacagcttt

SEQ ID NO: 79233 - DNA, 482 bp, Chicken  19866894369989_3
tagttacttccactttaagacagatattgcataagcccagtcaggctaccagctcatttcaagcttgctgctgaatttatattgagtgctaatgatttccagctaattctaaattggagttaggagyttacaacagaaactgaccctcactgccccaatggaaaagtggaagtgaaatgattatttcaggctatttgttaggtttgaaaactcacttaatgtaccaataaatcaaacagtgaaagaagctggtattgaaagtaggtgtgtggattttggtactaagtaggtgtttcatgygagggaatggtgagtgttactacagactgaataaaatcatctgaatcctgcaaatctccaaagcagtatgacatttgggtctaactttgctatcattgctcttgcaaatattcagtaaaacagctttgtgtgtgtatcttctgtacaatgtaccaacataatatacgtgtaatatttggtag

SEQ ID NO: 79234 - DNA, 600 bp, Chicken  19866894369993_1
tgtgtgtgtgtgtgtgtgtgtcatatctctactttgggatttattgctctgtttagcatgaataactttgcatagatgcagttagaatatttccattatgttaaacagaaatgctgtcagtaattctcaaatgtgcatagaagttgtatccatgtagacttccaatagaagattattgccttttagatcttagtgcctagcctttaactggtgtagtgctactctgtcaatgtggtagcaaggcagttatacaaacaaacatggagctagcaatgtctgtctttgtcaagtctgaaattrcaaagtctgtcagctcagggcatgtgttaatgtaccctaaaattctttggctcaagaatggaaagaatctccaagtcttttacagacactgtggatcgttgttttttaagttaatctgcctaacagtatgagtggaactgttaatgtgaaggcacatcacagtgtaaagcaggtagcaggtatgttctggctaggcaggaatagctgccaccctgttctcccaggtattacagacacttaacaaatacaggaaatgtactttgctaaaagtaatgcagtgtggagatcaaccatactgtt

SEQ ID NO: 79235 - DNA, 599 bp, Chicken  19866894369996_1
  misc_feature (1)..(196): n is any nucleotide
nnnnnnnnnnnnnnnnnnnnnnnnnnnnnnnnnnnnnnnnnnnnnnnnnnnnnnnnnnnnnnnnnnnnnnnnnnnnnnnnnnnnnnnnnnnnnnnnnnnnnnnnnnnnnnnnnnnnnnnnnnnnnnnnnnnnnnnnnnnnnnnnnnnnnnnnnnnnnnnnnnnnnnnnnnnnnnnnnnnnnnnnnnnnnnnnnnnnacccaatttagacaagttggactaattaaaattatcagctccctctagaagctttgtccttgtaatgcacttcttaactgtaaaggagatgtgactgcgctgcmgtagttgtgaatgagaaacagtgactcccctttaaccatkggatactgttgtacaggaccctcaaaaaaaagatgtaaatgatgaaaatttttctaggcaaatatctgtatgcatcagacattctccttttagctgaaatcatgctcataaggtcaacaggataatgaaaaatggtgtgtatttgggctgatgattttaaaatgcctatagttagcttatgygggatttctgaagtactcagtagttttatgactaattttattttcctctgtactattgaaggaaagattgcaacggc

SEQ ID NO: 79236 - DNA, 599 bp, Chicken  19866894369996_2
  misc_feature (1)..(156): n is any nucleotide
nnnnnnnnnnnnnnnnnnnnnnnnnnnnnnnnnnnnnnnnnnnnnnnnnnnnnnnnnnnnnnnnnnnnnnnnnnnnnnnnnnnnnnnnnnnnnnnnnnnnnnnnnnnnnnnnnnnnnnnnnnnnnnnnnnnnnnnnnnnnnnnnnnnnnnnnnnnnacccaatttagacaagttggactaattaaaattatcagctccctctagaagctttgtccttgtaatgcacttcttaactgtaaaggagatgtgactgcgctgcmgtagttgtgaatgagaaacagtgactcccctttaaccatkggatactgttgtacaggaccctcaaaaaaaagatgtaaatgatgaaaatttttctaggcaaatatctgtatgcatcagacattctccttttagctgaaatcatgctcataaggtcaacaggataatgaaaaatggtgtgtatttgggctgatgattttaaaatgcctatagttagcttatgygggatttctgaagtactcagtagttttatgactaattttattttcctctgtactattgaaggaaagattgcaacggcactcctgaatagcaaagagctacacgcaaagtaatgtgat

SEQ ID NO: 79237 - DNA, 600 bp, Chicken  19866894369996_3
taaaattatcagctccctctagaagctttgtccttgtaatgcacttcttaactgtaaaggagatgtgactgcgctgcmgtagttgtgaatgagaaacagtgactcccctttaaccatkggatactgttgtacaggaccctcaaaaaaaagatgtaaatgatgaaaatttttctaggcaaatatctgtatgcatcagacattctccttttagctgaaatcatgctcataaggtcaacaggataatgaaaaatggtgtgtatttgggctgatgattttaaaatgcctatagttagcttatgygggatttctgaagtactcagtagttttatgactaattttattttcctctgtactattgaaggaaagattgcaacggcactcctgaatagcaaagagctacacgcaaagtaatgtgatactgttgttttttcctggatgaataaaccaactctaatgttataactgccacctgcccagccaaaatgtcaatagtacacagcaacactcagagcagttaggattgaagtgggcagaaatggtaaaacatgatagaataggcaactgttgtttagcatcataagaagggaatttgtttttgaa

SEQ ID NO: 79238 - DNA, 600 bp, Chicken  19866894370001_1
tcagcaattcaaggttttggtttttttttagcattttttccttttttttttttttaaatgcaagaaaggcatttactaaaacaaacaaacaaacaaaaaaaaaaccaccccaaaacattaaaaatattaacaagacattatctgagataacattaagacggccctgtgctcactgctaacctaccctatcattacatgtgccacgaagtgagattttagtgcatcaatttaggggaaaaaaaaaagcatgacaagataaattcgatcatttctggtagatattcataagcagttaacacmggtttcttgggtttggagaattattccttctctttctcttccttttcctttttttaaatttttctcttctgtcccaccgttttgtgctcttcacctgaaatgaacggaacgcccaaaacttagccaaacccactggagaagcccttttcgcggtctctactgccaccgcgtggccaaagtgcggaactgcacccgtgctgtgacggccggaagcggtggtagcggctttaggaggcggtggtgaatcggaaaagttcctggagcgctctgtgcgcgctggtcccccagaacccccctctg

SEQ ID NO: 79239 - DNA, 600 bp, Chicken  19866894370002_1
aatatttttcttctctgtcaatttaagcgtatagttgaaactctcacttttactcgaattacctagctgaattatggcattgtgttggactccctgcatcaatgttttaattttaaacaatcagggtactacagtcacttccattctgtgacaaaataaatctccctggatttagaggcactacaagttcttcagtcatggttttgtaaaactgggcagcagtgtctcttaccgtgttatttcatacccacaaacaggaaaacaaaaccaggaagcatggccaaggaactttggcaggarttttattttaggagacacttatactgtgtcacgtaccataagcttcagtgaaaaacaaaacaaaaataccacaaaaaagtagtaaagcaaaaacatataaaaatacttccagaaaagaaatcacattgcaatccgtgagttaagtgaactttaggcatagcttattctccctgttcatggatgcaatattttgattttcagctgtattctgtgaatttctaaggcaaatcaggacagcaggacaggactgaatgcaraagttaactgaggtctgacaactggagatgagcaaccgaagat

SEQ ID NO: 79240 - DNA, 600 bp, Chicken  19866894370002_2
gcgtatagttgaaactctcacttttactcgaattacctagctgaattatggcattgtgttggactccctgcatcaatgttttaattttaaacaatcagggtactacagtcacttccattctgtgacaaaataaatctccctggatttagaggcactacaagttcttcagtcatggttttgtaaaactgggcagcagtgtctcttaccgtgttatttcatacccacaaacaggaaaacaaaaccaggaagcatggccaaggaactttggcaggarttttattttaggagacacttatactrtgtcacgtaccataagcttcagtgaaaaacaaaacaaaaataccacaaaaaagtagtaaagcaaaaacatataaaaatacttccagaaaagaaatcacattgcaatccgtgagttaagtgaactttaggcatagcttattctccctgttcatggatgcaatattttgattttcagctgtattctgtgaatttctaaggcaaatcaggacagcaggacaggactgaatgcaraagttaactgaggtctgacaactggagatgagcaaccgaagatcagtacagaaggcaaaccccaaataa

SEQ ID NO: 79241 - DNA, 600 bp, Chicken  19866894370002_3
gaaaacaaaaccaggaagcatggccaaggaactttggcaggarttttattttaggagacacttatactgtgtcacgtaccataagcttcagtgaaaaacaaaacaaaaataccacaaaaaagtagtaaagcaaaaacatataaaaatacttccagaaaagaaatcacattgcaatccgtgagttaagtgaactttaggcatagcttattctccctgttcatggatgcaatattttgattttcagctgtattctgtgaatttctaaggcaaatcaggacagcaggacaggactgaatgcaraagttaactgaggtctgacaactggagatgagcaaccgaagatcagtacagaaggcaaaccccaaataattcagacatcagatgatttcagctggagcagtcatggaagggatgacagaaataaaggctcagatgtctgtcagcctcacagaggtcatgggaaaaggtgacagaagtaaagactcaaagttctgtcagcatcacagagggcattttaaataaaaaggtctgttgggcatgctgaccctatctgcagaatcttcttctagttttcaatcagaatggactaaatgaaagcaa

SEQ ID NO: 79242 - DNA, 599 bp, Chicken  19866894370003_1
  misc_feature (1)..(197): n is any nucleotide
nnnnnnnnnnnnnnnnnnnnnnnnnnnnnnnnnnnnnnnnnnnnnnnnnnnnnnnnnnnnnnnnnnnnnnnnnnnnnnnnnnnnnnnnnnnnnnnnnnnnnnnnnnnnnnnnnnnnnnnnnnnnnnnnnnnnnnnnnnnnnnnnnnnnnnnnnnnnnnnnnnnnnnnnnnnnnnnnnnnnnnnnnnnnnnnnnnnnntggccttgagggcctccagggatggggcaccacagcttctctgggcagctgtgccagcacctcactgccctctgagtaaagaatttattcctagcatctaacytaaatcttttattttagtttaaagccattcccccatgtcctaccactatcagactgtgcaaaaagtcagtctcccttccgtttataagcctcctttaaataccggaaggcctcagtgtggtctccccagagccttctcttctccaggctaaacaagctcagctccctcaatctttctttataacagagatgctccagccccctgatcatcctcgtggcactgtggacacactcccaacaactcacatctttcttttgttggaggctgggactgggtacagtactcccaggtactcatga

SEQ ID NO: 79243 - DNA, 600 bp, Chicken  19866894370026_1
gtttactctataccagtacaaatgggattgcatgaaacattaaataatgggtgattaaagtagttgttccaaaaatttcagcagaagcccaacaactacttgacaatattgattatgctctgctgttaagcaatgaattatagaatatctttagctggaagaaggaagacaaagatcatcaagttcaacccctggcacgacacaggaccacccaaaatccaaaccctatgtccaagtgtgctgttcaaatgctctttgagctctggcagcttggggctgtacccactgcccagcagagcyggttccgtgcccaccgcccactggtgaagcaccttttcctaatacccagcctgatcttcccctgatgcaggtgacagggaatgaagaaaagatgaagaaaagaatctgtatccataaaaaaaggttttgcttagatacagtgtcaaaatctttcagaaatagtagcacagactgtatttctttctcaggacacaatcatccatcagtttgcccctaaaatggcttaatttaaatctgtttcataactttaaaaggaaagacagctgaggttttcccattttcagtagcattaaagaaaaa

SEQ ID NO: 79244 - DNA, 600 bp, Chicken  19866894370032_1
acaaacatgagtaggtatgctagccaaaacgtgtctttatttttaagagagaaataccaacagctgaacactacatatctctttccatcaccgactccagtcagccaaaatcacgttgggcagcagcgcaagctccgtgtcacagccaaagtgctttgtgatacccagacttctgaaagtttgtaccaaaatgtttatcattttgctttctagcaaatctgcctgtgattcaatttgattaagtgctcccagatgggctctgcagtaacagtttagattacagcccaagcttttcaattwaagttttatttttcttctagccttggctaagaggattaaacttgccmtgtactcttctactaaaaacaagagacattcacagctgatgtctgaatctctcctcaaagtgctataaagctgtgaaggattacccctgctgaaaaatgctgctaacacatactgtcaggcacagaacagataacccttgccggactaagaaacagaactacatgacttccccttcctcacacttcagttaggcaccggtaaatgacagatgacaagtctgacactgagagtgatcattgtttaaagtgtaat

SEQ ID NO: 79245 - DNA, 600 bp, Chicken  19866894370032_2
agagaaataccaacagctgaacactacatatctctttccatcaccgactccagtcagccaaaatcacgttgggcagcagcgcaagctccgtgtcacagccaaagtgctttgtgatacccagacttctgaaagtttgtaccaaaatgtttatcattttgctttctagcaaatctgcctgtgattcaatttgattaagtgctcccagatgggctctgcagtaacagtttagattacagcccaagcttttcaattwaagttttatttttcttctagccttggctaagaggattaaacttgccmtgtactcttctactaaaaacaagagacattcacagctgatgtctgaatctctcctcaaagtgctataaagctgtgaaggattacccctgctgaaaaatgctgctaacacatactgtcaggcacagaacagataacccttgccggactaagaaacagaactacatgacttccccttcctcacacttcagttaggcaccggtaaatgacagatgacaagtctgacactgagagtgatcattgtttaaagtgtaatggaaagtgttttgaaatgttagcaaaaaaatatatatatatatatcc

SEQ ID NO: 79246 - DNA, 600 bp, Chicken  19866894370033_1
ctggaaaacctggtgactaatctaaatagatttccaggcaggggaaaaaaaaaaaacaccacccagctcttgtttctagttctctgcactattaggaggatgacaaagacaagcagaatgtgaaaaaactgtgactccagtgaccttcatggctttgtcctggaaaggtcaagagtaatcagcaaaactttaactagagctaaaattcagctttgtcatccttagaggctggtgaaattaaataatctgttcttatgctctgtaagcagctacagtaattggttgtgctttccagcattsgctatgaagatgtattgacatgagctgaaattcgtagagatggtatttacatgatacgcagcagcctacaaccagatcccgatttcagcttatagtgctgaaaagtcacactcacattccttaaaatgagatcataccaggatacgagcacatacctgaatatctagcgtggggccctgcagtttgtcatgctgcaatctaaggttaaacacattttatttgaaaaaattcctatgagactgaaaagcatgaggcagtcaaagtatgcagaaataagtcatgtgaaaaaataatagagtg

SEQ ID NO: 79247 - DNA, 480 bp, Chicken  19866894370038_1
ccagcccttttggccgtgattccaatcagcagagctgctgcagcaggacccgagcaaggctggggcagatccatcacccgcccgtcgctgcctttccaagttcctccttccaaacctctcccctgaccttgagctcatctggcagtaagtgtggctctgctcaaacccttctctctgcttgagtaatgatgcagaggctcccgaggttttgctgatgcaaagcacccctgagctgccccatctccacattgccacctctacagggttacagagaatcaagcctgcagcaagacttctgcragccagatgtgcatgctttgctctctcccctgcccacttggtctgccagtgcacgcatcagacagcctctgtcaggtctggtttattatctcactgtctgctgtaccgacacgttaaggactgcggggatgtggtgctgagggatgagggcagtgagcacggtgtgggggcaagagggtg

SEQ ID NO: 79248 - DNA, 600 bp, Chicken  19866894370039_1
aaaaggaaggaaaaaaaaaaaaaaaaaccaccagaatttgaattttccacctcgaggtcaggataaaactcttcagaactgggaatccggcctcaaaaagaggagtgaacattccagaagcattgaggaatggttggaggagatctcctggcaaaccatccctggggataaaggaatggaagagagatagcagtgctttaagaacgtgtgtctgagggtacaggagctctccaacccccagcataagaaatcaggcaggaaaccagtgtggctgaacaaggacctgctggtcagactgarggatgagaagaaaaagtcaggatgggatgaagcttggaaagggatgtaaaagggaaacatcactcctgtttttaggaaagggagaagggatgagcccccacagctacagactgatgagcccgatcctcctggaagagatgttaaagcacatgaagggtgagcaagtgatatgagatggccagcatggctttgccaagggaaggttgtgcctggctcacgtggtggccttctgtgatggagtgatggcattggtggatgaagggaaggcaacagatgtcactaccggrattgcaccaggcc

SEQ ID NO: 79249 - DNA, 600 bp, Chicken  19866894370039_2
tggtcagactgarggatgagaagaaaaagtcaggatgggatgaagcttggaaagggatgtaaaagggaaacatcactcctgtttttaggaaagggagaagggatgagcccccacagctacagactgatgagcccgatcctcctggaagagatgttaaagcacatgaagggtgagcaagtgatatgagatggccagcatggctttgccaagggaaggttgtgcctggctcacgtggtggccttctgtgatggagtgatggcattggtggatgaagggaaggcaacagatgtcactaccggrattgcaccaggcctttgacatggtcctgcagcacatccttgtctctaaatcagataggtatgggtttgaatggttggctactcagtggataaggattcggttggatggttgcagccagagggctgccctgagctgcaccaaaaggtggggggcagaagggagagggttggcccctctgctctgccctcatgaggccccatctggagtgctccatccagacctggggcccccagcacgagaaggtttgtggggctgttggagtgagtccaaaggaaggcacaagggtggtcagagggctgg

SEQ ID NO: 79250 - DNA, 600 bp, Chicken  19866894370046_1
ggaggtggcgcgtgcgcagagcggcggtcgaggcgggtgcggggcggcggtcgcacgtgcggcgccgggcagcagttggaggcggcggttgcggtgagggggaatgaggccggggatcgccgcccgcggagcgacggctgtggagggaggaaaggtctcggaggcgcggcggtgccgctgaggggactccgagtgggcagacactggggtgcagcagcaggaaagggagggcgtaggggaaagccgaaccgcgaggctgttaaaccggggagataagagctggaatgcttctttcaaatrgtgacagcggggatctccttgtctcgccaggggaggaaagagatcggccccaccgcatagcagctgctgaccctcaccgccatggtcgtcttcacgtgtaacgcgtgcggggaatccgtgaagaaagcacaggttgaaaagcacgtgaacatctgcagacactgtgagtgcctctcctgcatggactgtgggaaggatttctggtaggtaaatgatggcaagtggccctgtttgctcctcagcggttgtcccaaatcaaaggttctccttctgtgtgtgagagttaactttggcaattaa

SEQ ID NO: 79251 - DNA, 600 bp, Chicken  19866894370047_1
tttgcacataaccttaagaaaagtatcatgcttcccactgctatagatctttccatctaaggagttcagaagagcttttcaaatatgaatgcactgcacatcacacagcccctgtggttgtgagaagtgctggtatcccttagcagtaggccaccaggcaaacagcatgactttctcaagactacacaatgagcttagatagacgtatgccttggtcatgaggtaattttttctctgttctcaagtatctcaagaatcaatcctgacaagtctcaggaacagtaattgttcaaacactaygcttttattaaaagcatcatttaataaagaaaaacgtgtccattctcaaggaatttggaattaaataatttccatgtcctccccctactcttcccataagcaacatgaaaaaaaatgaaaaaggagaaggaagagtaaaatggaaactacaacacacaatcactaaaaagctaaataagttaaaaagtcacacatttttcaccacacttttaaagcatgcagtgaatgttagttacttaagttaagttagttacttaataagaattttgctaacatttgaccaactcacttgctagtcct

SEQ ID NO: 79252 - DNA, 599 bp, Chicken  19866894370052_1
  misc_feature (1)..(29): n is any nucleotide
nnnnnnnnnnnnnnnnnnnnnnnnnnnnnaaagataatgctgatccagatacttagcatatgatctacatctctttggttatttattctcaatagaattattgtgatacacttctaaagcctttaatgtatcataagactgtcacagccccttcatttacataattaaggcaattatagccattacaattaaatacaacaccgtattaatggtctgaaccatatttaagcttctagctttataatccataaatgctggttggcatagagcaaaagaagataaggaacatatcctaaaaaraagcatgctcttatgactgcctaacatagttttatagagattgttgtgcagcacaggctaaactttcctaacaatttggatgtttgggggacctctaataccgagatcactcatcaaatgtttaatgacctacataaaaattaataattatcaaacagaagattaaacagcattaatgatcttctttcattatgatggcctgcctatctctttattaaaattgcagcagcactcacaaacartatagttggttacaaacccacaggataacacagtgaaattaaaacctttgccttcct

SEQ ID NO: 79253 - DNA, 600 bp, Chicken  19866894370052_2
aatccataaatgctggttggcatagagcaaaagaagataaggaacatatcctaaaaaraagcatgctcttatgactgcctaacatagttttatagagattgttgtgcagcacaggctaaactttcctaacaatttggatgtttgggggacctctaataccgagatcactcatcaaatgtttaatgacctacataaaaattaataattatcaaacagaagattaaacagcattaatgatcttctttcattatgatggcctgcctatctctttattaaaattgcagcagcactcacaaacartatagttggttacaaacccacaggataacacagtgaaattaaaacctttgccttcctcaaggcattcaccatgagatttccccttttaatttatacaatgaaaaaagaggaaggaaagttaaaaaaaaaaaaatcaacaagacttttgtaacagatcagtttaaaggaatctataaagatgttttcctttgtgaaaagcatatgaacagagcatagcttattttaaacagaaaaaaaaagcaactctgaatgactaattactcatcctgcacataataagtctttacctgaaaagctcca

SEQ ID NO: 79254 - DNA, 600 bp, Chicken  19866894370054_1
tataatctagggtacatgctcactttttattcaggaagcccagctcgctgtaatgaaaaatgtcaggctcctttaataaaagaacaatttgaaaacttgatatatcacaaaaccattaattttagctattatctgtttgacacttttcatagcaacgatttcactctgtaacatgcttcccgaggattaaaatgattttaaaggattaaaatgttaattaaaaatataatagaaatatcaatcgctgagaagaccaacataagtatttgtctccttaactgtataatcacaccgccgcgstttcctcctggctctttacagtttggagctccagtgcgcgaggaggtggtaaatgacagatccaggagcaattctgctctttaactatttgacaatgcatctgtttacacttcacaaaggcagcgttatgtccttgaaatttctaaaggtcattgttaatgggatcaattttttttttcttctttttttttttttttttcccttgtgccaactgtgtctttcttagctcgtaagagcgctgttccccgcgaggggctggagggggtgggagcaggcaggtccggcgaattccatgtgacc

SEQ ID NO: 79255 - DNA, 600 bp, Chicken  19866894370055_1
cacactgttctcagctgtcctaacccttgatctctcctcacatcctctgtgaccacgggcttaagcttccttttccatcagaaagacacccaagatgagaagtggcatcaggttctccacaagtaatggggtcaacagcagaggggatgctgagctgctccctccaggagcacactttgcacctttccactctgagctttgatgtggctggctttgtctccctttctctgcaccaatggtcccacaaacacactgtcttgcacaaggaccacatcatgggcacaagaagtgttacaggcrgtcccagagctgtccatgaggtgataaggagagagatatctctccatgctggccctgttctgatggataaacctccttaaatgtctgccatgtatycgtgttacaaattgcagcactggccttctaggtgatttttccagtgccatggagctggtgtgctcttagacctacactgtgtgttcagagcaaagaggttctctgggacatggtttagtgggcaatactggtgatagtggacggctggacttgttgatcttagaggtcttttctagccttaatgattctatggttctgtgattc

SEQ ID NO: 79256 - DNA, 600 bp, Chicken  19866894370055_2
gagaagtggcatcaggttctccacaagtaatggggtcaacagcagaggggatgctgagctgctccctccaggagcacactttgcacctttccactctgagctttgatgtggctggctttgtctccctttctctgcaccaatggtcccacaaacacactgtcttgcacaaggaccacatcatgggcacaagaagtgttacaggcrgtcccagagctgtccatgaggtgataaggagagagatatctctccatgctggccctgttctgatggataaacctccttaaatgtctgccatgtatycgtgttacaaattgcagcactggccttctaggtgatttttccagtgccatggagctggtgtgctcttagacctacactgtgtgttcagagcaaagaggttctctgggacatggtttagtgggcaatactggtgatagtggacggctggacttgttgatcttagaggtcttttctagccttaatgattctatggttctgtgattcaaatatcttccagtgtttggggtttggtttggtaaaaaaaaaattacactccggtttggaaagtgatgtatcagaaatagaaatgctgcaatggaa

SEQ ID NO: 79257 - DNA, 600 bp, Chicken  19866894370064_1
ttgtataaagatatgtttttcttcaaatttgtatgagaacatcactttgatgacattactgaagctccacacttttttatttaatgataacaagggtcacatctgggaagggatgttgctgctcatatctttggaataaaaaataacagaccttgaaagtgacctttgtaattcatgctgctaaactgaggattagccttcattccttttcaatttccaacactttcttttagctgccaccgtattttctaaagaacataaaaccaaagttacagagttgatcttttcaatgaaaagaaytctctttattaagttctaacattacgtaagaagtgactacctatacctgtttgtcctgaatagatagatctgaatttatctgaaaagagcaagtaatatagtctgacaaaaaggtgcgcagtgcattcagtttttggtggggtagtctaactggttgaagtgtaacactattgtcgctattgaaaggtctgcttatttacactcatttatttcatgtgaagtgtcagaaaacattttcactaaacatgtgagaaaagtcctgtattttttaatcagttccattcaagatcttagttttga

SEQ ID NO: 79258 - DNA, 600 bp, Chicken  19866894370072_1
ataattttttaaaggtcagcaggataccttaactgtctaaatgtcatggttaaagcaaaaacaacctctaaagtgactgatcaagtaaagaaaattgtccttaacattcagttactttcagtatacacatcaatgttgctggcacgttctcttctcatgtgaatggcaacagacatttggtagtttcaagccatggcagataatacagatctgtatgccttcgactcatgaatgtactatattactacgagactaaataattatactgctaaagtgagatttgaagtaaaatgatcttamaaaaacttctcactacaattttagcccttcatgctacaaattgtcatattcatggttatcactaacattattcaattcattaacatcagtgtcattattaatatatattttgtagacaacggcaagattaggttgcttatttcctttttaaaaaaaataaaaaacatacgatagcattattaagcatcaaacattttaaaaaaaacaaccaaacattttgtgtcattaaactacacccttcatctaaagtcagaatttaaattgatgattatcaaattagctttaggatgtttcaagctc

SEQ ID NO: 79259 - DNA, 600 bp, Chicken  19866894370073_1
gctcccacccaggactccagtgttactccatgctcaccagaaacatagctgtgcacctttatcactagtcagaacaaaggtaagttatctttaaatgataataaatcagctcagaaagtgtatggcatcaatacacacagcctatagaactcagcaatgattaaaaaaaaccttaccatccattccacaagagataaacaaaaggaactgacaagaacagagcacacctgcaccattcacagagtaatgagaagttccatagattgtctttcctggaatggtagcactggttataaaccsaaagtcccaccacacacaagaaaaagcaataacaaacacaacgctgaggaagtaagcatcttatgaattatgtacaaaggacacatagagaacagctctcagctgatatgaaatggcttttcacttggtctcagagcagacaatctcatggaaaattctgctattgacaaaactggcaacgcaatcaggaaaatcccctgctgcctgctaaaagaacagatacgcagctattagagctcaccacatacaaagcgagaagtgacagctagcctttgcttaccttgcagcagcctgagacca

SEQ ID NO: 79260 - DNA, 600 bp, Chicken  19866894370074_1
tgctgataagaggctgtatctcatcacaggatcagccatcttcccagcaggggcagggtctggaaaaatacctttgggaaaactaatgcttccctatgcatgtctcagatttttcctggactttgtgttgaaataaagcaaacaaaagaggattaaatgtaaggtatttcaaaccaaattagaatgtaataaaaaaaatcccacccccgctttggcctcttctcagtccttggcatgaaatccaaagaaagaaacggaaaacagagctgcagtgcctttggagccgtaggacatgcatcrcatgcatcactcagacttacaggaagatttctgcctcaggaagagtgggcagaaaacccagagctctgctaaggtgagaagtaaaggcaggttatcaatgaacccgttgggctttgtgtgctctgcgtcagcaagcaaagaggagaagaaagtcccacagttgcatgaagccatcctgcagcccagctctccttgaggctttggggttggggtgctgtgtgatggctaagctgagttccaggacccccagggtccctgggaccactgtgccaggagaagtgcacactgcagcatccttcc

SEQ ID NO: 79261 - DNA, 600 bp, Chicken  19866894370089_1
ctgctgtttgctgtcctccttttgtggggcataccctcaaggacaaaaaagcctggtggtactgtgctcatcaggagcaggggcaaacccgggatccattcagctttgaccacattacctgtcccgctgtgccagactaatatatcacagctcccatgctcttggaagttgtgtgtgtcctcgaggctcatctctggaagaacatttctgtatgacccaggtttctcattggctgcaggagtccccggcttatgtacttggtttcttttctacccccagaggtctaatctctgctattgytgggcaaagaagagcactagggtcagcatggtttatgtacaagctgtttcttctcctcctgctctgctacagttgctgagggcaagtcagtgtaagcagggcttgttgcctctctcccaggtgtgcaggaagggtgctgtgctctctgagctaaccctggagaggggaggcyaagagaggcacacacrtgggtcatggagaggctggtgagtgcggagagaagagttttagattgcagcaatggctgttgcagaaggctgctctccctcctctggaccttgctgccgcattgccttcctg

SEQ ID NO: 79262 - DNA, 600 bp, Chicken  19866894370089_2
gtgtgtcctcgaggctcatctctggaagaacatttctgtatgacccaggtttctcattggctgcaggagtccccggcttatgtacttggtttcttttctacccccagaggtctaatctctgctattgytgggcaaagaagagcactagggtcagcatggtttatgtacaagctgtttcttctcctcctgctctgctacagttgctgagggcaagtcagtgtaagcagggcttgttgcctctctcccaggtgtgcaggaagggtgctgtgctctctgagctaaccctggagaggggaggcyaagagaggcacacacrtgggtcatggagaggctggtgagtgcggagagaagagttttagattgcagcaatggctgttgcagaaggctgctctccctcctctggaccttgctgccgcattgccttcctggagaaggagatgctctagggaagaaggcctgttgggggagaaagctaaggagggagaatgaggtgtgtggagaagggcaggagaagtgagaagtgaggctctgggagcagagtgggccaaagcttttcaaattaggaggtaagtgtggggcaggaagattccaggagatgct

SEQ ID NO: 79263 - DNA, 600 bp, Chicken  19866894370089_3
catctctggaagaacatttctgtatgacccaggtttctcattggctgcaggagtccccggcttatgtacttggtttcttttctacccccagaggtctaatctctgctattgytgggcaaagaagagcactagggtcagcatggtttatgtacaagctgtttcttctcctcctgctctgctacagttgctgagggcaagtcagtgtaagcagggcttgttgcctctctcccaggtgtgcaggaagggtgctgtgctctctgagctaaccctggagaggggaggcyaagagaggcacacacrtgggtcatggagaggctggtgagtgcggagagaagagttttagattgcagcaatggctgttgcagaaggctgctctccctcctctggaccttgctgccgcattgccttcctggagaaggagatgctctagggaagaaggcctgttgggggagaaagctaaggagggagaatgaggtgtgtggagaagggcaggagaagtgagaagtgaggctctgggagcagagtgggccaaagcttttcaaattaggaggtaagtgtggggcaggaagattccaggagatgctgctccctggagcatct

SEQ ID NO: 79264 - DNA, 600 bp, Chicken  19866894370093_1
aaagaaacactttcagtaataatgaatgagatcttttttaactgaagttttcattttctgcataaatcagattctaagagttaattcttgtttcaaatacatcaatttgtatttagtcagataatgaaaacagattttgactaaagctgtcaaagagtccattgcatggacttctgaagtggttcaatgttttaagttctctgacaagtctacacagttgtgttaaattatataaagttttcagacatttttaccaatttaactgtcccactttgcacttttattcgtcaggcaaatttytcattgtctgaaataaaattatctcctacaactattatttttttattaaaagaactgcactcttgtagtctttctcacaagccagtaatgttatcgaaagttaaagttatggttgtgggtttgcctttttacatattaaaaartcagattaactctcctctgaaaatttgtcatcacaactcacattcacctgttatctattacaatgtcttagccaataaggtttatttgtttcttcctaccagaaacataactcattttcattcactacacacttttgtaatagtctaagaggtaatg

SEQ ID NO: 79265 - DNA, 600 bp, Chicken  19866894370093_2
aagctgtcaaagagtccattgcatggacttctgaagtggttcaatgttttaagttctctgacaagtctacacagttgtgttaaattatataaagttttcagacatttttaccaatttaactgtcccactttgcacttttattcgtcaggcaaatttytcattgtctgaaataaaattatctcctacaactattatttttttattaaaagaactgcactcttgtagtctttctcacaagccagtaatgttatcgaaagttaaagttatggttgtgggtttgcctttttacatattaaaaartcagattaactctcctctgaaaatttgtcatcacaactcacattcacctgttatctattacaatgtcttagccaataaggtttatttgtttcttcctaccagaaacataactcattttcattcactacacacttttgtaatagtctaagaggtaatgtatcattttggttatttacacaagatgataggaacagttatttggcccactctgtgcagaaccaggcagaaggctagaagtgatagacaggaaaaagggctytaatgctctctccatgacaagtttttttagcagtacaaaca

SEQ ID NO: 79266 - DNA, 600 bp, Chicken  19866894370093_3
aaagttatggttgtgggtttgcctttttacatattaaaaartcagattaactctcctctgaaaatttgtcatcacaactcacattcacctgttatctattacaatgtcttagccaataaggtttatttgtttcttcctaccagaaacataactcattttcattcactacacacttttgtaatagtctaagaggtaatgtatcattttggttatttacacaagatgataggaacagttatttggcccactctgtgcagaaccaggcagaaggctagaagtgatagacaggaaaaagggctytaatgctctctccatgacaagtttttttagcagtacaaacaaaactgtaaattctaatctataatgtctgtgaaaagtaaatggattacatgaagtaggaatgggaaagaaatgatggcagcagatgttactccagaatgtaaatgagaaggtgatgggaagaaaaggcagggaaggaatcctgagacaaaaccaagggagatctcttcaaatccacattgcatgatatgggagagagcactgctatgtacagtgctaagagtactacgcaatttcagagtaactctactgtattggaaa

SEQ ID NO: 79267 - DNA, 599 bp, Chicken  19866894370097_1
  misc_feature (1)..(65): n is any nucleotide
nnnnnnnnnnnnnnnnnnnnnnnnnnnnnnnnnnnnnnnnnnnnnnnnnnnnnnnnnnnnnnnnngttcgatgctgtttgagtctgttctatattttctggagtagatctgaaacttaaagaaaataaatcttctcatgccagagagcaaatatttcccagatcgtttttgtttaacaagaggagaccgtgttactttttgacatttaatggtactaaaggaaacttgatctatgtgtggcaagtgaatgtgggagtgtgtgtacagcctgccaaagttgtagaggtgcaagagcacagyatcagaactgagaagggggtacattactaaaacagtgaggcagtagggagggacgtgatcctgtctttttatttgcacctttaattggttctggcattggcttcccgccacgctatgttctgacctcgtctgatgagcagtcagctccatctgaatcaacaagatgcggtgattcagttctgctgtgctgcagtagcatcagtggtgtctaccacccacctctttcttttgagaatgccccatggggttgtattactactttgtgccgttcttcaaatacctgtatcattaacattgta

SEQ ID NO: 79268 - DNA, 600 bp, Chicken  19866894370106_1
ccattgatctctgagaaaattccagatatagcaaagaacaaaaaactagggcacagatgaaaagcaaacctttttcccactcgtgactcatggtgttaacacataagcaggcctatttcctactctggggaaggcagctaaagtatatttgtactgctttctcatttgcattactagtttccaccaaatatgttaatgcgctttatagaatagtatatagctctgctgcttaaactacatttacagaaatttaccattgctaatttagaaacaatatagtataatgtatatgcattcccytttaaaacagcaacaaaaagatactttgccttgctatttttattccttcattgaagcacttataatagcaaagttaggacattttcctttccttttaattttctctattttcaaaagctttttaccaacactgattgtattttcagaattctctactgctaaaagaaatggcatagaagcagacttattcaagttcagcaattaaaagtcttactcatacgctcagtgcatgcttgaaaacatcacattgctcttttgtactgatgtaagaaagcatttataacaaactcctgtatccga

SEQ ID NO: 79269 - DNA, 599 bp, Chicken  19866894370107_1
  misc_feature (1)..(3): n is any nucleotide
nnnttgtgaccttaaatccttctcctgtaggatggagggggaatatttgttgcttgagctgctgaaggtgggtgatgggtttttttttttaaaaaaaaacaaaacaaaaacaaaaaacaaaaccttaaactcttcctttgggaagaacgtagagcaaaacagcactttggtacaccctctgtagaacatgcagactcaacagtatcccacattaatgctgagtctgtgctggctggaaggtagcatggagcgtgcagctcatgttgatgagatgtcataaagtatgggagctggcatgarttttatgagcagattcgtctggcctagctcattaaaatagcattaattggacagccaggcaattttcacaatggcagtaaaagtttcctttcttggaaaaactgctcagagtgctccagagactgaagcagcataatgggccgtatgatgtgcatagcaggaggtagtttctcgtgttgtatggcaacatgtgatttcctctagaagcgaatgatgtactgagatgcacataggaatctctgagcttagcttaaaaccatgtcagatggccctgttctctggctgaggaggtgctggga

SEQ ID NO: 79270 - DNA, 600 bp, Chicken  19866894370109_1
gcatgctgtaagtctgcatagctgggattccatagagtagtgcagtagttgggacagaaaaggtacagcctgtaatatctcagtgggtcatgcccctgtgacaaaggacaaaggagtggaattacagatcctgcaactcctagctagaggtgcagttctaaaccaaactaaatgccttggggggttaaaattaaaccaccgtaaacccacaatttcagctgcaagggcaaatatgttttctgaatacctgaagttctgctgcgggaagaatacgactgtactgggagtgaaggactctcracagacttsccttgacagccttacttgagtatcctgtggtaaagtgatggctatgatgctgcaccctctccacactgtggcagaatgcagcccttataagaacatacaaagagaaaaagagaaaagcaaaagtctcatgggagatggggggatatcctgtaacataaaactgcattggataaagtattcaaaagagtttgataggaaaagaccaaataggacctaataatattctcttaatgaggcaatttaactgcctgtaattctgtcctatgcattgtgctctcccagcacagaagt

SEQ ID NO: 79271 - DNA, 600 bp, Chicken  19866894370109_2
aagtctgcatagctgggattccatagagtagtgcagtagttgggacagaaaaggtacagcctgtaatatctcagtgggtcatgcccctgtgacaaaggacaaaggagtggaattacagatcctgcaactcctagctagaggtgcagttctaaaccaaactaaatgccttggggggttaaaattaaaccaccgtaaacccacaatttcagctgcaagggcaaatatgttttctgaatacctgaagttctgctgcgggaagaatacgactgtactgggagtgaaggactctcracagacttsccttgacagccttacttgagtatcctgtggtaaagtgatggctatgatgctgcaccctctccacactgtggcagaatgcagcccttataagaacatacaaagagaaaaagagaaaagcaaaagtctcatgggagatggggggatatcctgtaacataaaactgcattggataaagtattcaaaagagtttgataggaaaagaccaaataggacctaataatattctcttaatgaggcaatttaactgcctgtaattctgtcctatgcattgtgctctcccagcacagaagttcaaagagt

SEQ ID NO: 79272 - DNA, 600 bp, Chicken  19866894370109_3
gctctcccagcacagaagttcaaagagttgtcacaacaggccatcaaaggagagtttttataatgagtggtgtttcttagggactcagtatggggcagatgtgctgaggagagcaggaaagagaaaaatagagggtacactgaaaaactggtcatcaaactccatagtcactgagccatattgctggttagtgtgaggcggcactaaaatcagtagagcatttccaaacactctggtcagtttttgtttaagagtggatacacttcaaattcagtttgacatctttactaaagggacttyagagggtttcacctgtttggttcccccgtgagcaactgcttccctgctgctagaggaaaataaagctttcccagcacatctcaaagggaaggcctggattcaattaactggcagagaaaatgcttttctctctctctctttccttaagacagtggctgtccttacttgtgaaggtcacccgcagcatgttcttcaggggaaaggtagaaagcaggggaagctcacgctgtggcagctgccaccttggtaacctccacaaatacaaacatcaattgtgcagagaacggtaactgttttaaa

SEQ ID NO: 79273 - DNA, 600 bp, Chicken  19866894370111_1
taaatatttttattttaaggagcagtaagtattctcatctattaaggaaagctgcatgcaaatagtaatattgtaaatcttttgtaagcatgtcattgctgaattaacagctatgtaataaaacagaaaccatgttttgcattattaaagaacaaatgaatgagattatgcagcactaatgactgcatcattgaactaggttattttatgttttgtgttatatatgtttacatatatatttgttaacaaaaaatgtttagagggtaaaaagtttattgattgtccttccagttcaaaaaygtggaaaactcctgatggtgtggtattttttgcatgtgtacagctagatgattaaaatatcaaattaggacatttccttcctaaacagaaaataaatgaacatgaatggctccagatgtttgtaccataaaattcaaatatatttaaaagaggaaaatctaactcattcttaagtttggaccaaatgcttggaagattactgtttgcagtcttttccactatttttctagaactaatgatagacacttatcaaacacaaattcatctctgtgttccttcaatctgtcttctaatatttga

SEQ ID NO: 79274 - DNA, 599 bp, Chicken  19866894370117_1
  misc_feature (1)..(40): n is any nucleotide
nnnnnnnnnnnnnnnnnnnnnnnnnnnnnnnnnnnnnnnntgtttgcttggaagaaaaggaggaggtaacgagctaaagctcaaatgtcacccttcccatcccattcacaggatttctaaagccaatggcagcttggaaattacactgttagcagtagctacgggctgctagccctagagaatgttgccttcttcttggcataccatcaggtttgcccagcagcatcccttatgttgccaggggcttccatgggttcaggcagcacaggtcagggatgggggtcaggagcagaagcatayatccccatcacctcctgtcttggaacatcggtgctccagctcctttctccagggaagagttggagccccttgctctgcagcttgatttcacagcacagttggcacctgggcagatgcttccagaggagatttacgtctgccgctgtgcactacctaagcactccctgctgcatgtagtgaagattttctcctatcgattctcctaggcaggcaacagcaagaacacgggaagcagaaagcacatctttaaacttccccaagctgcctcctggacagacaatccctttaagtgaagcacg

SEQ ID NO: 79275 - DNA, 600 bp, Chicken  19866894370119_1
ctaggtaactgcaccgggaccggagcaatgagaagatgtcacaaacagagtaatgctcacccgtctctgaagagctaggctcgcggaagaactccacagaggagggatcgcctggaagagatccttcctcggtggcagtcagcccttaaatgaggtttaagaggggtggagcccggctccatgccttcccttccctcaggtgaatcgccctcacctgtgctccccagcctgacctggcctcttcttccaggtgcccaatcagcggttctggccctgacttggcagatcccttgcagtcasgcaamtgttagtgcttacaacacgagccatgcagagcacagagacgcaccggccttgagaggtcagacggagctgcttcccggagaaaagcggaattgcttgtctttctcagtacgcccccccagagcggagatcccgcaaacatcgctagcctagcaaagcgcaagggaacgagacaaacgaaatccggggaagaaaactgagctcgccgggtggtaccgccggggaagatggctgtggggacggacgggctgacaagcttcttgactgttctgcttttaactgtagtctgatcgagta

SEQ ID NO: 79276 - DNA, 600 bp, Chicken  19866894370119_2
taactgcaccgggaccggagcaatgagaagatgtcacaaacagagtaatgctcacccgtctctgaagagctaggctcgcggaagaactccacagaggagggatcgcctggaagagatccttcctcggtggcagtcagcccttaaatgaggtttaagaggggtggagcccggctccatgccttcccttccctcaggtgaatcgccctcacctgtgctccccagcctgacctggcctcttcttccaggtgcccaatcagcggttctggccctgacttggcagatcccttgcagtcasgcaamtgttagtgcttacaacacgagccatgcagagcacagagacgcaccggccttgagaggtcagacggagctgcttcccggagaaaagcggaattgcttgtctttctcagtacgcccccccagagcggagatcccgcaaacatcgctagcctagcaaagcgcaagggaacgagacaaacgaaatccggggaagaaaactgagctcgccgggtggtaccgccggggaagatggctgtggggacggacgggctgacaagcttcttgactgttctgcttttaactgtagtctgatcgagtaaracc

SEQ ID NO: 79277 - DNA, 600 bp, Chicken  19866894370119_3
aamtgttagtgcttacaacacgagccatgcagagcacagagacgcaccggccttgagaggtcagacggagctgcttcccggagaaaagcggaattgcttgtctttctcagtacgcccccccagagcggagatcccgcaaacatcgctagcctagcaaagcgcaagggaacgagacaaacgaaatccggggaagaaaactgagctcgccgggtggtaccgccggggaagatggctgtggggacggacgggctgacaagcttcttgactgttctgcttttaactgtagtctgatcgagtaaraccgtcaaccgtaagagcacaggcctgaactcgctgtctagcttgccgaaccctcttttcaattagttccgctaagagaaaaggcataatctgaggccccgcttaaaaaagttgcgggaagaatttgctgggttcccagatggggctatcacctacctctgagaagaaatggaattgccttatcctcaggaactaactagcttccaaccaatccgatctccagacgtaaacccgcaactgcagtactccaactcagagtatttcactaattttcctaagaagaaaaatatctaggaaaac

SEQ ID NO: 79278 - DNA, 600 bp, Chicken  19866894370119_4
gctcaacgagctttttgcatccctcttcattggcagactggctttctgtagcagtcatgttccggaagtcctgtgcaagatttgtgggagcaaaatccctcccagtgtgaaacaagagcaagcctgtgactacccaatgacagtgaacatgcttacgcccatagagccttatagcacgcatcctagagtcccaaagagaccacccacagcaatggccacactgctctccatcacatttggtacatcatagtcatgaggcagctgtgacttgaagagcatcacacacccatttttaagaascttgaaatggaccgttaaataaaaaaaaaaaaagcagacctgctagagcgggtccaaaagaaggccacaaacatgagcaaagggctgcagcacacttcctatccaaaaaagatgaggaaattagggtttgtttttcatagtgaagacaaggcctcactgtgggcttgaagcacttgaatagagactataaacaggaggaataccagctttcagggctatctgggtaatgctagaacacaactgaaagaacagcaataatagcagggtggcagagtcctaggctgcagcaaaggaggacaa

SEQ ID NO: 79279 - DNA, 600 bp, Chicken  19866894370119_5
cctcttcattggcagactggctttctgtagcagtcatgttccggaagtcctgtgcaagatttgtgggagcaaaatccctcccagtgtgaaacaagagcaagcctgtgactacccaatgacagtgaacatgcttacgcccatagagccttatagcacgcatcctagagtcccaaagagaccacccacagcaatggccacactgctctccatcacatttggtacatcatagtcatgaggcagctgtgacttgaagagcatcacacacccatttttaagaascttgaaatggaccgttaaatsaaaaaaaaaaaagcagacctgctagagcgggtccaaaagaaggccacaaacatgagcaaagggctgcagcacacttcctatccaaaaaagatgaggaaattagggtttgtttttcatagtgaagacaaggcctcactgtgggcttgaagcacttgaatagagactataaacaggaggaataccagctttcagggctatctgggtaatgctagaacacaactgaaagaacagcaataatagcagggtggcagagtcctaggctgcagcaaaggaggacaaaccaaacacaggagctgccac

SEQ ID NO: 79280 - DNA, 599 bp, Chicken  19866894370120_1
  misc_feature (1)..(114): n is any nucleotide
nnnnnnnnnnnnnnnnnnnnnnnnnnnnnnnnnnnnnnnnnnnnnnnnnnnnnnnnnnnnnnnnnnnnnnnnnnnnnnnnnnnnnnnnnnnnnnnnnnnnnnnnnnnnnnnnnncgatgactgacaacatagcacagcaaaaggaatgtttcaaaactggagctgcttccacagtttgcttgtacacactttcttaaatgcaatcccagtataactacactgagtctgataaattcactggaaattaattaaccctccccctccccccccacttttttttttgagagttgatcccgcaartctttctgtaatgaactctattccattcgtattcaaacacatgcacaagtatatagtgcttatgaagggtgcctgaatcactgttctggaaaatgaattcttctccttacccgcaaaccagcacagcacaaacagagggtgtgtgtgcttccccactccaccccatctctatgtctcatccatgacctagaggggcaacctctagctaggcatcagcgggtggctcgctctctgtgcttatttaatcctcggccaacctgctaaggctgccaatcagggtgccaattgtggtggtggtt

SEQ ID NO: 79281 - DNA, 599 bp, Chicken  19866894370136_1
  misc_feature (1)..(48): n is any nucleotide
nnnnnnnnnnnnnnnnnnnnnnnnnnnnnnnnnnnnnnnnnnnnnnnnacagaagccagtagcaacagaatggctggaaaaagtagcaccttaaaaagtaaaagtactgatgaaagtcagcacaaatgacagcagccctgcactgagcatgtgagagaaggtgtcccttcagcccccaggtccacacctggtgaacagaaaacgactggggcaatgtagaggtcacatctgttttccagagagcctcagttatgtgctaatcattactcacatctatggggaaataaatgctgaaaagcyattccctttttaatggaaagtatgtggaaaccacacttcctaaaaggcttctttagtggctagaaaaaaagtgttatcacaattatggttatggattgtaaaatattccactgacactgcatcaagaaataatggtgctgccactcaggagaggctgcagaaaccacagggggaagaggatgttgtgatgtagaggttttccctcagcaagaagacaaagcttcaggcctgccagagagggaccagagcaaagcattcaaggycaggatgtggatgtgtctctgggcagcctggtctgg

SEQ ID NO: 79282 - DNA, 600 bp, Chicken  19866894370136_2
ttactcacatctatggggaaataaatgctgaaaagcyattccctttttaatggaaagtatgtggaaaccacacttcctaaaaggcttctttagtggctagaaaaaaagtgttatcacaattatggttatggattgtaaaatattccactgacactgcatcaagaaataatggtgctgccactcaggagaggctgcagaaaccacagggggaagaggatgttgtgatgtagaggttttccctcagcaagaagacaaagcttcaggcctgccagagagggaccagagcaaagcattcaaggycaggatgtggatgtgtctctgggcagcctggtctggtggttggcaaccctgcacatgggggggtgaaactagatgagcattttgatccttttcaacccaggccattctatgattttatgaaagcagcgcatgaggagtgttatggtcaagcagctagtacagtgtaacatctcatgctattttatctcgtttgacagcctttttagaacttttgcaattctaaaccagggatatgcacttcagttcctggctgtcgaagtctctttatcagttcacttccttgaacagctgcttaatgtt

SEQ ID NO: 79283 - DNA, 600 bp, Chicken  19866894370141_1
ttttaagggaaggcatcaatgtaaccggtcagtaaatgtgcaaatctgtagttgctcttagaagctgggaagagttaaccattcaagctctgacggggtaagtaacatcgcgcttatagaaaactaaccgtagtagcgaagaaagccaaaaaaacaatctgtaaagggcgaaaagtgggaacgtggcgatcgagtgttactaataggcgcagagggctctaacgtggccgtcccgcaacgatacttaaaggcgaccacaggagaggacccagagcggggcgagcacgcctcggacttagmagcgtgttttaacaaagcccaagttctgttcagccatcagcggccggctaacactcgcttagcccacaaagggtgtcgatcgcggtcctcgcgaggcggctttccaccttagcgagcggccattaagggaggaacttctgctccaactttgcggcagcagttgcgctcccggagcagcgcagcccggccgctcaggtgaacgcgctcaggcgctgcgcgcgggcccggggagcgcgcagaggcagcgcagctcctcgctttgcacaaaccagatgacgaaaactttacaatagaaagttt

SEQ ID NO: 79284 - DNA, 600 bp, Chicken  19866894370152_1
tgcaacatgatctggagcctaagctggtgccagccgtggccttggaaggagtggcaacacacagcactgctacctgctttggctgtaatggggtagagctgaccactctgttctgcagagccaccatctctatggtgctagttcatttagtgcagtgttccacagaaattcacttgagatgtgattaatttcagtggctgtattgtccatgattggaaaagtgcattttggatatatctgtacagcatatgtgctgaaataaaaaactttgggtaccagcagcagcacagtgcagcacaygagatactaactccagaagagaccacccctgacagtatttaagagascactggacmctgtactgaggaatgtacgatggaactttgtaagtgaattcrgtcattggatttgatgatcttgaaggtcttttccaacctagatgattccattaatctatgttaaaaaaaaaaaaagtgtagaagtccaggaacagctgcaccctgtgatctccaaagtccatgggagtatacaaccttcatggtcctgactccccctggaagggacttgctaaccctcgctctctcccaccttagctagctg

SEQ ID NO: 79285 - DNA, 600 bp, Chicken  19866894370152_2
ggagtggcaacacacagcactgctacctgctttggctgtaatggggtagagctgaccactctgttctgcagagccaccatctctatggtgctagttcatttagtgcagtgttccacagaaattcacttgagatgtgattaatttcagtggctgtattgtccatgattggaaaagtgcattttggatatatctgtacagcatatgtgctgaaataaaaaactttgggtaccagcagcagcacagtgcagcacaygagatactaactccagaagagaccacccctgacagtatttaagagascactggacmctgtactgaggaatgtacgatggaactttgtaagtgaattcrgtcattggatttgatgatcttgaaggtcttttccaacctagatgattccattaatctatgttaaaaaaaaaaaaagtgtagaagtccaggaacagctgcaccctgtgatctccaaagtccatgggagtatacaaccttcatggtcctgactccccctggaagggacttgctaaccctcgctctctcccaccttagctagctgtgtaaccaggacagcagcacttggtggctggcttgacagaagatgca

SEQ ID NO: 79286 - DNA, 600 bp, Chicken  19866894370152_3
acacacagcactgctacctgctttggctgtaatggggtagagctgaccactctgttctgcagagccaccatctctatggtgctagttcatttagtgcagtgttccacagaaattcacttgagatgtgattaatttcagtggctgtattgtccatgattggaaaagtgcattttggatatatctgtacagcatatgtgctgaaataaaaaactttgggtaccagcagcagcacagtgcagcacaygagatactaactccagaagagaccacccctgacagtatttaagagascactggacmctgtactgaggaatgtacgatggaactttgtaagtgaattcrgtcattggatttgatgatcttgaaggtcttttccaacctagatgattccattaatctatgttaaaaaaaaaaaaagtgtagaagtccaggaacagctgcaccctgtgatctccaaagtccatgggagtatacaaccttcatggtcctgactccccctggaagggacttgctaaccctcgctctctcccaccttagctagctgtgtaaccaggacagcagcacttggtggctggcttgacagaagatgcaggaggtaat

SEQ ID NO: 79287 - DNA, 600 bp, Chicken  19866894370152_4
ctgaccactctgttctgcagagccaccatctctatggtgctagttcatttagtgcagtgttccacagaaattcacttgagatgtgattaatttcagtggctgtattgtccatgattggaaaagtgcattttggatatatctgtacagcatatgtgctgaaataaaaaactttgggtaccagcagcagcacagtgcagcacaygagatactaactccagaagagaccacccctgacagtatttaagagascactggacmctgtactgaggaatgtacgatggaactttgtaagtgaattcrgtcattggatttgatgatcttgaaggtcttttccaacctagatgattccattaatctatgttaaaaaaaaaaaaagtgtagaagtccaggaacagctgcaccctgtgatctccaaagtccatgggagtatacaaccttcatggtcctgactccccctggaagggacttgctaaccctcgctctctcccaccttagctagctgtgtaaccaggacagcagcacttggtggctggcttgacagaagatgcaggaggtaatgtagggactgagatgtgacatttgtactatgtctggaataca

SEQ ID NO: 79288 - DNA, 600 bp, Chicken  19866894370152_5
tcctgactccccctggaagggacttgctaaccctcgctctctcccaccttagctagctgtgtaaccaggacagcagcacttggtggctggcttgacagaagatgcaggaggtaatgtagggactgagatgtgacatttgtactatgtctggaatacagatataaagatcaagaagtgagaaacatgcaacagacaagaaaagcgtggtatgggaacagagaacaagcttcaagagacagaatgaaagttatttcaaagacgattatttctattgctattttatctttgtgagatactcarcgaaacggagcctgacattttagaatatgttcctcatgctgtgacactaatgattggcagggtattcagctgactactttcagtctattagaccttggaagcatctgagactattttaagaggcttgctgtagcatgtaaatgtgaaactctacatgtgatgacgcgcttcacttatgaaatggtgaactagccctgagaaattatttgattactgtggtttgtgccaaataataattgatcagtgaaagactgttctctctgatgaactatcgcttgctccagcatgcttctgtagcat

SEQ ID NO: 79289 - DNA, 600 bp, Chicken  19866894370156_1
ccaaaaatattttgtttgcccacattaaaaatcagatgtgtttgtgtagctcacgtagcaaatcaagacagaagtagaactctggctcactgaatagcttgcagaacaatgtgcttggcactgcacatgctaagacaaagcagagatcctgaaaaacaagagcaacctgtctacactgaatatcacagcagattctcttcactctatagctaggctggtgagatttgcaggacagaagggccagccattcccttcacctctgcttagtgccagacatgcttcctaaaaatccattctctsaccaccccattatgcagccagcacagcacttgagggtgtactgcacaaaagcctgtaatgcctagaatgatgctagataatcagagaatcatagaatggcctgggttaaaaaggaccacaatgatcatcgagtttcaacccccctgctatgtgcagggtcgccaaccaccagaccaggctgcccagagccacatccagcctggccttgaatgcctccagggatggggcatccacagcctccttgggcaacctgttccagtgcgtcaccactctctgtgtgaaaaacttcctcctaatatc

SEQ ID NO: 79290 - DNA, 600 bp, Chicken  19866894370161_1
tgaggcaaaggctgcactgaagatacaatctttctgctaatgggctgaggttggagacccttcctaaccgatgagaccccgaaagccacctgttttctggagcagtgttgtctccttcaaccctttttctggctccttagtaagctgcagcttgcatgtgtttgcagaagggctggagtcagcaaaccataagctaagctcggtgtctacatagggagcttttatgaaaaccagagctctagcaggaggcagctgagatcttcagcattttctccagtggggtatgctgagctcaggacrgatgaggagcaagtggtggtttgcttcccatcctgaactcttttccttacatactccacgtgtcaaagccagctttttcctctggcaaaagaggagcaaagtagaaggaaatttctgctctggacaggggagagcaagtttggggagatcaggggactgcaaggcagaggccacatgtgtaagtaagtgacagagagtctttactcattagaagaacagtggggtctgaagtccatgcagaaactctaacagtgaatgacctgatattgctgcagaggtctttacctctctcacttcttc

SEQ ID NO: 79291 - DNA, 600 bp, Chicken  19866894370161_2
gcagaggccacatgtgtaagtaagtgacagagagtctttactcattagaagaacagtggggtctgaagtccatgcagaaactctaacagtgaatgacctgatattgctgcagaggtctttacctctctcacttcttcatttgatccctggtcattcccagactatcagtgtttgtgtactgggcttgtttccccaggccttttatcattcctatgctgctagggtctgaaagcacttgtttggctgatctgggggctgatctgccaagcagagagggcctcgtgcagcccaggcctgggractgcctcctttttccactggctgcagctacagtgccttctgcattcagtcacacaggtgagaagcccttccagtgtatcgtgtgtggccgagccttcgcccagaagtccaatgtgaagaaacacatgcagacccataaagtgtggcctccgggactgggatgcaccatctcccgcaactccatcacggtgcaggtcatggccttgaaccccaaccaggtggaggatgaggagaacacaggtttgctgcctggggatggtgtgttctaggggcagagcagtgatgggagggctctgcaca

SEQ ID NO: 79292 - DNA, 600 bp, Chicken  19866894370172_1
aatctgcagctgctccaggctattcataccatacgagatcccatcaggccttctttattgttgcagttttggcaaattattttcttatcacacacaacctattcacttctgttcctggataagcacttaggctcataaagccgtgggtcagcaacagtttagcatagagcacatggaacgtctgaccttggggactgctggtgtctgcccctccaaaaagcagcaactggagtcaataaaaaactggccaggatggtccattagcgagcccagctctgtcactgctcgcttggattactyggtggctgtgcagtctcctcctcctcctgccattgtgtctcaccttatgaaattcaatcacccctccttccgtgggaaagtgggatctgtggctggctgtctcycctaagaggcccattttcctaagggaagaaaagtacctatctatgttcatatatggctatatccactgcacgcatggtcatgcccaaggaacgtgcaatatagattagatcagcagcagtgctgcactgtctccaggccaggcaatgagtttattgtgcccagcacacatgtgcactggacaaatgctctggcatc

SEQ ID NO: 79293 - DNA, 600 bp, Chicken  19866894370172_2
acttctgttcctggataagcacttaggctcataaagccgtgggtcagcaacagtttagcatagagcacatggaacgtctgaccttggggactgctggtgtctgcccctccaaaaagcagcaactggagtcaataaaaaactggccaggatggtccattagcgagcccagctctgtcactgctcgcttggattactyggtggctgtgcagtctcctcctcctcctgccattgtgtctcaccttatgaaattcaatcacccctccttccgtgggaaagtgggatctgtggctggctgtctcycctaagaggcccattttcctaagggaagaaaagtacctatctatgttcatatatggctatatccactgcacgcatggtcatgcccaaggaacgtgcaatatagattagatcagcagcagtgctgcactgtctccaggccaggcaatgagtttattgtgcccagcacacatgtgcactggacaaatgctctggcatcttcagcgtgggcagagagcatgctgctcctattataycagcccattagggaagcaatttgaagaaaaatatttagcaatttggaaggaagcaaggttccagaat

SEQ ID NO: 79294 - DNA, 536 bp, Chicken  19866894370172_3
tctcaccttatgaaattcaatcacccctccttccgtgggaaagtgggatctgtggctggctgtctcycctaagaggcccattttcctaagggaagaaaagtacctatctatgttcatatatggctatatccactgcacgcatggtcatgcccaaggaacgtgcaatatagattagatcagcagcagtgctgcactgtctccaggccaggcaatgagtttattgtgcccagcacacatgtgcactggacaaatgctctggcatcttcagcgtgggcagagagcatgctgctcctattataycagcccattagggaagcaatttgaagaaaaatatttagcaatttggaaggaagcaaggttccagaatggcttgtttctgtgtgacagcctgccatgtacagatgaaagggaaggcttataacaaattttcattacccgcaaatataaaaaagagcaacagcaagcagagcaagtgctttcaggcagagaggtgggccacaaatccccccaggagactacaaaggagcctcagcaaa

SEQ ID NO: 79295 - DNA, 600 bp, Chicken  19866894370176_1
acgcatataggaacgtgtgggttttgctccctgacccagaatcatgctgttatataaagcctgggattatcaataacctcacattacaaaccagcttctgttcaactcattaaaggattgtgtctctgcctgttctgactcatttagcctctttgtcattctttgtgttaatgaagatagcaattcattactctccactagctgaaacacccataggttaacgcagttttcccttcagaaacaattgctttacaacggcattgcggcagcttgctttgtgcctgcaaagtaggtgccagkccagccaacaaccagatattccaacctcaaatgcttgctcctgaaattatggctagatgtatccaaagaacycagacctgggttaaaccagcacacttccacagctctcggtgcaagcgtggttccctggctttatcacgtacgacattacatcaccrccgtacaatgaaacatataatcaaaaacccagaagctgactctctctaggggttttggaagaaccaatttttaggaataagaaactcagatgtgacttggtttctttaggatttagattgaattgaaacaacacatctgtaa

SEQ ID NO: 79296 - DNA, 600 bp, Chicken  19866894370176_2
ataacctcacattacaaaccagcttctgttcaactcattaaaggattgtgtctctgcctgttctgactcatttagcctctttgtcattctttgtgttaatgaagatagcaattcattactctccactagctgaaacacccataggttaacgcagttttcccttcagaaacaattgctttacaacggcattgcggcagcttgctttgtgcctgcaaagtaggtgccagkccagccaacaaccagatattccaacctcaaatgcttgctcctgaaattatggctagatgtatccaaagaacycagacctgggttaaaccagcacacttccacagctctcggtgcaagcgtggttccctggctttatcacgtacgacattacatcaccrccgtacaatgaaacatataatcaaaaacccagaagctgactctctctaggggttttggaagaaccaatttttaggaataagaaactcagatgtgacttggtttctttaggatttagattgaattgaaacaacacatctgtaagtatgttcacattattgtcctcttcttctttaaagacagtttgaccaggacaaagggattagtaaaaattct

SEQ ID NO: 79297 - DNA, 600 bp, Chicken  19866894370176_3
ttctttgtgttaatgaagatagcaattcattactctccactagctgaaacacccataggttaacgcagttttcccttcagaaacaattgctttacaacggcattgcggcagcttgctttgtgcctgcaaagtaggtgccagkccagccaacaaccagatattccaacctcaaatgcttgctcctgaaattatggctagatgtatccaaagaacycagacctgggttaaaccagcacacttccacagctctcggtgcaagcgtggttccctggctttatcacgtacgacattacatcaccrccgtacaatgaaacatataatcaaaaacccagaagctgactctctctaggggttttggaagaaccaatttttaggaataagaaactcagatgtgacttggtttctttaggatttagattgaattgaaacaacacatctgtaagtatgttcacattattgtcctcttcttctttaaagacagtttgaccaggacaaagggattagtaaaaattctgaaagactccttccttggaaaccaggaattggcagttctggttcttctgactctcagctcttgtgcaacctgctgccttgcctagg

SEQ ID NO: 79298 - DNA, 599 bp, Chicken  19866894370183_1
  misc_feature (1)..(105): n is any nucleotide
nnnnnnnnnnnnnnnnnnnnnnnnnnnnnnnnnnnnnnnnnnnnnnnnnnnnnnnnnnnnnnnnnnnnnnnnnnnnnnnnnnnnnnnnnnnnnnnnnnnnnnnnnattgaaaagtcttccagtttttttctcaatgccagtattttagatggctctcttgctatacacctgtcctggttttgttttatttttctttcttttttacccacctgttacctgaagcattatctgagtgcttcagctgtaatacgattgtagctgaaaagcaagaggttgctcagtagatgagatcacggaggkggcgtaagatccctgtrtatgttatatacccttggtgactgagttgccattaacccttaattttcaaggagagtcactttcaaaagagccaactcctttttccacctctgtcttgtgcctttcctgaagctgattgtgcttggttgttgtggtggcagtgagtgacagcttggctctcagaggcataaagaacctgaacagaatgctgtgtttcgtagcctgctgctgggatgctctgaggaacttcacttctttccatactgatggcatcttctttgctgacatcaacttgtatgtgg

SEQ ID NO: 79299 - DNA, 599 bp, Chicken  19866894370183_2
  misc_feature (1)..(88): n is any nucleotide
nnnnnnnnnnnnnnnnnnnnnnnnnnnnnnnnnnnnnnnnnnnnnnnnnnnnnnnnnnnnnnnnnnnnnnnnnnnnnnnnnnnnnnnnattgaaaagtcttccagtttttttctcaatgccagtattttagatggctctcttgctatacacctgtcctggttttgttttatttttctttcttttttacccacctgttacctgaagcattatctgagtgcttcagctgtaatacgattgtagctgaaaagcaagaggttgctcagtagatgagatcacggaggkggcgtaagatccctgtrtatgttatatacccttggtgactgagttgccattaacccttaattttcaaggagagtcactttcaaaagagccaactcctttttccacctctgtcttgtgcctttcctgaagctgattgtgcttggttgttgtggtggcagtgagtgacagcttggctctcagaggcataaagaacctgaacagaatgctgtgtttcgtagcctgctgctgggatgctctgaggaacttcacttctttccatactgatggcatcttctttgctgacatcaacttgtatgtgggcaagtgtctgatgtag

SEQ ID NO: 79300 - DNA, 412 bp, Chicken  19866894370183_3
ccctgtgcaagagtatggccagagctgcacaaacaacgtaactctacagggtgtctaaactgctattagtgatctattccctgccccaaaccagctccattaatttttggtctgcagcactactttcaaattggcaaaaatcagtgtgtgtttaacaaagaaactttcctgttatctctgctctgacaatgactggcagcacaaatttttatgtgccaaataatattgattatttcataacataaaatttgcctgtcctccctgctcccactgccatcagttatcttttcaaatcactgygttttaagtcacaaaagaaaaarccttccatagaatcaattatcagtcctattgcatgatggaaggagctccaacaaatatagttgagggagaataccatggtattgtgggt

SEQ ID NO: 79301 - DNA, 389 bp, Chicken  19866894370183_4
gctgcacaaacaacgtaactctacagggtgtctaaactgctattagtgatctattccctgccccaaaccagctccattaatttttggtctgcagcactactttcaaattggcaaaaatcagtgtgtgtttaacaaagaaactttcctgttatctctgctctgacaatgactggcagcacaaatttttatgtgccaaataatattgattatttcataacataaaatttgcctgtcctccctgctcccactgccatcagttatcttttcaaatcactgygttttaagtcacaaaagaaaaarccttccatagaatcaattatcagtcctattgcatgatggaaggagctccaacaaatatagttgagggagaataccatggtattgtgggt

SEQ ID NO: 79302 - DNA, 599 bp, Chicken  19866894370184_1
  misc_feature (1)..(2): n is any nucleotide
nnattcttatctccccctgttggataattccaagctggttcctgccagtaaaacatgccaacaaagcatactgcatactgcacgtgtacatgttagggaagaaataaaagagtccatatcaattgctacagctacagattctctaatgaagaataaggaggtgtttgtaaaacgagacctcttttcctctttctaccccaccgctggcaccacccagcatggtgaagctctactcccagcttctttgcctacaatatctgcatctctggcaagatcaggtgcttagagaagtacaaaagraaaaccagcagggaagggaggggggctctgctcctaaaatctaacaatgtagtcagaggaggtaarytctctgaacatggcttccaaatggcctcattggttcattcttgtggttttagcttgaaaayggttgtcactgcactcagagctgaacagctgtataccaaatgctccaaatgcctcaaattagcaacccaagagcacccatcagaaaagaaccattctgctggcactcaagaatgtcaggcttttatgacatctccttctttactctgtcctcattcaacctcacattgttt

SEQ ID NO: 79303 - DNA, 600 bp, Chicken  19866894370184_2
catactgcatactgcacgtgtacatgttagggaagaaataaaagagtccatatcaattgctacagctacagattctctaatgaagaataaggaggtgtttgtaaaacgagacctcttttcctctttctaccccaccgctggcaccacccagcatggtgaagctctactcccagcttctttgcctacaatatctgcatctctggcaagatcaggtgcttagagaagtacaaaagraaaaccagcagggaagggaggggggctctgctcctaaaatctaacaatgtagtcagaggaggtaarytctctgaacatggcttccaaatggcctcattggttcattcttgtggttttagcttgaaaayggttgtcactgcactcagagctgaacagctgtataccaaatgctccaaatgcctcaaattagcaacccaagagcacccatcagaaaagaaccattctgctggcactcaagaatgtcaggcttttatgacatctccttctttactctgtcctcattcaacctcacattgtttcccaggcagggcatatcttctgaattagagctagatctattattgggaaaatatggagactgtagta

SEQ ID NO: 79304 - DNA, 600 bp, Chicken  19866894370184_3
atactgcatactgcacgtgtacatgttagggaagaaataaaagagtccatatcaattgctacagctacagattctctaatgaagaataaggaggtgtttgtaaaacgagacctcttttcctctttctaccccaccgctggcaccacccagcatggtgaagctctactcccagcttctttgcctacaatatctgcatctctggcaagatcaggtgcttagagaagtacaaaagraaaaccagcagggaagggaggggggctctgctcctaaaatctaacaatgtagtcagaggaggtaarytctctgaacatggcttccaaatggcctcattggttcattcttgtggttttagcttgaaaayggttgtcactgcactcagagctgaacagctgtataccaaatgctccaaatgcctcaaattagcaacccaagagcacccatcagaaaagaaccattctgctggcactcaagaatgtcaggcttttatgacatctccttctttactctgtcctcattcaacctcacattgtttcccaggcagggcatatcttctgaattagagctagatctattattgggaaaatatggagactgtagtaa

SEQ ID NO: 79305 - DNA, 600 bp, Chicken  19866894370184_4
cagctacagattctctaatgaagaataaggaggtgtttgtaaaacgagacctcttttcctctttctaccccaccgctggcaccacccagcatggtgaagctctactcccagcttctttgcctacaatatctgcatctctggcaagatcaggtgcttagagaagtacaaaagraaaaccagcagggaagggaggggggctctgctcctaaaatctaacaatgtagtcagaggaggtaarytctctgaacatggcttccaaatggcctcattggttcattcttgtggttttagcttgaaaayggttgtcactgcactcagagctgaacagctgtataccaaatgctccaaatgcctcaaattagcaacccaagagcacccatcagaaaagaaccattctgctggcactcaagaatgtcaggcttttatgacatctccttctttactctgtcctcattcaacctcacattgtttcccaggcagggcatatcttctgaattagagctagatctattattgggaaaatatggagactgtagtaattgtactagcttgtgtaaccttcgcttaagttggatggatctcactcctttagcattaaga

SEQ ID NO: 79306 - DNA, 600 bp, Chicken  19866894370188_1
gttggcttttgaatagcaaagcagagactagtaaagacttaagaggtgaactggtgaaaccttaataactaactaaataaatatattaattaggctagaattattaagttaaaggtagaaaggatgaaactgttgccatgtttgctccttcttagaaaggagaaagcagaggcttctttcagtgctcctgctgactttaaaggtcatttccctgctgtgagaaatgctcgacagccgtgctggcacttccagcatcctgtagctgattgctgctgttctgtgcagtttgcatttaatccygtgcacctacacagcctgcctggcttacagatgtagtgctgctttgcatgtgtgtgtgtgcagtctggttgttatattaattttttggaaaggccagcacagctcccaccatgacaaaattgtgttgactgctggtactgccagggactgttaaaatgtcggagagctgccaggagcccttgctgctttccaggggactggtggagaagtgacctttttcttttgaatttgaatttctggatgagggagagaygtgaggctttggctgaacgccttggccacttgcccgtccatcgttgc

SEQ ID NO: 79307 - DNA, 600 bp, Chicken  19866894370188_2
actggtgaaaccttaataactaactaaataaatatattaattaggctagaattattaagttaaaggtagaaaggatgaaactgttgccatgtttgctccttcttagaaaggagaaagcagaggcttctttcagtgctcctgctgactttaaaggtcatttccctgctgtgagaaatgctcgacagccgtgctggcacttccagcatcctgtagctgattgctgctgttctgtgcagtttgcatttaatccygtgcacctacacagcctgcctggcttacagatgtagtgctgctttgcaygtgtgtgtgtgcagtctggttgttatattaattttttggaaaggccagcacagctcccaccatgacaaaattgtgttgactgctggtactgccagggactgttaaaatgtcggagagctgccaggagcccttgctgctttccaggggactggtggagaagtgacctttttcttttgaatttgaatttctggatgagggagagaygtgaggctttggctgaacgccttggccacttgcccgtccatcgttgcatttggactttgctagtgctggctgccaagggcccaaaggagctgggag

SEQ ID NO: 79308 - DNA, 600 bp, Chicken  19866894370188_3
ctggtgaaaccttaataactaactaaataaatatattaattaggctagaattattaagttaaaggtagaaaggatgaaactgttgccatgtttgctccttcttagaaaggagaaagcagaggcttctttcagtgctcctgctgactttaaaggtcatttccctgctgtgagaaatgctcgacagccgtgctggcacttccagcatcctgtagctgattgctgctgttctgtgcagtttgcatttaatccygtgcacctacacagcctgcctggcttacagatgtagtgctgctttgcatytgtgtgtgtgcagtctggttgttatattaattttttggaaaggccagcacagctcccaccatgacaaaattgtgttgactgctggtactgccagggactgttaaaatgtcggagagctgccaggagcccttgctgctttccaggggactggtggagaagtgacctttttcttttgaatttgaatttctggatgagggagagaygtgaggctttggctgaacgccttggccacttgcccgtccatcgttgcatttggactttgctagtgctggctgccaagggcccaaaggagctgggagg

SEQ ID NO: 79309 - DNA, 600 bp, Chicken  19866894370188_4
atcctgtagctgattgctgctgttctgtgcagtttgcatttaatccygtgcacctacacagcctgcctggcttacagatgtagtgctgctttgcatgtgtgtgtgtgcagtctggttgttatattaattttttggaaaggccagcacagctcccaccatgacaaaattgtgttgactgctggtactgccagggactgttaaaatgtcggagagctgccaggagcccttgctgctttccaggggactggtggagaagtgacctttttcttttgaatttgaatttctggatgagggagagaygtgaggctttggctgaacgccttggccacttgcccgtccatcgttgcatttggactttgctagtgctggctgccaagggcccaaaggagctgggaggactagtctgcaaattcagcatcagctcagagaggggatcccaagccagacatctgtggggaatcccagctagttctgccaaagctttcaaggcaccgtctttctggacctgtatttacacctgggttgccttgtacaggttcacaactcagtcattagactgtcagccagtgttaccttaaggctgtaagcatttagcagagc

SEQ ID NO: 79310 - DNA, 600 bp, Chicken  19866894370188_5
tgtttgccagtctactcacaggaaactcttagcagaggaaatagcagaaatgctatctgtgaagaactgttagtgcccttgccctatgcagccagcagccggccacaccaggcgcttggccatctgcagaagtgacaggaacagagggaggattccttgctgggagctagtctcagggtgcctgttcccttctcctggcgcctgcctccaccagacagctgagagctatctgagtgcctgctccgatatcactgggcccgaattaacgaggcgttggcagcctcgaggcgtcagcctctmgtccagttgctgctgccccttcagcactcagcccatccgtgccattcgtctgcggatgcgcgcgacagacctctgggtgctggaaggggcgacatggcaggactcctgtgtaagcggcgcaaaaaaggaggtatgcgagattacatttccagcaagaatcttttcctaagctaaggaggtggcatataggctccctgtaacacaggctctctgggcagcaggttttgagaggcttgctactgatgcagcaggggaggatgctctggtcctgttgtggcagagcctygctggacctgaagg

SEQ ID NO: 79311 - DNA, 600 bp, Chicken  19866894370188_6
ggcgtcagcctctmgtccagttgctgctgccccttcagcactcagcccatccgtgccattcgtctgcggatgcgcgcgacagacctctgggtgctggaaggggcgacatggcaggactcctgtgtaagcggcgcaaaaaaggaggtatgcgagattacatttccagcaagaatcttttcctaagctaaggaggtggcatataggctccctgtaacacaggctctctgggcagcaggttttgagaggcttgctactgatgcagcaggggaggatgctctggtcctgttgtggcagagcctygctggacctgaaggcaagcatgarggttttatatggccctccatgtcatgaggggctgttgagggtgggggcttaatacacacatccatattgatggcttttttgttgttgtttagtaaattgtttaggaacaagatttgtgttaaggagggttcttcttgatgtttaaaagagtgagcacgtataacatcatggaactttgggggataaaagcagttcagctgcatttaaaggttttatgtcttgaggtgtatgcagtaatttgtatctatagcatatagcatgcattcctggccctga

SEQ ID NO: 79312 - DNA, 600 bp, Chicken  19866894370188_7
tgctgccccttcagcactcagcccatccgtgccattcgtctgcggatgcgcgcgacagacctctgggtgctggaaggggcgacatggcaggactcctgtgtaagcggcgcaaaaaaggaggtatgcgagattacatttccagcaagaatcttttcctaagctaaggaggtggcatataggctccctgtaacacaggctctctgggcagcaggttttgagaggcttgctactgatgcagcaggggaggatgctctggtcctgttgtggcagagcctygctggacctgaaggcaagcatgarggttttatatggccctccatgtcatgaggggctgttgagggtgggggcttaatacacacatccatattgatggcttttttgttgttgtttagtaaattgtttaggaacaagatttgtgttaaggagggttcttcttgatgtttaaaagagtgagcacgtataacatcatggaactttgggggataaaagcagttcagctgcatttaaaggttttatgtcttgaggtgtatgcagtaatttgtatctatagcatatagcatgcattcctggccctgaggagcttaggaaatctcttctgca

SEQ ID NO: 79313 - DNA, 600 bp, Chicken  19866894370198_1
tgcctacaataaatgcagtcaacctgtttctgtccatcacgtttactcgatagattgaaaacacaggaagacaaattccttggtcttcacatgctgatactccatagaatcatttgaggtggaagcaacccttaaaggccatgtggtccgactccgtgcactgaatggggaggcccacagctccatcagtgctcagagcccgtccagcctgacctcgggtgtctccagggatgcagcaccaccacctctccgggcatacttcttgagtccttccagcatcagacactgaacaactttccwtgctgactaatgattacagaggaggatgtacattgccataaagctgtcccttcagtggccctccagagacaagcgtgtgcgttttgctgtgtayrttcagggttcattgacatatccacttaaaagataaagctaaagaaaagatttgacctctctgcttataggcagtcagaaggcagatcaccatggaaatccaggcagcagagtacaaagtgtgttagctgtggggatgcagagcagccaacagtgacaaacgcattctgctaaggatggtgcgatttgcacaccacaagtttctgt

SEQ ID NO: 79314 - DNA, 600 bp, Chicken  19866894370198_2
tgatactccatagaatcatttgaggtggaagcaacccttaaaggccatgtggtccgactccgtgcactgaatggggaggcccacagctccatcagtgctcagagcccgtccagcctgacctcgggtgtctccagggatgcagcaccaccacctctccgggcatacttcttgagtccttccagcatcagacactgaacaactttccwtgctgactaatgattacagaggaggatgtacattgccataaagctgtcccttcagtggccctccagagacaagcgtgtgcgttttgctgtgtayrttcagggttcattgacatatccacttaaaagataaagctaaagaaaagatttgacctctctgcttataggcagtcagaaggcagatcaccatggaaatccaggcagcagagtacaaagtgtgttagctgtggggatgcagagcagccaacagtgacaaacgcattctgctaaggatggtgcgatttgcacaccacaagtttctgtttatacagctgtaggcgatactgtaagagcttttaaaaccccattccctaccatcatcctttcgttccctgttataaatacaagcaggaaatcc

SEQ ID NO: 79315 - DNA, 600 bp, Chicken  19866894370198_3
gatactccatagaatcatttgaggtggaagcaacccttaaaggccatgtggtccgactccgtgcactgaatggggaggcccacagctccatcagtgctcagagcccgtccagcctgacctcgggtgtctccagggatgcagcaccaccacctctccgggcatacttcttgagtccttccagcatcagacactgaacaactttccwtgctgactaatgattacagaggaggatgtacattgccataaagctgtcccttcagtggccctccagagacaagcgtgtgcgttttgctgtgtayrttcagggttcattgacatatccacttaaaagataaagctaaagaaaagatttgacctctctgcttataggcagtcagaaggcagatcaccatggaaatccaggcagcagagtacaaagtgtgttagctgtggggatgcagagcagccaacagtgacaaacgcattctgctaaggatggtgcgatttgcacaccacaagtttctgtttatacagctgtaggcgatactgtaagagcttttaaaaccccattccctaccatcatcctttcgttccctgttataaatacaagcaggaaatcct

SEQ ID NO: 79316 - DNA, 492 bp, Chicken  19866894370203_1
aaagctatttcctaagagagatcaaaggaaagggtaatacttatgacatatgcatatatatgtctcactggtgtgtcagagggaagggtgccagggcaatacccgcacagaagtgctggaccccctgccctgtcacagtcggacagaactgacagaggagggttggaagagtatcccagctcagcatcattgacgcaccccctgcctgccaaccccactcccccaggtcccactaagcaacagacttgagatgctggaaattgaaagggacatgagtggggagtccaggcaggatctgcytaggagggagcgtaggctgaggcagtcacccccatgccttgaaattgtctctgtcaggaaaggcaggaggggaattgtggtgggtgattcccttctctggggaacggagggctccatttgcaggcccgacccaacctgtaaggaggtgtgctgccttcctggggcccacatcagcgacattgccagaaaagt

SEQ ID NO: 79317 - DNA, 599 bp, Chicken  19866894370239_1
  misc_feature (1)..(164): n is any nucleotide
nnnnnnnnnnnnnnnnnnnnnnnnnnnnnnnnnnnnnnnnnnnnnnnnnnnnnnnnnnnnnnnnnnnnnnnnnnnnnnnnnnnnnnnnnnnnnnnnnnnnnnnnnnnnnnnnnnnnnnnnnnnnnnnnnnnnnnnnnnnnnnnnnnnnnnnnnnnnnnnnnnnnctgtggcactctgctactctcttgaaatgcaaaatgtggaatgttcactgatactacatttaaaggtatggatgacaatataagtagaaagattttgcaagtacttagtttcaaacttcagctaatattatgtggktttgttagttttaagaagtctggtatcaaggtcaaattataaagtgagtttgctattacacattaattagccatattatcacctgcagcatctagaggctttcacaactcagcagatatttttataacttcagaaaagctgtcagaggtttgaaaggagaagttgtcagtcagcacagctgtgagcaaagcagtgagggcatacagtaaggctcttcccaagcattgggcctaaaaaggaacaaattcagtttaggttagttaacctaacctaaggttaaccacttatcctacccccaa

SEQ ID NO: 79318 - DNA, 600 bp, Chicken  19866894370239_2
gcatacagtaaggctcttcccaagcattgggcctaaaaaggaacaaattcagtttaggttagttaacctaacctaaggttaaccacttatcctacccccaagatgaatcagtgaatgattaacagaagaaaattttcaatgtcttatgtaatggttaattaatccattcatccgctaaagtggttagatactctgatggctgcagctgatattgaacctgggttttatttactaccagtataactaggtgttgtgatttgatttgagacatgaagttgttctttcaacactgtattccartgtgtttcaagtaagaattatggattttgaacagggaacacatatcactctctgatgagacaaactgccacagactgattaaggktttggatgaatttagcaatcaccttccagatcaaggtgaaatgaaagttgagaaaaagcaacatcagatcagtggtgacaggcaaatactgtgggttggttcagccacctttcagaaccagctagtttagaatattttttgtacgttaaaggcagctatggcaataacaacactttagtccctggaaagctatatgttttaggcaatcaaaactt

SEQ ID NO: 79319 - DNA, 600 bp, Chicken  19866894370239_3
cttatcctacccccaagatgaatcagtgaatgattaacagaagaaaattttcaatgtcttatgtaatggttaattaatccattcatccgctaaagtggttagatactctgatggctgcagctgatattgaacctgggttttatttactaccagtataactaggtgttgtgatttgatttgagacatgaagttgttctttcaacactgtattccartgtgtttcaagtaagaattatggattttgaacagggaacacatatcactctctgatgagacaaactgccacagactgattaaggktttggatgaatttagcaatcaccttccagatcaaggtgaaatgaaagttgagaaaaagcaacatcagatcagtggtgacaggcaaatactgtgggttggttcagccacctttcagaaccagctagtttagaatattttttgtacgttaaaggcagctatggcaataacaacactttagtccctggaaagctatatgttttaggcaatcaaaacttatttgattatttgttgtaaaaggtctcaaagcaattaggttatgtccctttgaaaatacagggaatttttacaggttactttgtg

SEQ ID NO: 79320 - DNA, 600 bp, Chicken  19866894370240_1
atgtgagcaaaactttatagtaatttttgctttttccattctataaagttaattaactgataagacataaccctggagcatgggtcttcaagcaggacaagacagaggtttaaagagaagttgagacaatggtctgaagcaataaagaacctagaaaaggcaaaatatggataaagtatttgagtggctacagagaactgaaggattctttatcttaatttatttgtctttcatgtcaaacttgtgcatagaaacaattttctgtgagttcttgatgtgctgtaagtatttacgcttccwttagagcaacagaaaaagtttgttggtttcccaaatatattcgtacagaaagtttcctttcctttttgcactggatgaaattaacaagcagctatttactggtactttgaaaagcactctcaaaaatttcaaatatctcttctgtaaaggaaatgtgaaattaatcatttgagggagttggtttttcattgacttttagtcttggaataacttattttaaaatgcaagaggtaattaccacttggggaaattttggaactacctctgattgcattcccttgcttttaagagaaatgacag

SEQ ID NO: 79321 - DNA, 600 bp, Chicken  19866894370243_1
aaactctcagagctggaaagcagcggaagctggaaagcactggaagcacgtcctagttctgctactgatttgtgaggtgatcagtgacaagccctggttgctgccatgccttggaagcagacactgttcttctttgtatgtgcaggatatgttgagtctggtattgttgaacttctgacaggcttgtcttccaagaggatggaaggcctcagctgaccagaaatctagatgttgtatgagaacaagttaataaagaacaaagcccaatgcaaggaaaagtttgacaataaaattttcacraacgcacaaaattaagtgactaaaaacatgaaataatttttaagttcctaaaatttctattataaagatctgtggtggaccaaagtttatcagtatgataatgaccagacacattataaatacccactatcttactcatagttattatcattacagactgggacttggaaagcgtgtgtgccttttttgttgttgttgttaatgtacaatacagtttaaaaatggtgtaaatgctcaagttctacttttaattgtctagttagtataaatccagtgaaaataacagaacttcaaatttat

SEQ ID NO: 79322 - DNA, 599 bp, Chicken  19866894370244_1
  misc_feature (1)..(130): n is any nucleotide
nnnnnnnnnnnnnnnnnnnnnnnnnnnnnnnnnnnnnnnnnnnnnnnnnnnnnnnnnnnnnnnnnnnnnnnnnnnnnnnnnnnnnnnnnnnnnnnnnnnnnnnnnnnnnnnnnnnnnnnnnnnnnnnnnnccatgagtatatttaaacacacattaacatattcttgttaaaacaaagactccagaagattaattgctttcttcagggttaaagatgaatgtaagactgaacaaaactttaaaatgcattgtttgcaacttcaggaagacaacagagcaacatatttaatctacactctyatatatagctacattacccgattccactgtttaatacctgagatattcaaacaaattttttactgagaaatagacaggcacaagatttccaaacttacataaaatatcaggcaccaagtgaaaaggaaaacaagtcccaccctctccctccccaaaccaaaagattaaatcaccctataatgttcttttatacatgaacacagaacaacatgtttaccacagtagaattacagatgtgaaagctatgctggcaacacagtaaacagaataaaaacagaccacttaccagttcaactttg

SEQ ID NO: 79323 - DNA, 600 bp, Chicken  19866894370250_1
tgcagcttaaagctataataaatggaaaagatcttggtgtaaccctttaaaaacaaaatctgtttcactgtcagtcacagcactcttgcttattacatttatcttcactgttgaggtggcagcagcaacctgctgtacgtaacatgcaggaaacaaaactgaagatgtctgcaatgaggtgtcatgcaaggcccaaaatccactggaaagaaaggaaaaaggaacacctggagtttagttgggatcattacttgccacggctatgctaactctctcatgtactgcttgccctgcatcttyggttacagtatagttcatggaatttcctgttgctctttcttttgatccacctggaaggaaaaacactctgtccccatgagctgaagtccccagcagcacaagcacagagctccacaaccctcaaggctcagcagagagcccgctgcatgcccaccagctctcaccccttccaagcttttcccttctggttcatgaaaggaacctgtgagctgcccagaaacattttgaaatgtgaacatgaagaggtaactgaggggttcaggagaggacgcaaacctgattggcagacaccattgcagt

SEQ ID NO: 79324 - DNA, 600 bp, Chicken  19866894370252_1
gggaaatctgccgtccaaacacttccatcattccacatgggcttctttcaaagtaagttgttggctgttgtcagtgatttttcttcattcgtactccttttgaagattttgggatgtttggggaaggtgccgtattcattttaccagacacttcaagttctgaaaatcttttacctgcaaaggtattatactgatggggaattagtttcaactttatttgcagaagaaagcaagccatgtacaaagtgaaggatgcctggcatcttcccagaagcagcaagtctgaattgagatctgttygggcattctgggtatttgcatctctacatgcagaaaaagcaagtaaatgtaaatgagtgttccagcaaacagtggaaagcaaatagatatttttttttgcttaccctaaaaagacccggtaataaggattatgagagcaagagcccagtaccaacctagaagagagagaagtactaaacttccccagcaggagatgagaagcagtggttcagcactgggatcagcacctgtccatcctttctgggtcgtagccgtaaccctgctgtccccagctggtgctgccatcaactactggggcag

SEQ ID NO: 79325 - DNA, 600 bp, Chicken  19866894370252_2
gaaaaagcaagtaaatgtaaatgagtgttccagcaaacagtggaaagcaaatagatatttttttttgcttaccctaaaaagacccggtaataaggattatgagagcaagagcccagtaccaacctagaagagagagaagtactaaacttccccagcaggagatgagaagcagtggttcagcactgggatcagcacctgtccatcctttctgggtcgtagccgtaaccctgctgtccccagctggtgctgccatcaactactggggcagtgtggttctcaaatatccaacacaagttagcrcacagcagctgcactactgactctgtcagtataattacactgacccctcatctaagacggagattttaggggcaaaggaaaagatggatggatggatggatggatggatggatggatggatggatggatggatgaagttgagcagagagctaataggcagcagaggaaccaatggagttctcttcgaagttaaataatggatagacacagtgaagtcagagctatacaaaaatatgcagattttggtgtcttcttttaatggtgtattattcttaccmcgtacctacagataactagacc

SEQ ID NO: 79326 - DNA, 600 bp, Chicken  19866894370252_3
aaatatccaacacaagttagcrcacagcagctgcactactgactctgtcagtataattacactgacccctcatctaagacggagattttaggggcaaaggaaaagatggatggatggatggatggatggatggatggatggatggatggatggatgaagttgagcagagagctaataggcagcagaggaaccaatggagttctcttcgaagttaaataatggatagacacagtgaagtcagagctatacaaaaatatgcagattttggtgtcttcttttaatggtgtattattcttaccmcgtacctacagataactagacccttctggccagatgcttcttgcttagcttgcaccaagatgcccagcccagtgttttgtttcakctgcacctcagcatccagaagcatttcagctttagcaaactcctttaggtggagcgaaggctgcacaaatccgagcttcaatgcaggaagcattgaactgcagcgtgcggtttgtgcacacatgcatgtgagtgctcgcatgtgctcatcaaggaaacaaaaaggaggaactgaggcagcagacacatgagtcaggatgtgggcgagctccgtaa

SEQ ID NO: 79327 - DNA, 600 bp, Chicken  19866894370252_4
ttttaggggcaaaggaaaagatggatggatggatggatggatggatggatggatggatggatggatggatgaagttgagcagagagctaataggcagcagaggaaccaatggagttctcttcgaagttaaataatggatagacacagtgaagtcagagctatacaaaaatatgcagattttggtgtcttcttttaatggtgtattattcttaccmcgtacctacagataactagacccttctggccagatgcttcttgcttagcttgcaccaagatgcccagcccagtgttttgtttcakctgcacctcagcatccagaagcatttcagctttagcaaactcctttaggtggagcgaaggctgcacaaatccgagcttcaatgcaggaagcattgaactgcagcgtgcggtttgtgcacacatgcatgtgagtgctcgcatgtgctcatcaaggaaacaaaaaggaggaactgaggcagcagacacatgagtcaggatgtgggcgagctccgtaacataaccccatgctgcaggactatcagcaagttgggatcttcgttctgcagccgctgggccacgtcccagaacacagtgctgcag

SEQ ID NO: 79328 - DNA, 577 bp, Chicken  19866894370255_1
gttgctttttttagaaggaaataaaaaaaatcagtgctgaaaagcagctcctggtagcaaaagctgtggtctgtgtgaactgctgactctaatcacttcaaggcagagaaaaagaaaatgctgtgcttgttagaaccccctggttaagcttcagctccttctgcagggaagtgtttgtttccttccatctgctgcttttgctgggaagaaaaatcagcttgttcagacaccaggaagttcttcaacatttcaacagcgagctgagaatgcagaaacagcaacatgcataaataatcatamccaaaaatatcccgcataccagtcacacgtatagcccagccctggagccattcctcagcaacagcaggctgcctgatgcacgcagatccatgggatgtgggcaggatgggacagctgtggcagcagatgcacgtgcctgcctctcttgtgctggtcgcagtttttccttccatcaaagcttgtttgtttgtttttactgggagctgctgactgactctgatgtctttgtgcaccgctcctgccaaagctgcttgcgcaggaggtcaaagcaagagtg

SEQ ID NO: 79329 - DNA, 600 bp, Chicken  19866894370262_1
gtttgaaatacatagctttagtcatgtattctatttttatatttcaattgtagactcaacttgagaatttcaagtcatgacttctgaagctgaggatttctatcagttaatttctacttctagatacaaacttccaatttaaactcttatttttctttttctccttggagtaaattttaaaccatttttaagttttccagtgaactaaataacgtgcaaaacacgtatctccagagtcaggagaaatgaaaactactgtgatcttgttttaaatcattctcagtcttgtgaagatctatrccagtagagttttgtatgtgtaaaccatgaaaataccactagatggtgctcaagaacacatctagttccttggatttgttaaccgaacaggctgaaagatgctgaggattacatttaccacagttccgttatttataacgtcgtcttttccatggtaaattacagaaattactgcaaagttcctgggatcctagtaaggtaggaaaatgaaatcttctgggaatcagtgcaaaataaccaaaatattcattaggttttcaagagatagacatacacttgaagatatatctaatggtgggg

SEQ ID NO: 79330 - DNA, 600 bp, Chicken  19866894370264_1
ttaaagccatcctcagtatggctccaaaacaaaaggaggacttgtcttccattttaaatgatgtggatgttgacaagagtattggaggcgggatgaacagagagaacatgaggacagagccatagcagtgtgaccaagccaaggtagtactccaccagtcaatgcacacctccaagaggcaccagacgtttctccataggttctgaaacaaacaccagcacagaaggcttcagagtttgttaatcttccacgttaggctaaataccacgtctggaaatcaggaatttgttactgggtccstacccatccccagttccaaggtgaatctccctatatgttttccttaaaagaagctgtccaaaacagacaaaaccagatttcaaacaagccaagctgggtttttacctgaacagcaactgggacagmaacttggtcctttctggcagacccagcgaagtccaactgcctgaaagaaatatcaaacttaacacaatccctcctgggctcgtgccttggtgccacctctgcggtctgtctgtgagcccatttccagctctctgagcagcctttgccaccagaaccccttcaggctgtgcctca

SEQ ID NO: 79331 - DNA, 600 bp, Chicken  19866894370264_2
agtgtgaccaagccaaggtagtactccaccagtcaatgcacacctccaagaggcaccagacgtttctccataggttctgaaacaaacaccagcacagaaggcttcagagtttgttaatcttccacgttaggctaaataccacgtctggaaatcaggaatttgttactgggtccstacccatccccagttccaaggtgaatctccctatatgttttccttaaaagaagctgtccaaaacagacaaaaccagatttcaaacaagccaagctgggtttttacctgaacagcaactgggacagmaacttggtcctttctggcagacccagcgaagtccaactgcctgaaagaaatatcaaacttaacacaatccctcctgggctcgtgccttggtgccacctctgcggtctgtctgtgagcccatttccagctctctgagcagcctttgccaccagaaccccttcaggctgtgcctcaccagctgtcctctgggagctttggtccccctccccactgggagccccacagctgcagcctgacccccccgctggggacaaagccggtgccatcagccacagacaaaaggtcacattgcaaaagggt

SEQ ID NO: 79332 - DNA, 599 bp, Chicken  19866894370275_1
  misc_feature (1)..(44): n is any nucleotide
nnnnnnnnnnnnnnnnnnnnnnnnnnnnnnnnnnnnnnnnnnnntttggaaaaaaaacctgacactatatagacctcttgctgaaacagagctgtgagtgggctgcccagggaggcggtggagtcaccgtccctggaggtggccaagaaatgtgcagacgtggcactaaggaacacggttacaggcagacggttgggctgggtgaactcagaggtctttcccaaccttcccagttctatgattctatgaaaacgcacttgaactctaaaaaagacagcttatcttcagcaataaaaaatygagggctctcttggcaactggatgcctcagctatcaggctacagacttggcctctggccctttctctcagtctcctctcggagccattctgctgcagataaataattaagcaggcactggaacacacgcgtctcctccagcccggctgagtgccccactgatgggctataaaatctctgctggcccaacaaatatttattcatgcaaagtggagcggcttcagcgagagagagacggagacaatctcagcccttgtgctcttcagagcactcacccaggagcacacgctgacaacacgg

SEQ ID NO: 79333 - DNA, 599 bp, Chicken  19866894370279_1
  misc_feature (1)..(29): n is any nucleotide
nnnnnnnnnnnnnnnnnnnnnnnnnnnnntcctgtacgctgcagctccattgaaataaactgagctttgactgtccttctagctgtggctttgctccagtatcaactacatgctgctgtctgtgcatgagcagctttgatgcgtgtgctgtgggctgcagaataagtgtgctctccacatagtaggtaaacatagaaatcttcagtagaagtgttgcaaggtttgggagggagcatggagcgtagtccttattttcctttgcaaatgaaagattgctctgtaagctcagaaggtgttctrtttccctttgatgagtcaaggccagccaatgaatttgtaaagaaaaacattctcagcgtcttccatgtaaagtcctcaggcttaagagggcagtgtgatttgacataatgggcttgcattgcttctttggtgtgctgctgaactatgcagttgcttcctcattttcctgctgagtgggaaagtcactgtggttttaaagcactttgaagcaaattagattacttctacgtggtaagaatttgcttacttcataggcgagccaatgttaacagtggacattagccacaggtgtggccaca

SEQ ID NO: 79334 - DNA, 599 bp, Chicken  19866894370281_1
  misc_feature (1)..(151): n is any nucleotide
nnnnnnnnnnnnnnnnnnnnnnnnnnnnnnnnnnnnnnnnnnnnnnnnnnnnnnnnnnnnnnnnnnnnnnnnnnnnnnnnnnnnnnnnnnnnnnnnnnnnnnnnnnnnnnnnnnnnnnnnnnnnnnnnnnnnnnnnnnnnnnnnnnnnnnnttgtgaatttatggtgaaacacagaaaacattcatcaaagcacatggctttaaatgatttcttatacagctgagcattgctctcgccaacagaacaaatacagatttgagtaaagtactaatagcctcatgattttatacattcttttkgggggtttggatcatgatcacctgcatttagcatagctgaagatggattctsttgcacatttctgtgtatttcattggggagacacctacttgttaaacttgagccttcagttgtgaaagttttttctcagctacctttcttgtttatgtttacattctaaattcttcttaagcctccttgtgctctcccctgctgacctcagagagtttttaagccttgctgtgaatacctggtttatctgttctttggtttaaggatttattctgcctcagactcccaccacwgatgaaaacctgga

SEQ ID NO: 79335 - DNA, 599 bp, Chicken  19866894370281_2
  misc_feature (1)..(99): n is any nucleotide
nnnnnnnnnnnnnnnnnnnnnnnnnnnnnnnnnnnnnnnnnnnnnnnnnnnnnnnnnnnnnnnnnnnnnnnnnnnnnnnnnnnnnnnnnnnnnnnnnnnttgtgaatttatggtgaaacacagaaaacattcatcaaagcacatggctttaaatgatttcttatacagctgagcattgctctcgccaacagaacaaatacagatttgagtaaagtactaatagcctcatgattttatacattcttttkgggggtttggatcatgatcacctgcatttagcatagctgaagatggattctsttgcacatttctgtgtatttcattggggagacacctacttgttaaacttgagccttcagttgtgaaagttttttctcagctacctttcttgtttatgtttacattctaaattcttcttaagcctccttgtgctctcccctgctgacctcagagagtttttaagccttgctgtgaatacctggtttatctgttctttggtttaaggatttattctgcctcagactcccaccacwgatgaaaacctggagggacagtttcataaatgaatcctgctactgctctgtaagtaggcagctctc

SEQ ID NO: 79336 - DNA, 600 bp, Chicken  19866894370281_3
ttatacattcttttkgggggtttggatcatgatcacctgcatttagcatagctgaagatggattctsttgcacatttctgtgtatttcattggggagacacctacttgttaaacttgagccttcagttgtgaaagttttttctcagctacctttcttgtttatgtttacattctaaattcttcttaagcctccttgtgctctcccctgctgacctcagagagtttttaagccttgctgtgaatacctggtttatctgttctttggtttaaggatttattctgcctcagactcccaccacwgatgaaaacctggagggacagtttcataaatgaatcctgctactgctctgtaagtaggcagctctcaccttgcaggctggatttcatacttagtaagctttcccatgatayactggtgtctgaactgagcctaaactgagtgartacatktaagtgtaaactacaagtcagcttggaagaagcagaaagcattctgatggcagctgtcagtcactgttggaatggagaggtctgaactttgcatgggaagaatcagagacatgcttcaagtgcagcagcttgcatggagcattatattca

SEQ ID NO: 79337 - DNA, 600 bp, Chicken  19866894370281_4
aacttgagccttcagttgtgaaagttttttctcagctacctttcttgtttatgtttacattctaaattcttcttaagcctccttgtgctctcccctgctgacctcagagagtttttaagccttgctgtgaatacctggtttatctgttctttggtttaaggatttattctgcctcagactcccaccacwgatgaaaacctggagggacagtttcataaatgaatcctgctactgctctgtaagtaggcagctctcaccttgcaggctggatttcatacttagtaagctttcccatgatayactggtgtctgaactgagcctaaactgagtgartacatktaagtgtaaactacaagtcagcttggaagaagcagaaagcattctgatggcagctgtcagtcactgttggaatggagaggtctgaactttgcatgggaagaatcagagacatgcttcaagtgcagcagcttgcatggagcattatattcaaagaagggaggaagcaagcaaatacagaggtcatggatgtgactttttggctaaagcttggacaagcttcaagagaaagggacagcaatgaatagatttaccagaaacagt

SEQ ID NO: 79338 - DNA, 600 bp, Chicken  19866894370281_5
agctacctttcttgtttatgtttacattctaaattcttcttaagcctccttgtgctctcccctgctgacctcagagagtttttaagccttgctgtgaatacctggtttatctgttctttggtttaaggatttattctgcctcagactcccaccacwgatgaaaacctggagggacagtttcataaatgaatcctgctactgctctgtaagtaggcagctctcaccttgcaggctggatttcatacttagtaagctttcccatgatayactggtgtctgaactgagcctaaactgagtgartacatktaagtgtaaactacaagtcagcttggaagaagcagaaagcattctgatggcagctgtcagtcactgttggaatggagaggtctgaactttgcatgggaagaatcagagacatgcttcaagtgcagcagcttgcatggagcattatattcaaagaagggaggaagcaagcaaatacagaggtcatggatgtgactttttggctaaagcttggacaagcttcaagagaaagggacagcaatgaatagatttaccagaaacagtacttaaaggatgagtgaatccacttgaactgtg

SEQ ID NO: 79339 - DNA, 600 bp, Chicken  19866894370281_6
ctttcttgtttatgtttacattctaaattcttcttaagcctccttgtgctctcccctgctgacctcagagagtttttaagccttgctgtgaatacctggtttatctgttctttggtttaaggatttattctgcctcagactcccaccacwgatgaaaacctggagggacagtttcataaatgaatcctgctactgctctgtaagtaggcagctctcaccttgcaggctggatttcatacttagtaagctttcccatgatayactggtgtctgaactgagcctaaactgagtgartacatktaagtgtaaactacaagtcagcttggaagaagcagaaagcattctgatggcagctgtcagtcactgttggaatggagaggtctgaactttgcatgggaagaatcagagacatgcttcaagtgcagcagcttgcatggagcattatattcaaagaagggaggaagcaagcaaatacagaggtcatggatgtgactttttggctaaagcttggacaagcttcaagagaaagggacagcaatgaatagatttaccagaaacagtacttaaaggatgagtgaatccacttgaactgtgctaatc

SEQ ID NO: 79340 - DNA, 599 bp, Chicken  19866894370286_1
  misc_feature (1)..(27): n is any nucleotide
nnnnnnnnnnnnnnnnnnnnnnnnnnngagaaatccaaagccacgctgtccaggggaaaacaaacaaagagaaagtgccagggcagaaagccttggacatctgcagccacttctttcaaaaatcctgctccagcagactgctctcagtacccttgtatgggtttggcagcaaaaatatcgaaggctaaataaaatgtcctagagcttggaaactgcatacaagaaaatctcatttactttggttagatgcaggcaagcaggaaaaaaaaagacaaaagggcaactgtcagattctgtgartaatacaagtatccctcgtgcctgcccaaaatgcatataaccatagaaataactgtgggctttcacatcatgttcaacaagatcataatcaccaataytatagtctaatcactgagatgctcaratgtgttcrtttacctgaattaactgaagaagtttcaaatagttactgtgagaagtgaatgaattcataagttcatattgcaatcttcaaaattcagttaaaatttggtatctagttcagaaatgcacacattactatgaaacatgacactgaaatttacaggtaataatgagtt

SEQ ID NO: 79341 - DNA, 600 bp, Chicken  19866894370286_2
atctgcagccacttctttcaaaaatcctgctccagcagactgctctcagtacccttgtatgggtttggcagcaaaaatatcgaaggctaaataaaatgtcctagagcttggaaactgcatacaagaaaatctcatttactttggttagatgcaggcaagcaggaaaaaaaaagacaaaagggcaactgtcagattctgtgartaatacaagtatccctcgtgcctgcccaaaatgcatataaccatagaaataactgtgggctttcacatcatgttcaacaagatcataatcaccaataytatagtctaatcactgagatgctcaratgtgttcrtttacctgaattaactgaagaagtttcaaatagttactgtgagaagtgaatgaattcataagttcatattgcaatcttcaaaattcagttaaaatttggtatctagttcagaaatgcacacattactatgaaacatgacactgaaatttacaggtaataatgagttgaaattcacatcaactttattactgtttcagttggatttattttgtgctctgccttaagatttaatttctacaggaacagttataacaaagtcttcttc

SEQ ID NO: 79342 - DNA, 600 bp, Chicken  19866894370286_3
ctgctccagcagactgctctcagtacccttgtatgggtttggcagcaaaaatatcgaaggctaaataaaatgtcctagagcttggaaactgcatacaagaaaatctcatttactttggttagatgcaggcaagcaggaaaaaaaaagacaaaagggcaactgtcagattctgtgartaatacaagtatccctcgtgcctgcccaaaatgcatataaccatagaaataactgtgggctttcacatcatgttcaacaagatcataatcaccaataytatagtctaatcactgagatgctcaratgtgttcrtttacctgaattaactgaagaagtttcaaatagttactgtgagaagtgaatgaattcataagttcatattgcaatcttcaaaattcagttaaaatttggtatctagttcagaaatgcacacattactatgaaacatgacactgaaatttacaggtaataatgagttgaaattcacatcaactttattactgtttcagttggatttattttgtgctctgccttaagatttaatttctacaggaacagttataacaaagtcttcttcagtattgctgacaaataagtatgcta

SEQ ID NO: 79343 - DNA, 600 bp, Chicken  19866894370286_4
cagactgctctcagtacccttgtatgggtttggcagcaaaaatatcgaaggctaaataaaatgtcctagagcttggaaactgcatacaagaaaatctcatttactttggttagatgcaggcaagcaggaaaaaaaaagacaaaagggcaactgtcagattctgtgartaatacaagtatccctcgtgcctgcccaaaatgcatataaccatagaaataactgtgggctttcacatcatgttcaacaagatcataatcaccaataytatagtctaatcactgagatgctcaratgtgttcrtttacctgaattaactgaagaagtttcaaatagttactgtgagaagtgaatgaattcataagttcatattgcaatcttcaaaattcagttaaaatttggtatctagttcagaaatgcacacattactatgaaacatgacactgaaatttacaggtaataatgagttgaaattcacatcaactttattactgtttcagttggatttattttgtgctctgccttaagatttaatttctacaggaacagttataacaaagtcttcttcagtattgctgacaaataagtatgctaacaaagttt

SEQ ID NO: 79344 - DNA, 599 bp, Chicken  19866894370291_1
  misc_feature (1)..(252): n is any nucleotide
nnnnnnnnnnnnnnnnnnnnnnnnnnnnnnnnnnnnnnnnnnnnnnnnnnnnnnnnnnnnnnnnnnnnnnnnnnnnnnnnnnnnnnnnnnnnnnnnnnnnnnnnnnnnnnnnnnnnnnnnnnnnnnnnnnnnnnnnnnnnnnnnnnnnnnnnnnnnnnnnnnnnnnnnnnnnnnnnnnnnnnnnnnnnnnnnnnnnnnnnnnnnnnnnnnnnnnnnnnnnnnnnnnnnnnnnnnnnnnnnnnnnnnnnnnnntcggggaaataaagaaagagatgaggcgaagggggggagaaagaaggraaaaaaaaaaccccacaaaaaaaaacctgtgactccgcacttggcaaaagccagcactcagcaacaactgccgaacgctgagtcacttctttcccttccacctggcgagaggctgcccggatccattcagcagaaagcctcttttcattgaaactggcataaatctggagtaattccctctgttccgatggagcagctcaggatttayggcagcgtgacacggcaggcagaatccaggccacaargagmtgcagcccaggttctcctgcacggagcctgcagctgcgttcccatgggcc

SEQ ID NO: 79345 - DNA, 599 bp, Chicken  19866894370291_2
  misc_feature (1)..(44): n is any nucleotide
nnnnnnnnnnnnnnnnnnnnnnnnnnnnnnnnnnnnnnnnnnnntcggggaaataaagaaagagatgaggcgaagggggggagaaagaaggaaaaaaaaaaaccccacaaaaaaaaacctgtgactccgcacttggcaaaagccagcactcagcaacaactgccgaacgctgagtcacttctttcccttccacctggcgagaggctgcccggatccattcagcagaaagcctcttttcattgaaactggcataaatctggagtaattccctctgttccgatggagcagctcaggatttayggcagcgtgacacggcaggcagaatccaggccacaargagmtgcagcccaggttctcctgcacggagcctgcagctgcgttcccatgggccccgctgcaagccgggctcagcgctgacgccggcgctgcttctatttttcacgatgctgtaatctccagcagatgctctgtgagcagaaccctcagaagaaatttcccttcttcacgcacctygggaagatttcgacaatctatgagcagaagaatgtttaatagcttgaattaattattttttcaggtctactttattattttttttt

SEQ ID NO: 79346 - DNA, 599 bp, Chicken  19866894370291_3
  misc_feature (1)..(7): n is any nucleotide
nnnnnnntcggggaaataaagaaagagatgaggcgaagggggggagaaagaaggaaaaaaaaaaaccccacaaaaaaaaacctgtgactccgcacttggcaaaagccagcactcagcaacaactgccgaacgctgagtcacttctttcccttccacctggcgagaggctgcccggatccattcagcagaaagcctcttttcattgaaactggcataaatctggagtaattccctctgttccgatggagcagctcaggatttayggcagcgtgacacggcaggcagaatccaggccacaargagmtgcagcccaggttctcctgcacggagcctgcagctgcgttcccatgggccccgctgcaagccgggctcagcgctgacgccggcgctgcttctatttttcacgatgctgtaatctccagcagatgctctgtgagcagaaccctcagaagaaatttcccttcttcacgcacctygggaagatttcgacaatctatgagcagaagaatgtttaatagcttgaattaattattttttcaggtctactttattatttttttttccagatgtcatttactgctctaatttggttttgccaa

SEQ ID NO: 79347 - DNA, 599 bp, Chicken  19866894370291_4
  misc_feature (1)..(3): n is any nucleotide
nnntcggggaaataaagaaagagatgaggcgaagggggggagaaagaaggaaaaaaaaaaaccccacaaaaaaaaacctgtgactccgcacttggcaaaagccagcactcagcaacaactgccgaacgctgagtcacttctttcccttccacctggcgagaggctgcccggatccattcagcagaaagcctcttttcattgaaactggcataaatctggagtaattccctctgttccgatggagcagctcaggatttayggcagcgtgacacggcaggcagaatccaggccacaargagmtgcagcccaggttctcctgcacggagcctgcagctgcgttcccatgggccccgctgcaagccgggctcagcgctgacgccggcgctgcttctatttttcacgatgctgtaatctccagcagatgctctgtgagcagaaccctcagaagaaatttcccttcttcacgcacctygggaagatttcgacaatctatgagcagaagaatgtttaatagcttgaattaattattttttcaggtctactttattatttttttttccagatgtcatttactgctctaatttggttttgccaagatt

SEQ ID NO: 79348 - DNA, 576 bp, Chicken  19866894370291_5
tccattcagcagaaagcctcttttcattgaaactggcataaatctggagtaattccctctgttccgatggagcagctcaggatttayggcagcgtgacacggcaggcagaatccaggccacaargagmtgcagcccaggttctcctgcacggagcctgcagctgcgttcccatgggccccgctgcaagccgggctcagcgctgacgccggcgctgcttctatttttcacgatgctgtaatctccagcagatgctctgtgagcagaaccctcagaagaaatttcccttcttcacgcacctygggaagatttcgacaatctatgagcagaagaatgtttaatagcttgaattaattattttttcaggtctactttattatttttttttccagatgtcatttactgctctaatttggttttgccaagatttatataataattatttctaacgtctcactggactgtgtgaaacaagagttcagaagacggcagaaatatcttctgtgcagatgatgtgtgaacaagcaaggggagaagatcaagaattcaggggaataccaatcagctttaccagacaa

SEQ ID NO: 79349 - DNA, 600 bp, Chicken  19866894370294_1
gtaaaaaataaatgcaaatggtatttcctagcctctaagtgcactttgcagcctaaaggaagatctttcttcggagacattttaatgtcctttcctgacttatttaaagagcaaaggagtaaaaactaattagaagcagaaggtaggaagacagtcttgaatccaggttcctttgggattcagtgccattccatcacaagtatcccaccacaaaatcccttcaataagcctattgagttccttttaaaaccagtttggcaattttatttggcaaaagctattctgcaattaagaaaaagkccgggggaccccaacaaaacttcagtgaaatggattttttgttgcatctgaatggcagtgtgactgttcagatgaggtttacattaaggtggtgtgtttcagtatggacaaagctgtgcttcagacgtatcggccccttgtcaaagtactgttagatacaacattaatgttgctactcagtttgaaacggaagcttttttggccatagtaaaacaaagaacactggctttggaggcagatatgattaactttccgttgtgtgtaaatcaactacagcattccaggagtttttatgtgtct

SEQ ID NO: 79350 - DNA, 600 bp, Chicken  19866894370297_1
gagttcagaactgcaaagcgatatgcctggagagtgccaccacatgagctaccacatcttcctccactaccactcgcaaacacctttcaaaactgctatcactgggggcatagtgcagattcaattccttctcactggctgtttccctgcacaattcccttccaacccaagccattctgcagtcctctgaattgggctccccctggcaaaaagggcccatacagcgatcccattaacacctcgagctgcagctcacgggggcacagccctactggcagaccagctgcccttgggacagcrgggttggtgtggaaatattgacacaagccccagctgtcaatggtaacgatccctgggagcagttccccacgtggagaacgtcctcctgtgatcaccagggctgacacacgctatgttcatttttctcctctgcagctcagtgccagacaagccctctgcctgtgtttgtgcacaaaggaaaaatgctgctgctcccagacgctgccccctccgcaggtgttatggatgcttcccccagatatatcaccttgcctttttttgtgtgtgtgtgtgttgctgtttaattattatttacttact

SEQ ID NO: 79351 - DNA, 600 bp, Chicken  19866894370298_1
cacctatctttctatgcttatatcacctaagtttgatttagcacaggtaaaacaagttgttctatgtggcacatgtatgtggcgtttgctcattttccctttctgtgttgttttctccagattattggaacaatcccactgatgcctaatccagtcccctccagccaggcagcaggtggagctcagggccttcaggtgcagccaataactccacagttattgaccaatgcccagggtcagatcatcgctaccgtcatcggcaaccagatactccccgtgatcaatacccagggaataacrctatcgccactcaaaccaggccaacaggtaaagcagtggtagcctgaatgattatcagaacagatgcacaasaatcttctacttctcatagactctcacagtctttctaaaaattcacttatttcctgtttatgctactgaaagatgaattttgttgcatatagtgtattaccgcatgttctatatgtaattataatataaagtcattttaaatgatgtatttatacattcatgtgttgtccagctattcttttctttttccctttaaaaggtcagtatagtgtcaacaaaaattttctg

SEQ ID NO: 79352 - DNA, 600 bp, Chicken  19866894370298_2
atgtatgtggcgtttgctcattttccctttctgtgttgttttctccagattattggaacaatcccactgatgcctaatccagtcccctccagccaggcagcaggtggagctcagggccttcaggtgcagccaataactccacagttattgaccaatgcccagggtcagatcatcgctaccgtcatcggcaaccagatactccccgtgatcaatacccagggaataacrctatcgccactcaaaccaggccaacaggtaaagcagtggtagcctgaatgattatcagaacagatgcacaasaatcttctacttctcatagactctcacagtctttctaaaaattcacttatttcctgtttatgctactgaaagatgaattttgttgcatatagtgtattaccgcatgttctatatgtaattataatataaagtcattttaaatgatgtatttatacattcatgtgttgtccagctattcttttctttttccctttaaaaggtcagtatagtgtcaacaaaaattttctgcagagaaagcaaagtaggaatataaggcctataaaattcagtttattggttggtggttactcagtagattgg

SEQ ID NO: 79353 - DNA, 600 bp, Chicken  19866894370307_1
acagaaaatttcctctcattaagtactacgcaaagaaattctgccctcatttagcagcagcagaccaagcaaactgaaacctaatcctctcatgctattattattaaaatgtatatttatatgactgtcacattaactcccatgtaacgttaccactgttgtacctgcccacaccccttaactctccaatcgttggagtgcttctccctttaaatagtcatcttctcttccaagcagcaatacattcggatgcctcttactcctgcccacattattacccctcttcaaatcaaattcatrractgctctgtaggtctgcaggtctttgccacgttatcaacaattgataagacttttaatattgccttccagtccaaacctttctgccgctatggaaccttacaatcatcaccaggtttcagccacagttctgctaatgctatctttttactaactgttcatgctataagtacccaagggtacctcattccattagaaacacagaaatcctgacaccaccccatcccccactgtgayctccaatctttcatcttctcaatgaaggttcaaaccaacaattatttctagtatcctgtattg

SEQ ID NO: 79354 - DNA, 600 bp, Chicken  19866894370307_2
cagaaaatttcctctcattaagtactacgcaaagaaattctgccctcatttagcagcagcagaccaagcaaactgaaacctaatcctctcatgctattattattaaaatgtatatttatatgactgtcacattaactcccatgtaacgttaccactgttgtacctgcccacaccccttaactctccaatcgttggagtgcttctccctttaaatagtcatcttctcttccaagcagcaatacattcggatgcctcttactcctgcccacattattacccctcttcaaatcaaattcatrractgctctgtaggtctgcaggtctttgccacgttatcaacaattgataagacttttaatattgccttccagtccaaacctttctgccgctatggaaccttacaatcatcaccaggtttcagccacagttctgctaatgctatctttttactaactgttcatgctataagtacccaagggtacctcattccattagaaacacagaaatcctgacaccaccccatcccccactgtgayctccaatctttcatcttctcaatgaaggttcaaaccaacaattatttctagtatcctgtattgc

SEQ ID NO: 79355 - DNA, 600 bp, Chicken  19866894370307_3
caatacattcggatgcctcttactcctgcccacattattacccctcttcaaatcaaattcatrractgctctgtaggtctgcaggtctttgccacgttatcaacaattgataagacttttaatattgccttccagtccaaacctttctgccgctatggaaccttacaatcatcaccaggtttcagccacagttctgctaatgctatctttttactaactgttcatgctataagtacccaagggtacctcattccattagaaacacagaaatcctgacaccaccccatcccccactgtgayctccaatctttcatcttctcaatgaaggttcaaaccaacaattatttctagtatcctgtattgctcacaacacctrtctacaaacatttcagagcagcacttttattcatttattttcccttttatatcctaaactcaagacttttctggaagtataaatgctttacttttccaaaagccaccttctatggaggcatattttattagcagctcaatcgctctccaacaccgctgtgattttatgyagatttcctaatgaggtctctactgccaagacttcttatctgttcccttcaaaac

SEQ ID NO: 79356 - DNA, 600 bp, Chicken  19866894370307_4
gtctgcaggtctttgccacgttatcaacaattgataagacttttaatattgccttccagtccaaacctttctgccgctatggaaccttacaatcatcaccaggtttcagccacagttctgctaatgctatctttttactaactgttcatgctataagtacccaagggtacctcattccattagaaacacagaaatcctgacaccaccccatcccccactgtgayctccaatctttcatcttctcaatgaaggttcaaaccaacaattatttctagtatcctgtattgctcacaacacctrtctacaaacatttcagagcagcacttttattcatttattttcccttttatatcctaaactcaagacttttctggaagtataaatgctttacttttccaaaagccaccttctatggaggcatattttattagcagctcaatcgctctccaacaccgctgtgattttatgyagatttcctaatgaggtctctactgccaagacttcttatctgttcccttcaaaacyaggatggagccaacttactartcatcacaaactttatgttcttatttacatagttgagtttcttttttttcctca

SEQ ID NO: 79357 - DNA, 600 bp, Chicken  19866894370307_5
cctcattccattagaaacacagaaatcctgacaccaccccatcccccactgtgayctccaatctttcatcttctcaatgaaggttcaaaccaacaattatttctagtatcctgtattgctcacaacacctrtctacaaacatttcagagcagcacttttattcatttattttcccttttatatcctaaactcaagacttttctggaagtataaatgctttacttttccaaaagccaccttctatggaggcatattttattagcagctcaatcgctctccaacaccgctgtgattttatgyagatttcctaatgaggtctctactgccaagacttcttatctgttcccttcaaaacyaggatggagccaacttactartcatcacaaactttatgttcttatttacatagttgagtttcttttttttcctcagatataataataccacaacagaactcacatattaaaaagaaaaataacctgcataaagaattctactcctgacagtcacaagggctttcaaacaggaaaagtctgattcaaaatgctttttcctcattagaaagtcccttatatgcatgcagataaagatcactaagca

SEQ ID NO: 79358 - DNA, 600 bp, Chicken  19866894370307_6
tccaatctttcatcttctcaatgaaggttcaaaccaacaattatttctagtatcctgtattgctcacaacacctrtctacaaacatttcagagcagcacttttattcatttattttcccttttatatcctaaactcaagacttttctggaagtataaatgctttacttttccaaaagccaccttctatggaggcatattttattagcagctcaatcgctctccaacaccgctgtgattttatgyagatttcctaatgaggtctctactgccaagacttcttatctgttcccttcaaaacyaggatggagccaacttactartcatcacaaactttatgttcttatttacatagttgagtttcttttttttcctcagatataataataccacaacagaactcacatattaaaaagaaaaataacctgcataaagaattctactcctgacagtcacaagggctttcaaacaggaaaagtctgattcaaaatgctttttcctcattagaaagtcccttatatgcatgcagataaagatcactaagcacaaaatgcatgaatcagattgaatctacagctacgtgcaagtatccagaagaaagt

SEQ ID NO: 79359 - DNA, 600 bp, Chicken  19866894370307_7
tgaaggttcaaaccaacaattatttctagtatcctgtattgctcacaacacctrtctacaaacatttcagagcagcacttttattcatttattttcccttttatatcctaaactcaagacttttctggaagtataaatgctttacttttccaaaagccaccttctatggaggcatattttattagcagctcaatcgctctccaacaccgctgtgattttatgyagatttcctaatgaggtctctactgccaagacttcttatctgttcccttcaaaacyaggatggagccaacttactartcatcacaaactttatgttcttatttacatagttgagtttcttttttttcctcagatataataataccacaacagaactcacatattaaaaagaaaaataacctgcataaagaattctactcctgacagtcacaagggctttcaaacaggaaaagtctgattcaaaatgctttttcctcattagaaagtcccttatatgcatgcagataaagatcactaagcacaaaatgcatgaatcagattgaatctacagctacgtgcaagtatccagaagaaagtcagaagcatttttacagccat

SEQ ID NO: 79360 - DNA, 599 bp, Chicken  19866894370312_1
  misc_feature (1)..(188): n is any nucleotide
nnnnnnnnnnnnnnnnnnnnnnnnnnnnnnnnnnnnnnnnnnnnnnnnnnnnnnnnnnnnnnnnnnnnnnnnnnnnnnnnnnnnnnnnnnnnnnnnnnnnnnnnnnnnnnnnnnnnnnnnnnnnnnnnnnnnnnnnnnnnnnnnnnnnnnnnnnnnnnnnnnnnnnnnnnnnnnnnnnnnnnnnnnnnatgctgttcttgagtcacaaattagagccctggtaagacagccccctcttcctatctgctgctcttgcatgtagaagacatatctgggatatgttatccttgctggttatargtgtttattgctccttcagctctctgtccctcttggcagcaagcatgctgagtttccaaaactgtggcagagacaaaggaagttacaaaattttcctgccctaagaaactactcacgtcaatcattttggcagatggtttcagtcagactcttgtatctaccaaactggacacaaagatcatcatgctggagtagcagacctattttgaactgtcatctgcagatgaatgacctgcttagatgggctccagattttaacaggattagatttcttcttttttcttcctctttcatgtgat

SEQ ID NO: 79361 - DNA, 600 bp, Chicken  19866894370314_1
ttctttcctcaagctcagctccactctctaaatgagacaaaaccagcagccaacttgattaacattcaaatgtctcatattgtttaagtcagggcagtagtaatgttgaatccacacacacacaccccttacagccctctgctcccagacctcctccatgtgcatgcagtgtgccagacaatgcctttccacccagagagcaaatgctcccacctctccatccaccttcaaaacagaaacggaacctctgcatttcttcctccttacagagacatggagagtacactgaggaagtatttwaaaaaaaagtgtaaatactaacagtaaatggcccacgcctggaccatttggagttaacagtttcaagcaatgagggggaaggaggcagaagaaagcagagtaactctgcagctaaggacggggcaatatgctcttcagcatctctcctctccttcggggaaagagccaggcaccctgcacccagcacacacctaccactttccatgcttggcaataggagagggagcccaaatgttgtctcagcatatccaggagatgcaagttcctgaacaactgacgtgtcccaggaaaacgtgtcct

SEQ ID NO: 79362 - DNA, 600 bp, Chicken  19866894370314_2
tctttcctcaagctcagctccactctctaaatgagacaaaaccagcagccaacttgattaacattcaaatgtctcatattgtttaagtcagggcagtagtaatgttgaatccacacacacacaccccttacagccctctgctcccagacctcctccatgtgcatgcagtgtgccagacaatgcctttccacccagagagcaaatgctcccacctctccatccaccttcaaaacagaaacggaacctctgcatttcttcctccttacagagacatggagagtacactgaggaagtatttwwaaaaaaagtgtaaatactaacagtaaatggcccacgcctggaccatttggagttaacagtttcaagcaatgagggggaaggaggcagaagaaagcagagtaactctgcagctaaggacggggcaatatgctcttcagcatctctcctctccttcggggaaagagccaggcaccctgcacccagcacacacctaccactttccatgcttggcaataggagagggagcccaaatgttgtctcagcatatccaggagatgcaagttcctgaacaactgacgtgtcccaggaaaacgtgtcctg

SEQ ID NO: 79363 - DNA, 600 bp, Chicken  19866894370314_3; identical to SEQ ID NO: 79362

SEQ ID NO: 79364 - DNA, 600 bp, Chicken  19866894370314_4
gattcccttgtgctcagagacaagcacaagtcacagagctttcatcaatagtcctcgtctcaaattcctatagaactcagcagatgcctttctgacctgaaacgctctctcagatcaggatggactgctgtcccacaaggctcccgagttatgagagatggcactgccagacatgtggtcagagagtacacaggcgcagaaacctgtgcaagtcaccttaaatacaaaaacagtttttctccaacaatttcccaatttaagtacagttttggcatggcagtctggaccagagatatgagmtagaaaatgcctccaggttctactcccagctctgccactaactctgtaagtcaagttggccaactcatcttcttgtactttctgtttacctccattctgcatattgttttctgtttactctcctgtaagccgtatgtttttgatcacactgttctcaaagctcttgggaagttctctgacagaacaccctcatactgctgctgccaaaataaattaaacacatgagctcctccttaacaggactaatgacttgcttgggggattaggaactaactgtccctccgctggcacggctaagat

SEQ ID NO: 79365 - DNA, 600 bp, Chicken  19866894370328_1
tttcctccctcatattgttttctgagttggtcacttgcgtggagtggtagtcggagtcttcaggaaatacagcacgtctgctgtggtaactagagttgttcattttctcttgttttgtgtaatactctcagttcctactggtgagggcatagcggcagagttaggtttggcatggaagcactgcttgctaacagaggcagcaactagtctctcccctaaagctacatgttcaaatcaccaagtgaatagtcatcattttgcaaggccgaccacactaacgtgatgtttttctgctgagcrtttttctggcagcagaagggacagatgtacttcccaaagggctaaactgtagcctgctggaattgtctctctgaatttagtctgtgtaggagagtatacttaaatgagtttataaaaataaagaagatgaaagtagagtttcatttgctatgcatttaaaataaaaatcagccacttagtttcttatagtaccagtgacaatggtttttgcataccctgtcttctcctatgatttagtttatctgcagagctgtgaacaacatcagggttaaaatgaatttgcttttcaagcgttgcttg

SEQ ID NO: 79366 - DNA, 600 bp, Chicken  19866894370334_1
cacctcacccatgcacatcaacagatcatgagtagggagctgtatacagagctgaatatcagtttcactgcattcagtacaatgatagcaacattggaatattgcaaaatttgcaccaggttggttccatgaatgttgacataagaacgtaaagaacactccttctgttgcaagtttgtcaggacctattgaagagcagtctatgtcagaatggcaacatgtaaattctccatcaaagaaaaaattcaagacagccctcatcaggtagagtgatgtatgctgtcttttgggataggaaargagtgatccttctggatttcctggaacctagaaaaactatcaactatgattgctacatcactacactatctcacttgcaacatgatagcagcaggtctcataccagtttcaagtccatggaacacaatgccagttttggatggactctttccaytcccactgtatagcctgaatttagtttgtcattttctgacttccatgtgtttaggatgatgaaagatgatctgagtgagcattttcctagcaaaggcaatgtcatagtaactgtcaaatagtgggtcacctccgctggtgcagaat

SEQ ID NO: 79367 - DNA, 600 bp, Chicken  19866894370334_2
aacactccttctgttgcaagtttgtcaggacctattgaagagcagtctatgtcagaatggcaacatgtaaattctccatcaaagaaaaaattcaagacagccctcatcaggtagagtgatgtatgctgtcttttgggataggaaargagtgatccttctggatttcctggaacctagaaaaactatcaactatgattgctacatcactacactatctcacttgcaacatgatagcagcaggtctcataccagtttcaagtccatggaacacaatgccagttttggatggactctttccaytcccactgtatagcctgaatttagtttgtcattttctgacttccatgtgtttaggatgatgaaagatgatctgagtgagcattttcctagcaaaggcaatgtcatagtaactgtcaaatagtgggtcacctccgctggtgcagaattttatgagcacagcatacaagctcttgtttattgctggcaaaaatgcatagctaatgatgatgactacgttgaaaaattgtgttttgcaattgagaatttgctctattaagtagtgttactgtgctctttgtagctgtcgtagtttctctggaa

SEQ ID NO: 79368 - DNA, 599 bp, Chicken  19866894370335_1
  misc_feature (1)..(78): n is any nucleotide
nnnnnnnnnnnnnnnnnnnnnnnnnnnnnnnnnnnnnnnnnnnnnnnnnnnnnnnnnnnnnnnnnnnnnnnnnnnnnnaaaaaaaattctatggagctgtattgcctatactatcaaagtcaatagagcagctcctattgcctgaagaggcaccagatttaggccctgacacctgctgtcaatctgcagcctcagacagtactacattcagcagtagtatgtgctttataatgccgatgtagatattcagttcccaaattcaatttctcgacccatatttctattctgattttcttttgmcttgagcagtayaaagagcgtagatagttcctcctttctctaatctgcatcacacttggctcrtgagaaagcaccatgccacggttttgttccacgggtacaactgaagtttatctgtcttttaaccaaagttgcttccactggaacatttcttaatggaagcacttctatcactgttaagttggtaacaaggtatttgacagcctaaattttgagctaaacatagtaggaacactttaaatatactttgtcttacctctttccagcccttcakcacaagagatttcttttctctcact

SEQ ID NO: 79369 - DNA, 599 bp, Chicken  19866894370335_2
  misc_feature (1)..(66): n is any nucleotide
nnnnnnnnnnnnnnnnnnnnnnnnnnnnnnnnnnnnnnnnnnnnnnnnnnnnnnnnnnnnnnnnnnaaaaaaaattctatggagctgtattgcctatactatcaaagtcaatagagcagctcctattgcctgaagaggcaccagatttaggccctgacacctgctgtcaatctgcagcctcagacagtactacattcagcagtagtatgtgctttataatgccgatgtagatattcagttcccaaattcaatttctcgacccatatttctattctgattttcttttgmcttgagcagtayaaagagcgtagatagttcctcctttctctaatctgcatcacacttggctcrtgagaaagcaccatgccacggttttgttccacgggtacaactgaagtttatctgtcttttaaccaaagttgcttccactggaacatttcttaatggaagcacttctatcactgttaagttggtaacaaggtatttgacagcctaaattttgagctaaacatagtaggaacactttaaatatactttgtcttacctctttccagcccttcakcacaagagatttcttttctctcactcagaccttctag

SEQ ID NO: 79370 - DNA, 599 bp, Chicken  19866894370335_3
  misc_feature (1)..(15): n is any nucleotide
nnnnnnnnnnnnnnnaaaaaaaattctatggagctgtattgcctatactatcaaagtcaatagagcagctcctattgcctgaagaggcaccagatttaggccctgacacctgctgtcaatctgcagcctcagacagtactacattcagcagtagtatgtgctttataatgccgatgtagatattcagttcccaaattcaatttctcgacccatatttctattctgattttcttttgmcttgagcagtayaaagagcgtagatagttcctcctttctctaatctgcatcacacttggctcrtgagaaagcaccatgccacggttttgttccacgggtacaactgaagtttatctgtcttttaaccaaagttgcttccactggaacatttcttaatggaagcacttctatcactgttaagttggtaacaaggtatttgacagcctaaattttgagctaaacatagtaggaacactttaaatatactttgtcttacctctttccagcccttcakcacaagagatttcttttctctcactcagaccttctagatgagaggtttgctcaagagcagcaggcatcactccagctggagaatccag

SEQ ID NO: 79371 - DNA, 600 bp, Chicken  19866894370335_4
atatttctattctgattttcttttgmcttgagcagtayaaagagcgtagatagttcctcctttctctaatctgcatcacacttggctcrtgagaaagcaccatgccacggttttgttccacgggtacaactgaagtttatctgtcttttaaccaaagttgcttccactggaacatttcttaatggaagcacttctatcactgttaagttggtaacaaggtatttgacagcctaaattttgagctaaacatagtaggaacactttaaatatactttgtcttacctctttccagcccttcakcacaagagatttcttttctctcactcagaccttctagatgagaggtttgctcaagagcagcaggcatcactccagctggagaatccagtgctgttgcagtcaagttaactgggagaacagttgttctgcatcctcacaccacttgtatgtgggatgtctgatgaaactgggtgctattgcaaatgataaaggagctttgttttttagtgtccagattcaactcattcatcaacacgatgcattttattatcctcatcagctcgtgcttttcccgagggggaaaaaatgccaaatctcatt

SEQ ID NO: 79372 - DNA, 600 bp, Chicken  19866894370343_1
atgcgttacagacactcagaaagccacaaatgctattgattcatggtcatggtgtagctgaaactcaaaatgataattaatctgaaaagaagaacagtcaaacaggaagaggatccatgagtctcagctgccattccacgatatactactgtgccattatgtaagtgttttggcaaggcatgtaattcctctgtttacgcatgtctgggaggttgtgcccctcatttacatgttgtgagtaagtgctgtgagaatggagatgagtaaaatctctccagaagcaatgggcaaagcaactgyttttttatttatcattacagagctactctgcttttttaagcaagacaagaaaaccttccagaaccaggaatcgccacctagaacaaaagacacacaggagaagctgcagtatatgggaatggtcatttattgtgagctagtattgtttggtggagtgtcatgtgtctaaaccaaagccagaaagccaaggcgaaaacaagaaaaacatttgcagcgtgaccctgagaaaaagcaaacacagggctttttggactgcctgccagctggaacgagcctggaaacggtgagcaaagaaactgc

SEQ ID NO: 79373 - DNA, 600 bp, Chicken  19866894370345_1
tcatcatctaataagatatttgataattagtgaatatgaggaaaaaaagacttctactaactttttctcattccttctttaatatgtgactctacctgaaagtcttactttttctacattgatacattctcataatttcagtgtctttttccacctttgtctttcacttgacgatgcatttcctccaaaacttcacacttcctgcaggtgaagcaatgtatctggagctgtaaaagaaaactctctctctatatatacatacacacacacatatatataatgtaaatatatattatttamatgttagaaatggtttcatcttacatttatatatataataaaaatatatattatataaaagccttattttgaataacatatatatccattgaaaatatatagacacgaaactgaagaaaaccctttgaaactcgtcctatgtgtcttgcgttccttcttgtgagtaagcagagaataaaataatatatattcttaktaactcaatatagttttacaggggttacctgtagttttatagtctcgcaaataggtggcactaatgaattctgcatttgcaataacacagtaatgtatctcttc

SEQ ID NO: 79374 - DNA, 600 bp, Chicken  19866894370345_2
acttcctgcaggtgaagcaatgtatctggagctgtaaaagaaaactctctctctatatatacatacacacacacatatatataatgtaaatatatattatttamatgttagaaatggtttcatcttacatttatatatataataaaaatatatattatataaaagccttattttgaataacatatatatccattgaaaatatatagacacgaaactgaagaaaaccctttgaaactcgtcctatgtgtcttgcgttccttcttgtgagtaagcagagaataaaataatatatattcttaktaactcaatatagttttacaggggttacctgtagttttatagtctcgcaaataggtggcactaatgaattctgcatttgcaataacacagtaatgtatctcttcccaactaagaaaatacaacccttaaaacctgataagacggcagggagtagaatatgttgcccagtgggttgcactctacatacttggaaactttgaagaccctactagactaaacctttagccatctggactgatttagagttggcccttattttcaatggaggttgagccagaagctacctgaagttgcttccag

SEQ ID NO: 79375 - DNA, 572 bp, Chicken  19866894370347_1
gccaacgatgtgagtcatgggcacggagctcactggggtgagcagaaggagtggggccaggctgtagcgagggggtgctctcagctcaggagtggaggcactgaaaacaccaaatttttgcaggaaaacttccccccacacccacctatcccaaagctgacagagctctggtttcacagtgatgcacaacaactgtagaacctgattctaacaccaattccagcaatgctgctggggctattgacatgaaataaatggcactggggaacagcatgcatgcagaggttgggtacctgatgratggatccatcgctgcagatggagccatggacagaggccaagcagcagcgcagggtatatgcctttggctcccagagctatgcaaagtcacacctgggaaccaagcgcagtgttgtaattaacacaaagagaaaaaggcttcatagcgaggcactcattacctcccagctcttctaggaaagcctgttgctgcagacagtggtaattaaatggagtattacaaagggctcagtgagtgagcgatgggttaggcacagaaccggaggagaatt

SEQ ID NO: 79376 - DNA, 599 bp, Chicken  19866894370351_1
  misc_feature (1)..(252): n is any nucleotide
nnnnnnnnnnnnnnnnnnnnnnnnnnnnnnnnnnnnnnnnnnnnnnnnnnnnnnnnnnnnnnnnnnnnnnnnnnnnnnnnnnnnnnnnnnnnnnnnnnnnnnnnnnnnnnnnnnnnnnnnnnnnnnnnnnnnnnnnnnnnnnnnnnnnnnnnnnnnnnnnnnnnnnnnnnnnnnnnnnnnnnnnnnnnnnnnnnnnnnnnnnnnnnnnnnnnnnnnnnnnnnnnnnnnnnnnnnnnnnnnnnnnnnnnnnnnatggttcatcctggggcagaggcagtctgctgatactacctggaagtrtagtttaatccccatgcattatcacctgtatgagtgtgttttgatccaaggkggaaaaaaaagtaaacaacacgttagtctataacttagtaaaggaacaaactctgtgaaataattttttttcaataaatatatatatttctctccagcagttgcctggaaattgaaggaatagttatggaccacacgtagtgagggaaaagcgagtcatctcagcattttgctccaatttctaccactggctacatgactgtatacctgtaagtgaaatcacttcaagaagaatctgcaacagagaa

SEQ ID NO: 79377 - DNA, 599 bp, Chicken  19866894370351_2
  misc_feature (1)..(200): n is any nucleotide
nnnnnnnnnnnnnnnnnnnnnnnnnnnnnnnnnnnnnnnnnnnnnnnnnnnnnnnnnnnnnnnnnnnnnnnnnnnnnnnnnnnnnnnnnnnnnnnnnnnnnnnnnnnnnnnnnnnnnnnnnnnnnnnnnnnnnnnnnnnnnnnnnnnnnnnnnnnnnnnnnnnnnnnnnnnnnnnnnnnnnnnnnnnnnnnnnnnnnnnnatggttcatcctggggcagaggcagtctgctgatactacctggaagtrtagtttaatccccatgcattatcacctgtatgagtgtgttttgatccaaggkggaaaaaaaagtaaacaacacgttagtctataacttagtaaaggaacaaactctgtgaaataattttttttcaataaatatatatatttctctccagcagttgcctggaaattgaaggaatagttatggaccacacgtagtgagggaaaagcgagtcatctcagcattttgctccaatttctaccactggctacatgactgtatacctgtaagtgaaatcacttcaagaagaatctgcaacagagaaactctgtacgtaatgaatagatgttactcatctgtattattcttcactgatg

SEQ ID NO: 79378 - DNA, 599 bp, Chicken  19866894370351_3
  misc_feature (1)..(197): n is any nucleotide
nnnnnnnnnnnnnnnnnnnnnnnnnnnnnnnnnnnnnnnnnnnnnnnnnnnnnnnnnnnnnnnnnnnnnnnnnnnnnnnnnnnnnnnnnnnnnnnnnnnnnnnnnnnnnnnnnnnnnnnnnnnnnnnnnnnnnnnnnnnnnnnnnnnnnnnnnnnnnnnnnnnnnnnnnnnnnnnnnnnnnnnnnnnnnnnnnnnnnatggttcatcctggggcagaggcagtctgctgatactacctggaagtrtagtttaatccccatgcattatcacctgtatgagtgtgttttgatccaaggkggkaaaaaaagtaaacaacacgttagtctataacttagtaaaggaacaaactctgtgaaataattttttttcaataaatatatatatttctctccagcagttgcctggaaattgaaggaatagttatggaccacacgtagtgagggaaaagcgagtcatctcagcattttgctccaatttctaccactggctacatgactgtatacctgtaagtgaaatcacttcaagaagaatctgcaacagagaaactctgtacgtaatgaatagatgttactcatctgtattattcttcactgatgtcc

SEQ ID NO: 79379 - DNA, 599 bp, Chicken  19866894370361_1
  misc_feature (1)..(106): n is any nucleotide
nnnnnnnnnnnnnnnnnnnnnnnnnnnnnnnnnnnnnnnnnnnnnnnnnnnnnnnnnnnnnnnnnnnnnnnnnnnnnnnnnnnnnnnnnnnnnnnnnnnnnnnnnnttaggaaataggggtctcattaacaaagcctctcgcctttattagatcatataaataaccacgagagcctgcaaaagatcgattacagcctttaaacgtttacagaatcagtgtttaattaagaccattttaatatgcaaatcaagcctaattatcatcatttgttaatgttagtctgcctgggctctaaacakcttcagctacaaatatagtaacagtatcatatttttcctgcttttttttttttattattcctaggaggaacrgcagaggaaacaatcaagttgtgccaccagtacacacgaaggctttcaaaaccgcccttccatttaccatttggagatgaaggtcaaaaaagcgcccagcgtagcataaaatctagctgaaacgatatgcttttcttcacccactatttttcagagtgctttaattaatgcattttccttcaaagtatataacccctccgggagcttcttttgatgaaaatctgccc

SEQ ID NO: 79380 - DNA, 599 bp, Chicken  19866894370361_2
  misc_feature (1)..(34): n is any nucleotide
nnnnnnnnnnnnnnnnnnnnnnnnnnnnnnnnnnttaggaaataggggtctcattaacaaagcctctcgcctttattagatcatataaataaccacgagagcctgcaaaagatcgattacagcctttaaacgtttacagaatcagtgtttaattaagaccattttaatatgcaaatcaagcctaattatcatcatttgttaatgttagtctgcctgggctctaaacakcttcagctacaaatatagtaacagtatcatatttttcctgcttttttttttttattattcctaggaggaacrgcagaggaaacaatcaagttgtgccaccagtacacacgaaggctttcaaaaccgcccttccatttaccatttggagatgaaggtcaaaaaagcgcccagcgtagcataaaatctagctgaaacgatatgcttttcttcacccactatttttcagagtgctttaattaatgcattttccttcaaagtatataacccctccgggagcttcttttgatgaaaatctgcccttgttcagcgcagtgattgaacacatcggtttgtaacacattgccagtcaggagctgatactgggacttctc

SEQ ID NO: 79381 - DNA, 600 bp, Chicken  19866894370369_1
tttcatcacacatccctgaatgaaaaatacctctcattatctgtgtaatgaaggtaaatcaatgaatgacttttcaatcctaatgttaatgggaaacccaataccttgcctgagcattagctaagatgagtactttgcagcagcaaacagaagctgaaacaaaggtggggtgaaaatgagtaggtgagtggaaagagggcattcccagttgccaaggaggaatttaaaatcgtgattatcacatcagattttgaaacacagttgtatatacaggctgatcttaaatgagaaattggtcarttgtgccctaaaagttaatgcaaccgatgtattccagatttttttttatttttattttttaacttatcatgctgaaagtaatgattcccaaagtttaactggcaaaaacagaagttcatcagtcactgttcaagctttttccatgctattagtattagccctctttgcctcaagaaagctatcaatgatgccgtacttggatctatgcaaataccaattaaggccrgtatatgtcctgaagaaatgatagtccaagcaggcaaagtgctgaagaaagtaagcagtggaaaaatgggagaa

SEQ ID NO: 79382 - DNA, 600 bp, Chicken  19866894370369_2
aaatcgtgattatcacatcagattttgaaacacagttgtatatacaggctgatcttaaatgagaaattggtcarttgtgccctaaaagttaatgcaaccgatgtattccagatttttttttatttttattttttaacttatcatgctgaaagtaatgattcccaaagtttaactggcaaaaacagaagttcatcagtcactgttcaagctttttccatgctattagtattagccctctttgcctcaagaaagctatcaatgatgccgtacttggatctatgcaaataccaattaaggccrgtatatgtcctgaagaaatgatagtccaagcaggcaaagtgctgaagaaagtaagcagtggaaaaatgggagaaataaaagtggctgcaaaaccaagcagagagagaggtgtgttctcactttgctttaagagaggagaaagaaaatgtttgtatggctgagggaagagccaggagagacactggagatgtcagagaggtatgggaaagtgatgaagcaatgggaaggaagagaatagggaaaaacggatgagacagggagaagcatttgaataccagaggctgaagggaaaaacaaaac

SEQ ID NO: 79383 - DNA, 600 bp, Chicken  19866894370372_1
aacaagcaccctcaatcatggtatttgtctcaaaagaacaaagaaagggctcaaaatctttcaggggtaacattaaatgctagaaaaagtaacgcctaggaaagcattaatgtgggattaatgtcttgtccttaaatattctgtgaagcacgtgtctctgcaggccctagactggagtcttctgacctgcaaaagcaaaattaattgttctgaactttcagaacaaaggtcatatggtagaaaaaggagattggggaactacccaattcttgattaaaatcttaaagtttggtacctacwgttctctattctagtgcaagagtacagattacaaagcatgcaggagataagataccttaagatgmacgttaccgtgaggctttttattcactaacatttctgctggtgacatcacttaactttcacatgtagcacaagtgctgcagaaacattcagtgytgctgcctccatccaccaggggatagtgtttacaaaagytacaatctaaatcaccagtatcacccttactgtccaaaatgcaagcaatgcatggaccagaaacttcagctgattcatgttcttcttttcacgtagctgtat

SEQ ID NO: 79384 - DNA, 600 bp, Chicken  19866894370372_2
ggtaacattaaatgctagaaaaagtaacgcctaggaaagcattaatgtgggattaatgtcttgtccttaaatattctgtgaagcacgtgtctctgcaggccctagactggagtcttctgacctgcaaaagcaaaattaattgttctgaactttcagaacaaaggtcatatggtagaaaaaggagattggggaactacccaattcttgattaaaatcttaaagtttggtacctacwgttctctattctagtgcaagagtacagattacaaagcatgcaggagataagataccttaagatgmacgttaccgtgaggctttttattcactaacatttctgctggtgacatcacttaactttcacatgtagcacaagtgctgcagaaacattcagtgytgctgcctccatccaccaggggatagtgtttacaaaagytacaatctaaatcaccagtatcacccttactgtccaaaatgcaagcaatgcatggaccagaaacttcagctgattcatgttcttcttttcacgtagctgtatacccaatgtgaagcccagcaggttatttacttggatccatgcatatgtgtggacagatagccaaa

SEQ ID NO: 79385 - DNA, 600 bp, Chicken  19866894370372_3
gcaggccctagactggagtcttctgacctgcaaaagcaaaattaattgttctgaactttcagaacaaaggtcatatggtagaaaaaggagattggggaactacccaattcttgattaaaatcttaaagtttggtacctacwgttctctattctagtgcaagagtacagattacaaagcatgcaggagataagataccttaagatgmacgttaccgtgaggctttttattcactaacatttctgctggtgacatcacttaactttcacatgtagcacaagtgctgcagaaacattcagtgytgctgcctccatccaccaggggatagtgtttacaaaagytacaatctaaatcaccagtatcacccttactgtccaaaatgcaagcaatgcatggaccagaaacttcagctgattcatgttcttcttttcacgtagctgtatacccaatgtgaagcccagcaggttatttacttggatccatgcatatgtgtggacagatagccaaaaatctcaacaagcttaagcatgttcctcaggatattgattgtgaacaacaacaaaaaaacccaacaatgaggagtcttatgaatacacagaaca

SEQ ID NO: 79386 - DNA, 600 bp, Chicken  19866894370372_4
aattaattgttctgaactttcagaacaaaggtcatatggtagaaaaaggagattggggaactacccaattcttgattaaaatcttaaagtttggtacctacwgttctctattctagtgcaagagtacagattacaaagcatgcaggagataagataccttaagatgmacgttaccgtgaggctttttattcactaacatttctgctggtgacatcacttaactttcacatgtagcacaagtgctgcagaaacattcagtgytgctgcctccatccaccaggggatagtgtttacaaaagytacaatctaaatcaccagtatcacccttactgtccaaaatgcaagcaatgcatggaccagaaacttcagctgattcatgttcttcttttcacgtagctgtatacccaatgtgaagcccagcaggttatttacttggatccatgcatatgtgtggacagatagccaaaaatctcaacaagcttaagcatgttcctcaggatattgattgtgaacaacaacaaaaaaacccaacaatgaggagtcttatgaatacacagaacatactatgtagacatgggaaaaatggggataaattacaat

SEQ ID NO: 79387 - DNA, 599 bp, Chicken  19866894370385_1
  misc_feature (1)..(196): n is any nucleotide
nnnnnnnnnnnnnnnnnnnnnnnnnnnnnnnnnnnnnnnnnnnnnnnnnnnnnnnnnnnnnnnnnnnnnnnnnnnnnnnnnnnnnnnnnnnnnnnnnnnnnnnnnnnnnnnnnnnnnnnnnnnnnnnnnnnnnnnnnnnnnnnnnnnnnnnnnnnnnnnnnnnnnnnnnnnnnnnnnnnnnnnnnnnnnnnnnnnntgttgtgcttcaaggggccatcttataaaataatgcactgttcttttctaaatccagaccattagatggactgaacattatgtctagagaaagatttcctgagsataactgttcttggaagagccatcttctgaattcttctatttaaatcatacagagcagaagcctggaacctaatttgggtctgttatgccttgttatttgtctgaaaatacaggtttataagctgagctttgaatatcacaagagaagtgggaktttgcattagattaaacaaggctcctgcactggaagtctgtgtgtatgcacttgagtaaccaaagctaaagaatgcctgccggagctgcagctgtttctttctaccttttccaactaaatgaataaacgtataacaaaaaataca

SEQ ID NO: 79388 - DNA, 599 bp, Chicken  19866894370385_2
  misc_feature (1)..(42): n is any nucleotide
nnnnnnnnnnnnnnnnnnnnnnnnnnnnnnnnnnnnnnnnnntgttgtgcttcaaggggccatcttataaaataatgcactgttcttttctaaatccagaccattagatggactgaacattatgtctagagaaagatttcctgagsataactgttcttggaagagccatcttctgaattcttctatttaaatcatacagagcagaagcctggaacctaatttgggtctgttatgccttgttatttgtctgaaaatacaggtttataagctgagctttgaatatcacaagagaagtgggaktttgcattagattaaacaaggctcctgcactggaagtctgtgtgtatgcacttgagtaaccaaagctaaagaatgcctgccggagctgcagctgtttctttctaccttttccaactaaatgaataaacgtataacaaaaaatacaagtaaaagtatgtaaaaaggacataaattggtgaatagarttcttgatctgttagccttggcatagactgcatgaggagaatcattcacagaatgtcatcaggaagagaagaaaggataacacttctataaaattgtacttcatctacaggacg

SEQ ID NO: 79389 - DNA, 600 bp, Chicken  19866894370385_3
tttaaatcatacagagcagaagcctggaacctaatttgggtctgttatgccttgttatttgtctgaaaatacaggtttataagctgagctttgaatatcacaagagaagtgggaktttgcattagattaaacaaggctcctgcactggaagtctgtgtgtatgcacttgagtaaccaaagctaaagaatgcctgccggagctgcagctgtttctttctaccttttccaactaaatgaataaacgtataacaaaaaatacaagtaaaagtatgtaaaaaggacataaattggtgaatagarttcttgatctgttagccttggcatagactgcatgaggagaatcattcacagaatgtcatcaggaagagaagaaaggataacacttctataaaattgtacttcatctacaggacgtacagagtaacttgggttgggagcgacctctgaggatcacctgagtcagttctctactctaagcaggcgcagggctttccccagctgcaccttcctcacagatgcttctctgagttagctgtcccaatgcttgactactctggttgtgaatttttcttccactctaatatgtgatcaaaatttctc

SEQ ID NO: 79390 - DNA, 599 bp, Chicken  19866894370388_1
  misc_feature (1)..(219): n is any nucleotide
nnnnnnnnnnnnnnnnnnnnnnnnnnnnnnnnnnnnnnnnnnnnnnnnnnnnnnnnnnnnnnnnnnnnnnnnnnnnnnnnnnnnnnnnnnnnnnnnnnnnnnnnnnnnnnnnnnnnnnnnnnnnnnnnnnnnnnnnnnnnnnnnnnnnnnnnnnnnnnnnnnnnnnnnnnnnnnnnnnnnnnnnnnnnnnnnnnnnnnnnnnnnnnnnnnnnnnnnnnntcttctaaagtgagatgcccaaactagcagatactttcaatgtgcactggaaaacaccgaggtgaattttgagtcaccaartcttcctgtgagactaaagggactgagaaattccagatgtggcactgagggatgtggtcagtgggcayggtggggatgggctgatggttgggctagataatcttagtggtctttcccaaccttaatgattctatgattctgtactaggtgggttttgccttcaggggaaaaaaaacacataatmagggtaacatattgttcagctacagactgccggtgactgccattctggtgtaacagtaggatttcctcttcagaagacactgaccttcctgcactctgaaataacaagcatgaaa

SEQ ID NO: 79391 - DNA, 599 bp, Chicken  19866894370388_2
  misc_feature (1)..(151): n is any nucleotide
nnnnnnnnnnnnnnnnnnnnnnnnnnnnnnnnnnnnnnnnnnnnnnnnnnnnnnnnnnnnnnnnnnnnnnnnnnnnnnnnnnnnnnnnnnnnnnnnnnnnnnnnnnnnnnnnnnnnnnnnnnnnnnnnnnnnnnnnnnnnnnnnnnnnnnntcttctaaagtgagatgcccaaactagcagatactttcaatgtgcactggaaaacaccgaggtgaattttgagtcaccaartcttcctgtgagactaaagggactgagaaattccagatgtggcactgagggatgtggtcagtgggcayggtggggatgggctgatggttgggctagataatcttagtggtctttcccaaccttaatgattctatgattctgtactaggtgggttttgccttcaggggaaaaaaaacacataatmagggtaacatattgttcagctacagactgccggtgactgccattctggtgtaacagtaggatttcctcttcagaagacactgaccttcctgcactctgaaataacaagcatgaaagaattacttacaagggtatacaggagtgtggagacttgttggcaggcgttgcagctgtccacgtgcac

SEQ ID NO: 79392 - DNA, 599 bp, Chicken  19866894370388_3
  misc_feature (1)..(35): n is any nucleotide
nnnnnnnnnnnnnnnnnnnnnnnnnnnnnnnnnnntcttctaaagtgagatgcccaaactagcagatactttcaatgtgcactggaaaacaccgaggtgaattttgagtcaccaartcttcctgtgagactaaagggactgagaaattccagatgtggcactgagggatgtggtcagtgggcayggtggggatgggctgatggttgggctagataatcttagtggtctttcccaaccttaatgattctatgattctgtactaggtgggttttgccttcaggggaaaaaaaacacataatmagggtaacatattgttcagctacagactgccggtgactgccattctggtgtaacagtaggatttcctcttcagaagacactgaccttcctgcactctgaaataacaagcatgaaagaattacttacaagggtatacaggagtgtggagacttgttggcaggcgttgcagctgtccacgtgcacttactgggcaagttgggaagaatccatccactgtcggctttgctttcctgacttcccatgcagctgccattcatgagcaggcatgctttggctgtctcctgtatagtggaaataga

SEQ ID NO: 79393 - DNA, 599 bp, Chicken  19866894370403_1
  misc_feature (1)..(119): n is any nucleotide
nnnnnnnnnnnnnnnnnnnnnnnnnnnnnnnnnnnnnnnnnnnnnnnnnnnnnnnnnnnnnnnnnnnnnnnnnnnnnnnnnnnnnnnnnnnnnnnnnnnnnnnnnnnnnnnnnnnnnnnataaatatcgcgatggcatgccaactgtatttaaaattggtttagacatgtatctattaggcattatcaagtacctatgaagaaagagggaataaattaaaaacagaaacaagcaatttgaaaagtttgttaaaacatgcctgaaattattgtgggtgaattacagcattaacttgcaaaytgatttctcatataattaaaaagttcacacactttgacctaaacctgaactttaactttagctgctgttttataacaggtgctttcaaaagttccaggcagaggtgtgatgcagaatttctataaaatcttgtacccaaccggatattgacagctaccatccaaggacacatcaagctataggccatcatcgatccaatacagctttggttttccattatacaaggctccctttcattagagttttaaaggatctagtctgaaaaaacaaaaaccctgaaaagacctgaaagaatttac

SEQ ID NO: 79394 - DNA, 600 bp, Chicken  19866894370406_1
ccttcaattttgctccattgtttttcagtgcttttggctccactttcacctttttgcatagtcttcgcttatgggtcagcaagtttttgatgtcctgaaagaagaactttatttataaggatatggttgttttctacaaattggtttcaaggttgaacaaacaggaccagctttgctgcctttgggatctgtttcacttgaccacccgcagacacctcacagtgcttcaggtgccctatagtattctgtcagcctccagttgccactctggaagactgcacatatcctcagggtcctgayacataaggatgtctcagataacctcatgccttttgaatggcaccagatgtctaattttctgcagctgaataaagccttaaatgtcttcactttcctttggggctgaaactgctaatgaaaatgaaatgttgctgcccttctttatcagtctcctctgagttgcaggatggacttagcagcaatcctcttaggaaaagagagctgttgctgaggtctgccttctgatcctgcagctgcaagttatgaaggacccaccaaatgttacctgagctcccattaacacagctcccagggtcacag

SEQ ID NO: 79395 - DNA, 600 bp, Chicken  19866894370410_1
acagccattcatgtttgaccaccgttttgtacgccgtgaataaacaaaaagacaaatttatgcaatgcttgtgaagcagggaaacccctctcaaatcccatccaacacctctgaccatgaagtgggcggtggggaaacacttaaccttatggtgcaaagcaacaaacaaacagaagcaaccaaaccaaaaaaaggggaaagaaatcaatctcgtttgttaaatgagttgcttctcaattcacttcccactttgtaggacaaacagtcatcctgcgatgtctcattataagggacaaaagragccacctaccaacattaataaaactgtcaggagaaaagaagtccagtcttccccgagcaccaagtgctgcacatttgtttagattctatgctcttaagaatgtttcatgatttatcagcaccgtctctcaaagcagcctcgctgattcctggccctgccatcaagcctatttcctttcagacaccactgtctttgtaaacggaagtaataggaaggggataaagtctgcacgtgaggttttttattcagacaagaggggaaatactgttgagttgctgtatgtgaatgcaaagtgagtc

SEQ ID NO: 79396 - DNA, 600 bp, Chicken  19866894370410_10
ttctgcttttaaacttttgggtaatgaggaatggggtaatgaagaagakaagactgcacgttgctttactacccccctaggagtaaaacatctggtcaagcaaatagtgaacttcagaacacactgctcttcccattttgagttatgatacgctacrccgaatcaacattgaagcaaacactgtctctcagcatgaaactattttcacaacttcttgacaatgttacgttaccagcttcctgtttttccacatgaaactgcctgcagctatttgcagctgatcaaaacatcttccaacaytctttaccaggaaaagcagatggcatccaccctattcctttttattaggaagtcaaaatgcaattctgaaagtgtctccataggtctcctcacccaaacatctcagaaatcagcactgggagatccacgtgccacaggacacagataagcctaaggatgagcacagcaacgctccccaaaacacacacaacaatgctgttttatamaacttgacatacaagcaagggaggtatctctcttccytgtcccatccaggagaaaagcaagcagaattccacctcaaaatgcaccttctagaca

SEQ ID NO: 79397 - DNA, 505 bp, Chicken  19866894370410_11
acaacttcttgacaatgttacgttaccagcttcctgtttttccacatgaaactgcctgcagctatttgcagctgatcaaaacatcttccaacaytctttaccaggaaaagcagatggcatccaccctattcctttttattaggaagtcaaaatgcaattctgaaagtgtctccataggtctcctcacccaaacatctcagaaatcagcactgggagatccacgtgccacaggacacagataagcctaaggatgagcacagcaacgctccccaaaacacacacaacaatgctgttttatamaacttgacatacaagcaagggaggtatctctcttccytgtcccatccaggagaaaagcaagcagaattccacctcaaaatgcaccttctagacacgataacatgcacagccatcagtgctccggcagccctgtgttctttaaagccctgctttcccacagctgaaccctgccagcaacaaacctttgacagctgcactcacctca

SEQ ID NO: 79398 - DNA, 468 bp, Chicken  19866894370410_12
ttttccacatgaaactgcctgcagctatttgcagctgatcaaaacatcttccaacaytctttaccaggaaaagcagatggcatccaccctattcctttttattaggaagtcaaaatgcaattctgaaagtgtctccataggtctcctcacccaaacatctcagaaatcagcactgggagatccacgtgccacaggacacagataagcctaaggatgagcacagcaacgctccccaaaacacacacaacaatgctgttttatamaacttgacatacaagcaagggaggtatctctcttccytgtcccatccaggagaaaagcaagcagaattccacctcaaaatgcaccttctagacacgataacatgcacagccatcagtgctccggcagccctgtgttctttaaagccctgctttcccacagctgaaccctgccagcaacaaacctttgacagctgcactcacctca

SEQ ID NO: 79399 - DNA, 600 bp, Chicken  19866894370410_2
tgcaaagtgagtcactgctgttatctgctgtggatttgcccaccctgcagtgtaactgcttgtctgttcagacaggaaggctcaactcctcagtgctgccaggagcaggagctgcccatagcgaatccacagctgcaggtgatagatgcctttgaaattcaattaaccacaaaacacatgctagaagacatggctttcctaaatgatgtcaagggacatcagagggaagaagctgattcctaaaggcaaacagcccaccctctcacccctgtcacccatctcacgtcacacatccagcamagagyttatccaggtacccaaccacgtaaatgaaattggaattagggttttgtcyagcacagaatcatttcctgcattggtttcaattccctttctatggtgttcttcctaggccacagaccaatagcgcttctgcctcawtagggtgcagggtttctggcacgcattgagctccagaggtacgtgcttaatggaaagtgagtggaaagaaggtcactcagcagacagcrtcatcgccaccgctgccctgtcttagctcaggttaatgcagatgcacacacacaaggtaacacaaagatc

SEQ ID NO: 79400 - DNA, 600 bp, Chicken  19866894370410_3
agtgagtcactgctgttatctgctgtggatttgcccaccctgcagtgtaactgcttgtctgttcagacaggaaggctcaactcctcagtgctgccaggagcaggagctgcccatagcgaatccacagctgcaggtgatagatgcctttgaaattcaattaaccacaaaacacatgctagaagacatggctttcctaaatgatgtcaagggacatcagagggaagaagctgattcctaaaggcaaacagcccaccctctcacccctgtcacccatctcacgtcacacatccagcamagagyttatccaggtacccaaccacgtaaatgaaattggaattagggttttgtcyagcacagaatcatttcctgcattggtttcaattccctttctatggtgttcttcctaggccacagaccaatagcgcttctgcctcawtagggtgcagggtttctggcacgcattgagctccagaggtacgtgcttaatggaaagtgagtggaaagaaggtcactcagcagacagcrtcatcgccaccgctgccctgtcttagctcaggttaatgcagatgcacacacacaaggtaacacaaagatcatgcg

SEQ ID NO: 79401 - DNA, 600 bp, Chicken  19866894370410_4
ctgcttgtctgttcagacaggaaggctcaactcctcagtgctgccaggagcaggagctgcccatagcgaatccacagctgcaggtgatagatgcctttgaaattcaattaaccacaaaacacatgctagaagacatggctttcctaaatgatgtcaagggacatcagagggaagaagctgattcctaaaggcaaacagcccaccctctcacccctgtcacccatctcacgtcacacatccagcamagagyttatccaggtacccaaccacgtaaatgaaattggaattagggttttgtcyagcacagaatcatttcctgcattggtttcaattccctttctatggtgttcttcctaggccacagaccaatagcgcttctgcctcawtagggtgcagggtttctggcacgcattgagctccagaggtacgtgcttaatggaaagtgagtggaaagaaggtcactcagcagacagcrtcatcgccaccgctgccctgtcttagctcaggttaatgcagatgcacacacacaaggtaacacaaagatcatgcggccgtggaagaagataaaatggatgtagaaatggagccaagagagccgag

SEQ ID NO: 79402 - DNA, 600 bp, Chicken  19866894370410_5
atagatgcctttgaaattcaattaaccacaaaacacatgctagaagacatggctttcctaaatgatgtcaagggacatcagagggaagaagctgattcctaaaggcaaacagcccaccctctcacccctgtcacccatctcacgtcacacatccagcamagagyttatccaggtacccaaccacgtaaatgaaattggaattagggttttgtcyagcacagaatcatttcctgcattggtttcaattccctttctatggtgttcttcctaggccacagaccaatagcgcttctgcctcawtagggtgcagggtttctggcacgcattgagctccagaggtacgtgcttaatggaaagtgagtggaaagaaggtcactcagcagacagcrtcatcgccaccgctgccctgtcttagctcaggttaatgcagatgcacacacacaaggtaacacaaagatcatgcggccgtggaagaagataaaatggatgtagaaatggagccaagagagccgagagagaacgaggaagtctcatttctgatgaacaagcatttttttttctctaaagaaaagaataaacacacacacacaaaaaaaaaca

SEQ ID NO: 79403 - DNA, 600 bp, Chicken  19866894370410_6
agctgattcctaaaggcaaacagcccaccctctcacccctgtcacccatctcacgtcacacatccagcamagagyttatccaggtacccaaccacgtaaatgaaattggaattagggttttgtcyagcacagaatcatttcctgcattggtttcaattccctttctatggtgttcttcctaggccacagaccaatagcgcttctgcctcawtagggtgcagggtttctggcacgcattgagctccagaggtacgtgcttaatggaaagtgagtggaaagaaggtcactcagcagacagcrtcatcgccaccgctgccctgtcttagctcaggttaatgcagatgcacacacacaaggtaacacaaagatcatgcggccgtggaagaagataaaatggatgtagaaatggagccaagagagccgagagagaacgaggaagtctcatttctgatgaacaagcatttttttttctctaaagaaaagaataaacacacacacacaaaaaaaaacaggctttaaaagtacagttataaagygagtttctgcttttaaacttttgggtaatgaggaatggggtaatgaagaagakaagactgcacg

SEQ ID NO: 79404 - DNA, 600 bp, Chicken  19866894370410_7
ttgagctccagaggtacgtgcttaatggaaagtgagtggaaagaaggtcactcagcagacagcrtcatcgccaccgctgccctgtcttagctcaggttaatgcagatgcacacacacaaggtaacacaaagatcatgcggccgtggaagaagataaaatggatgtagaaatggagccaagagagccgagagagaacgaggaagtctcatttctgatgaacaagcatttttttttctctaaagaaaagaataaacacacacacacaaaaaaaaacaggctttaaaagtacagttataaagygagtttctgcttttaaacttttgggtaatgaggaatggggtaatgaagaagakaagactgcacgttgctttactacccccctaggagtaaaacatctggtcaagcaaatagtgaacttcagaacacactgctcttcccattttgagttatgatacgctacrccgaatcaacattgaagcaaacactgtctctcagcatgaaactattttcacaacttcttgacaatgttacgttaccagcttcctgtttttccacatgaaactgcctgcagctatttgcagctgatcaaaacatcttcca

SEQ ID NO: 79405 - DNA, 600 bp, Chicken  19866894370410_8
agcagacagcrtcatcgccaccgctgccctgtcttagctcaggttaatgcagatgcacacacacaaggtaacacaaagatcatgcggccgtggaagaagataaaatggatgtagaaatggagccaagagagccgagagagaacgaggaagtctcatttctgatgaacaagcatttttttttctctaaagaaaagaataaacacacacacacaaaaaaaaacaggctttaaaagtacagttataaagygagtttctgcttttaaacttttgggtaatgaggaatggggtaatgaagaagakaagactgcacgttgctttactacccccctaggagtaaaacatctggtcaagcaaatagtgaacttcagaacacactgctcttcccattttgagttatgatacgctacrccgaatcaacattgaagcaaacactgtctctcagcatgaaactattttcacaacttcttgacaatgttacgttaccagcttcctgtttttccacatgaaactgcctgcagctatttgcagctgatcaaaacatcttccaacaytctttaccaggaaaagcagatggcatccaccctattcctttttattagg

SEQ ID NO: 79406 - DNA, 600 bp, Chicken  19866894370410_9
atgtagaaatggagccaagagagccgagagagaacgaggaagtctcatttctgatgaacaagcatttttttttctctaaagaaaagaataaacacacacacacaaaaaaaaacaggctttaaaagtacagttataaagygagtttctgcttttaaacttttgggtaatgaggaatggggtaatgaagaagakaagactgcacgttgctttactacccccctaggagtaaaacatctggtcaagcaaatagtgaacttcagaacacactgctcttcccattttgagttatgatacgctacrccgaatcaacattgaagcaaacactgtctctcagcatgaaactattttcacaacttcttgacaatgttacgttaccagcttcctgtttttccacatgaaactgcctgcagctatttgcagctgatcaaaacatcttccaacaytctttaccaggaaaagcagatggcatccaccctattcctttttattaggaagtcaaaatgcaattctgaaagtgtctccataggtctcctcacccaaacatctcagaaatcagcactgggagatccacgtgccacaggacacagataagcctaagga

SEQ ID NO: 79407 - DNA, 600 bp, Chicken  19866894370415_1
ttcccttacatacagagtggatctctattttttgacaactgtctgctcttttgtcaaaagtcatactgttgtgtgattgactgatggcagccatacccatatcttctcagacagcccttttaatggatgccacttgctttggcacgtgtatgaatatataaactgatataaaatgcatacagtgtatacatataaagtactatgagtgtacaagtaggtataaatatattgttatttatacataaatacagcaaaatatataatatgtgtacacataactaaaaaaaactgcagcgtctratgcacagactcagatgtgaatgatctgaatcgtttattgtaarttctcacatcacttatataccttcacaagtttccttttctagctttcccatttgcccctataacattcccatccacctttacatgtcaacagaggattctacaaacactcttcaactgttcatgcgggcacttatccaatcagagccatgagctttctacttctagaggtgtccatggttctcatgctgtttatcttgctccacagctgctggtctgaatagtttttcttgtattcccacataaaaactataggaa

SEQ ID NO: 79408 - DNA, 600 bp, Chicken  19866894370415_2
gctcttttgtcaaaagtcatactgttgtgtgattgactgatggcagccatacccatatcttctcagacagcccttttaatggatgccacttgctttggcacgtgtatgaatatataaactgatataaaatgcatacagtgtatacatataaagtactatgagtgtacaagtaggtataaatatattgttatttatacataaatacagcaaaatatataatatgtgtacacataactaaaaaaaactgcagcgtctratgcacagactcagatgtgaatgatctgaatcgtttattgtaarttctcacatcacttatataccttcacaagtttccttttctagctttcccatttgcccctataacattcccatccacctttacatgtcaacagaggattctacaaacactcttcaactgttcatgcgggcacttatccaatcagagccatgagctttctacttctagaggtgtccatggttctcatgctgtttatcttgctccacagctgctggtctgaatagtttttcttgtattcccacataaaaactataggaattttatttcttcataaaatataagaacaagacaggaaacacatt

SEQ ID NO: 79409 - DNA, 599 bp, Chicken  19866894370422_1
  misc_feature (1)..(158): n is any nucleotide
nnnnnnnnnnnnnnnnnnnnnnnnnnnnnnnnnnnnnnnnnnnnnnnnnnnnnnnnnnnnnnnnnnnnnnnnnnnnnnnnnnnnnnnnnnnnnnnnnnnnnnnnnnnnnnnnnnnnnnnnnnnnnnnnnnnnnnnnnnnnnnnnnnnnnnnnnnnnnntccttccttccttccttccttccttccttccttccttccttccttccttccttccttccttccttccttccttccttccttccttccttccttccttccttccttccttccttccttccttccttccttccttccttccttyyttccttccttcacttttttcctttcctgtggcaatctcactacygactggttccagtcacttctcagtgctgtttgtgctgctgagggatctgctctaaacctttcttgtagcctcttctgggctacagagatcattattccatccaaaccttaaagtactggacaccagtggatgtctaaagaggttgtagaacctacatcattgagtttttcaagaaatgggaaaattcatgtctgatctggtctggtattggtcatagtacttcttctagcaggaggctgggcttggtgacctac

SEQ ID NO: 79410 - DNA, 599 bp, Chicken  19866894370422_2
  misc_feature (1)..(157): n is any nucleotide
nnnnnnnnnnnnnnnnnnnnnnnnnnnnnnnnnnnnnnnnnnnnnnnnnnnnnnnnnnnnnnnnnnnnnnnnnnnnnnnnnnnnnnnnnnnnnnnnnnnnnnnnnnnnnnnnnnnnnnnnnnnnnnnnnnnnnnnnnnnnnnnnnnnnnnnnnnnnntccttccttccttccttccttccttccttccttccttccttccttccttccttccttccttccttccttccttccttccttccttccttccttccttccttccttccttccttccttccttccttccttccttccttccttyyttccttccttcacttttttcctttcctgtggcaatctcactacygactggttccagtcacttctcagtgctgtttgtgctgctgagggatctgctctaaacctttcttgtagcctcttctgggctacagagatcattattccatccaaaccttaaagtactggacaccagtggatgtctaaagaggttgtagaacctacatcattgagtttttcaagaaatgggaaaattcatgtctgatctggtctggtattggtcatagtacttcttctagcaggaggctgggcttggtgacctaca

SEQ ID NO: 79411 - DNA, 599 bp, Chicken  19866894370422_3
  misc_feature (1)..(113): n is any nucleotide
nnnnnnnnnnnnnnnnnnnnnnnnnnnnnnnnnnnnnnnnnnnnnnnnnnnnnnnnnnnnnnnnnnnnnnnnnnnnnnnnnnnnnnnnnnnnnnnnnnnnnnnnnnnnnnnnntccttccttccttccttccttccttccttccttccttccttccttccttccttccttccttccttccttccttccttccttccttccttccttccttccttccttccttccttccttccttccttccttccttccttccttyyttccttccttcacttttttcctttcctgtggcaatctcactacygactggttccagtcacttctcagtgctgtttgtgctgctgagggatctgctctaaacctttcttgtagcctcttctgggctacagagatcattattccatccaaaccttaaagtactggacaccagtggatgtctaaagaggttgtagaacctacatcattgagtttttcaagaaatgggaaaattcatgtctgatctggtctggtattggtcatagtacttcttctagcaggaggctgggcttggtgacctacagagactccttctgccccaaatttccttgattccattttatcatc

SEQ ID NO: 79412 - DNA, 599 bp, Chicken  19866894370423_1
  misc_feature (1)..(14): n is any nucleotide
nnnnnnnnnnnnnnttgctattctcttgactggtttactaaggactagtttataattctataatttcttttcatctatctctattacagtgctgttgcgggtgaatgtttgcatatacagaattacagattgctgcaatacgactgtttagaagactgacctcagcgacttcactcgttaacaacaaaacttcttgaaaattttaagtcctttcatattcttaaacaaaattgttagtttatgacacatattaggactaaggacacattgctacatttttgcctgatggtgcatacattwtggactgacggtgaaatccttgatggttcttggtctctgagatcagggtgatcacttttgagagatctttcacagaagttagaaccaaggtgagcttgacttctggtttttactgattttccttgacaatgtttgatattcttaggctattgctccctccctctcaaaaaggatatctctatgctttttatcttcttcttggcttcactggtcatcctagttatgtagcagaatggttgttctgtctatttgtagtctctcattcttatcttgtctaacagcatcagttattggaatgc

SEQ ID NO: 79413 - DNA, 600 bp, Chicken  19866894370423_2
cttgacttctggtttttactgattttccttgacaatgtttgatattcttaggctattgctccctccctctcaaaaaggatatctctatgctttttatcttcttcttggcttcactggtcatcctagttatgtagcagaatggttgttctgtctatttgtagtctctcattcttatcttgtctaacagcatcagttattggaatgctccttacatgtacccagattcacctgtttttgcctcttctgtcacaacactcatattgatatgaaaactatatatttccaacctactgcagggawcctgctttagcagaggggttgtactagatgatctccagaggtcccttccaacacatgcaattctgtgattctgtgaaatatttgtacattttgtacagttatgccatcaacagtattggaaaatacgtactgctgttacttacattgttttagtatactgacatttggatgcaaggcaattcaagtgaatattaattgtatagtgattagtacagttatgctttttgggttttagagccctctattttgcatatggtggaaatctaagcagattgataacacctctgagaagagaaagca

SEQ ID NO: 79414 - DNA, 600 bp, Chicken  19866894370425_1
ctttaatacctacatacatgtatctgtatctatctatctacctacatatatctatatacagattttttgtgtgttactcaaatgcactttcagttgatctgattttcaagtttatttactttagctatggtttgtaagatagctaaatatagagggaatcagagtgaggaacaattatgattcagagacacagttttttgattgcataaacctcctcaggctgtattagtggactgatccaaggacatgaaatgcaccttcagagaagctttcactcagagactgatcttcaaagactaytgggcaggttgcaggttcttcccttttaagggattctgacttaactcccattgcaaattcttcaaatgccatactcctaaccatgtactggcaataatgacctttggggaatattttttattcagctagaatagttacatktaatctattgccttagcatcttccactggattgcaactagttacatctgatgatttaaagaataacatgcctgtccagctgtgtgtgtgtatttggggaagtaggtgatctgacaagagctcattctcaaacacacctaaaaacgaatgctgacaaagc

SEQ ID NO: 79415 - DNA, 600 bp, Chicken  19866894370425_2
gctaaatatagagggaatcagagtgaggaacaattatgattcagagacacagttttttgattgcataaacctcctcaggctgtattagtggactgatccaaggacatgaaatgcaccttcagagaagctttcactcagagactgatcttcaaagactaytgggcaggttgcaggttcttcccttttaagggattctgacttaactcccattgcaaattcttcaaatgccatactcctaaccatgtactggcaataatgacctttggggaatattttttattcagctagaatagttacatktaatctattgccttagcatcttccactggattgcaactagttacatctgatgatttaaagaataacatgcctgtccagctgtgtgtgtgtatttggggaagtaggtgatctgacaagagctcattctcaaacacacctaaaaacgaatgctgacaaagctcctgaagttatctagtgggtggcatccctgcccaaggcagtggggttggaactggataatcattaaagtcccttccaacycaagctgttctacaagggctgctccaaaagtaatgcttcccgttttactacattggccta

SEQ ID NO: 79416 - DNA, 600 bp, Chicken  19866894370425_3
catgtactggcaataatgacctttggggaatattttttattcagctagaatagttacatktaatctattgccttagcatcttccactggattgcaactagttacatctgatgatttaaagaataacatgcctgtccagctgtgtgtgtgtatttggggaagtaggtgatctgacaagagctcattctcaaacacacctaaaaacgaatgctgacaaagctcctgaagttatctagtgggtggcatccctgcccaaggcagtggggttggaactggataatcattaaagtcccttccaacycaagctgttctacaagggctgctccaaaagtaatgcttcccgttttactacattggcctactatgtcggcccacaatatcagaggtgggtgttggtgggatggcagtagaggatgaatcttctcaccaatatcccattaaattttgttgccatatgacagatggcagcagaggggcagtctgtcagaatggtgtctgacatggaagtgagaatgaagcaaaggtgtgccaatgaattcttctatgagaaaacaatggcacccactaacattcattgatgcttgctgaacatttatggaga

SEQ ID NO: 79417 - DNA, 600 bp, Chicken  19866894370430_1
tgtcaaagcatttttccattcttttcactggcaggttgtgaatgtgaactgtggtgcagagagagaggcagctctgacacaatcgtggctctgctggctgtgattgctctgcagcactttctcgttggggcctctctgtacatgcactgcccagactgcaggcagcaattaatttccaaatttttctttttaaacaaagaaaaaataaataaccccccccaaaacaccgaaatctcctagaaataaatgccatcatatgcagctgtaacaattctccctcttccccttcagctgtgcacygacagctgcctgttaacttgaactttctccactgctgcacagcctgctactacttgaactgctcatgatcatctagcagcagcagcagatgttgtctcatctagggagggagttttccaggtctgaatgccagagctgcaaaggtgactcttgcattctctgaagagtaatayccccaggaatcctaatactgatgttgccttggggtggcagtgggagtcccaggtagcatcaagacttctrtgctctcttctacccgtctcttgctttgcatctcctgctttgccatagtcagcaggc

SEQ ID NO: 79418 - DNA, 600 bp, Chicken  19866894370430_2
ttccaaatttttctttttaaacaaagaaaaaataaataaccccccccaaaacaccgaaatctcctagaaataaatgccatcatatgcagctgtaacaattctccctcttccccttcagctgtgcacygacagctgcctgttaacttgaactttctccactgctgcacagcctgctactacttgaactgctcatgatcatctagcagcagcagcagatgttgtctcatctagggagggagttttccaggtctgaatgccagagctgcaaaggtgactcttgcattctctgaagagtaatayccccaggaatcctaatactgatgttgccttggggtggcagtgggagtcccaggtagcatcaagacttctrtgctctcttctacccgtctcttgctttgcatctcctgctttgccatagtcagcaggccacgtctgaaagctggaggagctccactaatctcttttatctctctcaccttgcccaccactggatcaccacttcacacatgtttgcagggcttgtttagctccattacatgaatattcttcattaagataacaagtgtgaaagcccaattactcctacaaagttaggtgcta

SEQ ID NO: 79419 - DNA, 600 bp, Chicken  19866894370430_3
taaatgccatcatatgcagctgtaacaattctccctcttccccttcagctgtgcacygacagctgcctgttaacttgaactttctccactgctgcacagcctgctactacttgaactgctcatgatcatctagcagcagcagcagatgttgtctcatctagggagggagttttccaggtctgaatgccagagctgcaaaggtgactcttgcattctctgaagagtaatayccccaggaatcctaatactgatgttgccttggggtggcagtgggagtcccaggtagcatcaagacttctrtgctctcttctacccgtctcttgctttgcatctcctgctttgccatagtcagcaggccacgtctgaaagctggaggagctccactaatctcttttatctctctcaccttgcccaccactggatcaccacttcacacatgtttgcagggcttgtttagctccattacatgaatattcttcattaagataacaagtgtgaaagcccaattactcctacaaagttaggtgctaccctctagataaacacatcactaactttgagagcagataattttgtttgtctaaacaccgaccagttttt

SEQ ID NO: 79420 - DNA, 600 bp, Chicken  19866894370430_4
tggctatctgatcactttaagcccaattctttctccagatttagacatgcaatggtatgcctgtgtctcttagatttagtggaaagcctgtcactgaaaaaagagctacaaaaaaaaaagttctatacattccatcagaatttgtatgaaaactactctaaagaataacattctatactaaagccagtctacatttattcccagtcttgcttttttacagcttgtacatacagtttccataaaaatctaagcttttttgaaacaaaacctagatttttatacctgataaagatgcccatyamttctacaatgaagaaatattttcagagttttcagaatttcattatccagttccaaagtaacgtaacgtttattattgcacaatttcacagcatttgtgcctttgtcaagtatcacaagcatgagacacttccaaatacaaaaaatcaagctttaaccatgctaagtagcacttgcctgtctatgatttttaaagataattaaaatgatagaatacttcaattaagtaattatatactatcactaatagcacattttgaaatactgtaaataatgagaataaaaataaaaatcacatta

SEQ ID NO: 79421 - DNA, 600 bp, Chicken  19866894370430_5
gctatctgatcactttaagcccaattctttctccagatttagacatgcaatggtatgcctgtgtctcttagatttagtggaaagcctgtcactgaaaaaagagctacaaaaaaaaaagttctatacattccatcagaatttgtatgaaaactactctaaagaataacattctatactaaagccagtctacatttattcccagtcttgcttttttacagcttgtacatacagtttccataaaaatctaagcttttttgaaacaaaacctagatttttatacctgataaagatgcccatyamttctacaatgaagaaatattttcagagttttcagaatttcattatccagttccaaagtaacgtaacgtttattattgcacaatttcacagcatttgtgcctttgtcaagtatcacaagcatgagacacttccaaatacaaaaaatcaagctttaaccatgctaagtagcacttgcctgtctatgatttttaaagataattaaaatgatagaatacttcaattaagtaattatatactatcactaatagcacattttgaaatactgtaaataatgagaataaaaataaaaatcacattaca

SEQ ID NO: 79422 - DNA, 599 bp, Chicken  19866894370434_1
  misc_feature (1)..(42): n is any nucleotide
nnnnnnnnnnnnnnnnnnnnnnnnnnnnnnnnnnnnnnnnnnaggggaagagtcttcttctctgacgcaccttccaggctgacatcaagcacagaggcaggggaaaagcatcttgccttgagcacccacggtaccaattggggtcacccaagtgccctttcagactgcctgtagactttctgctgggagatgagtgctgctgctgtggggaccacaagcagtacagcatcagctttgataaaatccatggatccacagaaacagcctcagatggttggaaagagcagagattgagcaagyaatgcaatgagagcatctggaacttctccagttgcragctccttgctcgcccttctccgtgtcattgcgcctctctcagcttatccatccctgcctttggagccacagggcaggacctctcgctttcctcttttcttgtgcattaagctcctgatcctctggattgtgtagacgtgacctctgcgcatcctccaaggctcagaagccagatgaaaaagaagtgaatgtttatgcatatttatatgcacatctgatgatagcactgtagcgtttggccagtatcgctacccgcggggcaa

SEQ ID NO: 79423 - DNA, 599 bp, Chicken  19866894370434_2
  misc_feature (1)..(6): n is any nucleotide
nnnnnnaggggaagagtcttcttctctgacgcaccttccaggctgacatcaagcacagaggcaggggaaaagcatcttgccttgagcacccacggtaccaattggggtcacccaagtgccctttcagactgcctgtagactttctgctgggagatgagtgctgctgctgtggggaccacaagcagtacagcatcagctttgataaaatccatggatccacagaaacagcctcagatggttggaaagagcagagattgagcaagyaatgcaatgagagcatctggaacttctccagttgcragctccttgctcgcccttctccgtgtcattgcgcctctctcagcttatccatccctgcctttggagccacagggcaggacctctcgctttcctcttttcttgtgcattaagctcctgatcctctggattgtgtagacgtgacctctgcgcatcctccaaggctcagaagccagatgaaaaagaagtgaatgtttatgcatatttatatgcacatctgatgatagcactgtagcgtttggccagtatcgctacccgcggggcaaagggagctgactcaccaccttctaactcttgtgttt

SEQ ID NO: 79424 - DNA, 600 bp, Chicken  19866894370452_1
ctacaccagcagatttcatacatcaagttttctttgcaaaaactgattttccaattgtgagcaaaaaaaaatagagcaacttttgtcctgccaaacccacattaatggtatttaatttgcttgcttggagcccagatgaaaatgcttttcagataattagtggactgtaatcatggagatcctgattcagaggaaagctctgttaaggaaagcatacaagcatatgcctgagtgatgtggaagttggggttgtaatcatttaatcaagaatctttctgaggtcaagaatgttctgttcastggagtcataatgaccagcatcgtctcaacttatgccagaaaaaacaaaacttgtggtctgctgattaatggctttcatggttttccaatccttggctttttttcttaaccactccgacaaggatctctactgccaagacatgttccacatgtgctatcaaatggcaatgccactttgtgtgctatgggtgcactcaaagcctggttgtgtcttctcatcctgtgttgacctctccatccctatggaattcctctttgtgatgtcttcccagtttttctctgcctgctctgttcacgttc

SEQ ID NO: 79425 - DNA, 600 bp, Chicken  19866894370452_2
tactgccaagacatgttccacatgtgctatcaaatggcaatgccactttgtgtgctatgggtgcactcaaagcctggttgtgtcttctcatcctgtgttgacctctccatccctatggaattcctctttgtgatgtcttcccagtttttctctgcctgctctgttcacgttctccaggttagaaattgggtttagtctggggatatcagttcacctaggcggtttcgttgagaaaaacatctctctcattatgtccagtagcaaatatttagaaggtttccacatcttattttatttttktgccacaagttcttaaggagcctctactggggcagtattttctgtcttgccttggcattccatagactcagatgtgtgttctgagtgataggatgtatttgcatctcagctggctgagtggggctcactatgaggatgcaaaccaggatgctgtgccrcatgcaccctcaaaaaatcccacagtgctgtcagcaagcacaattctgtattgaaatggaggtgccaaaaaccaggtacacagaacagtgtggggtgattcaaataaagcagcgtctccatagcaatgaagtggctaagtac

SEQ ID NO: 79426 - DNA, 600 bp, Chicken  19866894370452_3
ctctgttcacgttctccaggttagaaattgggtttagtctggggatatcagttcacctaggcggtttcgttgagaaaaacatctctctcattatgtccagtagcaaatatttagaaggtttccacatcttattttatttttktgccacaagttcttaaggagcctctactggggcagtattttctgtcttgccttggcattccatagactcagatgtgtgttctgagtgataggatgtatttgcatctcagctggctgagtggggctcactatgaggatgcaaaccaggatgctgtgccrcatgcaccctcaaaaaatcccacagtgctgtcagcaagcacaattctgtattgaaatggaggtgccaaaaaccaggtacacagaacagtgtggggtgattcaaataaagcagcgtctccatagcaatgaagtggctaagtactacacaaacggtctagaattaaaaaaagaatcaggagaagtttggtgctttctgtggtggatgtgaacctgaaacatgaagggaaaggcagacgttgaaataaagataaaaaccaagtgctcaaaaaatccattttcttaaaaataataataataaaa

SEQ ID NO: 79427 - DNA, 599 bp, Chicken  19866894370455_1
  misc_feature (1)..(122): n is any nucleotide
nnnnnnnnnnnnnnnnnnnnnnnnnnnnnnnnnnnnnnnnnnnnnnnnnnnnnnnnnnnnnnnnnnnnnnnnnnnnnnnnnnnnnnnnnnnnnnnnnnnnnnnnnnnnnnnnnnnnnnnnnncctctgactgcctgagataggatgacaacttctttgaagcagcagcccatgatagtgttactactcaaaggggtaccaacatttccctcccgtatgcagccacaacttactgtagactatagcatcactgcaagctgtttgtactcggaaaagttggctgctcagtatgagaaaaccwttctgtttgatactaaaccttgcttgaaaacgtgttctgtaagcactaagaaattatcattctctgtatatatcagaaatatattattagaaaccccagattttatttctggctttgttgtctggtaaaagaaagtcacctatgctactttatttctcttgaattatttcccatagttttgtacggagaacttgctttctagaagcacttaaaagtatttatacaacatcatcacagccctagactggtcaagtgctactctggaggtagatggaaattagggcagaagtacatgaaat

SEQ ID NO: 79428 - DNA, 600 bp, Chicken  19866894370461_1
ttatggctagtgcatcctgagttcacactgaattcagatgaattatctgcagcatcaatgtgatactgcagttcccttaaaaagctctgtagtaattcactatcattatgagattcagtctgtgaaggggcacttacatccctagcaacaggttttccacgtttcgcctgttccactgctagcctgtccagtgaagccaacttcttctttttagcattaagcttttttaacagtttcaggcgaagctttcttgttttgtcactatctgactcttctgccttcacagaattacagctaggyggatggacctgagttgttttaccagagccgccctgtgtattgcctgacttattccaggttgggccttccttagcactrtgacttcggggaagacaagtgccttgagaaaatccttggaactttgataaacattgagcattattactccgaggaagcactgatgttagggtctgagatgatttgygttcacctctgccttgaaacccaccaaagttacttgctcctttaactggcaaccatgtgtcacttaacttttgcactgagggagttttgcaacttctctcattcttgggcatggag

SEQ ID NO: 79429 - DNA, 600 bp, Chicken  19866894370461_2
aaaaagctctgtagtaattcactatcattatgagattcagtctgtgaaggggcacttacatccctagcaacaggttttccacgtttcgcctgttccactgctagcctgtccagtgaagccaacttcttctttttagcattaagcttttttaacagtttcaggcgaagctttcttgttttgtcactatctgactcttctgccttcacagaattacagctaggyggatggacctgagttgttttaccagagccgccctgtgtattgcctgacttattccaggttgggccttccttagcactrtgacttcggggaagacaagtgccttgagaaaatccttggaactttgataaacattgagcattattactccgaggaagcactgatgttagggtctgagatgatttgygttcacctctgccttgaaacccaccaaagttacttgctcctttaactggcaaccatgtgtcacttaacttttgcactgagggagttttgcaacttctctcattcttgggcatggaggcactggaaggcagaaaagaagtattcttgcttaacagtttttttacccagcttcctacaaatcctcttttttggtct

SEQ ID NO: 79430 - DNA, 600 bp, Chicken  19866894370461_3
tgtccagtgaagccaacttcttctttttagcattaagcttttttaacagtttcaggcgaagctttcttgttttgtcactatctgactcttctgccttcacagaattacagctaggyggatggacctgagttgttttaccagagccgccctgtgtattgcctgacttattccaggttgggccttccttagcactrtgacttcggggaagacaagtgccttgagaaaatccttggaactttgataaacattgagcattattactccgaggaagcactgatgttagggtctgagatgatttgygttcacctctgccttgaaacccaccaaagttacttgctcctttaactggcaaccatgtgtcacttaacttttgcactgagggagttttgcaacttctctcattcttgggcatggaggcactggaaggcagaaaagaagtattcttgcttaacagtttttttacccagcttcctacaaatcctcttttttggtctttgtctgaaggctgaaaggaattattatcaacagaagaacttgcaacctgagaatgaactgcagttttgcttgcaccagtcaggtcaggtgatttttgtacaatat

SEQ ID NO: 79431 - DNA, 600 bp, Chicken  19866894370465_1
caaagagtcgttagaaagctatttttggtttaaaacagaattttaaaaacttctagaacttcatcatataagattggctcttttccttcctgcctatgtctttgtcttgctgtctttgcgttggcatgcctttaaaaatgcatatatcaaatataaacataatacatttataggaagagactattttgtaagcaaatcttcagaaactatacagcctatctcatgttgattgcctgtatttctaccaattaaggagaattaatattttgagctacaagtatgcgaggtttatatcataamtgtatttttttttaatcttttaaataataataataataaaacaactcttaaacacaagctaaccagagtaaaataataaagaacaaatcttgaaatttaaacaaaatatagacagagaaaggagaaagtattattttttkggggaaaattttctttctaaagactccagtctttaataaattaacttactccttcttcatttcttttctctttcgtaaatggaagtatataaattccttaaatatgttgatattactggtgcagctctactgaacaagaacagatggtcaagtctggtgg

SEQ ID NO: 79432 - DNA, 560 bp, Chicken  19866894370465_2
catatatcaaatataaacataatacatttataggaagagactattttgtaagcaaatcttcagaaactatacagcctatctcatgttgattgcctgtatttctaccaattaaggagaattaatattttgagctacaagtatgcgaggtttatatcataamtgtatttttttttaatcttttaaataataataataataaaacaactcttaaacacaagctaaccagagtaaaataataaagaacaaatcttgaaatttaaacaaaatatagacagagaaaggagaaagtattattttttkggggaaaattttctttctaaagactccagtctttaataaattaacttactccttcttcatttcttttctctttcgtaaatggaagtatataaattccttaaatatgttgatattactggtgcagctctactgaacaagaacagatggtcaagtctggtggcagctgtgtacttcagataatatactacagacatagatgaatgagctcagaaccatcaatctagaaagaaaatatgtgttcactcaggggacacttatgt

SEQ ID NO: 79433 - DNA, 600 bp, Chicken  19866894370466_1
taatggaaaatgctaatacactttacactaatctgcccattatacaaaaaacaaaccaagtaaacagaaaccaaacaaatgccatatacaagccccaaggcaattggataaaacatgaaaacctcagagacaaagaattcccagacttgataatccaggtctcatactacattaattaatattacagattatcattatttttaactcctgtcgttatgtttggatgtattttgtctctttttttgaaaaaaacttttttcttttccactcctcaatgtccagatatcaaataatcatttygcattcttccctatcacactgcataactaatggcaggggcagcctaccatttccagacagactccatatcccttaagcagcaatcaagcagagaatgttcagcctgcatctgagcctgttcttcaggagcgtatgggaaaggagtcttaacattaggaaaattcagtcctttgtccatcagagkttttctctcatttgtccaggtttttgtattcagcagactacatacaaacctcagagaactaaattgacctctactttctattcagtttgcatttagttctttcaggtaaagctgaa

SEQ ID NO: 79434 - DNA, 600 bp, Chicken  19866894370466_2
cagattatcattatttttaactcctgtcgttatgtttggatgtattttgtctctttttttgaaaaaaacttttttcttttccactcctcaatgtccagatatcaaataatcatttygcattcttccctatcacactgcataactaatggcaggggcagcctaccatttccagacagactccatatcccttaagcagcaatcaagcagagaatgttcagcctgcatctgagcctgttcttcaggagcgtatgggaaaggagtcttaacattaggaaaattcagtcctttgtccatcagagkttttctctcatttgtccaggtttttgtattcagcagactacatacaaacctcagagaactaaattgacctctactttctattcagtttgcatttagttctttcaggtaaagctgaatgagtaagggctgaaggatatgacttctagtttggaattatactgtttgagattgtaccaagagccctcttctttcccgatgagcttgttaatttttccacatgaacacacttcttattacgcacagcagtacagggtccccacatacttttcacagtcttcaggtggtgtttcttaaaattgc

SEQ ID NO: 79435 - DNA, 600 bp, Chicken  19866894370469_1
cccagtacagccatacatacatacaaaattgtgagggaggaaaggaaaaaaaggcatcaaatatttattctagtccacattacagagactaaagcattctatttgaaatgcatagaaacatacactgctggggcatcactgaacacctagaaaggcttctgtactgcagatttcctgcattcaacatcacatctttcctggtttatgtctttttcaattaaagcattgtgattaaagcaaagaaatctctttgcagcctttctgtttgtgcccattatacttctgagcctttgttctttyctgcaaacaatgtgcattctgttcttttaaccttctcttgaaagagatgtgttaaaaatggctgctttctctgaacttgctgtgttttttcagtatcttttgatggttttgtgcatacaatgaacgtacttcaagcatgatttcagcaaagacatgaaagtgggcacttttacttcccaacagtgtgacgtgatctgtaaaagtaaaaagtgaatattgcaatctttaaataaagaatgactcctgctagtgctacggagctttcagacacagaaatcaaatgtaatgcactcgctactg

SEQ ID NO: 79436 - DNA, 600 bp, Chicken  19866894370470_1
taacttgattttgagttgtgatcgaccaagaccatttgattccttggttcctaaataatctgtgaatcctatttcattactgctatatatgagaggatttgaaatccctacctttaggggttgacactgataaaagtaccgtacacccactatttgagcttgtggattggacaggagacccatcttagtccacaatatctgtatatccagggtcactggaatcatgcaacaggaactgcaattcttaatctgaaaaataaaatgcaactcaaacatctcaatgcattaatttacatgttwaaaaggaccatcacggtcaaagctcaatacttcgagtagcaaaggtctcagaacctcaatcacttacttgaggactaaccccataacttcttgtcaggtcagctacccattttagagctgtatctatctcactgtcgtctcatttccagacaatttatctcacctctatcacctggattttgccttctatgaggacaccttctaatagatgagtaattattaaaacagaatctacctcaccagcaagtacttggattgcaagctcttagctttagttaagcaatatacaaatatcactag

SEQ ID NO: 79437 - DNA, 600 bp, Chicken  19866894370478_1
acacaagattaggcacccccagcacccacttcttcaataaatgatatctgtcagtcaaactctctgtgtgctgtttcaagtgcaagcgtctgaccacttcggggccaaccaaaagataaagcatattacgaaggacattgtccaaacacctcttgaccactgacaggcatgaggcatcaaccagctcttcaggaagcccgttccagttcttcttaattatagagtcatagaatggtttgggttggaagggaccttaaatcacctaagttccaaccccctgctataggcagggacacctcycactagactgggctgctcacagattcatccagcctggccttgaacacctccagggagggggcatccacagcccctctgggcaacctgtgccagtatctcaccatcctcacagtaacaaatttcttcctaatatctagcctaaatctacctgcttctagatagaagccatttccccttgtcttggttgctacacgcccttatgaaaagtccctccccagctttcctgcaggaccccttcatgttctggagggccgttacaagttctgcctggagccttctcttaatgtctgatctgaaact

SEQ ID NO: 79438 - DNA, 600 bp, Chicken  19866894370481_1
agctgagaaccaattgataacacaactggcagagcagaggctacagcacctgtatgaagtgaaggaattactcgttaattactccaagtgttataggtcccaaggctgtattaaacaaaaggtaatgaaataataggtatgcttatacctatgcttgtctcctcagcttcttgtctgctggagttccatggagcactgtaactctgcagttcaggaaaagaaacagaggtacagcctcagagcttagatcacacagagtggctgtgattcctttctgtcagatggggaatggaaaagaawggaagtatttcaccttttaatcaaaggcacaaagaccagtgaggtttaaaaacatcaagcttaagacttcctactcatcttttgaattagaatgtttcaatacatttagaaaacaaattttactgtaacaaaacaactctaacttttcttcagatcttgtagatcagattcttatttttcttgcataaacatcttgatttgtggacatccaatagtcaaaaagttgaggcttcctaagactcacaattacattctgataaatggtaacatatcatagaatggcctgggttgaaaaggact

SEQ ID NO: 79439 - DNA, 600 bp, Chicken  19866894370481_2
atcttgtagatcagattcttatttttcttgcataaacatcttgatttgtggacatccaatagtcaaaaagttgaggcttcctaagactcacaattacattctgataaatggtaacatatcatagaatggcctgggttgaaaaggactcaaatgatcatcaattttcaacccccctgctatgtgcagggtcaccaaccaccagaccaggctgcccagagccacatccagcctggctttgaatgcctccagggatggggcatccacaacctccttgggcaacctgttccagtgcgccaccaytctttgtgtggaaaaacttcttcctactatctaacctaaacctcctctgtctcagtttaagacygtttccccttgtcctatcactatccaccctcataaacagccgttccccctactgttcatacactcccttcaayataacaacagtcgggcctactctaagagcagcagctgctgttggagacttctcgcctctgggtttttctacaaagggctgcagtttgtgaaatctcaacagtatgagttgaactacgtagagggtgttcccagcagagcccatagccctgttcctcactcctc

SEQ ID NO: 79440 - DNA, 600 bp, Chicken  19866894370481_3
aaaaagttgaggcttcctaagactcacaattacattctgataaatggtaacatatcatagaatggcctgggttgaaaaggactcaaatgatcatcaattttcaacccccctgctatgtgcagggtcaccaaccaccagaccaggctgcccagagccacatccagcctggctttgaatgcctccagggatggggcatccacaacctccttgggcaacctgttccagtgcgccaccaytctttgtgtggaaaaacttcttcctactatctaacctaaacctcctctgtctcagtttaagacygtttccccttgtcctatcactatccaccctcataaacagccgttccccctactgttcatacactcccttcaayataacaacagtcgggcctactctaagagcagcagctgctgttggagacttctcgcctctgggtttttctacaaagggctgcagtttgtgaaatctcaacagtatgagttgaactacgtagagggtgttcccagcagagcccatagccctgttcctcactcctctgtctctgctttctccagtacaggagcagagtttgtgttccttttactgtttcctactactagc

SEQ ID NO: 79441 - DNA, 600 bp, Chicken  19866894370481_4
gaaaaggactcaaatgatcatcaattttcaacccccctgctatgtgcagggtcaccaaccaccagaccaggctgcccagagccacatccagcctggctttgaatgcctccagggatggggcatccacaacctccttgggcaacctgttccagtgcgccaccaytctttgtgtggaaaaacttcttcctactatctaacctaaacctcctctgtctcagtttaagacygtttccccttgtcctatcactatccaccctcataaacagccgttccccctactgttcatacactcccttcaayataacaacagtcgggcctactctaagagcagcagctgctgttggagacttctcgcctctgggtttttctacaaagggctgcagtttgtgaaatctcaacagtatgagttgaactacgtagagggtgttcccagcagagcccatagccctgttcctcactcctctgtctctgctttctccagtacaggagcagagtttgtgttccttttactgtttcctactactagcttcatgcccaatttgtctttattttctcctttcagagagcatcccaatgcagactttatactatygtgatgac

SEQ ID NO: 79442 - DNA, 600 bp, Chicken  19866894370481_5
ccttcaayataacaacagtcgggcctactctaagagcagcagctgctgttggagacttctcgcctctgggtttttctacaaagggctgcagtttgtgaaatctcaacagtatgagttgaactacgtagagggtgttcccagcagagcccatagccctgttcctcactcctctgtctctgctttctccagtacaggagcagagtttgtgttccttttactgtttcctactactagcttcatgcccaatttgtctttattttctcctttcagagagcatcccaatgcagactttatactatygtgatgaccacaactgtcttacaacatgcagagcgctcagaggcacatccattcctgaatgtgactgaactttaactatagccatgmaaagtaaatgcctggctggtgttttgtgaagagtctgaaagggcttggctgctgaaccygggagatggagatgggcaataggacagaggcctaagcttcagctagtatagtatctagcatgcagacacaaatgttatgttctgggtcaggagaaagttggatcactagaggataaagaaaaatagtatgcgcagcatgataatcaaggacaca

SEQ ID NO: 79443 - DNA, 600 bp, Chicken  19866894370481_6
gcagtttgtgaaatctcaacagtatgagttgaactacgtagagggtgttcccagcagagcccatagccctgttcctcactcctctgtctctgctttctccagtacaggagcagagtttgtgttccttttactgtttcctactactagcttcatgcccaatttgtctttattttctcctttcagagagcatcccaatgcagactttatactatygtgatgaccacaactgtcttacaacatgcagagcgctcagaggcacatccattcctgaatgtgactgaactttaactatagccatgmaaagtaaatgcctggctggtgttttgtgaagagtctgaaagggcttggctgctgaaccygggagatggagatgggcaataggacagaggcctaagcttcagctagtatagtatctagcatgcagacacaaatgttatgttctgggtcaggagaaagttggatcactagaggataaagaaaaatagtatgcgcagcatgataatcaaggacacattagttattttgcttgagtgcagaaggatgtgctacatcagatataataacattaacagctagttagtatggcataaaaggcttctt

SEQ ID NO: 79444 - DNA, 600 bp, Chicken  19866894370481_7
cccatagccctgttcctcactcctctgtctctgctttctccagtacaggagcagagtttgtgttccttttactgtttcctactactagcttcatgcccaatttgtctttattttctcctttcagagagcatcccaatgcagactttatactatygtgatgaccacaactgtcttacaacatgcagagcgctcagaggcacatccattcctgaatgtgactgaactttaactatagccatgmaaagtaaatgcctggctggtgttttgtgaagagtctgaaagggcttggctgctgaaccygggagatggagatgggcaataggacagaggcctaagcttcagctagtatagtatctagcatgcagacacaaatgttatgttctgggtcaggagaaagttggatcactagaggataaagaaaaatagtatgcgcagcatgataatcaaggacacattagttattttgcttgagtgcagaaggatgtgctacatcagatataataacattaacagctagttagtatggcataaaaggcttcttctcagtctttatgctggtaagagtatagctacttggaaataatttcttgaaaacaagcc

SEQ ID NO: 79445 - DNA, 600 bp, Chicken  19866894370481_8
gcttcttctcagtctttatgctggtaagagtatagctacttggaaataatttcttgaaaacaagccgtgagaaagtcacaagttgtacgtgtttgtctcaccaagtttcctatcagagatactgggttgtgtctgtgactatctttttgctacttctgcttcctttcaagaaaacacagcctgtgaactggagagtatgagggaaagaaagggacagagaaggaggaaatgatagaggaaggagaaaaatagatagcagaaggaggagatggagggctgaacgtcagatagattgaaggrtgttaagaaaacacgtgaaataagaatggaaaaaagttgtcatggttttagttttgagaaagagctattggatttagtcacaatctgacatgacagctgatgaagtcaatgaagatagtgtcccttacaataagataaaaactcaatggagtatagaatcacattcagaatttgagcagttctatgtcttggggggagtgtgtcactgtgcagttttgcaagaacccagtggagctcctggggggtttgtgcagtggtccctggagcactggatgagataaggctgcactgatgagtgag

SEQ ID NO: 79446 - DNA, 599 bp, Chicken  19866894370484_1
  misc_feature (1)..(50): n is any nucleotide
nnnnnnnnnnnnnnnnnnnnnnnnnnnnnnnnnnnnnnnnnnnnnnnnnnactagattgaatttttatgttttctacaggaaaagcctgtgttaaaggcatccattttgtgttttccagttttggtggcctgacttgattgaagtttctcctgaatatttgaaacttctacagtatttaaataattagtcaaattcattacagtataattaattcaccacccgttctccagtattcagcattgctcaggaccagagtgtgaaacagatgtataaaacttttgttttgttttcttatttgrttcataawcaaaaatcaggaattatatttttactagattattagcaacagtttatgtctcataactcacatcagtttgatttgtctttcacaataaaatagtaagccttcgcagtattggatactcaacatacatatatttaaatagaaatttacatcagtatcctgcttttaacttcctactagaagaaatggaaatttgttctcaggctccaatttagagtgaattgtgaagttgcagcctgaaatttttcacctgttctttcaatataaccttgcaactacaacttatagctttgt

SEQ ID NO: 79447 - DNA, 599 bp, Chicken  19866894370484_2
  misc_feature (1)..(42): n is any nucleotide
nnnnnnnnnnnnnnnnnnnnnnnnnnnnnnnnnnnnnnnnnnactagattgaatttttatgttttctacaggaaaagcctgtgttaaaggcatccattttgtgttttccagttttggtggcctgacttgattgaagtttctcctgaatatttgaaacttctacagtatttaaataattagtcaaattcattacagtataattaattcaccacccgttctccagtattcagcattgctcaggaccagagtgtgaaacagatgtataaaacttttgttttgttttcttatttgrttcataawcaaaaatcaggaattatatttttactagattattagcaacagtttatgtctcataactcacatcagtttgatttgtctttcacaataaaatagtaagccttcgcagtattggatactcaacatacatatatttaaatagaaatttacatcagtatcctgcttttaacttcctactagaagaaatggaaatttgttctcaggctccaatttagagtgaattgtgaagttgcagcctgaaatttttcacctgttctttcaatataaccttgcaactacaacttatagctttgttcattgtc

SEQ ID NO: 79448 - DNA, 549 bp, Chicken  19866894370488_1
tgtgccagcagtttctcttgtcactgccactgtgcacagcagcagccttgcttcagctctcagtatatttcattaaagttagaaaagtcaccaaccatgcacagttctgttgtctgttgtgctcctgaggagtgctactagctctgctgctcatggctgtggcctgaattgaggtgatttttcatttcctgctgatctgatttgcactcgactaagcacggtgcttgatttaaatgtgaagaccaggaggacagcgggagaggcagcgagtggtgccagggcacaggggctgagggaccygaaacaagcagggaggaggcgatgatagatggctcccacctctgtccaacagggatgggggttgtgcaagtgaaggatcggggaaaacccgctgagtgatgacaaactgcctccttggccagctttcttaggtcaaaaccacagtgcttccgaagaaaaggcttcagccctttgtttacatagcagatggagtgcttatttattagcatcgaacctcgcttttatctaaccttgctgcaaagaaaagaa

SEQ ID NO: 79449 - DNA, 600 bp, Chicken  19866894370489_1
aagttgtcctcatctacattcaaagctgaagatgctcagaccagcacgacccatttttgaagtcacccttcaaaaacattactgcaccaacacatcctgatgtggaattaatccctatgcatgtcagcagacaccagtaaagttatgagcaggtccaggtgacaacattggttgtggtagtcaccatgtacccaaagcacagatggaatgtgctcttcatcatcatgggcttggacccaagatctcagaggggtaaaaacaaacatgagattgtcccatatatggaatagccaggattcmactgactccattggtgctttccataggttggtcagtcctggtaacaaaaagtaaaccaaggaaccagagtacaatttccactgaagcagagggacatgcaattagtctgtctggtttcttacagcttccaaagcagagaggcacagggagtgggccagcaattaaacctttctcagtatcctccacagctgtgccttggacatgaattgctctgaaagtgcactacatgtggacatgcttaaaaaaagatgctgagattaggaaaacattattccactacaggaataatacatttcagct

SEQ ID NO: 79450 - DNA, 599 bp, Chicken  19866894370493_1
  misc_feature (1)..(105): n is any nucleotide
nnnnnnnnnnnnnnnnnnnnnnnnnnnnnnnnnnnnnnnnnnnnnnnnnnnnnnnnnnnnnnnnnnnnnnnnnnnnnnnnnnnnnnnnnnnnnnnnnnnnnnnnnaaacccagtagtaaggagaaacgatttcctcattggggtaagctggtatagttacagagagatgaatgaccatacaccaattttacacaggctgaaagcatggccattgattcacagctacgggatgggttaatctcctcctcccctccagtcactcaagtttagtcagatcaggtctacatgtttcttctgctrgcagtgaatcacagaagcattaaggttggaaagactcctaagatcgtccagtccaaccatcaactcatgcctgtgactgccctagaccacgtcactcagtgctacaatctacccttttcttgaacacctccagggttgatgacatcgccacctccctgggcagcctgtaccacctcaccactyattctgagaataaatgtttcctaataaccaacctgaacgtcctctggtgcaacttaaagccattgcctttcatcctcttactgttacctaggagaagaagccaacccccacctcac

SEQ ID NO: 79451 - DNA, 600 bp, Chicken  19866894370493_2
aattttacacaggctgaaagcatggccattgattcacagctacgggatgggttaatctcctcctcccctccagtcactcaagtttagtcagatcaggtctacatgtttcttctgctrgcagtgaatcacagaagcattaaggttggaaagactcctaagatcgtccagtccaaccatcaactcatgcctgtgactgccctagaccacgtcactcagtgctacaatctacccttttcttgaacacctccagggttgatgacatcgccacctccctgggcagcctgtaccacctcaccactyattctgagaataaatgtttcctaataaccaacctgaacgtcctctggtgcaacttaaagccattgcctttcatcctcttactgttacctaggagaagaagccaacccccacctcaccacaacgtcctttcagggacctgtagagcacagtaatgtttccccttagcctcctcttctccagactaaacaagttcattcagcccctccccataacatgtgttccagacccttcaccagctttgttacyctcctttggacatgcctcaatatctggtttcccaacatggaaattgtgcaaata

SEQ ID NO: 79452 - DNA, 459 bp, Chicken  19866894370493_3
ccagggttgatgacatcgccacctccctgggcagcctgtaccacctcaccactyattctgagaataaatgtttcctaataaccaacctgaacgtcctctggtgcaacttaaagccattgcctttcatcctcttactgttacctaggagaagaagccaacccccacctcaccacaacgtcctttcagggacctgtagagcacagtaatgtttccccttagcctcctcttctccagactaaacaagttcattcagcccctccccataacatgtgttccagacccttcaccagctttgttacyctcctttggacatgcctcaatatctggtttcccaacatggaaattgtgcaaataccattgcaaacaccatcccaaaagctgaacaagaacctgaaaatgctgaagactggcacctagaattctttcctttttttggtactagcttttcacaaaacagct

SEQ ID NO: 79453 - DNA, 600 bp, Chicken  19866894370495_1
aaaagaagagtgttctgtattaaaaatcaaaaagattaatattgcaatttccatttgcaattaaaagatagactgtgtgctttctgtgttcatctccaactcttctttagatttcctgttgcaatttgactgattttaaattcaactcagtagctttgatgtttgaagccaaatggatttccttttttataacaataaccatttaattgatctgtcaaaaatacattcctcctttgatgcagttaaaataagaggtttacttcttgtggagtctcatttcatgtgaatcatcatcaaatkactctacctctacatctcatctgtgtttatgtacttatattaccagtctcaatccttcatggatgttaatgagtttgatactttaagaaacgctgtggttgcttcttgtattccctaatgaattgtttctaatttaattctacttcatcatttgcccttggggaggtttttggtggggaaggagaaataggaaagaaacagaataatgtgcctaaagatgtgatggttgtttccagttgtttgttaaattcatagaatcaaagaatcatagaatcactcaggttggaaaagaccttaaag

SEQ ID NO: 79454 - DNA, 600 bp, Chicken  19866894370496_1
cgccccacgctttgttggatacaagtagggaccggaggtgtggggctggcagtgggtgcggagcccatgggtgggggggtctctcacagccgtgcccctttgccttgcagccagcaggatgcacaggagttcctgcgcttcctcctggatgggctgcacggcgaggtgaaccgcgtgctggtgcggccgcgggccaatgctgacaccttggaccacctcccgtaagcatggggtgggcagtggggtgggcagcggggtgggggctgggtgcctgtgggatccagcgttgctcagcagctstgtccctctgccttgcagtgatgatgagaagagccgccagatgtggcggaggtaccaggagcgggaggacagtcgtgttagtggtgagcatayggggagggggtgggggcaggcagggggctggggccgggggtctcacccttctccatcccctcgcccccagatctcttcgttgggcagctgaagagctcactgacctgcagtgagtgtggctactgctccacagcctttgaccccttatgggacctctccctgcccatccccaaggtgaggtgtccccgctcttccccgtccccccca

SEQ ID NO: 79455 - DNA, 517 bp, Chicken  19866894370496_2
gcccctttgccttgcagccagcaggatgcacaggagttcctgcgcttcctcctggatgggctgcacggcgaggtgaaccgcgtgctggtgcggccgcgggccaatgctgacaccttggaccacctcccgtaagcatggggtgggcagtggggtgggcagcggggtgggggctgggtgcctgtgggatccagcgttgctcagcagctstgtccctctgccttgcagtgatgatgagaagagccgccagatgtggcggaggtaccaggagcgggaggacagtcgtgttagtggtgagcatayggggagggggtgggggcaggcagggggctggggccgggggtctcacccttctccatcccctcgcccccagatctcttcgttgggcagctgaagagctcactgacctgcagtgagtgtggctactgctccacagcctttgaccccttatgggacctctccctgcccatccccaaggtgaggtgtccccgctcttccccgtcccccccaccccacacgt

SEQ ID NO: 79456 - DNA, 600 bp, Chicken  19866894370507_1
tagaaatgttgctgtactctatttagagacgagagtcctattttctagggataaaattaaatgaaaagttcagaggcatctgaacgtaatgctttgccatctttgaggcgacatcatgtccccatcagagccacaataatatttgacactgccactgtcactaaatgcttaagttttcaattttgattaaagctgcaaaaagaactgtgctgtcaagcaccatcttgatgcatcagcagcacataacgtcgacaaggcaagacctgatgaatttaaaattgtggcaattttttgccaagrtgttagctcttgttcgctgccatttttcatccctgaaaaacgctgccatttgctttctttattacaggcttatttgcctgcttctcttagcctaactctctcccagcggtgggctatatcatgctttccacacaccttgagcttgctgatgatttcagacccrtcagcaccagctggtttctctgctacttcagctctgtcgtcagctgagcaatcattaacctataggacgaaattcccagcctctttcagggcccagcatgccgagatacagaagtgctatgcagggacacaaaccaa

SEQ ID NO: 79457 - DNA, 600 bp, Chicken  19866894370507_2
aatgcttaagttttcaattttgattaaagctgcaaaaagaactgtgctgtcaagcaccatcttgatgcatcagcagcacataacgtcgacaaggcaagacctgatgaatttaaaattgtggcaattttttgccaagrtgttagctcttgttcgctgccatttttcatccctgaaaaacgctgccatttgctttctttattacaggcttatttgcctgcttctcttagcctaactctctcccagcggtgggctatatcatgctttccacacaccttgagcttgctgatgatttcagacccrtcagcaccagctggtttctctgctacttcagctctgtcgtcagctgagcaatcattaacctataggacgaaattcccagcctctttcagggcccagcatgccgagatacagaagtgctatgcagggacacaaaccaaagtgctaggcatggggttttaatcctgggcttggtatcagctgtttccattgaggctgccgagacccagtgcctgtccagctgctcccttcttcagaaagtacagcatggataaagcacgataatcgctggatgygactcagaattctttgtgtcttcagata

SEQ ID NO: 79458 - DNA, 461 bp, Chicken  19866894370507_3
cttgagcttgctgatgatttcagacccrtcagcaccagctggtttctctgctacttcagctctgtcgtcagctgagcaatcattaacctataggacgaaattcccagcctctttcagggcccagcatgccgagatacagaagtgctatgcagggacacaaaccaaagtgctaggcatggggttttaatcctgggcttggtatcagctgtttccattgaggctgccgagacccagtgcctgtccagctgctcccttcttcagaaagtacagcatggataaagcacgataatcgctggatgygactcagaattctttgtgtcttcagataatgggagaatgttgaaaatgccattattttgctcccagggcagaaaagagaaatgcgcagcttaccaagagaacagaaagtctgaaacttgcctattcctattttataaattaaaaaacaaacagtccaaatg

SEQ ID NO: 79459 - DNA, 600 bp, Chicken  19866894370508_1
tgatgggaaaattgaagctgtataatccttctctactttcatcatctctgcaatacagagggaaaaaataaaagtgctgccagagtaatggcccatttattttaaagaaaaatagtaatacacgtcttggattatgacatctcaaaccagctaggttagagctaggtgaaatgtttatgatacacacatgaaaagaattcacttttcagtgaatgttctttgttcatcttcacgaaacagatcataaagccctgactgcatcaggagatacagcagtgaattttactgcagtacaaaacyacaaacaccagtagttgmagtttacttaaaaaaaaaaaacaaaaacaaacctatttcacccataaatttgatgttgactgaacaactaatatctcaaacaggcatttcaaaagctgacttcctgaaatttttatataccacagcatagaagagtgacacgactggracagaatgcttcagattgcctctcagtattcccaccaaagagccgtttgccccttctgtttgccattgcattatctaaagaagtacaagaggcagtaaataaattaatgtgagaatcaaatcagggaaatatca

SEQ ID NO: 79460 - DNA, 600 bp, Chicken  19866894370508_2
tgtataatccttctctactttcatcatctctgcaatacagagggaaaaaataaaagtgctgccagagtaatggcccatttattttaaagaaaaatagtaatacacgtcttggattatgacatctcaaaccagctaggttagagctaggtgaaatgtttatgatacacacatgaaaagaattcacttttcagtgaatgttctttgttcatcttcacgaaacagatcataaagccctgactgcatcaggagatacagcagtgaattttactgcagtacaaaacyacaaacaccagtagttgmagtttacttaaaaaaaaaaaacaaaaacaaacctatttcacccataaatttgatgttgactgaacaactaatatctcaaacaggcatttcaaaagctgacttcctgaaatttttatataccacagcatagaagagtgacacgactggracagaatgcttcagattgcctctcagtattcccaccaaagagccgtttgccccttctgtttgccattgcattatctaaagaagtacaagaggcagtaaataaattaatgtgagaatcaaatcagggaaatatcaacaaactaattgtttgct

SEQ ID NO: 79461 - DNA, 600 bp, Chicken  19866894370508_3
tgaaatgtttatgatacacacatgaaaagaattcacttttcagtgaatgttctttgttcatcttcacgaaacagatcataaagccctgactgcatcaggagatacagcagtgaattttactgcagtacaaaacyacaaacaccagtagttgmagtttacttaaaaaaaaaaaacaaaaacaaacctatttcacccataaatttgatgttgactgaacaactaatatctcaaacaggcatttcaaaagctgacttcctgaaatttttatataccacagcatagaagagtgacacgactggracagaatgcttcagattgcctctcagtattcccaccaaagagccgtttgccccttctgtttgccattgcattatctaaagaagtacaagaggcagtaaataaattaatgtgagaatcaaatcagggaaatatcaacaaactaattgtttgctccttgcttacaccacagtaaggatgggaatcccttggtagaatttgtcattctgccaccagttctcagaaaaaaacgccacaatgatcgagtccttcttatcgttcacactaaaaatactgacctattgattaacagcccattgaaaa

SEQ ID NO: 79462 - DNA, 600 bp, Chicken  19866894370518_1
actaagattctggttcattgttttcagctggctatctaatatgactcacacagtgatttcagagtagtctcatataaatatagctagaatagataagtatattttaaatcatgacattagttgttatgcatgtatttaaatatttaattaatttggtaacacatatttacattaaatgaaagtctgatttcacctgtcctgtttcctgttaacaaaccacccaaactgacaaaaaagtaagaaacaagtttggtgtcccaacctgcagtccatgagaatggctttccactccaaattcarataagaaatgtggaagaaaattctttcagtaaatattatcttcagaaaatgttattgaaggaaaacaaaaaccttgattttttttatttttttaaatttttgcttaaaagtaaaaataaacaaaaaactgaaatattcctaattcagttagacctcttcagaaattcaataatgaagtagcacaattgaagcatatgtgaagatttaatcttctaacaagtataaatcattttctaagagtcttgctgaggctgtgaaaaaatagtctgaagagtagcatcagattagggctattaagga

SEQ ID NO: 79463 - DNA, 599 bp, Chicken  19866894370528_1
  misc_feature (1)..(73): n is any nucleotide
nnnnnnnnnnnnnnnnnnnnnnnnnnnnnnnnnnnnnnnnnnnnnnnnnnnnnnnnnnnnnnnnnnnnnnnnnataatttgtatggggaaggccaatcttgtaattgcaatggaaaatatttgttttatgttatttcacccaatcatttgtaaattcctcctgcctacttggcatgaaagaaaaaattacttataagacaatgttggaaatgctctggaaaacaccagaagcttaaaagaaaagagtaggacagaaaaaggcaaagacacacactccagatataaagaccaatgctacayatggtcactaatctggaaaaaacagcactttcaatttcaaagatcatcagaagcatggtggtgatggcttttggtttaaacttcctagtatttaagtactctctatacataccttctccctcattcatctactgcagccactcagaagggaacaccatgcacaggttcaggtgttacctgcagcaccatcccaacgtgaatggcttccaaccccaaatcataacagttccctttctttaaggccctaaatgagatggcccatgttacaaacaarcatcacaatgggatagttgtaattc

SEQ ID NO: 79464 - DNA, 584 bp, Chicken  19866894370528_2
tccagatataaagaccaatgctacayatggtcactaatctggaaaaaacagcactttcaatttcaaagatcatcagaagcatggtggtgatggcttttggtttaaacttcctagtatttaagtactctctatacataccttctccctcattcatctactgcagccactcagaagggaacaccatgcacaggttcaggtgttacctgcagcaccatcccaacgtgaatggcttccaaccccaaatcataacagttccctttctttaaggccctaaatgagatggcccatgttacaaacaarcatcacaatgggatagttgtaattctggattacaaataacatcctgttgttgcacttctataagtcaaatatcaaaatctattatctcagagaatcagaagtgggagttcatattttaagccaaggcctacctttagcacctcaatgctctgtgaccacaaccacaatgctgcagctcctgtaactcactttcttcatcagctgtcatctgaggtacccaaggcctggctgaaggggaccctgggcagcctgagctggtgggggaacacccaacccatagcagg

SEQ ID NO: 79465 - DNA, 600 bp, Chicken  19866894370534_1
ttcaaaacctccaactctatgggcagcctgtcacgctgcttgcctatcttcattccatcttgaacctttcatgtttcatgattcttgtgctcctgccatggagcactatgaagtctggctccatcctctcagaccacagacacatgcagaccctccacccagtaatctctgcctcaggacaaaccacattcacgcagcctctccttctgaggcagctgctcccaccccagtgtggtagctcttctctgaacttgctcaagtttgtaaatatctttgggctttctgaacatcagtcagacygatttttcaaagagccttaccattttgcctctccactgaaggtgacagaggtcaaggcttagctgtggtaaatattgaaataattccatcagytggagcacatgaggcaaagaaaccaaatgaagtgggagacaggacatctgaaatatcatcaagggccaaattcagagagctgtcatgtatcttctgatatccaaagaaaccaacagcagtttaaagtatcaatcacagaaatgaaaaaactttatacataaatgtctttataaacttctatctaagcacatatagacacaactgtat

SEQ ID NO: 79466 - DNA, 600 bp, Chicken  19866894370534_2
tgccatggagcactatgaagtctggctccatcctctcagaccacagacacatgcagaccctccacccagtaatctctgcctcaggacaaaccacattcacgcagcctctccttctgaggcagctgctcccaccccagtgtggtagctcttctctgaacttgctcaagtttgtaaatatctttgggctttctgaacatcagtcagacygatttttcaaagagccttaccattttgcctctccactgaaggtgacagaggtcaaggcttagctgtggtaaatattgaaataattccatcagytggagcacatgaggcaaagaaaccaaatgaagtgggagacaggacatctgaaatatcatcaagggccaaattcagagagctgtcatgtatcttctgatatccaaagaaaccaacagcagtttaaagtatcaatcacagaaatgaaaaaactttatacataaatgtctttataaacttctatctaagcacatatagacacaactgtatatgaatgcatataaatatgtatgtgtgtgtttatcatatacattatttagtgcatttattttcttgttctgggtttgtttggattttggcatt

SEQ ID NO: 79467 - DNA, 600 bp, Chicken  19866894370538_1
aaaggagatcaaacgcgataactgctggggagaatcagaagctgagggaggaactggacaggtatggctccctcaccaaattcttgtaactatcattgaaaagtcagtgatgcaaaatacacgttttctctgctgcattgtattatttgtagctccaaaatacttccattaacgcatctgtttattttttctaagttcagtcttgtaatttgttcattttgtttaacctgttttaggttttcagcttcgtggatactgtaaacaacaaaattaagtgcttcatatatggtctgattctgrgacttttgcttgttcaaaatatgcctccacttgcgatcccattcacaaatccctctgtactgagttgtttccagcacctgtctttaagcagaactacagatacccaaagctctcagtagatttgcttgaaatggtccctactcattttttttttttttccccgtagggaaaactacatcgtttcttttatacacttcagttccgggagttaatgtagctctttcttttctgcagccaaaagaaagctgccacttgttagtagtctaaaaaaaacttaatccttgttattaataatggact

SEQ ID NO: 79468 - DNA, 599 bp, Chicken  19866894370540_1
  misc_feature (1)..(9): n is any nucleotide
nnnnnnnnntggactgaaaggttccccatgtttccttctcctacagctgtcggcttgagagcctgttttcaacccaatgaagccccttcttgattttcaagtgtatcgtggcatttcacactgctcacagcggtttagtgctgggtgatttagaaaggtgcagctatcacaattccatggagctccttcaaagtcttcatctcttggctgagtccgtgcagtctgtttggaattgtttggatgttctaaaaaaagaaaggaaaaaggaaaaagtcttttttcttattttagaagagaagraggatgggtaatttttctacatagataatactatttttttttcctacagcacatctaaaccratttgtgaaatttgattattttaagtattttacttctgtaaagagtcacttaaccatactatattataaacaaaaacaagtcactactgttagatcctggatactgctaaacgtttaatagcttaaaacataatgaagttttttactagcagtccaacatcatcctgttaagaatgacctgatatctatataagtctcctaccacattttaaattccaataaccttacttctatcca

SEQ ID NO: 79469 - DNA, 600 bp, Chicken  19866894370540_2
ctgttttcaacccaatgaagccccttcttgattttcaagtgtatcgtggcatttcacactgctcacagcggtttagtgctgggtgatttagaaaggtgcagctatcacaattccatggagctccttcaaagtcttcatctcttggctgagtccgtgcagtctgtttggaattgtttggatgttctaaaaaaagaaaggaaaaaggaaaaagtcttttttcttattttagaagagaagraggatgggtaatttttctacatagataatactatttttttttcctacagcacatctaaaccratttgtgaaatttgattattttaagtattttacttctgtaaagagtcacttaaccatactatattataaacaaaaacaagtcactactgttagatcctggatactgctaaacgtttaatagcttaaaacataatgaagttttttactagcagtccaacatcatcctgttaagaatgacctgatatctatataagtctcctaccacattttaaattccaataaccttacttctatccaaagtgaaagatgactataaatcagttccttcaaatagcttgacaaacaatatacattctatgt

SEQ ID NO: 79470 - DNA, 600 bp, Chicken  19866894370544_1
acccgccattttggtcctgaagagatgagagttgtggagttaaactgcagcgaaggaacctgatgttggctgctgggaaaggtgctccggagaagcaggaggctgcaggctcccagctgctgctgtttctacaggaaggtaagagacagggttggggggaatcggcttggacacctcgtcctgccctcgggtgggtgggatttgtgctgttctcagagctgctgggggccataaggcctagggctgagcacagtggctttctgatgtaagctgtcggcaatggcttctcaagatgtaaartactgctgtttgtagtgtgagaacagttggagaaggcaaggaagtgtttgagtgaaagatggtgggaaaacgtatggttttgtttggtggttgttttttaaaaacagctctaaaaagcccttcttcttctgtgagtgaaggggaatgccttgccattaatcagctgcagccttcatccccatcagcgaaatctgctggcagggacaggtgctggactgctgcttttcctgccctttgtctctgtggacaagatgacaggtcctggatctctgatcagtactttttgtggtgaccttctgt

SEQ ID NO: 79471 - DNA, 600 bp, Chicken  19866894370557_1
caaagccaggtcacttcagtccccttctgcagctctccttcaaagaccacaagtggagcccgatgagacatacctacagtccagttctgcagtccctatactgagttcctctatgacctcctctacatagacactaattgttgcattggttgaatccagcttgttttctgctccaattacaacctccatagctccagggctttggaaggagtgtatgataaaggattcagatgtaacaggagagaggccatcctccaggtaccaaacatacacgataccagtgccactggttatggtggygcttatgttaacagatgcattaacagcaactgggttggggaaggcataaggctttagaagaccaaggctttcaatgaattccaatgtcttgttagcagttgtgcttcccagcatgttagtagctttcagatagacagtgtagtttccascttctaagacattcaaggagaaggttttcccagtggctgtctgcacagcattgccatctttctgggctatccagctgtaagagatgtttgtcccctctctcaccaccgcgtgcagatggagtgttttgttagttgggaaatagagatcctc

SEQ ID NO: 79472 - DNA, 600 bp, Chicken  19866894370557_2
ttgaatccagcttgttttctgctccaattacaacctccatagctccagggctttggaaggagtgtatgataaaggattcagatgtaacaggagagaggccatcctccaggtaccaaacatacacgataccagtgccactggttatggtggygcttatgttaacagatgcattaacagcaactgggttggggaaggcataaggctttagaagaccaaggctttcaatgaattccaatgtcttgttagcagttgtgcttcccagcatgttagtagctttcagatagacagtgtagtttccascttctaagacattcaaggagaaggttttcccagtggctgtctgcacagcattgccatctttctgggctatccagctgtaagagatgtttgtcccctctctcaccaccgcgtgcagatggagtgttttgttagttgggaaatagagatcctccaccaggtcactgctagccacctgcaggccttcaatctgttccaaaacgtagacgtagatactgtcctgcaatgagctgatctcattctctgcagtcacaatgacattgaatgtgcccacggagcggaaggtgtaggaaattgtggagg

SEQ ID NO: 79473 - DNA, 599 bp, Chicken  19866894370558_1
  misc_feature (1)..(48): n is any nucleotide
nnnnnnnnnnnnnnnnnnnnnnnnnnnnnnnnnnnnnnnnnnnnnnnntcatatttggagtatgtatcttgaatgaaattaggatcatttaaaagattatgtttattgatctttacagacaaaggagaaattaatactcataattaagatttttgtttttcagtgttctaggcaatggtaactacagccccccagaattatgagcagaaacttggaagatacaatagtcatttattttgagaatggatgactttttttagaaatatctgtactatttcataaattgaaattataatatcraattttacacatgcagaacagttttatctgaaacttactagagtaagtttcatcacatttcatcatatgtatataaaaggaaatcgttccgttagatttagtaagcactaaacagtatccacagatactgttataataatgtatttgaggaaagatcagataagagtgaatgaaggccagcctgagcatatggtatgggaattacagtttactttctcagtcataatctataataatccatatgaaaacaaattatatttttattaaatacaacaattcatattataaactattgcata

SEQ ID NO: 79474 - DNA, 600 bp, Chicken  19866894370561_1
ggagggcagtgagaaccagagggagatccttggcatcctgactggttgctactccttgatgtgaggcagaacatgtgtaaaagtgttcccatagtgatgtctgaagagcaccttcttcccagttcttctttgtaccctgtcttggtacctgatgcatctctttcctgcaagcagccaagtccattctctttatataacctatgagtatcacatgagaaacaaatgctacttccctagcataatttcctgggcactagtccagccagcagtgtgacttggagtggtacttgcaggctttaycatgggagctgaatttggccatcttcacgccaaagcctttcagagctttggagcrtgtttgtctttgtgttctcagtccaggtacctcttgctcccacctcgctcctgctgcttgctctattatggggtcttatctatcatttgcctatcgcaacacttgaaataggggtttccatagagctaggtatgctcacaatagctgctactttgcaatygggagcaagtccattattcacctaagcatgtgtttacagaattgaatgtatgctggcatctaattagcccagcaatggaagagcc

SEQ ID NO: 79475 - DNA, 600 bp, Chicken  19866894370561_2
ttgatgtgaggcagaacatgtgtaaaagtgttcccatagtgatgtctgaagagcaccttcttcccagttcttctttgtaccctgtcttggtacctgatgcatctctttcctgcaagcagccaagtccattctctttatataacctatgagtatcacatgagaaacaaatgctacttccctagcataatttcctgggcactagtccagccagcagtgtgacttggagtggtacttgcaggctttaycatgggagctgaatttggccatcttcacgccaaagcctttcagagctttggagcrtgtttgtctttgtgttctcagtccaggtacctcttgctcccacctcgctcctgctgcttgctctattatggggtcttatctatcatttgcctatcgcaacacttgaaataggggtttccatagagctaggtatgctcacaatagctgctactttgcaatygggagcaagtccattattcacctaagcatgtgtttacagaattgaatgtatgctggcatctaattagcccagcaatggaagagccattgtgtcaccgtctgggacactgcaaaacagaacgtggatggaagaggagagga

SEQ ID NO: 79476 - DNA, 600 bp, Chicken  19866894370561_3
gaaacaaatgctacttccctagcataatttcctgggcactagtccagccagcagtgtgacttggagtggtacttgcaggctttaycatgggagctgaatttggccatcttcacgccaaagcctttcagagctttggagcrtgtttgtctttgtgttctcagtccaggtacctcttgctcccacctcgctcctgctgcttgctctattatggggtcttatctatcatttgcctatcgcaacacttgaaataggggtttccatagagctaggtatgctcacaatagctgctactttgcaatygggagcaagtccattattcacctaagcatgtgtttacagaattgaatgtatgctggcatctaattagcccagcaatggaagagccattgtgtcaccgtctgggacactgcaaaacagaacgtggatggaagaggagaggaggcgacaagacagacctcagtgtgaaatagagtgagagcagatggtagaaaggtagggagcagcattttaaccctctgctgctgtgcatccaccaactctgccttttcttttccacgcagcgtgcctcagagctgcaaggtgggctgtgccttaggagca

SEQ ID NO: 79477 - DNA, 600 bp, Chicken  19866894370570_1
ctaaaatctatagtataatcaactcagagccagtgaaatgtagtacatgaatgtcataaggtcagtttcacagttatttgtaatttgtctgtctatgaatctgtccatccctcaatttggcaacagacatctccagtaactcagtatcatgcatactcataaataggctatttgcctagtttccttttttttccttgtagaataaatgttaaataagtagagctgtatttgtatgtagtagacagagtaaaaatgaggcagaactgaagtcaggttcaggatggtcatacactaacaggrgatacataccattgccttctctttccatccaggaaaaaaaggaagatgtgtgtccaggacccttgctctgtttaaaaatctgcagatgttattgggaatttgaatgataaacctgccccaagatcaaaattcatagtactttgtaacatctactgatgctagataatgagttagtattatggacagtcaggtaaaaattttaataaggatccaaaaccccatcacagaagaaatgtactttgatttttattatgagtaacatagaattcacctggcaatttgaatatatataataagttc

SEQ ID NO: 79478 - DNA, 600 bp, Chicken  19866894370570_2
gacccttgctctgtttaaaaatctgcagatgttattgggaatttgaatgataaacctgccccaagatcaaaattcatagtactttgtaacatctactgatgctagataatgagttagtattatggacagtcaggtaaaaattttaataaggatccaaaaccccatcacagaagaaatgtactttgatttttattatgagtaacatagaattcacctggcaatttgaatatatataataagttcaacaagtctattagcagaattagaaagccagtttcagtacagactaagatataataytgaccacctttgaaaaatgtgtgattatatatttttcattgtaaaatgtctttcataactcagaagaaaatgacagctctgctatgaagctagcactacaaaaatataatctgtatgtcaaagtgtttcttttgaatttatttatctttatactttgaaataacgttctctgaaatactgctgaaagaaagaaagaaacattcagtgtctcactgttgttttggttggtggttatttggttggtttgaaagatcctgtgaaatttcaggagcaaatcctgtatgggaaactgatgaagct

SEQ ID NO: 79479 - DNA, 599 bp, Chicken  19866894370573_1
  misc_feature (1)..(94): n is any nucleotide
nnnnnnnnnnnnnnnnnnnnnnnnnnnnnnnnnnnnnnnnnnnnnnnnnnnnnnnnnnnnnnnnnnnnnnnnnnnnnnnnnnnnnnnnnnnnnntttgtctacaaagttaatcacagaatcatagaatggtatgggttgaaaaggaccacaatgatcatctagtttcaacccccctgctatgtgcagggtcaccaaccaccagaccaggctgcccagagccacatccagcctacttgaatagagtttatttctaatacttggagtaacaaacaatacatcattaatcaaaaataatccaygatcaagatatctgaaaccttgatatgaacagccattaatttctgaaatgattcaactggtgaataatgcacatttgcagtggtatttgtggccttgagatgcattctactcagaaagatcgcatccggtgctccgaagggagaaggaaagcggtcagctacagcagtgctaattggatgggaaagtgttccccgaacggatcctttgtcccttctggtttatgctagttctgaaatgaagtgtttttgatgtttggctaaagagaaactgagattataaatgtaaactgtgatactgc

SEQ ID NO: 79480 - DNA, 600 bp, Chicken  19866894370574_1
gttttttattatttgaaatgtaatctgagcattattctctgttcccttgctatgaattttatacaaaatagaaagtccaatttttcatttgtaatacttgttgaagagatctgctttcagctttacaaatgacattgcattcaggcacacaattcaacagcattaagggtaaatcaagaattttgtgaatgaatagaaaaacaaagtacatagtagtgaatagaaatatatatcttatcttgatcctgtacctgcatttctcggtgtcccagaaataatgacaatgcagttacaacatgstgctacaagttacagctgytagcaccagtgcaagaaactactgttttcctggaaaacacttaactttgggtgtatgtttgctgttactgaagtcagtgaaatttaaatttttcaacctagctctatgcacgtgcttaagtgagtatctgaactgcaaaccgaagctcacctaatcttcacattgagatttttttattatttttttatttttgatagttattgacactcttaagaaattcagtggtttttaaatactgacagccttccaaattaggtaactcctcatcatttgatagcaat

SEQ ID NO: 79481 - DNA, 600 bp, Chicken  19866894370574_2
gtaatctgagcattattctctgttcccttgctatgaattttatacaaaatagaaagtccaatttttcatttgtaatacttgttgaagagatctgctttcagctttacaaatgacattgcattcaggcacacaattcaacagcattaagggtaaatcaagaattttgtgaatgaatagaaaaacaaagtacatagtagtgaatagaaatatatatcttatcttgatcctgtacctgcatttctcggtgtcccagaaataatgacaatgcagttacaacatgstgctacaagttacagctgytagcaccagtgcaagaaactactgttttcctggaaaacacttaactttgggtgtatgtttgctgttactgaagtcagtgaaatttaaatttttcaacctagctctatgcacgtgcttaagtgagtatctgaactgcaaaccgaagctcacctaatcttcacattgagatttttttattatttttttatttttgatagttattgacactcttaagaaattcagtggtttttaaatactgacagccttccaaattaggtaactcctcatcatttgatagcaatgcattttcatgttctccta

SEQ ID NO: 79482 - DNA, 600 bp, Chicken  19866894370574_3
aacctagctctatgcacgtgcttaagtgagtatctgaactgcaaaccgaagctcacctaatcttcacattgagatttttttattatttttttatttttgatagttattgacactcttaagaaattcagtggtttttaaatactgacagccttccaaattaggtaactcctcatcatttgatagcaatgcattttcatgttctcctacttgccttaaaaggcaagattcaacatgacaactgctttagctcaaaatatatctgctgatattgcccatctattgaacgtttacccatttcaygttcacccccttgttcaccccctcactgagccttgatagcaagaacctttgaagtccactcaagctcaattcagcagtcaacacagaccattcatcaggatgtgtgttaactgccatgagcactggctggctggctggcttgctaaggcagcagccatagcccagacaaaatcataagggcaaagaagtccagcaataccattcagatccggctgtgcaagaacgctgttagcacattgcagatgtcataatgtatagagagggacaagtatatcctattttcaggcttgtaggacgact

SEQ ID NO: 79483 - DNA, 600 bp, Chicken  19866894370575_1
caatgcagtgtgactagatttccacattgaccactcataaagaacacaggcagctaacggtcctgctgtcagtgtgtgcttgtgagaataggcaaagtctttctttacatgcatgaagtgaattaacattgttttttctaactatactgcagttatgaataactgctaaactgcatttaatcacaagggacttaaaagtgaacaaaacaaactggaagccaggaaggaaatctgtcagtaaccttcctcacctttgaatcagagaatcacagaggttggaagggatctccagagatcatkgagtccaaccccccygctaaagcaggttccctacagaaggttgcacaggaaaggatccaggtgagyggttaatatctccagaaaaggaggctctgcagcctctctaggcagcctgttccagtgctctgtcaccctcacaatagagaagttgttcctcgtgcgtrtaaggagcttcctgtgtaccagttcgtgcccactaccccttgacctgtcgctgcacaccactgaaaagaacctggccccgtccatttgactgccacacttcagacacttataaacagtgatgagatcccctctcag

SEQ ID NO: 79484 - DNA, 600 bp, Chicken  19866894370575_2
agatttccacattgaccactcataaagaacacaggcagctaacggtcctgctgtcagtgtgtgcttgtgagaataggcaaagtctttctttacatgcatgaagtgaattaacattgttttttctaactatactgcagttatgaataactgctaaactgcatttaatcacaagggacttaaaagtgaacaaaacaaactggaagccaggaaggaaatctgtcagtaaccttcctcacctttgaatcagagaatcacagaggttggaagggatctccagagatcatkgagtccaaccccccygctaaagcaggttccctacagaaggttgcacaggaaaggatccaggtgagyggttaatatctccagaaaaggaggctctgcagcctctctaggcagcctgttccagtgctctgtcaccctcacaatagagaagttgttcctcgtgcgtrtaaggagcttcctgtgtaccagttcgtgcccactaccccttgacctgtcgctgcacaccactgaaaagaacctggccccgtccatttgactgccacacttcagacacttataaacagtgatgagatcccctctcagccttctcttctccag

SEQ ID NO: 79485 - DNA, 600 bp, Chicken  19866894370575_3
tgtcagtgtgtgcttgtgagaataggcaaagtctttctttacatgcatgaagtgaattaacattgttttttctaactatactgcagttatgaataactgctaaactgcatttaatcacaagggacttaaaagtgaacaaaacaaactggaagccaggaaggaaatctgtcagtaaccttcctcacctttgaatcagagaatcacagaggttggaagggatctccagagatcatkgagtccaaccccccygctaaagcaggttccctacagaaggttgcacaggaaaggatccaggtgagyggttaatatctccagaaaaggaggctctgcagcctctctaggcagcctgttccagtgctctgtcaccctcacaatagagaagttgttcctcgtgcgtrtaaggagcttcctgtgtaccagttcgtgcccactaccccttgacctgtcgctgcacaccactgaaaagaacctggccccgtccatttgactgccacacttcagacacttataaacagtgatgagatcccctctcagccttctcttctccaggcagaacagcctcacatctctcaacctttctttgtacagatgctccaggcc

SEQ ID NO: 79486 - DNA, 600 bp, Chicken  19866894370575_4
gctaaactgcatttaatcacaagggacttaaaagtgaacaaaacaaactggaagccaggaaggaaatctgtcagtaaccttcctcacctttgaatcagagaatcacagaggttggaagggatctccagagatcatkgagtccaaccccccygctaaagcaggttccctacagaaggttgcacaggaaaggatccaggtgagyggttaatatctccagaaaaggaggctctgcagcctctctaggcagcctgttccagtgctctgtcaccctcacaatagagaagttgttcctcgtgcgtrtaaggagcttcctgtgtaccagttcgtgcccactaccccttgacctgtcgctgcacaccactgaaaagaacctggccccgtccatttgactgccacacttcagacacttataaacagtgatgagatcccctctcagccttctcttctccaggcagaacagcctcacatctctcaacctttctttgtacagatgctccaggcccatcatcatcttcatggccctccattggactctcttcagcagttccccgtctttcttgaactggggagcccaccattggacacagcactccagatgtg

SEQ ID NO: 79487 - DNA, 600 bp, Chicken  19866894370582_1
caagcaaattttgtctttctgtcttcagcgttcgctagcagaagcaaaaattcttgacagaggcaacagttctttgaggatgcaacgttgtgtaaatttaaattagacttaaatatcttcatacttaatttataaatatacttaaatgatgtgtatactccaatagaggtagatctaccagtcatctgctggtcaaatttaacaaagaagccttatgatgctgtatgagttttcatgttacagtaggtagatgagatttgcagaattgctgtattagcttggcattaacttctgtgttargtggttgagacttatgaggagggaaaaaggaaaatagatcgtgttcatatgttgcctaattagagtttgggatgaaaagtctcagaattaagtttattaagtgattattaaatgcagttgtaggtagtgaacacagactgaatgatgaattgcaaaaagatcttaaaagacagagataaaatggctaatgaaatttagtatgaatgattgtacagcatatgatagtggagagtggacaagaattttaacattatgggcctgggtacataggacagagatctcagagtacattcgtttcca

SEQ ID NO: 79488 - DNA, 600 bp, Chicken  19866894370585_1
taattttaagttagactacacaaaaatacgtggcagcatttaattttgtagttcataattacacatattattaaatatgttttacagaagttggcaaatgcaagccatgtgccaagtagtaagtattctaattgacatgttaatgaacagtgtctgtaagagagaagactcttaagaaaatttggaaataattttggatatcaaataaataaaaaatcttttctgtgtatttttttgtgctgagtttcatgatcagtgacacaggaaatttggcatttatacctatagtgataatacctmttttcttagtgtaccttctagtacttgtatgtgctaatgacataagttgtgaaatttaaatttacatgttgcaataattctttcataattttctgttttctaggtaagtactctctgtattcttcaatgaactgaaagaaaatgtaccattcctctttgccttcttgaagtgcaacaaaagaggtaaaaacaagggaaaaaaatgaaagccatgtggtaagaattgtgtttatttggttatttactttacttttgagaactagtttccrtagaattggtgagagatgggaaactgattat

SEQ ID NO: 79489 - DNA, 536 bp, Chicken  19866894370585_2
ttggcatttatacctatagtgataatacctmttttcttagtgtaccttctagtacttgtatgtgctaatgacataagttgtgaaatttaaatttacatgttgcaataattctttcataattttctgttttctaggtaagtactctctgtattcttcaatgaactgaaagaaaatgtaccattcctctttgccttcttgaagtgcaacaaaagaggtaaaaacaagggaaaaaaatgaaagccatgtggtaagaattgtgtttatttggttatttactttacttttgagaactagtttccrtagaattggtgagagatgggaaactgattatgacaagtgatcatgaaatgcactctgcacttgctgactgtctaggtggattgcaggcaacagaaactcatccccacagtccagaatcatgtcattaatgtaaaggtattttgtttcctcaaaggctgaattgaacattgacagagagctttgatggcagaaatgtctgcttaacagcagagcatatcaaagaggacagaattttc

SEQ ID NO: 79490 - DNA, 600 bp, Chicken  19866894370587_1
aaactaagaacttgttcatgtgctgaagacattcagcagtaactctatggcaagctttccatcacacagcaaaactcagccacaatataagccagggtgctcagtaagcacacctggggcacagtactgttgttaacataccttactgcatgctttgttacaagtaaaggatttatttcagtgggtatcactcaaggcatcattaaggtagtagagttgtcaggcattagtggtgttattccctggtaactattccatgattcagaaagcatcttctgaactgggaggtggataaaatayctattttaacgcaggatatccaattcatgtcacctttcagaaaaggctcatgttatggttcagtgggttatgtgcacacaatttgcaaacacacatgtaataggttcagcagctaccgcatcagaacctgtgcccctaactcagtcagcaccaacrtaactgcatgtttgactcctcttagcaaatctcctgcatctcctctttaatttgtgttatatatatatgttatatatgtatataacatatatttataatgctatatatattatatatatgtatttaataatgtctttaattgca

SEQ ID NO: 79491 - DNA, 600 bp, Chicken  19866894370587_2
gttacaagtaaaggatttatttcagtgggtatcactcaaggcatcattaaggtagtagagttgtcaggcattagtggtgttattccctggtaactattccatgattcagaaagcatcttctgaactgggaggtggataaaatayctattttaacgcaggatatccaattcatgtcacctttcagaaaaggctcatgttatggttcagtgggttatgtgcacacaatttgcaaacacacatgtaataggttcagcagctaccgcatcagaacctgtgcccctaactcagtcagcaccaacrtaactgcatgtttgactcctcttagcaaatctcctgcatctcctctttaatttgtgttatatatatatgttatatatgtatataacatatatttataatgctatatatattatatatatgtatttaataatgtctttaattgcatctcctctttaaaaatgtgttagtctagcccattctggtctttcttacttgtctgtactgatggcatgtatttgtttacttggtatataaaagaaaaagcccaataaattactacaattgttaatttttttgttaggcttaaaaatagcaagcaac

SEQ ID NO: 79492 - DNA, 600 bp, Chicken  19866894370588_1
gatgcagcagggctgaaggcgctcccatcacacacatttatcgcacaagatcacaccactacctacgtgcgatgcaagcactggcctggatgtgatttaccagcccagggccataaaacgcaagggaaggaggagaaatggaatgggagagaggaagggtcctgggggaagcataaacagattcacaaggctccaaactggtgtttgttctccagcttgctaattaatccatcttaaaatgcttgtagaagggaagtgctccatttgtgtttaaaacaggacaaatgaaagtgatgtctycttttacagctacccactgtaaacatatggagggcaaatcccagtggtccacagtaactcgaagttatttgggtaaaccgatgcagggagaagatgcacacatttggtgatggagctcccaatcagtccaaccgtgttctaatggcacttcatcacycttccttctctcccatgcacaatagcacctgccaaacctacaagaccccaagccaagaagtctccaagtgtaaagatgttaattatgaatagctgtaattcacaattaacctcctggagctctcagcagaggcaccggaggaa

SEQ ID NO: 79493 - DNA, 600 bp, Chicken  19866894370588_2
ggtcctgggggaagcataaacagattcacaaggctccaaactggtgtttgttctccagcttgctaattaatccatcttaaaatgcttgtagaagggaagtgctccatttgtgtttaaaacaggacaaatgaaagtgatgtctycttttacagctacccactgtaaacatatggagggcaaatcccagtggtccacagtaactcgaagttatttgggtaaaccgatgcagggagaagatgcacacatttggtgatggagctcccaatcagtccaaccgtgttctaatggcacttcatcacycttccttctctcccatgcacaatagcacctgccaaacctacaagaccccaagccaagaagtctccaagtgtaaagatgttaattatgaatagctgtaattcacaattaacctcctggagctctcagcagaggcaccggaggaaacatgagaaccacaatgctcttcacgggccttcagaccccctacttgcagtacgaagtcccctggggctgttgtgcagttggtgacaagatgctggttggttaccagcctttctccttctcttccccaattgttttctgagtgacaaagcagaacat

SEQ ID NO: 79494 - DNA, 600 bp, Chicken  19866894370588_3
ctgatgcaggttgtttttcttgctacacttagacaaaggaaatctgagtttatgctcggcccagagacagctcttctccctgcagtgggacaggaggagaggctcagacagaaagtgccagtccagctgacaggcattcatgaccaacatctgtgggtttaatcccaacagaggcagcgggagagtgtcccctgctctcacagctgccacactgccagccacagccctaggtccctcagcatcatgctgatggcagccccagccctgctgaccccaggtgctaacacagcagatggaacraatggacaaatgctccttctcccatccatgcattttccaggaggggcgccgacaaataaatgaataacaaaagcccaaaaacgaagcgagaaagagcacgagcatattaagacattttctctccccagtttatgcttcagctgctaccttgagactggcacagaaaccaacgtgccgttcactccgcacagctcctgggatctgtgtggcacactttctgcttgggtacattcacttctggaggccattaggcagggtaatttcaccagttcctgagcaaatgcctgcaggggtctttgc

SEQ ID NO: 79495 - DNA, 600 bp, Chicken  19866894370588_4
ttctctccccagtttatgcttcagctgctaccttgagactggcacagaaaccaacgtgccgttcactccgcacagctcctgggatctgtgtggcacactttctgcttgggtacattcacttctggaggccattaggcagggtaatttcaccagttcctgagcaaatgcctgcaggggtctttgcaaagccagttcagcgcagctgaaatatggaagaaatgttcgtttgagtcctaaagagagatgtaatgactgctttatagtaaagcacattaaaatcagccccatttgggctgatcraggcacatcatcggcactctccaagaagaagaaacatttctgatccagcaagtgagcttaacacctttatggaagagttttcatcaactgacaacacccagcttgcaaagaattagctcacagcaccactcaggctcagattyaaagaaacaagtgcattcaatctatttttttttcatttattcccctcttttttttttctctggaacggtagttggagtttgctgggccctgctatgcttagatgccatctggatgaacacatcagctgaggtttgccctgccaatttgctctgctga

SEQ ID NO: 79496 - DNA, 600 bp, Chicken  19866894370588_5
atttcaccagttcctgagcaaatgcctgcaggggtctttgcaaagccagttcagcgcagctgaaatatggaagaaatgttcgtttgagtcctaaagagagatgtaatgactgctttatagtaaagcacattaaaatcagccccatttgggctgatcraggcacatcatcggcactctccaagaagaagaaacatttctgatccagcaagtgagcttaacacctttatggaagagttttcatcaactgacaacacccagcttgcaaagaattagctcacagcaccactcaggctcagattyaaagaaacaagtgcattcaatctatttttttttcatttattcccctcttttttttttctctggaacggtagttggagtttgctgggccctgctatgcttagatgccatctggatgaacacatcagctgaggtttgccctgccaatttgctctgctgatggctgcaacctgtttgctcgccggggcgttgatgcctggggtgctgtgtcctgaccaggagtgaaatgaaaatggggaggagaagaccttctttacaggagctgagtgagaaactcaagggagtcgctgtgggttcgctggc

SEQ ID NO: 79497 - DNA, 448 bp, Chicken  19866894370588_6
ggagtttgctgggccctgctatgcttagatgccatctggatgaacacatcagctgaggtttgccctgccaatttgctctgctgatggctgcaacctgtttgctcgccggggcgttgatgcctggggtgctgtgtcctgaccaggagtgaaatgaaaatggggaggagaagaccttctttacaggagctgagtgagaaactcaagggagtcgctgtgggttcgctggcagtttacaaacaaacaagagaaacaggggtggggtgtttgtaatagcgtacccaaaaggatggaggggctacmagagacagcctgcaactcacctccttcacacctgctccactgcacagccacaaagacgtccttcctcttgccccatctctcatcttaaaccatagctttgccacctgtgtcaaaaaatacattggagggaaagaggcagcagacaagg

SEQ ID NO: 79498 - DNA, 600 bp, Chicken  19866894370604_1
aacaatgcctgattaaaatacattctgaccaggtcagaaaataggtaacaattcaaataaaccaaaattatatcaaatcctaagtccaaaaattcactccatgatcaaaattttcaaacaacttctcattcacaacagttctttggtgttcatagaatcttatgagtttataagacaggcagtgcagatgaataacaattattaaattaaatggaatcttacttatctgtgctgtgcataatgtaggatgcaggacaccttttatcatcatgtttcattccaaggttatgtcccagttcrtgtgcaactactgtagcatgacgtaacacattgttatgattcaactaataaagagaatcagtgttaaaaattatgacagtactacctttccacctacccacttattcaagccataggtttcttagaggctatgaagacattgcaaaattatattgcaatgcaaaaacagcaagaaatggcagtttgccactgtttattttcaggtagggccaaattctgctgctttttctattccttccaacaggaccatactctgatagtaacacagccagtcacgggaatgtacttacagtgctgatt

SEQ ID NO: 79499 - DNA, 600 bp, Chicken  19866894370605_1
ccgggtggtgctgctgatggtaagtcccttctgctggggcacgtgaggcaagcgaggggttaaggaggggtgtgggcatctcctggggatggtgccggcagtgctgagagggctgaagctgctggggcttcagggacctctcctgccacagagttgtttctatcaatagggagatctgtgttggctcacgcaggggctggtgttggccaagagggttgggcacttgtcttgggcttgtataggttgtagaaaggagttgctgcgtgtcaagggcttcagataccccttagggtttgtgayggggaggagggaggcttctgagctttgccacagtctgaagccagcagctagcgcgcyccaggtgctcccccaggctccaaagcaccaggctcgtgtcctcgggggttacttcagttgcttcagccttccagggcccattctaagaggacatgccccccactctctgccaccgtcccaggctcgcggttctcgacgccccgtggtgccggcaagctgggcaagaagcgggcactgtccatctcacccctgtcagactctagcgttgacctgcagacggtgatccgcacctcgcccaactcc

SEQ ID NO: 79500 - DNA, 600 bp, Chicken  19866894370605_2
ggttaaggaggggtgtgggcatctcctggggatggtgccggcagtgctgagagggctgaagctgctggggcttcagggacctctcctgccacagagttgtttctatcaatagggagatctgtgttggctcacgcaggggctggtgttggccaagagggttgggcacttgtcttgggcttgtataggttgtagaaaggagttgctgcgtgtcaagggcttcagataccccttagggtttgtgayggggaggagggaggcttctgagctttgccacagtctgaagccagcagctagcgcgcyccaggtgctcccccaggctccaaagcaccaggctcgtgtcctcgggggttacttcagttgcttcagccttccagggcccattctaagaggacatgccccccactctctgccaccgtcccaggctcgcggttctcgacgccccgtggtgccggcaagctgggcaagaagcgggcactgtccatctcacccctgtcagactctagcgttgacctgcagacggtgatccgcacctcgcccaactccctcgttgccttcatcaactcccgttgcgcttccgccggtggctcctatggtcacctc

SEQ ID NO: 79501 - DNA, 600 bp, Chicken  19866894370609_1
gtgcttaatgcagcttctgaaaagatcacaaaatcctttgcagagcttcaacaacagagagcacagcagctcctggattaaaggaagagctgggaaatgaggtgctacaccagccacaaaggaggaatcccgtatttctctgttctccctgccaaaatccccagctttgattcagcagaagcacgaatagcagcacagccgagtgcatctcactgcaaacaaaaccatttacatttaaacccccaccctgctcccctaaagaactgctgcatgcagtaatttccttgtgacgagggggaraggagaaaaaaaaaaamgggtgggaaaaaaaaaacccatgatgaaattgtctcaagagtttgtctgcattttgtttacagctgctgccctcaaagccagggccagcacacagaccacgagcctgctaacaggagtaaatccaacatttgagaccgtttagaacagctctgcttgcagacagtcagcgctcagagggggaaatcccttcgcagctctcaaataagggaaactagagctgttttccccggagaaatttaggcctgaaagatcttctgagtttctcgttcggagctacgcagc

SEQ ID NO: 79502 - DNA, 600 bp, Chicken  19866894370609_2
tgaaaagatcacaaaatcctttgcagagcttcaacaacagagagcacagcagctcctggattaaaggaagagctgggaaatgaggtgctacaccagccacaaaggaggaatcccgtatttctctgttctccctgccaaaatccccagctttgattcagcagaagcacgaatagcagcacagccgagtgcatctcactgcaaacaaaaccatttacatttaaacccccaccctgctcccctaaagaactgctgcatgcagtaatttccttgtgacgagggggaraggagaaaaaaaaaaamgggtgggaaaaaaaaaacccatgatgaaattgtctcaagagtttgtctgcattttgtttacagctgctgccctcaaagccagggccagcacacagaccacgagcctgctaacaggagtaaatccaacatttgagaccgtttagaacagctctgcttgcagacagtcagcgctcagagggggaaatcccttcgcagctctcaaataagggaaactagagctgttttccccggagaaatttaggcctgaaagatcttctgagtttctcgttcggagctacgcagccctataacggaccctct

SEQ ID NO: 79503 - DNA, 600 bp, Chicken  19866894370621_1
aacctgatgagggacctttctctgatgcctaatttacatcaggaaaagcagattggatttgaatcaaaatccattgattgctcatcactgcttcatgagagctccgccaccagaatgaacacatggcattgtgctgctcctttggcacggaacaaacatccaaaccagcagcaatgacttagggcagacccccagcaggcacgtaggagaaatacctatgagaatccatctgtgggaagagatgaatggaaggatttgaggcccctgtgctgctccacacaacaccagccctcccactgytgtttcctgcacggtggagaaaaagcactttctcttggtgaggcggaaggtggttttkctcaagtgagaagtctttggggtaacataggcaggaacagcctgcatgcagtgcttcacagctgtcttgtgaaaggggaaaaatacagcccacttcactggttaaggagtgtgttcctcctcgtgggtggataagatatctctcaagtgaacractctcgtatttattatgtcacattatgccacttgagttactggttctgattataacaaaactggaaaaacaaccacttactagatatt

SEQ ID NO: 79504 - DNA, 600 bp, Chicken  19866894370621_2
ttgaatcaaaatccattgattgctcatcactgcttcatgagagctccgccaccagaatgaacacatggcattgtgctgctcctttggcacggaacaaacatccaaaccagcagcaatgacttagggcagacccccagcaggcacgtaggagaaatacctatgagaatccatctgtgggaagagatgaatggaaggatttgaggcccctgtgctgctccacacaacaccagccctcccactgytgtttcctgcacggtggagaaaaagcactttctcttggtgaggcggaaggtggttttkctcaagtgagaagtctttggggtaacataggcaggaacagcctgcatgcagtgcttcacagctgtcttgtgaaaggggaaaaatacagcccacttcactggttaaggagtgtgttcctcctcgtgggtggataagatatctctcaagtgaacractctcgtatttattatgtcacattatgccacttgagttactggttctgattataacaaaactggaaaaacaaccacttactagatattaattttatcttacagattctattgtaaatgtgatacaggcccgtatgtatactacaat

SEQ ID NO: 79505 - DNA, 600 bp, Chicken  19866894370621_3
atacctatgagaatccatctgtgggaagagatgaatggaaggatttgaggcccctgtgctgctccacacaacaccagccctcccactgytgtttcctgcacggtggagaaaaagcactttctcttggtgaggcggaaggtggttttkctcaagtgagaagtctttggggtaacataggcaggaacagcctgcatgcagtgcttcacagctgtcttgtgaaaggggaaaaatacagcccacttcactggttaaggagtgtgttcctcctcgtgggtggataagatatctctcaagtgaacractctcgtatttattatgtcacattatgccacttgagttactggttctgattataacaaaactggaaaaacaaccacttactagatattaattttatcttacagattctattgtaaatgtgatacaggcccgtatgtatactacaatccttaaaatagctccatctaaatgcaaatgtggacctctgcctaacgcagagctgagagccttcccattaacgtgccatgagataggggaattaattcaatgctaaaaattctcagggataagaggagtttcttctgttcatatctagcatca

SEQ ID NO: 79506 - DNA, 600 bp, Chicken  19866894370628_1
gccatcctcacacaattattaaactgaatgcccatgtaataggagcaggggacggggacatcacatcagtgcaggcggtctctcggaagccctgcatgcagaagcagaagaattcactccaagagtccagactgctcgacaggcgggccgaaaaaaaatgaaactccagagctttgctaactccagcaacccgggtgggatgctaatattgagtgattttggctaggagaatgagcttggccaggagaaaaaaaaaaagtcaagatagagaagccacagcattatttgcaaacctttgaygtcccaactttataccgtctcccctatcgatatacaatctcgatcattaagcacacagggactgttgcaagtacttgtttcccaatcagacaactaggaagctgatattccaaaacgtacagcatctgaaaagtttcagtactcaaagagaggctttttcctatggctggtcttacaaccactctgtaccaggatacaacagaaagccctgtatttggtgcaagcagaactaagcccaccacaaaccctgtaaatcagttactgaagacatacgcaggatcacaaagggtacagcataca

SEQ ID NO: 79507 - DNA, 600 bp, Chicken  19866894370628_2
aaacattgagtcctgaaagatgccagcacaacctgaaaccattaatcttcctgaagtgaatacactctaatagcgtgcccaggcatatgccattcatcaaatcacatccatccatcacactgcaccagacacagtttggcagagctgccatgattagtggatgacaatgcacctctgaagctgtgcaaggtagctcctccaggggaattatttatgattggcttgaaaaagaggagctgaaaccacttataaccaccactgatttcttataaagacatcaggaagaaaatatccttcttwatatcctgcttgcttattttgtcaaaaattgaagtaggccatttgcagtgagttttattatccatttttctttttcagaatggagtaccccagggagatgccaccaggacaaatagttgtgctttcaagtagaaattgcagttatcagggcacccaaatcagcattcctatgcatgatggcaaaacagctcctgtcacaatgggcactcaacacagtgcacagaatgtaaaagctcctgatagaagacacacagctgcagataaaaggaagaaaaaggggtggggatagggaacgtggca

SEQ ID NO: 79508 - DNA, 600 bp, Chicken  19866894370631_1
tcacaatgagagctactgacacactgatctttaccatgagcacggacctgcagtacctaaccgtaaatgacaccagaaacaaatgcagttatatctgctaaattggtgcagcttatctctgtcaccttttccttccatgttctaggggatggaaagtgtgcataagttatgtaaaatcattctgacgtgtctgaattcattctcgtcatgccatttgttttacacagcacagtcagccaacaaagaggagaaaaagggatacataactcatcgtggccatatccaaatctgttctcacarttttcctgctccaycctcactgattcttacacacctctcaaattaaaagcattaccttttgcaaactctgatccagtagcaacaaggcacttagaagcacacaaagcagctgcccagggctgctaacatactcagggacatgagtatcatgacaacatgatgtgtggctttcatagcccagccagaactcaaaccctacagaaactgcagaaactaggtgaaacatcagagctattactgttattacaaaaagcatgactattgaatgctgacctacaattataaagagggttgctatgg

SEQ ID NO: 79509 - DNA, 599 bp, Chicken  19866894370631_2
actgacacactgatctttaccatgagcacggacctgcagtacctaaccgtaaatgacaccagaaacaaatgcagttatatctgctaaattggtgcagcttatctctgtcaccttttccttccatgttctaggggatggaaagtgtgcataagttatgtaaaatcattctgacgtgtctgaattcattctcgtcatgccatttgttttacacagcacagtcagccaacaaagaggagaaaaagggatacataactcatcgtggccatatccaaatctgttctcacarttttcctgctccaycctcactgattcttacacacctctcaaattaaaagcattaccttttgcaaactctgatccagtagcaacaaggcacttagaagcacacaaagcagctgcccagggctgctaacatactcagggacatgagtatcatgacaacatgatgtgtggctttcatagcccagccagaactcaaaccctacagaaactgcagaaactaggtgaaacatcagagctattactgttattacaaaaagcatgactattgaatgctgacctacaattataaagagggttgctatgggagagagagagca

SEQ ID NO: 79510 - DNA, 600 bp, Chicken  19866894370632_1
tcataaactgtaaaaaagcagtaatgtataagagcagacttatgaacagaaattccattatgaaaatggcgtgtatttaaatttggctcatcagctattattctctaaaagccttaacagttaattcatcttgattgcgacaaagttttgcatgcattatgcctggtggatatatagtacagctctgtttatgttcggactacattttttatgaatgtgcagatattccagctgatgaataagtctcaaagaagtctagagtaagtatttatgggaagatatacaacatatgcagtgttratgcagattatcatcatttcattttagtctcattactgctttcagttggaatcatccagtcttactgcactcatgagagctgagagactccacgttcccgtactatgactatttctagtcatttcmcttctttttcacaaactgattctaaattaaagaatcgccatcaaatattagctaggtatcactggcacatcacaagagtaggcaggaacaagcccacttaacacaaccacaaattatttcttaacataaataagggactcgtgggcctctgaccctctgtaagggttatttcaa

SEQ ID NO: 79511 - DNA, 600 bp, Chicken  19866894370632_2
catcttgattgcgacaaagttttgcatgcattatgcctggtggatatatagtacagctctgtttatgttcggactacattttttatgaatgtgcagatattccagctgatgaataagtctcaaagaagtctagagtaagtatttatgggaagatatacaacatatgcagtgttratgcagattatcatcatttcattttagtctcattactgctttcagttggaatcatccagtcttactgcactcatgagagctgagagactccacgttcccgtactatgactatttctagtcatttcmcttctttttcacaaactgattctaaattaaagaatcgccatcaaatattagctaggtatcactggcacatcacaagagtaggcaggaacaagcccacttaacacaaccacaaattatttcttaacataaataagggactcgtgggcctctgaccctctgtaagggttatttcaactctcctgtagaagtaatgtgaaggcataatgtgatcttaatcctagtcaagatggaaactcagtctacttgtaaagtaagacacaacttaagaaaaacagaaagatcagactggctctctcaaga

SEQ ID NO: 79512 - DNA, 600 bp, Chicken  19866894370633_1
ccagttaaaccagaggtgaagaagtaaaagctagctgagatgcttaaggacataatgatcacctcaatccttgcatttcctttccccagtgtatttttttcagtactgcagactacatcttcagacacgattttattcttaaatattacctggtgataaatccaactctaagtagatacagcaccacagtcacttgaggaaagcagtccttaaacccatgctcccagggcatgcatgcaaggacccagctcctcatcgcagcgcttcaagagagaaaaggctgttggctcaagagcaggyggccctggggttaagagcaagagagcttatcttcctgtgaccagggattaaggaacttgatatgtggttatctgaagagagcatgggacatcactgagccctggtaattatgtcttacaagttttgtcttctgcagagctttgactgacctgtatttaataatagggtcttaattactgaagaaggcagtgtaattctttgtttcttgcatgagcccccataaaatgaaactgaagagtattatcatcagataacattgttgtggcaattgtctgctaatgacctagcccttttatatca

SEQ ID NO: 79513 - DNA, 600 bp, Chicken  19866894370633_2
agtaagcaatggacaattttatatcatttttattagagaaatattaattgcaggccaaacttaccactggttattgctgtataagtgaaatactgcacattcatcaaaatgtatgtctgtatattgcagtgcattacagcaagagcccacagtggaaaaccctagcagcaattagtatattctacagttttagctaccaaagcaatagatgaacatgcaggacctaagtctaagcataccgaatgaaatatcactttcagcattcaatgacaagaaaaaaaatccaacttgactgtcaaygcttttagagatatatctgatcttctcccacattccaagccmtaagttctccataaatttttatcatcagacctccttgtggaggatttgtggcatttgaacaataaatcaatagcacgttataaaatattggctcactgtggaggttctctgaaatgacacactcaagaaaaattggatctgctagaagaactctctattttcccttttcraatagatcgtatctgacattcagcatcacttccagtttaaccagagcaaagaagctcaactctcaatgaccatcaaaggtaagataaa

SEQ ID NO: 79514 - DNA, 600 bp, Chicken  19866894370633_3
attaattgcaggccaaacttaccactggttattgctgtataagtgaaatactgcacattcatcaaaatgtatgtctgtatattgcagtgcattacagcaagagcccacagtggaaaaccctagcagcaattagtatattctacagttttagctaccaaagcaatagatgaacatgcaggacctaagtctaagcataccgaatgaaatatcactttcagcattcaatgacaagaaaaaaaatccaacttgactgtcaaygcttttagagatatatctgatcttctcccacattccaagccmtaagttctccataaatttttatcatcagacctccttgtggaggatttgtggcatttgaacaataaatcaatagcacgttataaaatattggctcactgtggaggttctctgaaatgacacactcaagaaaaattggatctgctagaagaactctctattttcccttttcraatagatcgtatctgacattcagcatcacttccagtttaaccagagcaaagaagctcaactctcaatgaccatcaaaggtaagataaatcagaaggggagctatggaaaaaaaaaaagcagaaatttaaa

SEQ ID NO: 79515 - DNA, 600 bp, Chicken  19866894370633_4
acatgcaggacctaagtctaagcataccgaatgaaatatcactttcagcattcaatgacaagaaaaaaaatccaacttgactgtcaaygcttttagagatatatctgatcttctcccacattccaagccmtaagttctccataaatttttatcatcagacctccttgtggaggatttgtggcatttgaacaataaatcaatagcacgttataaaatattggctcactgtggaggttctctgaaatgacacactcaagaaaaattggatctgctagaagaactctctattttcccttttcraatagatcgtatctgacattcagcatcacttccagtttaaccagagcaaagaagctcaactctcaatgaccatcaaaggtaagataaatcagaaggggagctatggaaaaaaaaaaagcagaaatttaaagaaatgcactttgactctagaaatatgcagtttagtccctgtcgttgccttcgacactttgctggatgctgaagaagccatttacccatccctgatttctgctcgtctccctagagagggacacaatcatccattttaggctgtaaaatgatggacgagaaattaaggcg

SEQ ID NO: 79516 - DNA, 600 bp, Chicken  19866894370642_1
ttcactggaagaacatcctgtaaactcaccatattttgtttagaaattggatattggaaattaccatatttctttaccttgtcagtgtatttttttttcccctcctttttataaaaaatgttctactcatacttgtgagtgtgaaaaatcagtttactgaatatgaggaagcttatgtggattttctcactttttctgtgggagttcattcaaacttgtgccaaaacctttccttctgccagtctagtcctggaagaactgctgtataatactccataaaatttagattccaaaaggagraaaaaaaataaccacttctagtaagcttcctaactttgacttacttctagtatacagcagtatagttctagttaacagtctaccttggtcgagctctgtgttgcatgacatcttctactgaatgacacactatgtaagtaggtaaaactttcccagttacaaaaatttagctgtcagtgaaggtaatcaagagtggctccatgatactgcagctgcagtaatattggttaaaaaacaataaacaaaagtaacacaggcagacagggagcatccccagccaatcacagaaccccattctct

SEQ ID NO: 79517 - DNA, 573 bp, Chicken  19866894370657_1
atacatttttagaggctgggaaataacagtctgagttaaagcactattggaagaaagttactgcaaaccttgaataggctacacatactcaagactcaactagacagagacataactgccttgattttctgtttactgttggcagtagaagtgcttggaaagaaatactgaagaagaccttcagttgacccttccaatagacatttctgtgactctgtgaagttctcatctgtacccagggtattgcttttagattcccttgttcaacaggagctattgttggaagggatgacttttggyaaatgtgatatatgaaacaaaacaactaaagctagaaaacaaaatccaactcttgtgttgagcattggagaggctggtgacctaagggaggtttaagtgatgagggagaaacggaagaggaagttttcaaacagttttgccactattttttgtttaatctcaggaatacatcctaaagagatcccactaaagagctaagcctcttttttcctaaattactgaatcagaagcctgggcaatctgtttaaacatatgatgctgaccttttttgtg

SEQ ID NO: 79518 - DNA, 599 bp, Chicken  19866894370658_1
  misc_feature (1)..(2): n is any nucleotide
nnaaaaaatggatgcaagagaaaaattaacaaaattaacagcttatttgttcaggctttatagtatataagcgtagccatatattacattatgcacattctcatttcctcatggtgactggaattactcataaaaatctttctttataagaggtttgtaagtgcagcctcttctaatatttcaaaaaacaaacaaacaaaaaaacacccaacaacacaaaacaaaaaacacttctaaaagcagtggaacaaaccttaaatataggttgtgaatgagagcaaaattgatctaaaagctatygtttactctaataattckcacagattctctacatcagtacttaagagagtctgcactgctttgtgtagaaataaggcaaatactstctggcttttctcctttatattcctgaacaacttgcccttttcattttatttcttgcagtagagaactaatctcagttatagtcattccaatcagatattctcaaatgacctttaaatactggggtgtccctggagattatttgttaacctccatcttgaataagcaacttaagttaacagggtatgagggaaaccatgaatacacaayaattt

SEQ ID NO: 79519 - DNA, 600 bp, Chicken  19866894370658_2
agaaaaattaacaaaattaacagcttatttgttcaggctttatagtatataagcgtagccatatattacattatgcacattctcatttcctcatggtgactggaattactcataaaaatctttctttataagaggtttgtaagtgcagcctcttctaatatttcaaaaaacaaacaaacaaaaaaacacccaacaacacaaaacaaaaaacacttctaaaagcagtggaacaaaccttaaatataggttgtgaatgagagcaaaattgatctaaaagctatygtttactctaataattckcacagattctctacatcagtacttaagagagtctgcactgctttgtgtagaaataaggcaaatactstctggcttttctcctttatattcctgaacaacttgcccttttcattttatttcttgcagtagagaactaatctcagttatagtcattccaatcagatattctcaaatgacctttaaatactggggtgtccctggagattatttgttaacctccatcttgaataagcaacttaagttaacagggtatgagggaaaccatgaatacacaayaattttcaggaaaaatagtcttca

SEQ ID NO: 79520 - DNA, 600 bp, Chicken  19866894370658_3
acattatgcacattctcatttcctcatggtgactggaattactcataaaaatctttctttataagaggtttgtaagtgcagcctcttctaatatttcaaaaaacaaacaaacaaaaaaacacccaacaacacaaaacaaaaaacacttctaaaagcagtggaacaaaccttaaatataggttgtgaatgagagcaaaattgatctaaaagctatygtttactctaataattckcacagattctctacatcagtacttaagagagtctgcactgctttgtgtagaaataaggcaaatactstctggcttttctcctttatattcctgaacaacttgcccttttcattttatttcttgcagtagagaactaatctcagttatagtcattccaatcagatattctcaaatgacctttaaatactggggtgtccctggagattatttgttaacctccatcttgaataagcaacttaagttaacagggtatgagggaaaccatgaatacacaayaattttcaggaaaaatagtcttcatagtcttatgaaccctgtgattaattttcatttttgaagtttatattcaaatgaaaactctaaacta

SEQ ID NO: 79521 - DNA, 490 bp, Chicken  19866894370658_4
gctatygtttactctaataattckcacagattctctacatcagtacttaagagagtctgcactgctttgtgtagaaataaggcaaatactstctggcttttctcctttatattcctgaacaacttgcccttttcattttatttcttgcagtagagaactaatctcagttatagtcattccaatcagatattctcaaatgacctttaaatactggggtgtccctggagattatttgttaacctccatcttgaataagcaacttaagttaacagggtatgagggaaaccatgaatacacaayaattttcaggaaaaatagtcttcatagtcttatgaaccctgtgattaattttcatttttgaagtttatattcaaatgaaaactctaaactactctcttttaaataaacaaagccaaagtagcaattattcttaaaacgccttccagaaaccaggtgacatggtggctgtgggcttgctgggcttccaaag

SEQ ID NO: 79522 - DNA, 600 bp, Chicken  19866894370675_1
caaggcaacagctaagcgacagcaagtttcaaacaactgaaatgtatgattagaattacaaatcagtttttgtagttttagtcttggttaagttcattttattgtagtgaaaattaattctactctttttcctgtgcagcgatcctatgaggatggattctcagcagcctgctgtacaggatttaatggaaatatgccactttgcaggagctgaagatctagcactttgaacactggttagtgaacaaaaacacttgctgccaatgtgagaactattttgttgtttcatatcagagtgtyttcagtgcttctaataagcaaggagatgtttcataatgctaagcaccactaccttatcatagtactaygccacaaagatgwgtctatttcagacttgttaaaaaawcaatatttggaatgctaacgtgtaatatataaacttcaaactggactgattaggtaacaaaggttattattgcagaagaagttacagcatctaagaaataagaacatctgcagccaatcagaaattttattttaaaaaaaatcagaaagcattgggttattcagtatgaagtatttcatttaagcagctactac

SEQ ID NO: 79523 - DNA, 600 bp, Chicken  19866894370675_2
tttgtagttttagtcttggttaagttcattttattgtagtgaaaattaattctactctttttcctgtgcagcgatcctatgaggatggattctcagcagcctgctgtacaggatttaatggaaatatgccactttgcaggagctgaagatctagcactttgaacactggttagtgaacaaaaacacttgctgccaatgtgagaactattttgttgtttcatatcagagtgtyttcagtgcttctaataagcaaggagatgtttcataatgctaagcaccactaccttatcatagtactaygccacaaagatgwgtctatttcagacttgttaaaaaawcaatatttggaatgctaacgtgtaatatataaacttcaaactggactgattaggtaacaaaggttattattgcagaagaagttacagcatctaagaaataagaacatctgcagccaatcagaaattttattttaaaaaaaatcagaaagcattgggttattcagtatgaagtatttcatttaagcagctactacaaaactagggaacctggagaatccagataatgtacctccggacagattacctggaagatttcatcctg

SEQ ID NO: 79524 - DNA, 600 bp, Chicken  19866894370675_3
tcttggttaagttcattttattgtagtgaaaattaattctactctttttcctgtgcagcgatcctatgaggatggattctcagcagcctgctgtacaggatttaatggaaatatgccactttgcaggagctgaagatctagcactttgaacactggttagtgaacaaaaacacttgctgccaatgtgagaactattttgttgtttcatatcagagtgtyttcagtgcttctaataagcaaggagatgtttcataatgctaagcaccactaccttatcatagtactaygccacaaagatgwgtctatttcagacttgttaaaaaawcaatatttggaatgctaacgtgtaatatataaacttcaaactggactgattaggtaacaaaggttattattgcagaagaagttacagcatctaagaaataagaacatctgcagccaatcagaaattttattttaaaaaaaatcagaaagcattgggttattcagtatgaagtatttcatttaagcagctactacaaaactagggaacctggagaatccagataatgtacctccggacagattacctggaagatttcatcctggagccaaaaactc

SEQ ID NO: 79525 - DNA, 600 bp, Chicken  19866894370675_4
gtgaaaattaattctactctttttcctgtgcagcgatcctatgaggatggattctcagcagcctgctgtacaggatttaatggaaatatgccactttgcaggagctgaagatctagcactttgaacactggttagtgaacaaaaacacttgctgccaatgtgagaactattttgttgtttcatatcagagtgtyttcagtgcttctaataagcaaggagatgtttcataatgctaagcaccactaccttatcatagtactaygccacaaagatgwgtctatttcagacttgttaaaaaawcaatatttggaatgctaacgtgtaatatataaacttcaaactggactgattaggtaacaaaggttattattgcagaagaagttacagcatctaagaaataagaacatctgcagccaatcagaaattttattttaaaaaaaatcagaaagcattgggttattcagtatgaagtatttcatttaagcagctactacaaaactagggaacctggagaatccagataatgtacctccggacagattacctggaagatttcatcctggagccaaaaactctgacaagtacacacaccttagcaac

SEQ ID NO: 79526 - DNA, 600 bp, Chicken  19866894370678_1
tctgcctttcacctgtctacattaagtgagatcagtggtgccttctttaacaagattgtttttaggatcaatctttaggtggtcctttaaaacgcagcagtgtttgcctttgatattcaagcaactgtacttctgtagtttcatatgagaggacagagtgagaaattcttttgccagcacacctctatggagtagcagtatggcttctcacggtgtcctcactgtagcttcgccctccactcttatgtccctcctgggcactcttgtagctgcctgatgggtgttttcttcctcttctaragcagagcaatgagtcggaatgagaacagcagtctctgtatgtctgtatgtgataaccaaaccacactcctgaatacttgcataagtctttgcttttggcagtccctattgttgtgttaaaagctgttttatggattgtgatgataaaattttctgagaacttcaaaaacaaaacaaaacagatgttagttatggttcataaggatgacctgagattttaatgactcgtttctcgtgagaagagatgaaatatcagatacaaatgaattttcaaaccccaaatgggtgtaaatacttgaa

SEQ ID NO: 79527 - DNA, 600 bp, Chicken  19866894370683_1
gaaggagaagtaaaaaaagaaagaaagaaagaaagaaagatgagaagaacaaaagaaacttttttcattcccttctttcattttcagtttgataagcttttactctgatgacataattgcatctctgcataccagaaaggtacgcagtcaccaaaaaacataggctgttgaacactgagaaggacaatgcagttgctcagcatcctctaagccagcatttaaatactaatatttgaaacataacaacaaaagtcatgactgaatgatgtattgacgcagttgtgttaactttcagcatayggggctacttccattgcacatcttacaggagactgtgctaatacagaggatcacaaagtaaggctagtaggggaattaagacttctttgtaatgttcaaatctcaatgctgctgagcttatcctcagcagtcttagcaatggttgccaccataacttaaaatatcctctctcttctgtagttatgtgaagtaaaatgaccagggaccaccaggatcaggcagttctgatcagttgtctaaatacatacaatatacatgcataaggtatcttctagaccacatcattctgcatgcagtacc

SEQ ID NO: 79528 - DNA, 600 bp, Chicken  19866894370684_1
gaagtgtttgaaagaaaacatgagagagaaaaaaagtccccacactgcagcgcaactcttgttgcaccttcagcacctgaagctgctgcacagtgaggttcctgtaggggacagaagggttcccaggggacagaggagctcctcggggacagcaggattcctacggcacgaaccgcagtgctgctgctgccatacaaactggaacgcatcatttccattgggtgcccaaaccaaaccaatgcttccgagctcctggtgatgggctcacacaaaaactaacagcattcatccccgatcackgttgagtcaaacaaatgaagtgartaagtggaaattcttcagaactgcactaatcagggtgtgctgttactgtgtgaaggtcttcagtatgtatacatctgttttcagatgtataactgccaggaaaagaaacccagagtaatgaagttgcacacaaatgtctggagcactgtgttctcagaaatgtaaataacactacaaaacaccacatgggatatgtaagctgctttaataataataataaatttgtaaagtggcaggaagccactctgctttgtaaaccgattttactcaatcaca

SEQ ID NO: 79529 - DNA, 600 bp, Chicken  19866894370684_2
agagaaaaaaagtccccacactgcagcgcaactcttgttgcaccttcagcacctgaagctgctgcacagtgaggttcctgtaggggacagaagggttcccaggggacagaggagctcctcggggacagcaggattcctacggcacgaaccgcagtgctgctgctgccatacaaactggaacgcatcatttccattgggtgcccaaaccaaaccaatgcttccgagctcctggtgatgggctcacacaaaaactaacagcattcatccccgatcackgttgagtcaaacaaatgaagtgartaagtggaaattcttcagaactgcactaatcagggtgtgctgttactgtgtgaaggtcttcagtatgtatacatctgttttcagatgtataactgccaggaaaagaaacccagagtaatgaagttgcacacaaatgtctggagcactgtgttctcagaaatgtaaataacactacaaaacaccacatgggatatgtaagctgctttaataataataataaatttgtaaagtggcaggaagccactctgctttgtaaaccgattttactcaatcacaatccccctggtttttttttcctta

SEQ ID NO: 79530 - DNA, 600 bp, Chicken  19866894370684_3
catcaaaccaggcgccgccttttggaatccctctccatatcctcagggggaaagtctccattgcagcctaggggggacaccatgtttagcaaagggtcttcagatgcccctccaaacagggacagcaacaaagccacgccatagccagtagctcgttcaccctggaaaaaaaaaacacaaaaaattcccatttcagattgcgttgtctgggctagttttaactcaccaacccactcagctggagcagtgacacagcacggccacagcaaacactgggtgcccccgccaagcctgctcaasttactcctctttattcttattgctactgtaatcyttcccctgttggattaaaccaacacatccattgattcacaggaatagagctcatgctgactggaggatggccttatgctaccattcctcagggcacagaacgttctatccaacatgaacacagattttggagcacgagttgattaggttgggtttatgaaaaaaaagaaaatggaggaggtaaagagtaaattttcaaggaggaaaaaaaaaagtacacatgttccattcaagggaggaggaatcccacaagcaaataaatgtttt

SEQ ID NO: 79531 - DNA, 600 bp, Chicken  19866894370684_4
ccatatcctcagggggaaagtctccattgcagcctaggggggacaccatgtttagcaaagggtcttcagatgcccctccaaacagggacagcaacaaagccacgccatagccagtagctcgttcaccctggaaaaaaaaaacacaaaaaattcccatttcagattgcgttgtctgggctagttttaactcaccaacccactcagctggagcagtgacacagcacggccacagcaaacactgggtgcccccgccaagcctgctcaasttactcctctttattcttattgctactgtaatcyttcccctgttggattaaaccaacacatccattgattcacaggaatagagctcatgctgactggaggatggccttatgctaccattcctcagggcacagaacgttctatccaacatgaacacagattttggagcacgagttgattaggttgggtttatgaaaaaaaagaaaatggaggaggtaaagagtaaattttcaaggaggaaaaaaaaaagtacacatgttccattcaagggaggaggaatcccacaagcaaataaatgttttccctactgaaggtcagcaggaaaatcagctctta

SEQ ID NO: 79532 - DNA, 600 bp, Chicken  19866894370697_1
gttcaacttttcttccagtgtatttaccttctacactcaacatcttctcctggtacctgaactgcttgtagagcacctgtacctactgggctaactggcctccaaatggaagagataatgaggcactcaatttaatgatgtctatctgctactttatttttttatttatttttatttttttaagttgccatggaactgagaattcattacaagatcccttaaaaacttgtacctttctagtgttactttctacagattttattcctgccagttatcttgtaaggtaaacttgtacttaawttaagtttgtcataattaaatgaatgttgtatcatatgttctaaactaatgaatattttagaaatattccttaaaacttctgacagttttcagctcgtggtagaatgttcaacctacacgagatcacagggagctagctgtgtagttccacttgtactgcctggatgctgagggctgagatactatctactaaaaagcctacttcataatactgtgtataataaaagatgcaacttgtttatgttttcttcaggtgaagattgtttttaattgtaatttgtcttacttctctaaaaaggt

SEQ ID NO: 79533 - DNA, 600 bp, Chicken  19866894370697_2
aatgcataaaacatataatttggcactcaaactgaataaatcaaaaccatatttcagttaattctaatgaaaatatccagagacatcatacatgtatgccagcactgacatctatgacttaacacctaatacacatatcccaattacttcaatagtgtttaaatctcctgattttaactctctttaacagtgtttagacctcctgattttagtttttgtgtgcaacatgcatattaagcaactttactagtagctcaagtacaagaactacttagatgttaggaggatatattttacccwtagggtggtgagggattggaataacttgcccagagaagctgtggataccctatctctggaggtgtttaatgcaaggctggataaggccctgcaaagcccatggcacggggttggaactgggtgcgcttcaaggtctttccaacccaaggcatcttctgattctataatataaacttaaatgggtgcattaccctaaatcttccataatgtgattgctgcattgacacaagctttcctgattgtatcagtgaatgctggtctcactaaagcataaatattttactattctttgagttttaa

SEQ ID NO: 79534 - DNA, 600 bp, Chicken  19866894370698_1
gtgaatctttaaaactaatacataaattacagggttaaaaatcaagctatcactggccaaaagcaacagagaatttaacctgacttcatcacaagcagagaaaataagggctcaagtactcaaaattaatcaagttagtgctgtcagcacaggaaggtttgcagttctttagattgataggtcagaattattcacttgcttatatcactactgcctatcaagaaaataatttttaaaagtgcagacagtatttacagaccattcaagaataagactttcccagcaatgagacatagctgyaggtacttaaccaacatttggcacttcagacaatttgctgagccaaaaatcagagctattcgctttctcaccctagcctgcactcatacgtctgacttctgaatgtacagcttagagtcctctttatcattcatacattaattagaaatcatttattaaatacaacagaatatttttaattatgatagattgattaactctcagattagatgccttcaacacaagaaaggaagactgtactgccattctgaggcacaactgttgccaagtatgaagctagaatctcaaggaaaaaaaatg

SEQ ID NO: 79535 - DNA, 600 bp, Chicken  19866894370698_2
aaccaacatttggcacttcagacaatttgctgagccaaaaatcagagctattcgctttctcaccctagcctgcactcatacgtctgacttctgaatgtacagcttagagtcctctttatcattcatacattaattagaaatcatttattaaatacaacagaatatttttaattatgatagattgattaactctcagattagatgccttcaacacaagaaaggaagactgtactgccattctgaggcacaactgttgccaagtatgaagctagaatctcaaggaaaaaaaatgagacttcraaycactatttttaagttatatttgccttaaggttaactgatttctatcaatggcagtgcaaagtcatttactccattcatattaaatacaaactcactaaattcatattaactatctcagcaaccttcacttaaaaatcaatttagttcaaaaaggttggaactcagttccagtgcttaagtaagtttttcaggcttcaggatattgtaacaaagttaagaatataagaatctcttcaagttttaagatcccttaagagacggcatttgctgttcatgtcaacttttggactctatctt

SEQ ID NO: 79536 - DNA, 600 bp, Chicken  19866894370698_3
caacatttggcacttcagacaatttgctgagccaaaaatcagagctattcgctttctcaccctagcctgcactcatacgtctgacttctgaatgtacagcttagagtcctctttatcattcatacattaattagaaatcatttattaaatacaacagaatatttttaattatgatagattgattaactctcagattagatgccttcaacacaagaaaggaagactgtactgccattctgaggcacaactgttgccaagtatgaagctagaatctcaaggaaaaaaaatgagacttcraaycactatttttaagttatatttgccttaaggttaactgatttctatcaatggcagtgcaaagtcatttactccattcatattaaatacaaactcactaaattcatattaactatctcagcaaccttcacttaaaaatcaatttagttcaaaaaggttggaactcagttccagtgcttaagtaagtttttcaggcttcaggatattgtaacaaagttaagaatataagaatctcttcaagttttaagatcccttaagagacggcatttgctgttcatgtcaacttttggactctatctttaa

SEQ ID NO: 79537 - DNA, 599 bp, Chicken  19866894370700_1
  misc_feature (1)..(145): n is any nucleotide
nnnnnnnnnnnnnnnnnnnnnnnnnnnnnnnnnnnnnnnnnnnnnnnnnnnnnnnnnnnnnnnnnnnnnnnnnnnnnnnnnnnnnnnnnnnnnnnnnnnnnnnnnnnnnnnnnnnnnnnnnnnnnnnnnnnnnnnnnnnnnnnnncctctcgagctctgagagtagtgattatcctgagatgatgcattggagggtggaaaccaccagctcagatttgcaggctcatccagggactcccaacacatttccttcagaggtcccaccccattgctggctgcctcccttcccaaaataatcartgtgatccctaactacagctcagaggtcacgagttgaaccgctgcttggcaaggcctccaggtccagaaaaacaacattcatttcccaatatgaatcaaactcagaccgtttgcatatcttgaccctctgacagcttttggtgggtcaccaaaaccacagcttttcaaaaaggcagcaaagaaargcattcaaaatgaacacatatctgcataaaagtgcattgctctgcttcagcttctacttttyaagcacctctcttcggaattaaatatrtgaaaggctgatttccagycagaac

SEQ ID NO: 79538 - DNA, 600 bp, Chicken  19866894370700_2
cattggagggtggaaaccaccagctcagatttgcaggctcatccagggactcccaacacatttccttcagaggtcccaccccattgctggctgcctcccttcccaaaataatcartgtgatccctaactacagctcagaggtcacgagttgaaccgctgcttggcaaggcctccaggtccagaaaaacaacattcatttcccaatatgaatcaaactcagaccgtttgcatatcttgaccctctgacagcttttggtgggtcaccaaaaccacagcttttcaaaaaggcagcaaagaaargcattcaaaatgaacacatatctgcataaaagtgcattgctctgcttcagcttctacttttyaagcacctctcttcggaattaaatatrtgaaaggctgatttccagycagaaccctgtgtactttgggaagaaaaagttaaagtagctgagatttttttccatatattcagcagcccacaacagaggaagccttattccagcccagttccaaagtcaaactatgtcagctactcatcataaatacattagcttgaaacaagagccccgaagagcagctttcagatgtggggtatgattt

SEQ ID NO: 79539 - DNA, 600 bp, Chicken  19866894370700_3
tccttcagaggtcccaccccattgctggctgcctcccttcccaaaataatcartgtgatccctaactacagctcagaggtcacgagttgaaccgctgcttggcaaggcctccaggtccagaaaaacaacattcatttcccaatatgaatcaaactcagaccgtttgcatatcttgaccctctgacagcttttggtgggtcaccaaaaccacagcttttcaaaaaggcagcaaagaaargcattcaaaatgaacacatatctgcataaaagtgcattgctctgcttcagcttctacttttyaagcacctctcttcggaattaaatatrtgaaaggctgatttccagycagaaccctgtgtactttgggaagaaaaagttaaagtagctgagatttttttccatatattcagcagcccacaacagaggaagccttattccagcccagttccaaagtcaaactatgtcagctactcatcataaatacattagcttgaaacaagagccccgaagagcagctttcagatgtggggtatgattttgaaaaagtacatttttgcagagaaaggaatttgttgctggcttacagctcctggcagcctt

SEQ ID NO: 79540 - DNA, 600 bp, Chicken  19866894370700_4
gctgcctcccttcccaaaataatcartgtgatccctaactacagctcagaggtcacgagttgaaccgctgcttggcaaggcctccaggtccagaaaaacaacattcatttcccaatatgaatcaaactcagaccgtttgcatatcttgaccctctgacagcttttggtgggtcaccaaaaccacagcttttcaaaaaggcagcaaagaaargcattcaaaatgaacacatatctgcataaaagtgcattgctctgcttcagcttctacttttyaagcacctctcttcggaattaaatatrtgaaaggctgatttccagycagaaccctgtgtactttgggaagaaaaagttaaagtagctgagatttttttccatatattcagcagcccacaacagaggaagccttattccagcccagttccaaagtcaaactatgtcagctactcatcataaatacattagcttgaaacaagagccccgaagagcagctttcagatgtggggtatgattttgaaaaagtacatttttgcagagaaaggaatttgttgctggcttacagctcctggcagccttgtgcttaatctcttggcatagccaacg

SEQ ID NO: 79541 - DNA, 600 bp, Chicken  19866894370700_5
taatcartgtgatccctaactacagctcagaggtcacgagttgaaccgctgcttggcaaggcctccaggtccagaaaaacaacattcatttcccaatatgaatcaaactcagaccgtttgcatatcttgaccctctgacagcttttggtgggtcaccaaaaccacagcttttcaaaaaggcagcaaagaaargcattcaaaatgaacacatatctgcataaaagtgcattgctctgcttcagcttctacttttyaagcacctctcttcggaattaaatatrtgaaaggctgatttccagycagaaccctgtgtactttgggaagaaaaagttaaagtagctgagatttttttccatatattcagcagcccacaacagaggaagccttattccagcccagttccaaagtcaaactatgtcagctactcatcataaatacattagcttgaaacaagagccccgaagagcagctttcagatgtggggtatgattttgaaaaagtacatttttgcagagaaaggaatttgttgctggcttacagctcctggcagccttgtgcttaatctcttggcatagccaacgagtccccttcacaacaaac

SEQ ID NO: 79542 - DNA, 600 bp, Chicken  19866894370701_1
aaaaaatgtatttccttggattcttccaggctgggaaatgtgtctgttatggcagctgtgagataactgaagcctttgttttgatgaaagtagagcaggagtattacatttaggtcatcctgcagtcctccagggatagtatgaaggttgtcattgatcatgcagtaataacagtaagtcccttcaggtacctcccttcagatcagcactgtgatcaccacttccaccatcagtggggattaactgtagaaagtcctacaattccaaatatgattccacaactattttcagtatttttgragaaagttaagatgtagaggcagtctctcagagtctcacactagaaagtgtgaaagctctgttaattaaaataagcataaccttccactagaaagtttaaaattcaccagaatttaccaactatgaacttgaaacccacctaaatccaaaaccgtatttaccaaatgcttcatagatatttacaaacatttcatatgctctagaacagtacagaatactagtttgttagcactgtcatcctcatcctcaggtgtcataggatttgcctaaagaagaatagaagtaaacctcaatttctga

SEQ ID NO: 79543 - DNA, 599 bp, Chicken  19866894370709_1
  misc_feature (1)..(120): n is any nucleotide
nnnnnnnnnnnnnnnnnnnnnnnnnnnnnnnnnnnnnnnnnnnnnnnnnnnnnnnnnnnnnnnnnnnnnnnnnnnnnnnnnnnnnnnnnnnnnnnnnnnnnnnnnnnnnnnnnnnnnnnngtctttatggcgcgtaccgtggtgaacttccatagttgtgtgtgacaaggtgatcaatgcaaggatgactgaagagtgttggtgttggagatatgtagctctgaatgtcataggatcattggagttggaagggacctttaaaggctatttggtccaactcccctgccacagtcagggacrcctacggtttgatcaggtgcccagaacctggtccagtctgactctgaagttcttgcattgaagaaaagacaaaaatcctttatcttttcaaaaatctggggcaggttgcacctctacaccttgcatgtttctatgcagatgctgccagattcccttctttacaaaattrtctcagcccatctgggacatctgattgtaggaaattttatgacttctatggtcagttgtattattcatcaccctggaccctgtttttatctctacttatgtctacactgtgcactgaaatgttgcaaaat

SEQ ID NO: 79544 - DNA, 600 bp, Chicken  19866894370709_2
gtgatcaatgcaaggatgactgaagagtgttggtgttggagatatgtagctctgaatgtcataggatcattggagttggaagggacctttaaaggctatttggtccaactcccctgccacagtcagggacrcctacggtttgatcaggtgcccagaacctggtccagtctgactctgaagttcttgcattgaagaaaagacaaaaatcctttatcttttcaaaaatctggggcaggttgcacctctacaccttgcatgtttctatgcagatgctgccagattcccttctttacaaaattrtctcagcccatctgggacatctgattgtaggaaattttatgacttctatggtcagttgtattattcatcaccctggaccctgtttttatctctacttatgtctacactgtgcactgaaatgttgcaaaattaaattggacccaagataaatattayttgacagaaagcaagacaagaatcaagtttccatgtaggatcatacatgtccagttggtggaattattccagggctacagtgaggaggggatgggygtttacctcccctggattactaacatgattaattacttatatatggta

SEQ ID NO: 79545 - DNA, 600 bp, Chicken  19866894370709_3
acctggtccagtctgactctgaagttcttgcattgaagaaaagacaaaaatcctttatcttttcaaaaatctggggcaggttgcacctctacaccttgcatgtttctatgcagatgctgccagattcccttctttacaaaattrtctcagcccatctgggacatctgattgtaggaaattttatgacttctatggtcagttgtattattcatcaccctggaccctgtttttatctctacttatgtctacactgtgcactgaaatgttgcaaaattaaattggacccaagataaatattayttgacagaaagcaagacaagaatcaagtttccatgtaggatcatacatgtccagttggtggaattattccagggctacagtgaggaggggatgggygtttacctcccctggattactaacatgattaattacttatatatggtacagatctgcagctggaggaatgagatcacagaataatagagattgaagaagacctctaacatcatcagtccaaccattaacctaccccaaccatgcccactgaccacgtccctcagtgccccatctccacagttgtgaacaccttctcagacagtg

SEQ ID NO: 79546 - DNA, 600 bp, Chicken  19866894370709_4
tgcatgtttctatgcagatgctgccagattcccttctttacaaaattrtctcagcccatctgggacatctgattgtaggaaattttatgacttctatggtcagttgtattattcatcaccctggaccctgtttttatctctacttatgtctacactgtgcactgaaatgttgcaaaattaaattggacccaagataaatattayttgacagaaagcaagacaagaatcaagtttccatgtaggatcatacatgtccagttggtggaattattccagggctacagtgaggaggggatgggygtttacctcccctggattactaacatgattaattacttatatatggtacagatctgcagctggaggaatgagatcacagaataatagagattgaagaagacctctaacatcatcagtccaaccattaacctaccccaaccatgcccactgaccacgtccctcagtgccccatctccacagttgtgaacaccttctcagacagtgattctaccacctccctggacagcctgtgccagtgcatcactgctctttctgagaagaaaggatgtcctgtgacttcaccagagcaaaggggtctct

SEQ ID NO: 79547 - DNA, 600 bp, Chicken  19866894370710_1
attgtctgcttatcccacaggattgcacttggatatctagctaaatacctgtagaataaatcatcaagtctatcagcaggaacagcaattcctaaaaacaagtcaagactcaggaaatgctgactttatgccctatctttataatgaactctgactggccctgactgcctggttagacacgtaatgttccatcgtagggtcaaagtaccaaatgggttgttttcttcattatcccttttgatcttcaggcttttttttctcttgttggatacttcagcaccatctccaggcaactgatgktttttttcagatgcccaaaacaaagacttttctgggcttcattgccaatttcttgtgtatttttgatataataaattcttcgttgtttccatctctaatcttgtcatttccatattgcttttccatttatcactgtttaaaagcaggaaatgaagcaatagttatccttttggctttagcgtagtacatactggcactgtgaaaatttctgagcatgtacagttaagcagtagtaaagtccaggacagcagaaaataacagagatagtggtaaatttaaggttaattagatgacttaatt

SEQ ID NO: 79548 - DNA, 599 bp, Chicken  19866894370721_1
  misc_feature (1)..(28): n is any nucleotide
nnnnnnnnnnnnnnnnnnnnnnnnnnnntctccttgcctccccctttagggtttctgccaaattatttactacctccctacgaggaagtggtgaacagaccgccgacccccccgccgccatacagtgccttacatcagcagtgcgtcccagcaggcagcagtagcacaatcccagacacgccgagaaacctgcagccagcacagagcagctcggcagcgcccagcggcaataacagcagtactgacagcaccgggccccctggccttggagaccccgagccttccaccgccgcgctggtygagcgagcagtagccaaaatgcaaagcgtggagcctggtggcaccagcacgggagccgagctagtggagagggccggtcccgaaaaggatacggagtgcaaggaggaactgctgaaaggttacagctcggagarcttagagcagagcagcgccattcccgacgccaaggacaagacgccgggcaggcagcgccgcttcacgggcgactcgggcatcgaagtctgcgtatgcaaccggggccatcacgacgatgacctcaaggagttcgacgggctcatcaacgatgctctggacgggcc

SEQ ID NO: 79549 - DNA, 600 bp, Chicken  19866894370721_2
tcagcagtgcgtcccagcaggcagcagtagcacaatcccagacacgccgagaaacctgcagccagcacagagcagctcggcagcgcccagcggcaataacagcagtactgacagcaccgggccccctggccttggagaccccgagccttccaccgccgcgctggtygagcgagcagtagccaaaatgcaaagcgtggagcctggtggcaccagcacgggagccgagctagtggagagggccggtcccgaaaaggatacggagtgcaaggaggaactgctgaaaggttacagctcggagarcttagagcagagcagcgccattcccgacgccaaggacaagacgccgggcaggcagcgccgcttcacgggcgactcgggcatcgaagtctgcgtatgcaaccggggccatcacgacgatgacctcaaggagttcgacgggctcatcaacgatgctctggacgggcccctggacttctgtgacagctgcagcggccgcccgcacggcgatgaggaggaagggctttttaatgccacggaggagcagcaccgcgaacacagccaccaccacctgccccggcagccggtgtgtgtactcttgaa

SEQ ID NO: 79550 - DNA, 599 bp, Chicken  19866894370730_1
  misc_feature (1)..(7): n is any nucleotide
nnnnnnnctattcatttgtttttaaatattaggaagctactgaaatggcccctaaggtctttggctatggatccctttcagtttgatttgcacacagtttaacagaattcagcagagtcttgggagctcagatatgttcaccttagaattaatttctgatttacagcctggaaattcacccctcaaagaaagctctgtaacagccgtgctgagcaccctgctgcgatgctggggctgcacagatgtgacgtggtgggatcgacagacacagcagcacagtgcagtggggaaggcagggarctgaagccaaattctggtgagggctgagcacagaggattagaccactaagtgcattttcatgacaagtggataatgagctcttactggtgaaatgctgctcgttagatttcaatatttaaaaggatttatgaaggcttattactagggactgcattaataaagactgtgggtctgttctcccttagcccaccgcctggtgttgrcattttctttcctttctttcaataaaagtataaataaataaatatataaatagaaggagcaggaccccctgtttgctttccggagttaaggaaca

SEQ ID NO: 79551 - DNA, 600 bp, Chicken  19866894370730_2
cgtgctgagcaccctgctgcgatgctggggctgcacagatgtgacgtggtgggatcgacagacacagcagcacagtgcagtggggaaggcagggarctgaagccaaattctggtgagggctgagcacagaggattagaccactaagtgcattttcatgacaagtggataatgagctcttactggtgaaatgctgctcgttagatttcaatatttaaaaggatttatgaaggcttattactagggactgcattaataaagactgtgggtctgttctcccttagcccaccgcctggtgttgrcattttctttcctttctttcaataaaagtataaataaataaatatataaatagaaggagcaggaccccctgtttgctttccggagttaaggaacaattagctgtgtgagcaagaggtaagcaggaagggccctcacacttccacttacttgattgcagagaagcaaagctattagcagaattaataccaagagatcagaagtctcgctatgaaggcattaaaaacacacacaacacccatcagcaggtttactataattatgtaacagaagctgattcagcagaaggtgctttcaggcat

SEQ ID NO: 79552 - DNA, 600 bp, Chicken  19866894370733_1
ctttcttctgctagcagattggggaaggagggaagaaagcagttgaagcaagtttctggctgatcccgaaacaacagctgagctagagagaattggacaaggacacgcacaagggtgtgttctgctacccaagctaatgggtttagtagggaggggaatcaaacgttttcaagttgtggaactgaaaaactgaccattattgagatggtgctggctggacggtatgggcagaaattgggagttcactttcaaggatgatagcaaggttaagaagaaaggaaatgggtatgagaagaagcmaggagcargatttatgaaagctacctggcatttcactttggtgagatttacctaacgtttatctgaaggctgaatgtgtgggtgtggaaacgttaatgtcattaaaatgtttggatgaagaattacatgggaaacatcaatgacraatagaacttctgatgcccctcgaggggctacctccagaacaacagakcaaataggaaggtgttgccacccttaatttaaattaatgaattttaaattgatgtaaaggaacaacagcttaaggaggtcaaggacttttccttgcagtgaacgtct

SEQ ID NO: 79553 - DNA, 600 bp, Chicken  19866894370733_2
tgctagcagattggggaaggagggaagaaagcagttgaagcaagtttctggctgatcccgaaacaacagctgagctagagagaattggacaaggacacgcacaagggtgtgttctgctacccaagctaatgggtttagtagggaggggaatcaaacgttttcaagttgtggaactgaaaaactgaccattattgagatggtgctggctggacggtatgggcagaaattgggagttcactttcaaggatgatagcaaggttaagaagaaaggaaatgggtatgagaagaagcmaggagcargatttatgaaagctacctggcatttcactttggtgagatttacctaacgtttatctgaaggctgaatgtgtgggtgtggaaacgttaatgtcattaaaatgtttggatgaagaattacatgggaaacatcaatgacraatagaacttctgatgcccctcgaggggctacctccagaacaacagakcaaataggaaggtgttgccacccttaatttaaattaatgaattttaaattgatgtaaaggaacaacagcttaaggaggtcaaggacttttccttgcagtgaacgtctccccacct

SEQ ID NO: 79554 - DNA, 600 bp, Chicken  19866894370733_3
gtagggaggggaatcaaacgttttcaagttgtggaactgaaaaactgaccattattgagatggtgctggctggacggtatgggcagaaattgggagttcactttcaaggatgatagcaaggttaagaagaaaggaaatgggtatgagaagaagcmaggagcargatttatgaaagctacctggcatttcactttggtgagatttacctaacgtttatctgaaggctgaatgtgtgggtgtggaaacgttaatgtcattaaaatgtttggatgaagaattacatgggaaacatcaatgacraatagaacttctgatgcccctcgaggggctacctccagaacaacagakcaaataggaaggtgttgccacccttaatttaaattaatgaattttaaattgatgtaaaggaacaacagcttaaggaggtcaaggacttttccttgcagtgaacgtctccccaccttactggctgtcactgtggagtcagatgtaggttgtgtatccatgcagttattatcccagcaggattataggtacatgctctgaatgctactgcaggctaagctgtttaatgttgtaagaacaagtgaatggagacag

SEQ ID NO: 79555 - DNA, 600 bp, Chicken  19866894370733_4
ccattattgagatggtgctggctggacggtatgggcagaaattgggagttcactttcaaggatgatagcaaggttaagaagaaaggaaatgggtatgagaagaagcmaggagcargatttatgaaagctacctggcatttcactttggtgagatttacctaacgtttatctgaaggctgaatgtgtgggtgtggaaacgttaatgtcattaaaatgtttggatgaagaattacatgggaaacatcaatgacraatagaacttctgatgcccctcgaggggctacctccagaacaacagakcaaataggaaggtgttgccacccttaatttaaattaatgaattttaaattgatgtaaaggaacaacagcttaaggaggtcaaggacttttccttgcagtgaacgtctccccaccttactggctgtcactgtggagtcagatgtaggttgtgtatccatgcagttattatcccagcaggattataggtacatgctctgaatgctactgcaggctaagctgtttaatgttgtaagaacaagtgaatggagacagactcgggattggagtacagaatagctgtagggcatccccagactgaaa

SEQ ID NO: 79556 - DNA, 600 bp, Chicken  19866894370735_1
ggctctgcaattatagctgctttcccgggtcaggaaacgaatgctgtgactgctgtattcctgtgtgtgatatttatgacacacaatgttatctttgtaattgttacgtctgcttttatgtagtgcaattagggtggagctgaggttaatgctagtgttaatcgttttcgtgttcctaatttagactccaaatgctttccttcagcagcgattgagtaacaaaaattattcatgctattgtcctgctgtcacatctgtgatgtggggagatggcagccaaaatcaccctgatcctggatytgcccactgaaaagattctccgtgtgagctctggagtgttctcctgcttgaaccatgctgggaagtcctctgggtcttaatagrtggagctgctgtgaaaccaagccctgtgcttcaagaggcatccatctggacgggcttcaacccagctgaatttttgctgaggcacaggaactatttatgatagagtggttcagagaaactcacctctgatgtgaggttactggtgtcctcagcttcctaatgagttgaaatacatatttttgtaccaatttaaagttaaaatcatactgaggacca

SEQ ID NO: 79557 - DNA, 600 bp, Chicken  19866894370735_2
aatgttatctttgtaattgttacgtctgcttttatgtagtgcaattagggtggagctgaggttaatgctagtgttaatcgttttcgtgttcctaatttagactccaaatgctttccttcagcagcgattgagtaacaaaaattattcatgctattgtcctgctgtcacatctgtgatgtggggagatggcagccaaaatcaccctgatcctggatytgcccactgaaaagattctccgtgtgagctctggagtgttctcctgcttgaaccatgctgggaagtcctctgggtcttaatagrtggagctgctgtgaaaccaagccctgtgcttcaagaggcatccatctggacgggcttcaacccagctgaatttttgctgaggcacaggaactatttatgatagagtggttcagagaaactcacctctgatgtgaggttactggtgtcctcagcttcctaatgagttgaaatacatatttttgtaccaatttaaagttaaaatcatactgaggaccaatcagcttgtatttctatcaacagcaattttgcagctatcttctttgactggttgcaaaagaaacgcacgcagamattttgctg

SEQ ID NO: 79558 - DNA, 600 bp, Chicken  19866894370735_3
cttaatagrtggagctgctgtgaaaccaagccctgtgcttcaagaggcatccatctggacgggcttcaacccagctgaatttttgctgaggcacaggaactatttatgatagagtggttcagagaaactcacctctgatgtgaggttactggtgtcctcagcttcctaatgagttgaaatacatatttttgtaccaatttaaagttaaaatcatactgaggaccaatcagcttgtatttctatcaacagcaattttgcagctatcttctttgactggttgcaaaagaaacgcacgcagamattttgctggtggtcaaactttgttttttttacattgtgctctgttcacaaacgaaagacttctttgctgaggaccatttgcttttcctgcaaccaaaccaaagggcgtgaatggctgtgctcatggagcaccagagagttggctgagttatgaaagaaacaacttctaagagagctcttcattttgtgcttcctcagytcagggctccaagcctttcacaaaacagagatgcgtcccatggggccaaagtcatcctggggtgggtggtttgaatgacttaagtgtctttttttggtctg

SEQ ID NO: 79559 - DNA, 600 bp, Chicken  19866894370735_4
taaagttaaaatcatactgaggaccaatcagcttgtatttctatcaacagcaattttgcagctatcttctttgactggttgcaaaagaaacgcacgcagamattttgctggtggtcaaactttgttttttttacattgtgctctgttcacaaacgaaagacttctttgctgaggaccatttgcttttcctgcaaccaaaccaaagggcgtgaatggctgtgctcatggagcaccagagagttggctgagttatgaaagaaacaacttctaagagagctcttcattttgtgcttcctcagytcagggctccaagcctttcacaaaacagagatgcgtcccatggggccaaagtcatcctggggtgggtggtttgaatgacttaagtgtctttttttggtctgatttgtgacttgttttaatttattgcctcctctgtaaaccacagatatgtttgtcatttgcaattacatggtaggggaaaaaagaaaagaaaagaagaaaaaaagctttatttggatttgaatttttaattcattctttctccttgccttggcatttggtgcagtgaattcttttcatgagagagctagattgaaatag

SEQ ID NO: 79560 - DNA, 600 bp, Chicken  19866894370745_1
ttagccaatgtgtgcagtcctgttaaaaaacaaagcttagaatcttgttatttgtgttatactctttgaaacttgcacagtggcccatgtggctgattccccagcagtgggtggctctcaaattgcacagtgttgtctgcagcctgttcttgtaaagagtttggggcttgtctatgaagttatctaagacatgatcctgcaaagcatttaatcttatgaatagctgcattggagtttatcaggttacacagacacttaaactctttcctatgcaattatctgacgtttaagaaagaaaaraaaaaaactctgtaggagaagatattgcaaagcactagtttgcttgcagacagctttttgagctgtatttgtgttaattttcactagcattaattacggaatgtgcccttttttatgttctacttcagtgtttttcccgagtaaacacttacaaattgtgtaggtcactctgaatgtggtacctcctatttacttccacagaaactatgacagatacaaagagcacaataaccatatttgatagagcaaattctgagctacaaaacattatttttcaacagtcaccgctattagctatgc

SEQ ID NO: 79561 - DNA, 522 bp, Chicken  19866894370750_1
acaggccttcaaagccctgtttagagttgttgtgcatctagagaagtgacatgtcatatattataataaaacctgtctcccctggaatatgctctacccagaagatttttttcaaatgaaatcaatctggatggttcaggcacatgagctgtgtatttactagataaacattcacagtaacttagaacacaaagtattttatttcttgttatttttgtcaggtctatttgttgttttactgtcttaccaaaacgcgtgctctgtgggaaggcgtgctttgcatttgtgctgacttcaccraggaacccttactggcctgtgtgtttacctcacacacaaataaagcacatccagatttgaactctgtcacttggatcctgttggaaacataaacaagccattttgccccatttttcctcagaactttggctgatgcaggctcttaagctgcatgcagcatgttttctgtaacgcttcgcctgcttacatcaatctcaaaagcacaggagggcacttgcaaca

SEQ ID NO: 79562 - DNA, 600 bp, Chicken  19866894370753_1
gaggcattcatttcagagcagccttcatattatgcattgtgcaagggtaaaagcaacaatgaaattacaaagattttaatttcatgtaaggaattaaaatgataccttaggattttataaggatactccaattatgtgcactagcttatcttgtgataaaattcacaaacaaaaccttgattccattgacttccttttgatcatctttcttctaacccctcattttgttctttttgttcttttcctatctgcaccaccttttttttttttccaaaccatatgtacaaaaattgccagatsatccttcaatttgtgaacagaagagaaattctacattgctagatttataggaattaaataaatataaggcaattgaaatgcataaaagtcatctagatttttatgatttaaaataataataacaacaaaatactgctgtatggtgtctgggtatctcaaaagagctttctgggtgacgaaaaaatatagcaaactagcttatcaattacaggccatatcaactacagagtttaaaacctgtcatatggttgctttcattggtacactgttcctttttcagttcaaggtgagatgctatta

SEQ ID NO: 79563 - DNA, 600 bp, Chicken  19866894370761_1
gttcttaaataaaactggcctgaaaagcaactaggtggtcctgcatctcacgcttatatattttgagctgccacaagtcagactcctttgacttaacctaattctgtttacctgtttgcattagcccctctgggtttttctgtttttttttttttaaaccttggatggataataaaggaatatgattattgtcagcctagtttgatggggatggatctgtgtgtcttggacataggtcattattctttccagtatatcaagcccttgactgaaagattagagctgacttcccttctcacycagtatctcatcagccacctgctccactataaacttgcactgagttaagatgagaccactggaagttctagagtatctgatcttatgtgctgtgtcttcatcattgctcaaatcttagcaacaaggttgctttctctgaaatgtttgtggtttcccacttttgcaaaggacaaaaatctctcttaattgactgttgatctgcttttaaatgagtaaagcttatcccataagggttattttcttttcatcttgtgacatgacagtattgcaatggctcggatttaaataattctagtaaca

SEQ ID NO: 79564 - DNA, 600 bp, Chicken  19866894370762_1
ggtccaatcccttaaagctaggcaaggggcccacggttgtgttctaaagaggaaaagagcttgactaaccctttgctaggtacaaagcctgatgaacgatatccagttttaaatactttggatcaaaatccacttttcacttctggcatgaagtaatgagaagactggaaatagatcttttgtgtcttaattctctctcatccttcttcccaacagcactgagttaaataaaatccaataactttctttggattattttctcaagagtagttacaaatacaggaatcttttaattttttwatttttattttcattattatttttaccaactttgactcactaagccatcctaagaacaagtgaaaaacagaggaacaagggcttctctattctggaggcctacaatttgtcttaaactgagcatctcataactgaagtaacttgaattaatgtactgcttttcatagcgattagttttatcttacttgctaaaaaggagatacaacatcagcaacaactggcatttctgctttcttgctgaagtgactgtatcttgtattgtctgtcaggataagaatatattttagcttcctgatctgc

SEQ ID NO: 79565 - DNA, 600 bp, Chicken  19866894370764_1
atcctttgggaaatggagagccactctaagaagttaatacctctggggcagtatattggaaagcttcatttgatcttctctgacatatatgacagtatctcattttcaagctgaaaaagtcccatctataggttatgccaccaccaacatgcataaataaggctccaagtaggaaagcgagagtgatgggatattggaatgagtggcaaatgttatctgaagctcctattagaatactgctattaaaagacatgctgactaagctgtctggcataactgcagtatgttgctggcttattygtgctatttggctgaatggatggtaattgtcagtgcaaggatggagtcagtaatcagggagcaataacatttcaacctctctggcaagatctgtaaaagggcagctcactgagatcagtcctctccgtcaattaacaatgtctcataagtctgaagggctctgattttgatgcagcccagtgtatggaaaacaatctgttttctccaaggactcttaaggaagttgttatataaacttactgacaggaaaaaaaggatggggatacagaaagaaagaagctccttccagaatccacatca

SEQ ID NO: 79566 - DNA, 600 bp, Chicken  19866894370770_1
gtgtccccaggaattagaactgtgtctaactgcattgagttgtaactagtactgcaattactcattagctgctctgaaacaccattaatgggtgttgtgtaacagatggaaacagatcaatcactattaatggtggtttgaaggcaccattcatttttctgatggcaggaaggaggcaaatgcctttctgaacctaaagtacatgcatttgctgtgatgaaaggattcacggacaggaataaaacaaaaaaaaagcacaggaacctccaataccttgtctatacaagcagctgctttagyacactgtcacaagcattctgaaagcaagagmatgtttacataaatcccacagaaggttcatgttcagacatttaagaatgaacagtatgagtaatgtaaagtgcagccagtggaaactctccagaactcaatacggcagtgttacacagagagggagcttttagacggagagcctgagatgggaggaattggagggaaagcttcccaagaaacaagaactatygataaacagatcagaaataaaatttaattttcatcatttttagctttgtatttctgttgctggcatgtcagcagaag

SEQ ID NO: 79567 - DNA, 600 bp, Chicken  19866894370770_2
gcattgagttgtaactagtactgcaattactcattagctgctctgaaacaccattaatgggtgttgtgtaacagatggaaacagatcaatcactattaatggtggtttgaaggcaccattcatttttctgatggcaggaaggaggcaaatgcctttctgaacctaaagtacatgcatttgctgtgatgaaaggattcacggacaggaataaaacaaaaaaaaagcacaggaacctccaataccttgtctatacaagcagctgctttagyacactgtcacaagcattctgaaagcaagagmatgtttacataaatcccacagaaggttcatgttcagacatttaagaatgaacagtatgagtaatgtaaagtgcagccagtggaaactctccagaactcaatacggcagtgttacacagagagggagcttttagacggagagcctgagatgggaggaattggagggaaagcttcccaagaaacaagaactatygataaacagatcagaaataaaatttaattttcatcatttttagctttgtatttctgttgctggcatgtcagcagaagtcaaaatcagtatcttagtgatactaaaaag

SEQ ID NO: 79568 - DNA, 600 bp, Chicken  19866894370770_3
gattcacggacaggaataaaacaaaaaaaaagcacaggaacctccaataccttgtctatacaagcagctgctttagyacactgtcacaagcattctgaaagcaagagmatgtttacataaatcccacagaaggttcatgttcagacatttaagaatgaacagtatgagtaatgtaaagtgcagccagtggaaactctccagaactcaatacggcagtgttacacagagagggagcttttagacggagagcctgagatgggaggaattggagggaaagcttcccaagaaacaagaactatygataaacagatcagaaataaaatttaattttcatcatttttagctttgtatttctgttgctggcatgtcagcagaagtcaaaatcagtatcttagtgatactaaaaagataaggggcagcttctactttagtagtcataaaaaagtcttgcttgctggattcagaacatctgcattgttgttaatctcaatctagcattttcaacaagagagtaaaagaactcactgtacaaattagaagcacaaaggtcctcagtatcccagacaaaaygtttcagtgctggtgagaacagctcccccr

SEQ ID NO: 79569 - DNA, 600 bp, Chicken  19866894370770_4
gggaaagcttcccaagaaacaagaactatygataaacagatcagaaataaaatttaattttcatcatttttagctttgtatttctgttgctggcatgtcagcagaagtcaaaatcagtatcttagtgatactaaaaagataaggggcagcttctactttagtagtcataaaaaagtcttgcttgctggattcagaacatctgcattgttgttaatctcaatctagcattttcaacaagagagtaaaagaactcactgtacaaattagaagcacaaaggtcctcagtatcccagacaaaaygtttcagtgctggtgagaacagctcccccrgtattcatacagagaaggcaaatcctgcctcaaagtgataaagtttcatattatttcagtgcaacatacaaaagatgctttatactaccttgtattcaaggctgctgtgtagcaaccacaatctggctttaatggcttcattaaaaaatgaaccgtctttatcaacaacctacacagtgagattgagtgcatcctcagcaagtttggagacaatcccaagcagagtggtgcagctgatacaatgaaaggaagggatgccattcaaatgga

SEQ ID NO: 79570 - DNA, 600 bp, Chicken  19866894370770_5
gataaacagatcagaaataaaatttaattttcatcatttttagctttgtatttctgttgctggcatgtcagcagaagtcaaaatcagtatcttagtgatactaaaaagataaggggcagcttctactttagtagtcataaaaaagtcttgcttgctggattcagaacatctgcattgttgttaatctcaatctagcattttcaacaagagagtaaaagaactcactgtacaaattagaagcacaaaggtcctcagtatcccagacaaaaygtttcagtgctggtgagaacagctcccccrgtattcatacagagaaggcaaatcctgcctcaaagtgataaagtttcatattatttcagtgcaacatacaaaagatgctttatactaccttgtattcaaggctgctgtgtagcaaccacaatctggctttaatggcttcattaaaaaatgaaccgtctttatcaacaacctacacagtgagattgagtgcatcctcagcaagtttggagacaatcccaagcagagtggtgcagctgatacaatgaaaggaagggatgccattcaaatggacgtggacaggattgagaaatgggcctgtgt

SEQ ID NO: 79571 - DNA, 600 bp, Chicken  19866894370782_1
gccagcccttgcagcctgcttttgcctagcagcattactgaggtgataggctgggtagctggcactgcaaaggaatgattgcatgcccttctgaaagcttagcatggataccatggagtaaagcagcaaaacctgggtactgggcctagggtcatctttggagctccctctcctaatttgagaggcacaatgaaagagaatgcagtgtatcttctctcagactgccagcaaattcatctgtcaaatcagctatgtgatttctttacaagactgtaataaaagcttgttgtgaaggcaggrtgtgtgctgtgtgagagtacacttgtagagataaggtgataacaaggccttttaataagcagtcttctccgagcttcttggtcttgtagaatctgctgctcttccttttagcaaagaacttcgttcctgcaaaccattagggtattagtgagaagatgtttggacctgctaccttctgaagaaagctttatttgagtgaggaacaatgtggaaatagaattgtgtgtgatggcaaagctgtagatgggtagttagttatctacaagaacttgcagaaggtggtgtgaggaaatgctgtca

SEQ ID NO: 79572 - DNA, 600 bp, Chicken  19866894370786_1
gccctcttcttgcataaggttaaaaagacttttccacccagatttctacaaaaatcataaagtgctgtacccaccaagtggtcctcactctctctgggtaggaatgcacttttcaaccaaagaccctccaagacagcaatattcagatggtttgtggcctaggacagacatcatttgaaggtctggagggccttcatgcagtggggtcgccaagaggaaggaaagaaatcacagaatcatagaatggcgtgggttggaaggaaccttaaatgttatctacttccaacctccttgttggtmatggttgccaaccaccagatcaggctgctcagggccccaacaagactggccttgagcacctccagggatggggcatccacaactaagtgttaaagcwtgggagaagtgggaaaatcagtagcatagagaagggatgaatgccctgcttcatctactcagaactgcacagggagggaaacaarccatgmgacctggaggggagagcagtggcagatgcaaatgatgcatgagagacacttgttaagccttctagtaagagacattaccacaaccctcctgaaaagcaggctgtttcttgac

SEQ ID NO: 79573 - DNA, 600 bp, Chicken  19866894370786_2
gtaggaatgcacttttcaaccaaagaccctccaagacagcaatattcagatggtttgtggcctaggacagacatcatttgaaggtctggagggccttcatgcagtggggtcgccaagaggaaggaaagaaatcacagaatcatagaatggcgtgggttggaaggaaccttaaatgttatctacttccaacctccttgttggtmatggttgccaaccaccagatcaggctgctcagggccccaacaagactggccttgagcacctccagggatggggcatccacaactaagtgttaaagcwtgggagaagtgggaaaatcagtagcatagagaagggatgaatgccctgcttcatctactcagaactgcacagggagggaaacaarccatgmgacctggaggggagagcagtggcagatgcaaatgatgcatgagagacacttgttaagccttctagtaagagacattaccacaaccctcctgaaaagcaggctgtttcttgaccttgagaaaatcacctgtcaaaccccccttctgctctctttccacttctcggttattaaacacccccagagagcttgggaagtcctctgaacacctg

SEQ ID NO: 79574 - DNA, 600 bp, Chicken  19866894370786_3
ctggagggccttcatgcagtggggtcgccaagaggaaggaaagaaatcacagaatcatagaatggcgtgggttggaaggaaccttaaatgttatctacttccaacctccttgttggtmatggttgccaaccaccagatcaggctgctcagggccccaacaagactggccttgagcacctccagggatggggcatccacaactaagtgttaaagcwtgggagaagtgggaaaatcagtagcatagagaagggatgaatgccctgcttcatctactcagaactgcacagggagggaaacaarccatgmgacctggaggggagagcagtggcagatgcaaatgatgcatgagagacacttgttaagccttctagtaagagacattaccacaaccctcctgaaaagcaggctgtttcttgaccttgagaaaatcacctgtcaaaccccccttctgctctctttccacttctcggttattaaacacccccagagagcttgggaagtcctctgaacacctgaacctcaggcagagaatttcagagctttgcatgttaaaaaaaaaaaaaagaaaaaagtgacagaaggggtgtgaaactgagcaat

SEQ ID NO: 79575 - DNA, 600 bp, Chicken  19866894370786_4
ggccttcatgcagtggggtcgccaagaggaaggaaagaaatcacagaatcatagaatggcgtgggttggaaggaaccttaaatgttatctacttccaacctccttgttggtmatggttgccaaccaccagatcaggctgctcagggccccaacaagactggccttgagcacctccagggatggggcatccacaactaagtgttaaagcwtgggagaagtgggaaaatcagtagcatagagaagggatgaatgccctgcttcatctactcagaactgcacagggagggaaacaarccatgmgacctggaggggagagcagtggcagatgcaaatgatgcatgagagacacttgttaagccttctagtaagagacattaccacaaccctcctgaaaagcaggctgtttcttgaccttgagaaaatcacctgtcaaaccccccttctgctctctttccacttctcggttattaaacacccccagagagcttgggaagtcctctgaacacctgaacctcaggcagagaatttcagagctttgcatgttaaaaaaaaaaaaaagaaaaaagtgacagaaggggtgtgaaactgagcaatacctgc

SEQ ID NO: 79576 - DNA, 600 bp, Chicken  19866894370787_1
caacagattcaggcaagaaagatacttgtacagacccaagctcaaaaagattctaatgaattaaaatagaggccacaatttctgaagaaggaaaaaaatcagaagcagccacccatgtatcaggcctcagatcatcctctttccaggcatctggtgattacccacaaagtgtattaagggcatggtttaagaagttcctactggtgatgtgagagttatcaagatgaaacagaagcacaagcaacttggaagagtcttgcacctgaaagtagtaatatagaatttccttgctttcctggktttctgttatacgagcacaaggccagcaaggaaagacacttttagtagagtcatatgggtcactgtgatgtgaaaagccatgacagccagagattcttaccacagctctttgaagcaccagcagccctctgaatgaattctgggagcacaagcctcccaaattcagttaaggagaagcagcttctagaggtgacacttgtgtggcagccaccacttgcacctgcatccttccagcccagcctccaggctgcaggcagttatggagcaggctgatccctgtcaaacctcagggaggcctta

SEQ ID NO: 79577 - DNA, 600 bp, Chicken  19866894370790_1
ctaacctcagggggaggttgttgtgtgtgtttttggagtgggagtactggtgatcatagtgactgtatgcatttgggcttcagactgtttttcctaatttctctgctaataccttgtctggttgtgaatccatcttttcttctttgtccttcccacctaattccagtctgttcaccaccaagagatgtgtacggggagagcactttactttcattgctgaaaggaatttctaacctgcatgagactggaaaagccccgctgtgctgaacccaggcaagcacagttgtgcttgcttcaatygctttgccattgacattacacaattgtgagattatacaaccaaggatctgtgcagtttggtgacaagaactgattcaatttttttaagattgctgtgaggttagcagtgaaaactcaaacggcttggaaaatgtcctggaatcaattggagacagtgctgtgtacagagcaattactcccaagaacaatttccagttcaaacaagctcagactgcattcacaagcaaaggacactggagtcaaggggactgtgtaagttctgatacactttgacatccgctaggttttcagcaggaaaga

SEQ ID NO: 79578 - DNA, 600 bp, Chicken  19866894370797_1
cttctgacttccttatcgccttagtaatatgcagcttgcattttacttgtcatatactttctcccttttggctccactaggagtgaatttccagtctctgaaggatggtgcttcaattctactaaccctttgtatttggggaattttatttacttgactccttttattaggaactttttcttgtcttcctgtttcccttcttacagagaaatgtgcataactttgtttaaatagctcccctgttttcataaagaattagatttccttgcttttgacattaggatatttttgagagagttytttaagaaaaaaataaaagatgtttttctaaattgcagtgttatactgaaagttgctggaactatccctctctgcaaaagyatacacagaaaatacygggttcaccagttttatgaaatcacggtcagagtttgcatgatttcatttgggtacctatatctaaaatctrttattccgtgtatctttagtattgcacttaacaaagatacgttacaaataagtatatgcaaatgcacaacaggcagatttcacacatgcccagctgtgcacatctttctttgggtttagtattgtagatct

SEQ ID NO: 79579 - DNA, 600 bp, Chicken  19866894370797_2
agtgaatttccagtctctgaaggatggtgcttcaattctactaaccctttgtatttggggaattttatttacttgactccttttattaggaactttttcttgtcttcctgtttcccttcttacagagaaatgtgcataactttgtttaaatagctcccctgttttcataaagaattagatttccttgcttttgacattaggatatttttgagagagttytttaagaaaaaaataaaagatgtttttctaaattgcagtgttatactgaaagttgctggaactatccctctctgcaaaagyatacacagaaaatacygggttcaccagttttatgaaatcacggtcagagtttgcatgatttcatttgggtacctatatctaaaatctrttattccgtgtatctttagtattgcacttaacaaagatacgttacaaataagtatatgcaaatgcacaacaggcagatttcacacatgcccagctgtgcacatctttctttgggtttagtattgtagatcttcactatgaaatcgagcttcaatagcaccatgtcagcattgtaactccatgttgtcatcattgaaagaaaaaattgcttat

SEQ ID NO: 79580 - DNA, 600 bp, Chicken  19866894370797_3
ctgaaggatggtgcttcaattctactaaccctttgtatttggggaattttatttacttgactccttttattaggaactttttcttgtcttcctgtttcccttcttacagagaaatgtgcataactttgtttaaatagctcccctgttttcataaagaattagatttccttgcttttgacattaggatatttttgagagagttytttaagaaaaaaataaaagatgtttttctaaattgcagtgttatactgaaagttgctggaactatccctctctgcaaaagyatacacagaaaatacygggttcaccagttttatgaaatcacggtcagagtttgcatgatttcatttgggtacctatatctaaaatctrttattccgtgtatctttagtattgcacttaacaaagatacgttacaaataagtatatgcaaatgcacaacaggcagatttcacacatgcccagctgtgcacatctttctttgggtttagtattgtagatcttcactatgaaatcgagcttcaatagcaccatgtcagcattgtaactccatgttgtcatcattgaaagaaaaaattgcttatgctttcttcagtttgt

SEQ ID NO: 79581 - DNA, 600 bp, Chicken  19866894370797_4
ggaactttttcttgtcttcctgtttcccttcttacagagaaatgtgcataactttgtttaaatagctcccctgttttcataaagaattagatttccttgcttttgacattaggatatttttgagagagttytttaagaaaaaaataaaagatgtttttctaaattgcagtgttatactgaaagttgctggaactatccctctctgcaaaagyatacacagaaaatacygggttcaccagttttatgaaatcacggtcagagtttgcatgatttcatttgggtacctatatctaaaatctrttattccgtgtatctttagtattgcacttaacaaagatacgttacaaataagtatatgcaaatgcacaacaggcagatttcacacatgcccagctgtgcacatctttctttgggtttagtattgtagatcttcactatgaaatcgagcttcaatagcaccatgtcagcattgtaactccatgttgtcatcattgaaagaaaaaattgcttatgctttcttcagtttgtgttagctttaagaattttaagtgaaattgatgtggggacatagtggcttttttttgtaggctccagtgttta

SEQ ID NO: 79582 - DNA, 600 bp, Chicken  19866894370798_1
tgccagccttcccataaagcacgccaaagccaccagtgcctgagccaaacactgctatgttcaggccgtactgcctgcagaaaccaggcttgtgttggcagcactccaagaggagcgaggagggcaagacaggttttaaagagatatcatttctgcagaaagaaattaaacacttaaaaaagcattccgcctgcagtgcagaagccagtctcaaggactctgccatgcccagctacccaatgggtgaatgactggatcaagagagccaagcttggtactgctttgtcccacatgcacgcrtcttcacgataaggatttaacacccacccaccttcccagaaaggatgtctggagattgccgggccctaatccaaggcagcacttcatcatgttacactggaagtgtttgaasggtcccactgaagtcatcagcactctgcagcagaggggcgtaggctctgccacggtggaaagttttattaatgtggccctgagctgggctgctctccggctctaaagctgctgctgtttggtgctcgggctgctgttgacccctccatcattcctgaattctgaagttcgttacagggagatgctatt

SEQ ID NO: 79583 - DNA, 600 bp, Chicken  19866894370798_2
gagcgaggagggcaagacaggttttaaagagatatcatttctgcagaaagaaattaaacacttaaaaaagcattccgcctgcagtgcagaagccagtctcaaggactctgccatgcccagctacccaatgggtgaatgactggatcaagagagccaagcttggtactgctttgtcccacatgcacgcrtcttcacgataaggatttaacacccacccaccttcccagaaaggatgtctggagattgccgggccctaatccaaggcagcacttcatcatgttacactggaagtgtttgaasggtcccactgaagtcatcagcactctgcagcagaggggcgtaggctctgccacggtggaaagttttattaatgtggccctgagctgggctgctctccggctctaaagctgctgctgtttggtgctcgggctgctgttgacccctccatcattcctgaattctgaagttcgttacagggagatgctatttggctttccccgtcgacgagccctttgatgtagctgccatcacaggagttgttgctgggacagcacatcaagccttaccatctggaaggactttacagagagaggaagcata

SEQ ID NO: 79584 - DNA, 600 bp, Chicken  19866894370799_1
tgaggatgtttatcttttaagttgcaaacacgtgttcatggtagttgttgcaagttgtgtttgtcacttacagtgttaaaactaactgcatatgtagtatattgttgagaggttaagtatggaggtatgctctctgtccagtgcttcactgaagagatttttcctttggttttaacatctgtcctaaaatttgaagagttttattattccttggatcaaaatagtgtcaaaacagataacgtctctagcagaaagtggagaggcccaggaaaaatgttgcccgtgtcttggttctacacrtggtaatgcagcagtcrggtgtttcgtggttggaggatggggaaaaatgaaactatttttttctttatagctgttttttaccaagagatattctagacaaatagagtaatagattgtgtactttgtttttcagcctacagcagtcaaaatgatatgtttcattagctaaactgactgaacaggctggaatttgtggacacaatggagaaaatttcttggaaaagtcctcctgaagcactcgttctttcttacatgcgtgcacagtagaacttttcagcttaggtcttctaaaccttacct

SEQ ID NO: 79585 - DNA, 600 bp, Chicken  19866894370799_2
taagttgcaaacacgtgttcatggtagttgttgcaagttgtgtttgtcacttacagtgttaaaactaactgcatatgtagtatattgttgagaggttaagtatggaggtatgctctctgtccagtgcttcactgaagagatttttcctttggttttaacatctgtcctaaaatttgaagagttttattattccttggatcaaaatagtgtcaaaacagataacgtctctagcagaaagtggagaggcccaggaaaaatgttgcccgtgtcttggttctacacrtggtaatgcagcagtcrggtgtttcgtggttggaggatggggaaaaatgaaactatttttttctttatagctgttttttaccaagagatattctagacaaatagagtaatagattgtgtactttgtttttcagcctacagcagtcaaaatgatatgtttcattagctaaactgactgaacaggctggaatttgtggacacaatggagaaaatttcttggaaaagtcctcctgaagcactcgttctttcttacatgcgtgcacagtagaacttttcagcttaggtcttctaaaccttaccttgtcccaaagctgttga

SEQ ID NO: 79586 - DNA, 600 bp, Chicken  19866894370800_1
gggaaacttgcacagggtgaagtagcaaggagtgaaactggatggtggttgggggcttttgtgtttggtccatgtatgcaatttctcggttcatttgtaccagtactgttcactagcaattctggaaataccttcgtaaaacctcaggctggctctgaagaagcactgaggtgtgcccactcaagacccactgagtattgtcttttgtccagctctctggtagctttcagatggaaacagagctggtaatccttgattatcccaggctgagtatctttagatctatgtaccgggaatctmaatcacatatttttatttagtataaactcagttctaaatcttcttgatcagaagcaatgcattttaaatgctgattttctctattttgtgggctattctcttcaaaacaaatgcctcttgggaaaatataaggaggcagaagccagtattttaaacatttatcttgctattactttgaaagaatgacagtaatatatatgacttaaaaaaatatatttctsaagtggggttcaggtctgaaaatctgagatcaaaagattgtgctggaagtgtatagaaaggacttgtagtattttarag

SEQ ID NO: 79587 - DNA, 600 bp, Chicken  19866894370800_2
agctttcagatggaaacagagctggtaatccttgattatcccaggctgagtatctttagatctatgtaccgggaatctmaatcacatatttttatttagtataaactcagttctaaatcttcttgatcagaagcaatgcattttaaatgctgattttctctattttgtgggctattctcttcaaaacaaatgcctcttgggaaaatataaggaggcagaagccagtattttaaacatttatcttgctattactttgaaagaatgacagtaatatatatgacttaaaaaaatatatttctsaagtggggttcaggtctgaaaatctgagatcaaaagattgtgctggaagtgtatagaaaggacttgtagtattttaragaaacttatgatttaaaaatgaaacaagctttgtactggaaaactgaatatacagactatggcatgaggctgagtgaaatgcagctgagcttctgttgacataagtggaaggcggcttacctagcgttgctccctccagggatgcctgtgggaggcctatctcatgaatctccttgttagacagtgttgaatcctgacctctgtatggttgcagtgttcctc

SEQ ID NO: 79588 - DNA, 600 bp, Chicken  19866894370800_3
tmaatcacatatttttatttagtataaactcagttctaaatcttcttgatcagaagcaatgcattttaaatgctgattttctctattttgtgggctattctcttcaaaacaaatgcctcttgggaaaatataaggaggcagaagccagtattttaaacatttatcttgctattactttgaaagaatgacagtaatatatatgacttaaaaaaatatatttctsaagtggggttcaggtctgaaaatctgagatcaaaagattgtgctggaagtgtatagaaaggacttgtagtattttaragaaacttatgatttaaaaatgaaacaagctttgtactggaaaactgaatatacagactatggcatgaggctgagtgaaatgcagctgagcttctgttgacataagtggaaggcggcttacctagcgttgctccctccagggatgcctgtgggaggcctatctcatgaatctccttgttagacagtgttgaatcctgacctctgtatggttgcagtgttcctctggtcagcttggaaatgcacaagcctttgtttgcagaagacattttaaaatagcagcattttggactccacagctga

SEQ ID NO: 79589 - DNA, 599 bp, Chicken  19866894370801_1
  misc_feature (1)..(117): n is any nucleotide
nnnnnnnnnnnnnnnnnnnnnnnnnnnnnnnnnnnnnnnnnnnnnnnnnnnnnnnnnnnnnnnnnnnnnnnnnnnnnnnnnnnnnnnnnnnnnnnnnnnnnnnnnnnnnnnnnnnnntgcttatctggaaattttgtttggatattgtttcaggttctctttcaaacacattccaggcaatgggatgagcacagtaagaacaaggagacttacataggagaaatgtaataaagaacacatttttgaagtttttgtattggatttgaagctgaagatactcttaagtcttcattagcttcygctgagcttcgatgtttacacaagctgctggcattataatttcaaacacttcttcagttatttctacttacggcaaaagcccaaaggaaagcatgctggagatggagcgcgtcatcagaaaacacagactccttgcatacagatgagctttcagctcaatagaattttaacagcctgtggctaggatgcaaaaattggaatcatgaccctctgagacagtagggtagatgcctgtggtaaggattaactccaaacaagcaaacctttctttcaagaagctgaggaaataaagacaacat

SEQ ID NO: 79590 - DNA, 581 bp, Chicken  19866894370801_2
tacggcaaaagcccaaaggaaagcatgctggagatggagcgcgtcatcagaaaacacagactccttgcatacagatgagctttcagctcaatagaattttaacagcctgtggctaggatgcaaaaattggaatcatgaccctctgagacagtagggtagatgcctgtggtaaggattaactccaaacaagcaaacctttctttcaagaagctgaggaaataaagacaacatttcagagaatgaagcttaaggaaaaagaaattattcctcttgtgctcagggtatgtttgcagcagaagycaaactaagtccaccaactcattttctacaggatccaaaacctggacatgaccctgactcttaattttggaacataaaatcttgctgtgttttgttacatgcattaatcccataaccttcatagttgcgataggatccagcaccttacttcagctggtaaccgcagctcaggtggcagggatggcggctacagttacctctggtctttctggaagggaaaagacatactcctccatctgcaataaagcgtgaccttggatgagccatggagagccaccttg

SEQ ID NO: 79591 - DNA, 600 bp, Chicken  19866894370814_1
agtgtttgattagaaactgaaaaagtagaatatgtatttcaaattcctactaaatgggttaaaatgtgtactgttcacagtatacatcaaagacacaaaaactgtcagagctgtatttaaaaatgtaacacttccttggtttggtaggacctctttcaaaacacgggctgttcgcagagcctgtgctgttctctttttcttcccagtattggaccctgttctgctgctctttgtgtctatgtgtatcctcctgggcctaacgaatcctggctgctaacaaggaaccttcctgctctgaayactggcacacaccattccatgatgacgtggtggtagcaatgaaccaccatatttaacgctgctttggttcagccaaggtaacccctgcacttttcctccctgttccttctccacagtttccatgtccatgtccattcctgtgcccagctcacacaggaaccagtaggctgtcaacccctgcactgggacacccacacctgcagggacatggccccttgctgtcacactgagtgcagggtgctcagatgggacagaagcaaacatcagcctgtaagtcatagaatcatgaaatggtctggg

SEQ ID NO: 79592 - DNA, 600 bp, Chicken  19866894370814_2
gaaccaccatatttaacgctgctttggttcagccaaggtaacccctgcacttttcctccctgttccttctccacagtttccatgtccatgtccattcctgtgcccagctcacacaggaaccagtaggctgtcaacccctgcactgggacacccacacctgcagggacatggccccttgctgtcacactgagtgcagggtgctcagatgggacagaagcaaacatcagcctgtaagtcatagaatcatgaaatggtctgggttgaaaagcaccacagtgatcatctagtccaaccccctgytatgtgcagggtcaccaaccagcagaccaggctgcccagagccacatccagcctggctttgaatgcctccagggatggggcatccacaacctccttgggcaacactgagtcctgctctgtttgctcagttcagtgttttcccttttctcccttcccttctgttcccactactctctgccctacttctgttcacttgtttgcaaataaaactcagttcaatgttgctgaaaaactaattagctggtgtgatgctaccaggagatgtgttagcatggagaggatgatgtaataaaggaaaag

SEQ ID NO: 79593 - DNA, 600 bp, Chicken  19866894370815_1
actgttctgggaaaatgttggcattgtttcaggctgtagaaagaggctgtcatagaagcatccattactaaggctgtgatgtagtgttacttttgactgtgtacccagaaaaattactgtctaagcatcaccgatattacaaggcacgtctgtcctgtgacttgtagagtctgcagacatgggacagatgggtttgtccttcgaatctatattatatactctcagttaatctctacctctcgatgttctgatttccactctgaaataataacactgaattagaggtcaagtaatgcaacrcattccaaaatgatctgcgtttgtttttaaataaggagagattgaatatttgttcttgttctctatagcaacagaagggatctgagcattttgatggtaattaacctgactgcaaatgcaaattaatgatcaaattgtttcttcagcaggtatatgtaatctaaaagtgattctctagacaaacagaaatcaaggacgtagtttctgtgtctagctgtagatgttgaaaaagaactgctctgagttrctcaggcaagtcagaagaaccaaagtcattacaacactgggrggaactttttg

SEQ ID NO: 79594 - DNA, 600 bp, Chicken  19866894370815_2
ctgatttccactctgaaataataacactgaattagaggtcaagtaatgcaacrcattccaaaatgatctgcgtttgtttttaaataaggagagattgaatatttgttcttgttctctatagcaacagaagggatctgagcattttgatggtaattaacctgactgcaaatgcaaattaatgatcaaattgtttcttcagcaggtatatgtaatctaaaagtgattctctagacaaacagaaatcaaggacgtagtttctgtgtctagctgtagatgttgaaaaagaactgctctgagttrctcaggcaagtcagaagaaccaaagtcattacaacactgggrggaactttttgcaacacactgtgaagagcatgaaaaaatcctctaatggtaatacataaggatattagtaaataaacctgactagagcaaatgtgagcacatgtgagttttagtgcattgtcttaagatattgagctagtgctttgtaacacacttgctgtaggaaatgatgagactgttgtgaaactgaaggatggaaagcatgtctttgaagtgaagcaaakgatgtcaccagtaagtgatgctggtcaggaggaa

SEQ ID NO: 79595 - DNA, 600 bp, Chicken  19866894370815_3
gtaatgcaacrcattccaaaatgatctgcgtttgtttttaaataaggagagattgaatatttgttcttgttctctatagcaacagaagggatctgagcattttgatggtaattaacctgactgcaaatgcaaattaatgatcaaattgtttcttcagcaggtatatgtaatctaaaagtgattctctagacaaacagaaatcaaggacgtagtttctgtgtctagctgtagatgttgaaaaagaactgctctgagttrctcaggcaagtcagaagaaccaaagtcattacaacactgggrggaactttttgcaacacactgtgaagagcatgaaaaaatcctctaatggtaatacataaggatattagtaaataaacctgactagagcaaatgtgagcacatgtgagttttagtgcattgtcttaagatattgagctagtgctttgtaacacacttgctgtaggaaatgatgagactgttgtgaaactgaaggatggaaagcatgtctttgaagtgaagcaaakgatgtcaccagtaagtgatgctggtcaggaggaaatagcttcccccagtacaagttcctgcattgtgcagtaggtg

SEQ ID NO: 79596 - DNA, 600 bp, Chicken  19866894370815_4
gctgtagatgttgaaaaagaactgctctgagttrctcaggcaagtcagaagaaccaaagtcattacaacactgggrggaactttttgcaacacactgtgaagagcatgaaaaaatcctctaatggtaatacataaggatattagtaaataaacctgactagagcaaatgtgagcacatgtgagttttagtgcattgtcttaagatattgagctagtgctttgtaacacacttgctgtaggaaatgatgagactgttgtgaaactgaaggatggaaagcatgtctttgaagtgaagcaaakgatgtcaccagtaagtgatgctggtcaggaggaaatagcttcccccagtacaagttcctgcattgtgcagtaggtgaatgtgaataaatgttgtaactgaatttcattctctgaaagtgagtaactgtatgatcagtagaarcrtttctgaagctaaaaggaaataaaaatatatagtcaactgaaagtaaaaatatttctttcagagtaaagctaattacaggtggccattaaagatggtgcaactatgtgaggcatgaagtgtcaagcatgttttttctttttggcctataaactaga

SEQ ID NO: 79597 - DNA, 600 bp, Chicken  19866894370815_5
agtaaataaacctgactagagcaaatgtgagcacatgtgagttttagtgcattgtcttaagatattgagctagtgctttgtaacacacttgctgtaggaaatgatgagactgttgtgaaactgaaggatggaaagcatgtctttgaagtgaagcaaakgatgtcaccagtaagtgatgctggtcaggaggaaatagcttcccccagtacaagttcctgcattgtgcagtaggtgaatgtgaataaatgttgtaactgaatttcattctctgaaagtgagtaactgtatgatcagtagaarcrtttctgaagctaaaaggaaataaaaatatatagtcaactgaaagtaaaaatatttctttcagagtaaagctaattacaggtggccattaaagatggtgcaactatgtgaggcatgaagtgtcaagcatgttttttctttttggcctataaactagaggtagtttaatctctggactgtagtttgtattatttgtcacactctaattcacagtgctcatctctgctgctttttttgttctagagtcctagacttggtcactgtatcatctacaaagagcatgtttattgtattccatag

SEQ ID NO: 79598 - DNA, 600 bp, Chicken  19866894370815_6
taaataaacctgactagagcaaatgtgagcacatgtgagttttagtgcattgtcttaagatattgagctagtgctttgtaacacacttgctgtaggaaatgatgagactgttgtgaaactgaaggatggaaagcatgtctttgaagtgaagcaaakgatgtcaccagtaagtgatgctggtcaggaggaaatagcttcccccagtacaagttcctgcattgtgcagtaggtgaatgtgaataaatgttgtaactgaatttcattctctgaaagtgagtaactgtatgatcagtagaarcrtttctgaagctaaaaggaaataaaaatatatagtcaactgaaagtaaaaatatttctttcagagtaaagctaattacaggtggccattaaagatggtgcaactatgtgaggcatgaagtgtcaagcatgttttttctttttggcctataaactagaggtagtttaatctctggactgtagtttgtattatttgtcacactctaattcacagtgctcatctctgctgctttttttgttctagagtcctagacttggtcactgtatcatctacaaagagcatgtttattgtattccatagcc

SEQ ID NO: 79599 - DNA, 600 bp, Chicken  19866894370822_1
gtgtgagtggggaatttggaccagcagtggcacaatttggccacttggtggtgccaaaaaactgtgcagtggtaaaggctatattactgtagagagaagtaagattttttcctggtacactactacagagctctcctcattgccaggctcatatttagattacttttgtgttaaaatgtagcactggtttgtaggaaccaagcattaaaacaacttctgtcaaagaactcccagtgagaacaacgcagcagctgaaattgaaagcaaaaacctgatagctgtaaggggaaatgcctcacrtgtgttgtctgctacagttctcattcctgcatgctcagacatttaagcagtcccattctttctgaacaatttgcttttttcctttctttcattaattcttcatttctctttgcttctcaggcgctgatgctgcagaagatgaagaagtggatgtaacgagtgtggatcccattgctgccttttgtagcaggtaaaagaatatctttgtttaaagtgtggatacaaaacatatcactgacattcccctaaagcakctctctctgtacactttagattttttgtgtctctgctgtagcagat

SEQ ID NO: 79600 - DNA, 600 bp, Chicken  19866894370822_2
tgtgagtggggaatttggaccagcagtggcacaatttggccacttggtggtgccaaaaaactgtgcagtggtaaaggctatattactgtagagagaagtaagattttttcctggtacactactacagagctctcctcattgccaggctcatatttagattacttttgtgttaaaatgtagcactggtttgtaggaaccaagcattaaaacaacttctgtcaaagaactcccagtgagaacaacgcagcagctgaaattgaaagcaaaaacctgatagctgtaaggggaaatgcctcacargtgttgtctgctacagttctcattcctgcatgctcagacatttaagcagtcccattctttctgaacaatttgcttttttcctttctttcattaattcttcatttctctttgcttctcaggcgctgatgctgcagaagatgaagaagtggatgtaacgagtgtggatcccattgctgccttttgtagcaggtaaaagaatatctttgtttaaagtgtggatacaaaacatatcactgacattcccctaaagcakctctctctgtacactttagattttttgtgtctctgctgtagcagata

SEQ ID NO: 79601 - DNA, 600 bp, Chicken  19866894370822_3
aaattgaaagcaaaaacctgatagctgtaaggggaaatgcctcacatgtgttgtctgctacagttctcattcctgcatgctcagacatttaagcagtcccattctttctgaacaatttgcttttttcctttctttcattaattcttcatttctctttgcttctcaggcgctgatgctgcagaagatgaagaagtggatgtaacgagtgtggatcccattgctgccttttgtagcaggtaaaagaatatctttgtttaaagtgtggatacaaaacatatcactgacattcccctaaagcakctctctctgtacactttagattttttgtgtctctgctgtagcagatagagagttgcttgtgtaaaaaaaccattggcagagactagggtcagggtttataaatgaaaaggaacaagatattaaagacccctggttttaaaagaaatcatacctttttgtttcgtagtgatgaagaactggaggactccaaggctctgctttacttacccattgctcctgaagtagaggatccagaagaaaacccctatgggcctccacctgatgctgttcagagttccttaaccgacgagggtataggat

SEQ ID NO: 79602 - DNA, 600 bp, Chicken  19866894370830_1
tctcctctgtaacagtaggaagagaacacttctagtacacatatctcctgaaaactgctattttccacagtccttatgtcacagctttcagtttctcaaatgattcgtttcaaaactatgctgacacagaaagctgaacagatattgtttgcagaaggagaaaaaaagacaagagaaatttttctgggatcattttatatacttttacaatagggcatcaggatcatactggtcagaagagactccttcaggaggatatttagtacctttgtagattatatgagagaaaagatgcaaaayatgtaatagaaatgctcttacaattagactatttattacttctagctgtaaacttgttgtaaatatggcttttctcgcatagctcctggcaaacaaactaactacagagatgcaaagttgtggaatttccatttcatttcttgcctcattaatttcattaacttacaaatagatgaatacataaaattaaaaagtaatttccttttaatatttttaaattactctctccaagtattcaaaccttttaatctgctcttttaaggtctccatctaattggttttacggagacataattgagg

SEQ ID NO: 79603 - DNA, 600 bp, Chicken  19866894370840_1
gggctgggataagagttagttttatctcataatggttggcatctcaaccgttattgagaataacgttgataacacaccaatatctcagtgcttacacagagccacagatgtttcagcttccagtgttgccctgtcagcaaggagttctgggtgcacaaggaagggaaccagtacagctgaccccgactggccaaagagatgtcctatatcacatggtgtcatgctgggcaataaaacaaaggggagttggccagggggatgccattgctagctagcactggtcagctaacagtgcatcasgttttctttattactactgttgtggagttttttagatttattttcttctctttcaaattaaattgttcttatctgtagccataacttctcacacttcctttgttttttctgttcccttccccatcccacttcattggagtggaacacaaggttgtatggtgctgagctgcctgtcaggttaaaccacagcatcaaaatagaaaatctgctaagaatgacaaggtacttttcagaggtaatmataactcagggattgattaggtcttcaaactcatcatctgttcagaagttmattccaaa

SEQ ID NO: 79604 - DNA, 587 bp, Chicken  19866894370840_2
gggagttggccagggggatgccattgctagctagcactggtcagctaacagtgcatcasgttttctttattactactgttgtggagttttttagatttattttcttctctttcaaattaaattgttcttatctgtagccataacttctcacacttcctttgttttttctgttcccttccccatcccacttcattggagtggaacacaaggttgtatggtgctgagctgcctgtcaggttaaaccacagcatcaaaatagaaaatctgctaagaatgacaaggtacttttcagaggtaatmataactcagggattgattaggtcttcaaactcatcatctgttcagaagttmattccaaaagtaatataccagatactattgttaagatattgatgtacctcttgagtcacaacacatctgtaaaggcagcaggtggaaaaacaattaatacaaacctttcaaatgaaaaatctaaacatggaattatctactacttaaataagaaaaatcactaccaaaaaaccatgcattttctctattgtgttccttttyctccattttaacaaatatcaacaaacatgaagttt

SEQ ID NO: 79605 - DNA, 536 bp, Chicken  19866894370840_3
tgcatcasgttttctttattactactgttgtggagttttttagatttattttcttctctttcaaattaaattgttcttatctgtagccataacttctcacacttcctttgttttttctgttcccttccccatcccacttcattggagtggaacacaaggttgtatggtgctgagctgcctgtcaggttaaaccacagcatcaaaatagaaaatctgctaagaatgacaaggtacttttcagaggtaatmataactcagggattgattaggtcttcaaactcatcatctgttcagaagttmattccaaaagtaatataccagatactattgttaagatattgatgtacctcttgagtcacaacacatctgtaaaggcagcaggtggaaaaacaattaatacaaacctttcaaatgaaaaatctaaacatggaattatctactacttaaataagaaaaatcactaccaaaaaaccatgcattttctctattgtgttccttttyctccattttaacaaatatcaacaaacatgaagttt

SEQ ID NO: 79606 - DNA, 335 bp, Chicken  19866894370840_4
aaaatagaaaatctgctaagaatgacaaggtacttttcagaggtaatmataactcagggattgattaggtcttcaaactcatcatctgttcagaagttmattccaaaagtaatataccagatactattgttaagatattgatgtacctcttgagtcacaacacatctgtaaaggcagcaggtggaaaaacaattaatacaaacctttcaaatgaaaaatctaaacatggaattatctactacttaaataagaaaaatcactaccaaaaaaccatgcattttctctattgtgttccttttyctccattttaacaaatatcaacaaacatgaagttt

SEQ ID NO: 79607 - DNA, 600 bp, Chicken  19866894370846_1
taatacatcatattcttttattctcctaattactttttttgtgtgaaagacaattcccagggaacgaacacttcatttctttgaaccactgccaataatatgcaccacaattgctgaaagcaaagagaggatctggcatatctattagagctttgcaaagacatactttttttctttttaaccttggttttcccttaataccagcactgaataaatgaattacattccctctttccccccctttgctcacaacttctatttctgttttccagttgttggttttgcttttttttttttttwaagtcaagtcttgatgggtaattattatatttccagcgtcttctgtctcagccttgtattaaaaaacagcagctaagaaaacaagtccaaattaacaatctactttctgcaaagtgattttaaaggcattagtacagcactccttccacctcactctccatctgcactgtccttctaaatatccttttagcacaaactgtattagctcaccttgagacgaatgaaaccttttattcaaaggcaattcatgcccaaatcttcactgatttcaaacacagtcacctatcttccaccttcata

SEQ ID NO: 79608 - DNA, 599 bp, Chicken  19866894370848_1
  misc_feature (1)..(8): n is any nucleotide
nnnnnnnnattgctaaatatttgactttgggttatgaagatctgtatcaccgttcagactttctgaagaagtttttgtatgtttcatgctgtacaaaacatgaatgtatctttgggacgaaatgaactggatgtgattggtgttacgactgttggatttgacggacaattattttcataccatttgattaggaaaaatactgggtgggtggagaaagagtatgtttgtaatgcttccatgatacagatccagcttaaaaaagaaataatgaagtttccattgtaaataagagcaatattmtgagagttttgtgccagtgtataacatcgagactttttccttttcagttcaaattcaaaactaccactaccatctcttgtttaaagtggacgtgaaggtttttctgtcagcagaaaaatatgaggttcttgagaaggctttgcgtgttttgggggggcatttttaacttctgctaaatatgaaataagatgcaggtaaatcaccgacacattgtcagccaatcccttctgagaaatgctgctttacatacaccagagagctgaaaacttcatttatcctgaatttgaagcatttggtga

SEQ ID NO: 79609 - DNA, 600 bp, Chicken  19866894370860_1
aattggaagtgtggtttttaaactatggaaatgccagtggggtcccaggcacacttgtaccagaaataccaaatgtgtgactttttaaagacaaagctcctccttcaaaatatatgtgaacacgatcaagtcggttataacaaaatgtctctgagatgtagagcacgctggaaagaaaagaacagggaagttattggacagacacgtacatggtgctgcagaaggtgtagaaaaagcatctgtagaaaaaaagaaaaaagtccccagctctcataggctacacagcagtgactctgcccycttctgaaatagtggaacggcagaaaagctcaattaattttctgtgtccaccttcaccacagaggatgatgaagaaattcctgttccaaggacatttttcacaggaaatcagagtgtggccttataacagagattgaagtctcttaggaggaagttatggagcaacttcagcaactcgagtgcagtaaatcaccaggaccagatggtactcatccgagtgttcctaaggaaataaaagtgtgaagcagcagagatattgacaaggatctgcaatgtatcattaaaaccagcaactgttcc

SEQ ID NO: 79610 - DNA, 600 bp, Chicken  19866894370862_1
agttgcaaacagaaaacatccttgacattgagaagaaaaaaaaaaaaaggtaatcataatggggagagagttctggatttgacctagaaaaagttaagcttcagcacagatgtcattacaatcagcccagtctcagcactccggtttgcaacaggaaactcagaagcaatttggcagaaacctttttccacagccttgttcttctccagcatcactgtctcaaacacctatttttgtctagctcaaaggagttgatttttcagtgcagttgattagtgttctcacgtctaaacttctgcrgaaagaaaactgtgtcatcaactggtcataaaccatgggattctcttgaaaactgtactgtcctgcttggaggaagctatcacagtacaacyagctcaaatgcagccatttggttactgcgattttgtaagcagcaacttggaatttcatgtattaattctagatcaccactcagtctattttaagatgattattttgttactcctaccttctgcaacgggaagtggacacaatattacgaataaaggagaacaacaaagttcactgctgcatttccgtgtagacatcacacaaatcaaa

SEQ ID NO: 79611 - DNA, 600 bp, Chicken  19866894370862_2
gttaagcttcagcacagatgtcattacaatcagcccagtctcagcactccggtttgcaacaggaaactcagaagcaatttggcagaaacctttttccacagccttgttcttctccagcatcactgtctcaaacacctatttttgtctagctcaaaggagttgatttttcagtgcagttgattagtgttctcacgtctaaacttctgcrgaaagaaaactgtgtcatcaactggtcataaaccatgggattctcttgaaaactgtactgtcctgcttggaggaagctatcacagtacaacyagctcaaatgcagccatttggttactgcgattttgtaagcagcaacttggaatttcatgtattaattctagatcaccactcagtctattttaagatgattattttgttactcctaccttctgcaacgggaagtggacacaatattacgaataaaggagaacaacaaagttcactgctgcatttccgtgtagacatcacacaaatcaaacacatttagctccagcatctttgaaatcaaactctttttttcttatccactttacggttcgcaataattggtgcaaaagccaaaggaagaga

SEQ ID NO: 79612 - DNA, 599 bp, Chicken  19866894370868_1
  misc_feature (1)..(46): n is any nucleotide
nnnnnnnnnnnnnnnnnnnnnnnnnnnnnnnnnnnnnnnnnnnnnntatggcaccctcacttttggacagaagatgttatatctcaaacacagcaatgaatatttcataacgtcagaactgaaagctatggcctcactcttgcttaaggtggtgggcatccaggggacccctggcagtgcgctgatgtcaagttctctgaaggccctgacttagacatgcatataatccaggagttttatcagatcagtacaagtgttgtcatgtcgttaggatagcctaatacgatcagaattgatgtrcgtatatattatggcagtagacaatgcatgagataactgagttctgcaagtaatccatatttctgtcatgactttgctttctctgtttggggccatccctcctccaccctttgcagtgtgcatggctttatggtgctggtaggttgtgcacagtgagcacttcaacagacaagagaagcaaaatcttcattttttggagaactctcttgttgtagactattattaaaataggagtgtatcattggactgacgataatatcttacggaaatactgaaaaaaagtatgaggggggaataga

SEQ ID NO: 79613 - DNA, 600 bp, Chicken  19866894370870_1
gaagttgggctggggtaagtgtaaagatgttcctgatgtgtgtttggagcaggcttccctcttcttgcctttggaaggtgttttcttagattttgaagggaaaaggggctgctcgctgttttccttattgctgttgcattctgtgatgtcctgggcagtcagttcatcctctgtgatgatttttaagggatcatagatgctgatgcggtgaagccgcccgtcgatgtctacttccacgatgcgctgggcctgagcatacgtcagcgtctcccgagtgggcgagcacttgaggctgtaggstgaaggagaacgccggccctccagtttctgccgtgacctcctccgaggcttcctcatcgctgcagtccaccagagaccctgcaacaaaccaggaccagcatgagcccaggagacaagcaaacagaagcagcacagattgaaaaactcacacagcatcacaatagaaaagcatttcaactaagggcctcggcaatttcaggcttgcagaggatacttcaccttaaatacaagtactggatatatcaatcatttttgcagtgcatatcagagcaagtcacagcaccctccaactttctctat

SEQ ID NO: 79614 - DNA, 600 bp, Chicken  19866894370879_1
agcttttaataatgagaatcagccaatggattttcaaagcatgctactggggcttaatgatttcaaaagctatcacatttacaagttaatgtaccgtaaattattcataagcatcttataaataagtgtaataagttatttccaaggctagtgttgccttaaaataaggttcttctgaaaaatgcctttaaaaatagagctttgtatgaacccatatttactacctctgatgctattttcagatgaaaatttgtgtttgtaatcagatcatttaccagcccagacctccttcagtccacrtctcggttaagccttgacaatccccagggtttagaagaaagcagaggcattggaggcactcagcatgatgctgacggcctctgatttcctcttgcaatggcgtccagtgaggctactggagccagagaagcttcctgtccagaagcagctctgctctctttggcaaagcagctgcttgcggcacgcagaaatgaaacagatgccatctgagcggggtgctgctgccccaygctgtgagcagcccttgccgtgcyacatccccaggcccctatcggcctccaattccagggacacttccca

SEQ ID NO: 79615 - DNA, 600 bp, Chicken  19866894370879_2
tgctattttcagatgaaaatttgtgtttgtaatcagatcatttaccagcccagacctccttcagtccacrtctcggttaagccttgacaatccccagggtttagaagaaagcagaggcattggaggcactcagcatgatgctgacggcctctgatttcctcttgcaatggcgtccagtgaggctactggagccagagaagcttcctgtccagaagcagctctgctctctttggcaaagcagctgcttgcggcacgcagaaatgaaacagatgccatctgagcggggtgctgctgccccaygctgtgagcagcccttgccgtgcyacatccccaggcccctatcggcctccaattccagggacacttcccagcatgagcctggtggagatgcagggctgtcagcaatgtgcttcccagccctttctttacaagttccagctcctctggcaggttagaccacccccacccacacacaaagtgatggtgaaaaatctgcacgttttaagaaccagacaaaatcttcctgaatcacgcactgcccctctctccctcatagaacagcagagtttcagtagtaaatggtgaatctagcttaagaat

SEQ ID NO: 79616 - DNA, 600 bp, Chicken  19866894370879_3
gtttgtaatcagatcatttaccagcccagacctccttcagtccacrtctcggttaagccttgacaatccccagggtttagaagaaagcagaggcattggaggcactcagcatgatgctgacggcctctgatttcctcttgcaatggcgtccagtgaggctactggagccagagaagcttcctgtccagaagcagctctgctctctttggcaaagcagctgcttgcggcacgcagaaatgaaacagatgccatctgagcggggtgctgctgccccaygctgtgagcagcccttgccgtgcyacatccccaggcccctatcggcctccaattccagggacacttcccagcatgagcctggtggagatgcagggctgtcagcaatgtgcttcccagccctttctttacaagttccagctcctctggcaggttagaccacccccacccacacacaaagtgatggtgaaaaatctgcacgttttaagaaccagacaaaatcttcctgaatcacgcactgcccctctctccctcatagaacagcagagtttcagtagtaaatggtgaatctagcttaagaatctgaaatagtaacactaatttagg

SEQ ID NO: 79617 - DNA, 600 bp, Chicken  19866894370890_1
atggtgatatggggaataggatgaataacgaaacactccactgcctgcaggaaaacctcctggggaaagcagtagttagaactacctctgtggcttatagatcagatttaccgtaaccgattctattcagataggcatttaaaataagagcattcaaaaggaggacgtttaagtgacctaaacaaccttctgagtctaccgtgacatcaaacgctaccattactttagtgaaaacaggagatgcttccatgagttaaaagtatgttgaattcaacacaaaaatccaagaacctggcttcstttattcttgtacaaatgtgcccagatgacctcaattaacccatactctgggaaagtccagaagaactcttaatcccattttctcatacagcagtttgacgctaaaaaatccacctccaccacactgccctaaatctccttttctctaaagctctcattagtcctgtaacatctcccatggagcacagcatatccccctagaacttctattgttctcaggattacacttgctattttaaaggtcttgtcagctagagctacaaatagatatatatatatataaataatttctctctcgac

SEQ ID NO: 79618 - DNA, 557 bp, Chicken  19866894370899_1
gccattgttcatgggggagacagaggcaagagaatcagagaatcagtgcattacagaatccttagagttgaaagggatctttaaaggcccatctagtttaactcctctgtaatgaacagggacatccacatccatcctctttaactttgagaaaatttccccttgtcatatcatcacagaccctgctgaagagtctgttcctttctttcttgtagatcctcttcagatactgaaaggccgcactcaggtcaccttggagccttctcttctccaggatgaacagttccagctctctcagcytgtccttgtaggggaggtgttccatcccttggatcatttttgtggccctcctctggacacactccaacagctccatgtcccttctgcactgagtactccacatctggatgcattactccaggtgaggtctcaccagcacagagtaaagtagcatgagagctgactgacatggatcaccctccaggcctgtccagttgctgcatccaggcagcaactcacacaaggaccagtgcctctttctaagaggactgggctgg

SEQ ID NO: 79619 - DNA, 599 bp, Chicken  19866894370901_1
  misc_feature (1)..(130): n is any nucleotide
nnnnnnnnnnnnnnnnnnnnnnnnnnnnnnnnnnnnnnnnnnnnnnnnnnnnnnnnnnnnnnnnnnnnnnnnnnnnnnnnnnnnnnnnnnnnnnnnnnnnnnnnnnnnnnnnnnnnnnnnnnnnnnnnnncttgtctttgaggagagctagagataacctcccattgcattgtagtatgctttccagtgtcagtggaggatctgccagaaggagatcagatttgccctgaagtccaccccatttcacctttcagctcagaactgaccttgcttttttttcactgccatcactaatcacaytgattccctttgctaatatctagagtgactcttgctgagaggtagtgatctgcggggataaaaacaaaccaaagacttccagagcacaaggaaggcccacagctgcaagagtctttacttggagggtggtgaggcactggcacagcctgcccagagaagctgcagacaccccatccctgaaagcattcaaagcaaggctggatggggccctgggcagcctgatctggtggggggaaccccggcccatgacagtgaagctggagcttgatgatctttaaactcccttgcaacctaaagcc

SEQ ID NO: 79620 - DNA, 600 bp, Chicken  19866894370906_1
gagagacataatcacaccttgtaaagaaaggacataacacaaggaagttggtaacagtttggtgcgaaaggctgataaggactcttagccagttcagagacacagttaccagatgtacagttccagatgtcaggatttcctattttatgctgcttccggtcaggagaggtgtatttccatggtaatggtgtcagagcctttaagatatgaggattatccaaccttgaatatgtccattaacattgtacagaagcgcttagtttaagcctctggccatcaatagcataaatactgtactarttaaactgtaagggaagggttaattcttttgcctaagagctctgtaagaaagccacctatagctaataaacaacaccaatgggcaaattaaatgactgtagaaagtccttggtagaagtgaggagatgctcctcataagttttattttctagtcccttcaccagcttcattgctctcctctgtaggcccttgagcaactcaacattcttgtagtgaggggccccagacagtttttgagtctttgagatgactccttgtagaggtgagaccacagttccttccctgctctgcactgtttct

SEQ ID NO: 79621 - DNA, 599 bp, Chicken  19866894370910_1
  misc_feature (1)..(45): n is any nucleotide
nnnnnnnnnnnnnnnnnnnnnnnnnnnnnnnnnnnnnnnnnnnnngcattcaccaatcattgtcttatttctcaaaatttattttgaaggaatttgtctccacgttagagcttttttggtatttagacactattcagactgaacattcccttttggagtttttggaatgaaagaatatgcaattaaaatgttaggaaaaaaacatctcaatagaaatctccttaattttcaaatataattacaggtgttgtagtccacatctgacttttgtttgtctatttgcttgttttgatctttccyttcttcattccctcctccccacttttatgagtgctcctttacatcccatgcaaggaggccaagctggaatcgctctctgaccaaggtttgctcttgttactgttcccacctcttaggctgcccatatccattgaccacactttgctttactgttcagacaggaagagactttactcctcattattctcctttaagagtgagcaaacaatttataatgaattgctgatttggttgattccactacctccttcctgtttgtgagttatttatgactctcgtaaatacacttgctgaataat

SEQ ID NO: 79622 - DNA, 600 bp, Chicken  19866894370910_2
ccccacttttatgagtgctcctttacatcccatgcaaggaggccaagctggaatcgctctctgaccaaggtttgctcttgttactgttcccacctcttaggctgcccatatccattgaccacactttgctttactgttcagacaggaagagactttactcctcattattctcctttaagagtgagcaaacaatttataatgaattgctgatttggttgattccactacctccttcctgtttgtgagttatttatgactctcgtaaatacacttgctgaataatgcctattaacaattccrgtctgcatctcatttcagagcacttcactgaaactcttcaatgtgtgacatttgagctatgttatagagtttaaagcaagtatttctgatatacctttccaccagatgactaaattccagggattcactattcttaacagctaggtatagtttatcaaagaaaagcaagacttcttcttttgtcacacacactgtgtgatctccgacagctatcttcacctttctctgccctagatgtaaattagagacagtgtttttctactaacctttcaagcctgtaattctgtaataaaataatat

SEQ ID NO: 79623 - DNA, 600 bp, Chicken  19866894370922_1
caacacagaagagcttacgtaccttttaattgcctgtaatatattccaattttggtgtgcatttgcaactatgacatctggttctttgccagactttttgggtggcattgctctacacttaattttcaaagtgttgagtgatacggtcatggaaaatgcttcttcttttttttccccttaaaaaaggcaatcatatcggagatgttaaaatttatgctaagtctattcagtgaaacataaatagtcgtcacttggagaacttgctgtgcaaggcatgatcctgcaatatgctcttgcaakaaagtctcagcaccctcagtgctcactgagctgcctgatgctcagcaccttgtaggatctggcctcagaaaaggagcatgaaaggacccaatgcaaactgacaaacattcagctgttccttgtacaacttttcttctctctcaaaagtaacagttcaaacaaaggattaatttagaaagaaaaaaaataattaaaattgaaagaaaatgagcaaggatgatgcgtgaaaaagaatgttaataagagcatttgaagaggcaaagaaattagagagatgaaaaacctgatttttctttttaa

SEQ ID NO: 79624 - DNA, 600 bp, Chicken  19866894370927_1
gcaacatctaccactgcagttccttgttctttctctgtactgcatacaggacgtacacagctttttgctgttatctcagagttcctaggaaaggagttggcattaacaccatttttcttagatggcagaattgaagagactagagtgagagctccgttatagggcattttgccatcttggccccagctctctccactatatcttggtctgcaatatgctactatcagggaataaaactgattttgcccttatattcaagcaagatcacaagaatcatagagcagacaccaagtcacaccrctgatacaggacaaccccaaaggacaggaaaggcataagctccccaaaccagacaggaaagtaactgcagaggagccttagctagtgaaaggctgcagggagataaaagaacaagaaagagttcagttgtgggtttcatttgcatttcaaatagagatggatttggcagatgaagccctggacagaacatgcatgtgaaagattgcctaatgtgcacagagtcatgggtgttttgtgtgacataccttcaggtaacttcctctctgaatgcaggtacctatgaaagaagagatacacgta

SEQ ID NO: 79625 - DNA, 600 bp, Chicken  19866894370927_2
actgcagaggagccttagctagtgaaaggctgcagggagataaaagaacaagaaagagttcagttgtgggtttcatttgcatttcaaatagagatggatttggcagatgaagccctggacagaacatgcatgtgaaagattgcctaatgtgcacagagtcatgggtgttttgtgtgacataccttcaggtaacttcctctctgaatgcaggtacctatgaaagaagagatacacgtaggtaaacaataatgaagttactcaaatcttgatgttatagacacagactctgtattaaccccrttctcttaacacacgtacacrtttacaatagttgatcttaaaagaaagttaaggagcagacgctggatgcgtacgtcaggcrgtagtaagcctcaatccccacattaatctgccatttcttttctgtgctggctgctggggacacagcacaaataagctccataaatccaattcactctcaaacttctgttgcactaagggaaactgtaggaggctgccaaaggttatttacctctgatagcatttgctcttacagggtctctgtctgctgaccaggaacacagctgacagctcctgctt

SEQ ID NO: 79626 - DNA, 600 bp, Chicken  19866894370927_3
gtgaaaggctgcagggagataaaagaacaagaaagagttcagttgtgggtttcatttgcatttcaaatagagatggatttggcagatgaagccctggacagaacatgcatgtgaaagattgcctaatgtgcacagagtcatgggtgttttgtgtgacataccttcaggtaacttcctctctgaatgcaggtacctatgaaagaagagatacacgtaggtaaacaataatgaagttactcaaatcttgatgttatagacacagactctgtattaaccccrttctcttaacacacgtacacrtttacaatagttgatcttaaaagaaagttaaggagcagacgctggatgcgtacgtcaggcrgtagtaagcctcaatccccacattaatctgccatttcttttctgtgctggctgctggggacacagcacaaataagctccataaatccaattcactctcaaacttctgttgcactaagggaaactgtaggaggctgccaaaggttatttacctctgatagcatttgctcttacagggtctctgtctgctgaccaggaacacagctgacagctcctgcttggggaccaacttccttctttc

SEQ ID NO: 79627 - DNA, 562 bp, Chicken  19866894370927_4
ttcaaatagagatggatttggcagatgaagccctggacagaacatgcatgtgaaagattgcctaatgtgcacagagtcatgggtgttttgtgtgacataccttcaggtaacttcctctctgaatgcaggtacctatgaaagaagagatacacgtaggtaaacaataatgaagttactcaaatcttgatgttatagacacagactctgtattaaccccrttctcttaacacacgtacacrtttacaatagttgatcttaaaagaaagttaaggagcagacgctggatgcgtacgtcaggcrgtagtaagcctcaatccccacattaatctgccatttcttttctgtgctggctgctggggacacagcacaaataagctccataaatccaattcactctcaaacttctgttgcactaagggaaactgtaggaggctgccaaaggttatttacctctgatagcatttgctcttacagggtctctgtctgctgaccaggaacacagctgacagctcctgcttggggaccaacttccttctttctaacctgtgctggcacggggaca

SEQ ID NO: 79628 - DNA, 600 bp, Chicken  19866894370931_1
tatttaagtatttatctgtaacaaaggggaataatgaggtttctccctgctgaactgtggttaacgtgtaaaaccacacctcactgtgatggtggcactcagaggtggcagctcctgcagcgcactgtgctgaatgtccccaggcttgcagggtgttcatgcacagctgggcttgaatatgctctgcagtgcttccttggggtcacagcaggggtgaccagctctgcctgctgaggtcaggctatgcccagaagtgctctgcagagctccctcatgttgaaacagcaaggaggaaagctstcccaccactgctgagcactgagttttttactgaaggccactgtaggtggcagtagcccatggggtgctctgggtttggcatagctcttgctgcagcctttggttacaaggtattgctgtgagtatgggctggaggcagggaaggcttatgctcgggacaggaggtgggaatgtctgtgcagaaagtcctttagactcaggcattggtctgagtgctcaagtcttgaaatgaaatactggaaggtaaataggttctgagctaagagtatttcaggcagctcatagatgagaagcgaaagg

SEQ ID NO: 79629 - DNA, 599 bp, Chicken  19866894370935_1
  misc_feature (1)..(103): n is any nucleotide
nnnnnnnnnnnnnnnnnnnnnnnnnnnnnnnnnnnnnnnnnnnnnnnnnnnnnnnnnnnnnnnnnnnnnnnnnnnnnnnnnnnnnnnnnnnnnnnnnnnnnnnaataagtatcacaggtaggtaagcctgcattgttgatattgccttctcatagtttggagagaggagccaaaagattaacaaacttttcagagtaaatgattgggaagctgaattcacacatgctatagaatgactcattgtgatggtgaagatgagaggaaaagcaagaagaaatgtaggccttaggaaggactgarcaataaacctgtggatctggagctggagatgagaaaggttttgaaaatattragcatayacaggtcaggagtaactgctcctactttaggcagttaaaggacttaatacctgccttgatttgctttcagtctcctcttagcatacatttatgaggccaacctgacaccacmctggtgctgacacacagctgggtgtaggcattgtggcctttgccagcatcaccaggcttgttacaggtagtcttgcttcctctcctcatgttaatggatcatggtccttcatcttagtttacttcagt

SEQ ID NO: 79630 - DNA, 599 bp, Chicken  19866894370935_2
  misc_feature (1)..(51): n is any nucleotide
nnnnnnnnnnnnnnnnnnnnnnnnnnnnnnnnnnnnnnnnnnnnnnnnnnnaataagtatcacaggtaggtaagcctgcattgttgatattgccttctcatagtttggagagaggagccaaaagattaacaaacttttcagagtaaatgattgggaagctgaattcacacatgctatagaatgactcattgtgatggtgaagatgagaggaaaagcaagaagaaatgtaggccttaggaaggactgarcaataaacctgtggatctggagctggagatgagaaaggttttgaaaatattragcatayacaggtcaggagtaactgctcctactttaggcagttaaaggacttaatacctgccttgatttgctttcagtctcctcttagcatacatttatgaggccaacctgacaccacmctggtgctgacacacagctgggtgtaggcattgtggcctttgccagcatcaccaggcttgttacaggtagtcttgcttcctctcctcatgttaatggatcatggtccttcatcttagtttacttcagtctttagcaaaaaaataaaaaataaaaaawataaaataaaaaagctcacaaaa

SEQ ID NO: 79631 - DNA, 599 bp, Chicken  19866894370935_3
  misc_feature (1)..(44): n is any nucleotide
nnnnnnnnnnnnnnnnnnnnnnnnnnnnnnnnnnnnnnnnnnnnaataagtatcacaggtaggtaagcctgcattgttgatattgccttctcatagtttggagagaggagccaaaagattaacaaacttttcagagtaaatgattgggaagctgaattcacacatgctatagaatgactcattgtgatggtgaagatgagaggaaaagcaagaagaaatgtaggccttaggaaggactgarcaataaacctgtggatctggagctggagatgagaaaggttttgaaaatattragcatayacaggtcaggagtaactgctcctactttaggcagttaaaggacttaatacctgccttgatttgctttcagtctcctcttagcatacatttatgaggccaacctgacaccacmctggtgctgacacacagctgggtgtaggcattgtggcctttgccagcatcaccaggcttgttacaggtagtcttgcttcctctcctcatgttaatggatcatggtccttcatcttagtttacttcagtctttagcaaaaaaataaaaaataaaaaawataaaataaaaaagctcacaaaaaaaagcc

SEQ ID NO: 79632 - DNA, 600 bp, Chicken  19866894370935_4
aaaagattaacaaacttttcagagtaaatgattgggaagctgaattcacacatgctatagaatgactcattgtgatggtgaagatgagaggaaaagcaagaagaaatgtaggccttaggaaggactgarcaataaacctgtggatctggagctggagatgagaaaggttttgaaaatattragcatayacaggtcaggagtaactgctcctactttaggcagttaaaggacttaatacctgccttgatttgctttcagtctcctcttagcatacatttatgaggccaacctgacaccacmctggtgctgacacacagctgggtgtaggcattgtggcctttgccagcatcaccaggcttgttacaggtagtcttgcttcctctcctcatgttaatggatcatggtccttcatcttagtttacttcagtctttagcaaaaaaataaaaaataaaaaawataaaataaaaaagctcacaaaaaaaagcccaagactgcagaatctgaaccttttactgtgcaaagtgtcccagaaggttatctcatgcagctggctagcatggtgctcggggctgaagactgggacaggcaagggttgcctc

SEQ ID NO: 79633 - DNA, 600 bp, Chicken  19866894370935_5
atgagaaaggttttgaaaatattragcatayacaggtcaggagtaactgctcctactttaggcagttaaaggacttaatacctgccttgatttgctttcagtctcctcttagcatacatttatgaggccaacctgacaccacmctggtgctgacacacagctgggtgtaggcattgtggcctttgccagcatcaccaggcttgttacaggtagtcttgcttcctctcctcatgttaatggatcatggtccttcatcttagtttacttcagtctttagcaaaaaaataaaaaataaaaaawataaaataaaaaagctcacaaaaaaaagcccaagactgcagaatctgaaccttttactgtgcaaagtgtcccagaaggttatctcatgcagctggctagcatggtgctcggggctgaagactgggacaggcaagggttgcctcaaggaggaatgctggaaaaagcacacacttttttccttttttttttcttccacaatctctggctcttcctgagctataaaaacacataagttaaagaaagaaaaaccatgaagcaccaaaaactagatccaagctgactttccaattacaaacaggt

SEQ ID NO: 79634 - DNA, 600 bp, Chicken  19866894370935_6
attragcatayacaggtcaggagtaactgctcctactttaggcagttaaaggacttaatacctgccttgatttgctttcagtctcctcttagcatacatttatgaggccaacctgacaccacmctggtgctgacacacagctgggtgtaggcattgtggcctttgccagcatcaccaggcttgttacaggtagtcttgcttcctctcctcatgttaatggatcatggtccttcatcttagtttacttcagtctttagcaaaaaaataaaaaataaaaaawataaaataaaaaagctcacwaaaaaaagcccaagactgcagaatctgaaccttttactgtgcaaagtgtcccagaaggttatctcatgcagctggctagcatggtgctcggggctgaagactgggacaggcaagggttgcctcaaggaggaatgctggaaaaagcacacacttttttccttttttttttcttccacaatctctggctcttcctgagctataaaaacacataagttaaagaaagaaaaaccatgaagcaccaaaaactagatccaagctgactttccaattacaaacaggtcaacacaaaccaagtggcat

SEQ ID NO: 79635 - DNA, 534 bp, Chicken  19866894370935_7
ctttgccagcatcaccaggcttgttacaggtagtcttgcttcctctcctcatgttaatggatcatggtccttcatcttagtttacttcagtctttagcaaaaaaataaaaaataaaaaawataaaataaaaaagctcacaaaaaaaagcccaagactgcagaatctgaaccttttactgtgcaaagtgtcccagaaggttatctcatgcagctggctagcatggtgctcggggctgaagactgggacaggcaagggttgcctcaaggaggaatgctggaaaaagcacacacttttttccwtttttttttcttccacaatctctggctcttcctgagctataaaaacacataagttaaagaaagaaaaaccatgaagcaccaaaaactagatccaagctgactttccaattacaaacaggtcaacacaaaccaagtggcatggcaactgtgcagctccccttagctctggttggctacttctcttttccaactcactcaagtgatctaatgccacttctgcaaaaggcaattcag

SEQ ID NO: 79636 - DNA, 600 bp, Chicken  19866894370938_1
tgactggttttgtctactacagtggctttgtgctatacattgcgatacatcccctgggttactttacaaggtaataatagtgttttctctatcttgtacatgttaattttaaattatgtttacacagtgtgtgaatgtgaatcaattgaagcttgacattcctatttcagggtagaaataactagtcaatattagctgatattattgatcgtgctgtttgagtgtctgttatgcagaccatacaggtaatgaacatcaatatgcaagaggctgctcaaatgttttgcagttagaagcaaraagagttcactgaatgtggaaggcagccttctatgttggaaaacagctgccaatattttggtacaatagagtcatctgtaatctgacgtacatatataaaaatgaaatgtgaaatactctgtcttaaagggaaaacatgaacatatgtttcacgttacacttctgacacgtggtgtctcacactccagagtgacttttttttttttttttttttttagttctgatgcagtgttacgcttatgggattcccaggcagaaggcaaggcacagtgcaggatctctccaactctcctgactgtc

SEQ ID NO: 79637 - DNA, 600 bp, Chicken  19866894370940_1
tttttgcaaatatttctttgttttgtatttgaaattgtagagcaaatgaataaaggtggagcaagatcaagggaagagccgaacttgtaaagagctggttaccagtagagtatgcttagggaactgtcagttcttcacctcatattgctttcttatactatattctctgtagcaaagtgattctttgtgaattcattgttttcttctgttgaaatgttctgaaggatttgtaccttctaaacattttaggttcaaagtcttactttcacacttgcagtactgagccttttagatagattygtgcaagaagtaaaagagaataattgagagggccaaatgaaaagtaaatgcagcaggatgaaagaacagctgcgtgggtagaatctgcactgagcttactttgagagaggctcccctggggtaaactactgttagttttcctgttgaagatcttaaccttctgaagatggtaacttcttattttgagcagggaaataagaagggtttcatgctgaccaggttttcaagagagaacatctaagattaaaattacagagcttttaagaaatgtattattggacttgattggtctcttctgtg

SEQ ID NO: 79638 - DNA, 599 bp, Chicken  19866894370942_1
  misc_feature (1)..(10): n is any nucleotide
nnnnnnnnnntttgggttggaaggggcctttaagatcatctagttccaacatcccagctataggcagggacaactccctctagaccaggttgctgaaagccccattcagcctggccttgagtgcccctagggagggggcatcaacaacctcactgggcaacctgttccagtgtctcaccaccatcacatttccattaatggtaaatcactttcaatatgggaaaggcagatggagccaaagactccggtcctggaggatacctatctagcttagaggaaggaagtgccttagccacactyccatcgctgggttacatcacctgtctggctgctggcaatttctatagcagagcagttctgccagaaaaagtatttttgacagtctagctaggagatcatattctagctgtcagtctccacggcaccgctatggacattggcaaggctcagactactgggaaacgttgcaaatagctttggggaagagaaaaggaagggaagcagggacatggaaagtgtaaggcagtgaacgcgacagtaagaagttcagtatgaattaaatatgaatcttatatctagaaaaagaaacacgtaacagt

SEQ ID NO: 79639 - DNA, 453 bp, Chicken  19866894370949_1
cagttatttatcctgggggtgcaatttgcaggtgctgcagactgggtgtgctccagagcaggccctcccttaaacgtttgcctccccccaccccagtataaacctctatgactgtatctggaacaagatataaggcatgcttcatccaagtcttttgttaattgcagtttctggaatctcctgctggcgaaattattccccacaaaatccctatctggagggttaggaaagggttagcagcgtgccttcccatttggggtgggtggctggaaataaagctcgctttcatctcccaacctygtaaagagccagcagctgctggagagatgggctccgtgcatgtctacaatgagcagggaacattgctccgatgtgggtgctggtggatgtgccaggtcctgccctatgggatgaaccctggaggagaccctttggctgctcctcttgcttggg

SEQ ID NO: 79640 - DNA, 599 bp, Chicken  19866894370960_1
  misc_feature (1)..(46): n is any nucleotide
nnnnnnnnnnnnnnnnnnnnnnnnnnnnnnnnnnnnnnnnnnnnnntattgatttgtttctaaaaataaattttccagcattatcctctgtcaaacagatgcttttttatcagcccagttgacatggctagaaatctgtttgatttcctaaaaagagtggcctgtgactggatatgcatctgattactgtcacttttactggggagaaagaagaggtatgggtaaaaaatgctttcctcaaatgagaaggaataagattccctttaaagggaggacctccttagggcagaaaaataaatktcagcacggtacctgagacagatacgtacaggggagacaaagaaaatgtaaggctaatagtctagtcactgtgcatgtaagataccggccaggatgtagttcactgtggccttacatacagttttgacatttactatcaggccagtaaaacttgtactaagaaatgtcacggcagatcattatctccttagttaatgaaatgtctaagaggaatgagtaattttgtcccaaagtttccaagaggtgattgcaacaatactccctgtgccaacccagctcccagtcctgcaccatgcagg

SEQ ID NO: 79641 - DNA, 600 bp, Chicken  19866894370967_1
agaacagaacagaacagaacaattgaaagagaccttcaaatataattcagtccaactgcctgacaccttcaaggttagcaaaagattaaagcatattaataagagcgttgttcaaaagtattttgaacactcacaggcatgaggcacaaaccatatcactagaaagcctgttccagagtttgttcattcttgatgttaaaaaaaaaaattccctatacctaatccttatacctcccctggagcaactttatgccattcctccatttcctgtcattggctatcagagagaagagaccagtrcttccctctctgcttcccctcctcagaaagttgcagagagcaatgaggtcacctcagcctcctccagactagaaaatctaagttttctcagcctcccttcaggagacatgccttccagaactttatcatttttattgccctcctctggatgctttttttaaatcacattttcacattgttcagcccagaactgcacacaaaattaaaggtcaggttacacaaaagctaaataaagtgcaagaatcacctcttttgaccagctgactgtgctgtgattaatccatcccaaaatacaatttc

SEQ ID NO: 79642 - DNA, 599 bp, Chicken  19866894370975_1
  misc_feature (1)..(81): n is any nucleotide
nnnnnnnnnnnnnnnnnnnnnnnnnnnnnnnnnnnnnnnnnnnnnnnnnnnnnnnnnnnnnnnnnnnnnnnnnnnnnnnnnttcagcagacaccagtgagggccagcctcagcacatgcagtgccagcagaccccctgtgcacagctatgggagaccgcattgatcttgcttcggtgtgaactgaattctcctttcagtgagggtcactggtcacagatagctctgtagaacttacaccttgataattattgcagctcattttgcttgtgacctaaaacttgagagatagaacagatgasgtaaaaggtgagatgcttttcagactccatacawttccctggcctggggtctcagctgtcagtaaatccctccgagtatgaattttaccttccaaagtcagtttaactggagaatcacgttgaatggacatcactgtgcttcaagtaatgttcaaaatacagcttttatttttacttcagtaattctaaaaggctttatttttcaaattaatctacataatttgggctccactcctccttttctctgtacaggtcatgtgcaatactatgaatgcagctgtgccagacaccctgcaggc

SEQ ID NO: 79643 - DNA, 599 bp, Chicken  19866894370975_2
  misc_feature (1)..(47): n is any nucleotide
nnnnnnnnnnnnnnnnnnnnnnnnnnnnnnnnnnnnnnnnnnnnnnnttcagcagacaccagtgagggccagcctcagcacatgcagtgccagcagaccccctgtgcacagctatgggagaccgcattgatcttgcttcggtgtgaactgaattctcctttcagtgagggtcactggtcacagatagctctgtagaacttacaccttgataattattgcagctcattttgcttgtgacctaaaacttgagagatagaacagatgasgtaaaaggtgagatgcttttcagactccatacawttccctggcctggggtctcagctgtcagtaaatccctccgagtatgaattttaccttccaaagtcagtttaactggagaatcacgttgaatggacatcactgtgcttcaagtaatgttcaaaatacagcttttatttttacttcagtaattctaaaaggctttatttttcaaattaatctacataatttgggctccactcctccttttctctgtacaggtcatgtgcaatactatgaatgcagctgtgccagacaccctgcaggcaggctgggtagaatgtcctaacaagaacagatcc

SEQ ID NO: 79644 - DNA, 563 bp, Chicken  19866894370977_1
attaatcagcctcgaaggcaaaattaggtttccaggaacgctgcttctttgggattagattttggagtggaaaaggtcagactgagctaccagctctaataactcacaatgctttcttctgtcattcttatttaattcagaacaagaaaaataagcttccatctagagcaaggtaagggagttttctctttcttgttaaggcaaaatgctgaagtacgtacttaaactctcagtaactacttttggcttggtctcagcttggtgtcaagcagaattttgctagcaatacaaaattctccsccctgccaacagtatatttacttgatttttggagagaatcaccaggcttagtggtcaggaccaataatgtgccatttaccacacttctaagatactgcttctacagagatgcgattgtgaagctccaagtgccactgaaagatggatggaattgtctcacgtgaaagaggaattaatccttctgtgatatttaggatctggagagagcactgagctgtaaagcactggacacatcccttaggagacggcaagctgtgcacacg

SEQ ID NO: 79645 - DNA, 600 bp, Chicken  19866894370989_1
cagaaagcttgtgttacattagcctgcagggaggatgggttgtggaaaggtgatatttcaaagtaattattccaggaaaagtctttaaagatttcttgatgtgcctggaacatttggtgttagaggcaacttcttttgcttttcatggtttccatagctggtttttaattctctgcagggtatttgttttctaaatgtctaaaatgcaccaaaaaaagaacaccacttttgcagttccggtgaagtcatttttgaaactgactgataaggttatttagtggcaactgtgtttgtttattyagtgtgtagagcagccagaggtaggcttgaggccaggaacgttgatggatgcttgtatcttatatgaatgctaagcatcactaagttctgtctatacataggcaaatgcagctttactttctgttaaaaatgatggcagaggttaactgtgtatttttaattatttttccctcaaacgtttatgccttttttaaaagtaaaactaagagaaactgaagctacacttttcagcactagcaaagctgaatccatgtgggtccttgtataactccatctatatgtgttacgtgcatgtggatg

SEQ ID NO: 79646 - DNA, 600 bp, Chicken  19866894370994_1
gaaatacacacacacacacacacaaacaaacaaacaacaaaaaaaattttttcaatcacatgaggcaaaattgaaatacacaaatttccaccaaacaatcctaaaccagaccagtactcagactagcctaacatactgacattacagtggagtagtacttttttgagtttgacagatatgcaaagagccactatagcacacacctctcaaagtcatagcaaagcagctgtaaagctacagtttatctttgattaaatacaaaaacctccttaacacccctaggaatctctttttttttcyttttttttgccttcagaaatgttaactcctgacccgtgtcacttgaagggcagagaaaaaacaagaaagtatcctacactttatgcaataaaacacatcattagctttctgactgctgcagcaaatgaagcagcattttaattatgttgcctgatgcatcatacagatgtctttcctgaacatataggttggaattcaagagcatctgagtggttatatatttcctatgaagcttcattatcaagtaggtaccaaaatcttgtttcatctgcctctttgatttctcttaaatttgacagt

SEQ ID NO: 79647 - DNA, 600 bp, Chicken  19866894370995_1
aagaacagaaaactacagatattcttaacagaaaattctacttaattcacacattcctctatataactcaagaagctttcatgctctgcgctatgattcaagattgcaaaaagtattgtataaatggagtgccaaactatgagccagaataaaaatagccacagtgcattacagtatcatagttgtgacacgacaaggtaggtaaaatggcatgagtagctctaccacaaactttttttcttctctctccaatgtgcatttgatacataaagggtttaaaatgtatgctttctttttttwaaaaaaaaactttgaaaaatattaattttttagtgtttgctaattgaataaggaaaaaatatatatatcagactttacaccttcagatactacaaatataaaatgggcaggttttctaatgctcagacagtcctgatcattttggtagctgatgtttgcttaggcaataatttcaaaaggggcttgtatttgtgagtgacagtatatgcatgctttataaaaaagtcttttaattgaatttgtggtcagtctacttacaaagggaacattacattttagatgtaaacttaatttgaatta

SEQ ID NO: 79648 - DNA, 533 bp, Chicken  19866894370995_2
cattttagatgtaaacttaatttgaattaatatgatgctataattaactacaactttgaatgaaatcccacaagtccaccaaagataattggattttgagattttcagtaccattctgatagatgttcatgtgtaatgtctaccctaaccctaaaatgcctttcttaacctatgaaatgtacaagtaaaataggagggagaacagagaagcaaaggtagcagtcctctaatctccacttacactggttgtaccaagacacaaacagagatttcaaatgtggaagtgcctctgctcacagmtacaagaggtgaactggcctcagaaagctgagaaggtgctgtagtttgaagagattccagaaggaagaatgaaaattatccacgttacacagtggacgaattcttcaagatatacagcatatttctaaccgaaaaatgtctgtactacataaacagaggaaaaaagtcctgctgcagtacattggcaaatggtctagtagtctaatatgctaatttacacatcggcacattga

SEQ ID NO: 79649 - DNA, 600 bp, Chicken  19866894370999_1
ttaagtctcctccatttctcccgagtgtttttgtattgcctgctgagctttctgtacaggaaatgggcttattttctcagctagatgtctcctgaagaccttttttgttgttcttagtactgatcacgaatagctctgccagcccttacccttcatctttaattgtttctcctatctactcagttaatgttggtcctgcctcagttgggttttgtaaaatagtttctgtgctttaagtgacctgtagtttatgtaacctggtgtgcattataaatgtttaagtagatatttaaagtgatrcaataccatgccatactgataaaggaaattgagttatacatttgttaaaccaagaagattagattgttataccaaaggattaaagtgctgatacatctcgtggagagatcaaaatgtaaacctaacagacacacggtgggagctctagggtaaggattgcatggcacgcatgtgaagtttctctcctcacttaagggctacttttgtgatttattgagacagcacttcatatgccgaggacattaatttgttctgaggtgaactaacacgaaacagccctatgcatatatgagctttgaa

SEQ ID NO: 79650 - DNA, 599 bp, Chicken  19866894371003_1
  misc_feature (1)..(45): n is any nucleotide
nnnnnnnnnnnnnnnnnnnnnnnnnnnnnnnnnnnnnnnnnnnnnctaatgatgacagcatcaatagaaaactgcattctaatactcacatcgtgatcacttttattttattcataattacagtacctacattttagtctatgcaggatgaaaacttaccaaagcatcaaacaccaacgtgtcaaatgtctcactctctgagttctccatcattatgttaaaaagtgcatccagagtgtcttgaaggaactacaaataaatacacaagccaccacatttaagaggaaaaataaaaatcargtttcacataggtttatgcagacacatttgctttcatttatgcaagaggtttttgaaagttagctgagaaagggaaaaattaacattgtttttctggaaattctttttagttcattactataaatccatatcactcaaaaayagggaaaaaattgcatttggtacttgaagaaaacatttaatctatttataggagacgaacaaaatatattccaaaactcagtatcaacatacagccaacagggtcatgcagtttctgaagactgatgtttcacagcacaaatcagacaagcaactca

SEQ ID NO: 79651 - DNA, 600 bp, Chicken  19866894371003_2
gcaggatgaaaacttaccaaagcatcaaacaccaacgtgtcaaatgtctcactctctgagttctccatcattatgttaaaaagtgcatccagagtgtcttgaaggaactacaaataaatacacaagccaccacatttaagaggaaaaataaaaatcargtttcacataggtttatgcagacacatttgctttcatttatgcaagaggtttttgaaagttagctgagaaagggaaaaattaacattgtttttctggaaattctttttagttcattactataaatccatatcactcaaaaayagggaaaaaattgcatttggtacttgaagaaaacatttaatctatttataggagacgaacaaaatatattccaaaactcagtatcaacatacagccaacagggtcatgcagtttctgaagactgatgtttcacagcacaaatcagacaagcaactcaggctcatgccaaaccagtcaccctgagcagtctgagctgagcagtacgagaagtgcacagcgtatggcttttcacagctgcacaattccaaatgacagcatacatgccaggcgtgggacacagagcacacaacctcctgcccc

SEQ ID NO: 79652 - DNA, 600 bp, Chicken  19866894371005_1
cggtgctttgtcaggatggctttttgcatgacaagtctcaccatgtttcttacttttctgcttttagagagcttttaagcacctgcatttttgggctgatgttagaaactaactaaataaagtatttggaaaaaaaaatctttctgatcttgcttcatcctttgcttcttatttggcagagaaatatatttctgtggtctaaacattagtcttgtcttcaggtttgacataaactattacaaaagctgaaacagtaaaaagctgagaagcataaacgtatatgttacttaatgtgttcarttctttatctctctggcaaagagttgaataacacggtcaccctattgatcagaaaaaatactcctgggaagacccgaagacacatttcgctcttcagaatcccttttcccttagaaaacctctgatagttaattttgtttgcatctttgcattgctggtcaagaaatcgtcgaatttaggattaggcagagtaaagctgaaatatctttgaaacaccaagtctaggatcatttcaatacctattgaccgtggaagttaccttagaaagcaacagggtatctttttggttcctttcattga

SEQ ID NO: 79653 - DNA, 600 bp, Chicken  19866894371018_1
gctgttgtggtcatttttatgcaactgtttgttttgttaatgctcatctcatcacaaatccatttacacatccagacctgagcccacactggatgggtggctcggtgaccgtgcggcagtactgtagtgcttggcagcatcggggccaactggaacagagttgcttctccggtaagcatccaaacattcagggttttttgagcttggttttggatctcttggccctgcaactctggcaaagcttgctgaaaaccaaaaggaatgaaaaaggaagaagaccttaaaggatattcgtaatcrtgcttgcttccagcattacatatgatgtggagggaaatagattttctggatgcagttctgtttgcagatccagctggctcttgaagtgagcatgaaaagcagacgataagtacrtatatatccggtacctatctgaaggaactgaagttatcttagaaacyratatatacagagatcacagcatctgaaacttttccctctggcattaaacgcagccaatgtttaacagtactgaataaaaatgtgacagtttaagacacagcagctctttccaagtgaaccttcagggagaacccagag

SEQ ID NO: 79654 - DNA, 600 bp, Chicken  19866894371018_2
ggcagtactgtagtgcttggcagcatcggggccaactggaacagagttgcttctccggtaagcatccaaacattcagggttttttgagcttggttttggatctcttggccctgcaactctggcaaagcttgctgaaaaccaaaaggaatgaaaaaggaagaagaccttaaaggatattcgtaatcrtgcttgcttccagcattacatatgatgtggagggaaatagattttctggatgcagttctgtttgcagatccagctggctcttgaagtgagcatgaaaagcagacgataagtacrtatatatccggtacctatctgaaggaactgaagttatcttagaaacyratatatacagagatcacagcatctgaaacttttccctctggcattaaacgcagccaatgtttaacagtactgaataaaaatgtgacagtttaagacacagcagctctttccaagtgaaccttcagggagaacccagaggagaaaaatgtacgttgagacttggccaaagaaaagggttaatgccatttgtccttatcaaaactgctgcaggatattgcatggccgcaggtagttagggcctgggttttgtat

SEQ ID NO: 79655 - DNA, 600 bp, Chicken  19866894371018_3
tgcttctccggtaagcatccaaacattcagggttttttgagcttggttttggatctcttggccctgcaactctggcaaagcttgctgaaaaccaaaaggaatgaaaaaggaagaagaccttaaaggatattcgtaatcrtgcttgcttccagcattacatatgatgtggagggaaatagattttctggatgcagttctgtttgcagatccagctggctcttgaagtgagcatgaaaagcagacgataagtacrtatatatccggtacctatctgaaggaactgaagttatcttagaaacyratatatacagagatcacagcatctgaaacttttccctctggcattaaacgcagccaatgtttaacagtactgaataaaaatgtgacagtttaagacacagcagctctttccaagtgaaccttcagggagaacccagaggagaaaaatgtacgttgagacttggccaaagaaaagggttaatgccatttgtccttatcaaaactgctgcaggatattgcatggccgcaggtagttagggcctgggttttgtatctgatcctgcggacagcagtgcagtgcgatgcgtcagatcccccggt

SEQ ID NO: 79656 - DNA, 600 bp, Chicken  19866894371018_4
gcttctccggtaagcatccaaacattcagggttttttgagcttggttttggatctcttggccctgcaactctggcaaagcttgctgaaaaccaaaaggaatgaaaaaggaagaagaccttaaaggatattcgtaatcrtgcttgcttccagcattacatatgatgtggagggaaatagattttctggatgcagttctgtttgcagatccagctggctcttgaagtgagcatgaaaagcagacgataagtacrtatatatccggtacctatctgaaggaactgaagttatcttagaaacyratatatacagagatcacagcatctgaaacttttccctctggcattaaacgcagccaatgtttaacagtactgaataaaaatgtgacagtttaagacacagcagctctttccaagtgaaccttcagggagaacccagaggagaaaaatgtacgttgagacttggccaaagaaaagggttaatgccatttgtccttatcaaaactgctgcaggatattgcatggccgcaggtagttagggcctgggttttgtatctgatcctgcggacagcagtgcagtgcgatgcgtcagatcccccggtt

SEQ ID NO: 79657 - DNA, 599 bp, Chicken  19866894371020_1
  misc_feature (1)..(62): n is any nucleotide
nnnnnnnnnnnnnnnnnnnnnnnnnnnnnnnnnnnnnnnnnnnnnnnnnnnnnnnnnnnnnnctgatttctgtctgacagctgaaagataagaacttaatttttggcagtctgaatgacatcaccactggagtcaatgaaacagtacctatttgtccagtcctggacccactggcttttacgtgtctcacagggaaacatttcattgctgagctgcaaagctcaatacagaagcacctcacagatagggaaaccaaagcacctggagttgacgcaacttgctctgccatctgacaggttraaaatccccacttcaaaccatarccactctattkygctgtgttcccaaaagcacaccgcaggcaaactgctgtatatgacaagtcagtagtactgcaaagtcataagaaaaccatacggcggacctactaagttccttatttgaggacttctaaacagtgcctgactaccagcctttacacctcaaacaaacagagcaagcaaaatccacagcaaacagcccaaagtctcaaagaaatccccatcatcctgccacacacaattcctagcccaacaacccaaaaggaaccacagagccca

SEQ ID NO: 79658 - DNA, 599 bp, Chicken  19866894371020_2
  misc_feature (1)..(39): n is any nucleotide
nnnnnnnnnnnnnnnnnnnnnnnnnnnnnnnnnnnnnnnctgatttctgtctgacagctgaaagataagaacttaatttttggcagtctgaatgacatcaccactggagtcaatgaaacagtacctatttgtccagtcctggacccactggcttttacgtgtctcacagggaaacatttcattgctgagctgcaaagctcaatacagaagcacctcacagatagggaaaccaaagcacctggagttgacgcaacttgctctgccatctgacaggttraaaatccccacttcaaaccatarccactctattkygctgtgttcccaaaagcacaccgcaggcaaactgctgtatatgacaagtcagtagtactgcaaagtcataagaaaaccatacggcggacctactaagttccttatttgaggacttctaaacagtgcctgactaccagcctttacacctcaaacaaacagagcaagcaaaatccacagcaaacagcccaaagtctcaaagaaatccccatcatcctgccacacacaattcctagcccaacaacccaaaaggaaccacagagcccagctgacagcagatgctgaagctc

SEQ ID NO: 79659 - DNA, 599 bp, Chicken  19866894371020_3
  misc_feature (1)..(28): n is any nucleotide
nnnnnnnnnnnnnnnnnnnnnnnnnnnnctgatttctgtctgacagctgaaagataagaacttaatttttggcagtctgaatgacatcaccactggagtcaatgaaacagtacctatttgtccagtcctggacccactggcttttacgtgtctcacagggaaacatttcattgctgagctgcaaagctcaatacagaagcacctcacagatagggaaaccaaagcacctggagttgacgcaacttgctctgccatctgacaggttraaaatccccacttcaaaccatarccactctattkygctgtgttcccaaaagcacaccgcaggcaaactgctgtatatgacaagtcagtagtactgcaaagtcataagaaaaccatacggcggacctactaagttccttatttgaggacttctaaacagtgcctgactaccagcctttacacctcaaacaaacagagcaagcaaaatccacagcaaacagcccaaagtctcaaagaaatccccatcatcctgccacacacaattcctagcccaacaacccaaaaggaaccacagagcccagctgacagcagatgctgaagctcctatccgtact

SEQ ID NO: 79660 - DNA, 599 bp, Chicken  19866894371020_4
  misc_feature (1)..(27): n is any nucleotide
nnnnnnnnnnnnnnnnnnnnnnnnnnnctgatttctgtctgacagctgaaagataagaacttaatttttggcagtctgaatgacatcaccactggagtcaatgaaacagtacctatttgtccagtcctggacccactggcttttacgtgtctcacagggaaacatttcattgctgagctgcaaagctcaatacagaagcacctcacagatagggaaaccaaagcacctggagttgacgcaacttgctctgccatctgacaggttraaaatccccacttcaaaccatarccactctattkygctgtgttcccaaaagcacaccgcaggcaaactgctgtatatgacaagtcagtagtactgcaaagtcataagaaaaccatacggcggacctactaagttccttatttgaggacttctaaacagtgcctgactaccagcctttacacctcaaacaaacagagcaagcaaaatccacagcaaacagcccaaagtctcaaagaaatccccatcatcctgccacacacaattcctagcccaacaacccaaaaggaaccacagagcccagctgacagcagatgctgaagctcctatccgtactt

SEQ ID NO: 79661 - DNA, 600 bp, Chicken  19866894371025_1
cacagagggcatcatgcagccactaacagagctgtgtgagctgagctgtgctgcaggggctgtgtcatcccagcaatcccagcagcagaggcagggctggtcccagctcacagccagcaaatggacagccctgggcagtctgcagggggcactcacctgaatgctctgcataattagcagtaatacacacatgcagataagcacttggcaatatctcgtcttctcagtttccatcaactacttgtgttctaattcaagctaatctatgaaaatctcacagaaatgctaattttctgtctygtgaaatgcactgatcattggttaagatcgggagaataaaagaaaatatggcaaagcgtggtaaaacaacaacwgtgtgggatcatccatcccgcacaaaaccaaagtgcccaccgccgagggctgcatggctcagcactgcaggacttacctgagttggagtcctgctgcttttcccgtgtccgcctcttcttttttccctaggaaagccaaggaaaagcccatcaggccgtgctcccagtgctgggggatggatgggtctgagctctgggaaatacacccggggaagtcccaaagcca

SEQ ID NO: 79662 - DNA, 600 bp, Chicken  19866894371025_2
aatcccagcagcagaggcagggctggtcccagctcacagccagcaaatggacagccctgggcagtctgcagggggcactcacctgaatgctctgcataattagcagtaatacacacatgcagataagcacttggcaatatctcgtcttctcagtttccatcaactacttgtgttctaattcaagctaatctatgaaaatctcacagaaatgctaattttctgtctygtgaaatgcactgatcattggttaagatcgggagaataaaagaaaatatggcaaagcgtggtaaaacaacaacwgtgtgggatcatccatcccgcacaaaaccaaagtgcccaccgccgagggctgcatggctcagcactgcaggacttacctgagttggagtcctgctgcttttcccgtgtccgcctcttcttttttccctaggaaagccaaggaaaagcccatcaggccgtgctcccagtgctgggggatggatgggtctgagctctgggaaatacacccggggaagtcccaaagccaccaccagggtgagtgtccccatgtccagcaccgcaggcagtgaggctcacatgtatacatctgcaggaactcag

SEQ ID NO: 79663 - DNA, 600 bp, Chicken  19866894371027_1
atgctgccattactgggtacactattcaaaaagcagataagaagagtatggtaagtaataagatgtttaaaagactgatgtattcatgaagatcttctttttaaaaataaaaagctttataataattaatgcaggagtacaaagcattgaccagtcaatgttatgaaaatctacaaggtatttctaaaaattctaaggattttctggctctaaaagccttcgacatgaaaagccaataacaagcaagatatgtttatcattttcttaaactgacatgaaatgtaaacttccttaaaaaayagcacttggattcttacatttaatgcttattgcaaattaaaacgctggaaaactgggacaatattttgggagttgagttatctaaaggaatccttttgcccactccccagaaaactcagtatgttgacctgcttcatgccctgatcaattaattcctcctgttgatctgtttcccttcccattcttcagttttaatgtcttcaaattgtaagaggagatcttcctccagaagaagaaatgttccctgcctttgagttactgtcagagggagaaagcagcaaaagcagtgtctagggccca

SEQ ID NO: 79664 - DNA, 599 bp, Chicken  19866894371033_1
  misc_feature (1)..(25): n is any nucleotide
nnnnnnnnnnnnnnnnnnnnnnnnntatttttaaggagaaactccaatgcggcgctcacgtcgagattctaagcactgaaactgacagatgccgagcacaaacgctgctcctttcccaggcagacaaagtgaggcgggtcagagcctttgctggtgccccgggagcgcagccaacaagcgccgtgctgcccgcattcaccctgcagggccgatgcttcacgctgccgtcagatccggccccggtgccttctgcggggcaaaatgggtttcggtaggtttggaggattaatcaccgtcggycccatttccttctgggcagcagcctctgcacggctgcaggtgacagcagcaggagatggctctgatcggcgagctgtgggctgtgttacggtgttactacgtcctaatgcaacacatagcctcggacggggatgtggctcgctcctttgaactgggcaatgagggctgagtgcttacaggtaatgaatcagtgtccctgcagctgtaccggggtgtggaggagcatccagagcatggaagtgctttaaggtgggagtcccatctgatggcatctcacaactcccatactacagcccggc

SEQ ID NO: 79665 - DNA, 600 bp, Chicken  19866894371043_1
cctgcaaaattctgtgatgtgacaaaatatttatgagtagggcttttatctactttttttaatgaatgcagtcttatttacactaacagtgagtgagaagtttagaatgagagcagtcaaatagatgtcagcaaggaggctaaacaatgatagctggagttacaactggtttgagctttgcacttctggaagacattcagactaccaaattaaaaatctactaattgtagtcagaggacagacaagaaattgggtaaaaggtgtaactgatttataaaaaaaaaaaaaaaaaaaaaaaargattagacattctttgtgttctgtctagtgtactgagttcccagttcagtgtcaagtgctaaaagccaaacgagaactaagcatcgctctcccattgaaaagtttattgaccaggaaatgatttcaagatgaccaaaaatgtttctgaattctgttggatttgatagaacattttggttaaactaaaccacaaaaatggaaaacttaagcaaaatctgtttcatttcaatctcttcaaaaagagacatcttagtattgccaaatgacaattttgaaaattgtccttagaaacatagtatt

SEQ ID NO: 79666 - DNA, 600 bp, Chicken  19866894371045_1
gctgagatgctgccatatcctaagagtagaagtcagaagggttttgggaaaggtgtagcatttgataaatctaacttttgctcaaagggattgtatttttgcccattccctaacaattaggtgctttgtgtgcacgattggggtgtgtgtgcttttacaataatcacccggtaccaaaatgggttcaatatgcatttatcatcttttttcctagagtttcctgaggtggggcgactcatactgcaagaatcaagaaagtattgagtacttcttacggcaggtagagaaaggaaatctgcrgggaaggctatagattaygtggcacagcaattgttaccatagtttccatccatatcattagttcccaaccactttatctggcttttaggaggaagagaaagacagcgtgctctggcagtctagccagccccctctcatcggatttagcgtgcctcaaagaagaggtgcagggtgcgtggccccttttcttttcaggcaaatttgactggtagcaggatgtggtgtggcttgaaagaaggcatgaagagagttactgtgacaattgactgcatctgcctgattgacttacaagaatgggct

SEQ ID NO: 79667 - DNA, 600 bp, Chicken  19866894371045_2
cctaagagtagaagtcagaagggttttgggaaaggtgtagcatttgataaatctaacttttgctcaaagggattgtatttttgcccattccctaacaattaggtgctttgtgtgcacgattggggtgtgtgtgcttttacaataatcacccggtaccaaaatgggttcaatatgcatttatcatcttttttcctagagtttcctgaggtggggcgactcatactgcaagaatcaagaaagtattgagtacttcttacggcaggtagagaaaggaaatctgcrgggaaggctatagattaygtggcacagcaattgttaccatagtttccatccatatcattagttcccaaccactttatctggcttttaggaggaagagaaagacagcgtgctctggcagtctagccagccccctctcatcggatttagcgtgcctcaaagaagaggtgcagggtgcgtggccccttttcttttcaggcaaatttgactggtagcaggatgtggtgtggcttgaaagaaggcatgaagagagttactgtgacaattgactgcatctgcctgattgacttacaagaatgggctgtttgactcctggggagg

SEQ ID NO: 79668 - DNA, 600 bp, Chicken  19866894371045_3
ctctggcagtctagccagccccctctcatcggatttagcgtgcctcaaagaagaggtgcagggtgcgtggccccttttcttttcaggcaaatttgactggtagcaggatgtggtgtggcttgaaagaaggcatgaagagagttactgtgacaattgactgcatctgcctgattgacttacaagaatgggctgtttgactcctggggaggaagcctggggagggtggcagtttgtttccaagaaaaccttagtggaaaaaaagacaatgatgtaggaaaagagtagtgatcaacaagcacrgatagcacttgctaaagtttctcttttttacccctcaaaaacattagacagtatagatttaacttagactacactgatgttttttttcattagttcatttgtatgtttctatgtagtaatctttgttggcaagacagtgaacatgattgatgggtgttttatgcagaagtgatcactttgctgcttatcagagcaaagtctgtgaggcaggtatagggtgtctcacgtcttttctttagttctctaaatgctgcagttctgcagacaaacactgagtccgtaataatagccagatgctgc

SEQ ID NO: 79669 - DNA, 600 bp, Chicken  19866894371047_1
cctgaatgtgagctagcaggtgatcccctccaaaaaatatctaacctctcctttctgagcacagttggaggggtaagggttttaaagacaggcagttatcctgattgcagttcctcgtcaaaaactgctgcatcatcttcggtagagtacacttcccttctatggtttgaactgactctacctcaatggccagcatcaaaatcatgcctaaactgcagctttcttgatggtatgtattatctgaaggcttaggcaaactgctcatgtccatcagtctgtcaaggtgttcaccctcttccycatccattcacacaagtgtgtggaccacacaagataggtacaaargtgacaccttttakcgtaagtaaagatgcagtgaccgaactcttctcatggttaattatgtctgttttccaagggattccaaatgggtccacctggaagaccttcagaaacacaaagggtagagaaaggaattgtccctggaaaacaaactaatctccagagagatttctcttcagactttcagccaattcttcaaagcaagcaaaaaatcaggtttctctgagcaacagcagaattacaaggttagctcaaagc

SEQ ID NO: 79670 - DNA, 600 bp, Chicken  19866894371047_2
ctctcctttctgagcacagttggaggggtaagggttttaaagacaggcagttatcctgattgcagttcctcgtcaaaaactgctgcatcatcttcggtagagtacacttcccttctatggtttgaactgactctacctcaatggccagcatcaaaatcatgcctaaactgcagctttcttgatggtatgtattatctgaaggcttaggcaaactgctcatgtccatcagtctgtcaaggtgttcaccctcttccycatccattcacacaagtgtgtggaccacacaagataggtacaaargtgacaccttttakcgtaagtaaagatgcagtgaccgaactcttctcatggttaattatgtctgttttccaagggattccaaatgggtccacctggaagaccttcagaaacacaaagggtagagaaaggaattgtccctggaaaacaaactaatctccagagagatttctcttcagactttcagccaattcttcaaagcaagcaaaaaatcaggtttctctgagcaacagcagaattacaaggttagctcaaagccagatgagagagaaggaaagaatccaaatctcatcccaatcctgc

SEQ ID NO: 79671 - DNA, 600 bp, Chicken  19866894371047_3
cacagttggaggggtaagggttttaaagacaggcagttatcctgattgcagttcctcgtcaaaaactgctgcatcatcttcggtagagtacacttcccttctatggtttgaactgactctacctcaatggccagcatcaaaatcatgcctaaactgcagctttcttgatggtatgtattatctgaaggcttaggcaaactgctcatgtccatcagtctgtcaaggtgttcaccctcttccycatccattcacacaagtgtgtggaccacacaagataggtacaaargtgacaccttttakcgtaagtaaagatgcagtgaccgaactcttctcatggttaattatgtctgttttccaagggattccaaatgggtccacctggaagaccttcagaaacacaaagggtagagaaaggaattgtccctggaaaacaaactaatctccagagagatttctcttcagactttcagccaattcttcaaagcaagcaaaaaatcaggtttctctgagcaacagcagaattacaaggttagctcaaagccagatgagagagaaggaaagaatccaaatctcatcccaatcctgccaacacgttttctg

SEQ ID NO: 79672 - DNA, 412 bp, Chicken  19866894371047_4
gaaacacaaagggtagagaaaggaattgtccctggaaaacaaactaatctccagagagatttctcttcagactttcagccaattcttcaaagcaagcaaaaaatcaggtttctctgagcaacagcagaattacaaggttagctcaaagccagatgagagagaaggaaagaatccaaatctcatcccaatcctgccaacacgttttctggcaaatctaatagtctgaatgtccaaacttgtcctctgtgtatccccttctgaacgaaacatactgaatggaatgaactcctgcactgcatytgcaggagactttgcatcttgcagacgtgggtgtaatagcatagccttcattggtcaagttgtcagaccctaggagactgcagtcatcaaactctgcaggagcacagtcaaa

SEQ ID NO: 79673 - DNA, 599 bp, Chicken  19866894371049_1
  misc_feature (1)..(3): n is any nucleotide
nnncaggatctttctctataagccaccttagcatggactagagttgtaccttccctcctctctgaaagatatagacagttctgagtgcttgcataggaagtgtccacacattcttcagaaagggaaaccatctagtcccatttctagcaaggattaaatcacaacatctcatgaaatcacaaaagatatccaagaggaaatatgtcttctgtctttcctgcttttgtactcttttgcaaaatcaaagctctctgtgaaagacaggctaccaggaacctcaaggggcacctccagagaaarcacaatcctcactttctaatgctttctattttttggtaaagtttgtgatgtgtgatttttccctaaagcctgagttctctgagtcatacagttcgctgagaattgttttctcaaatgttaatttctagaaaaaaaaagcccaaagacatgactagaatcctaattttataatgagaagcaaaaagaaaaagggtcgaaggtattgtttttaagcagtctctaggtatttaagckaagtttgagagtttctgaggtctagaatgtgatttttgaagagtagcgatgacaacagtgcatta

SEQ ID NO: 79674 - DNA, 600 bp, Chicken  19866894371049_2
tgcaaaatcaaagctctctgtgaaagacaggctaccaggaacctcaaggggcacctccagagaaarcacaatcctcactttctaatgctttctattttttggtaaagtttgtgatgtgtgatttttccctaaagcctgagttctctgagtcatacagttcgctgagaattgttttctcaaatgttaatttctagaaaaaaaaagcccaaagacatgactagaatcctaattttataatgagaagcaaaaagaaaaagggtcgaaggtattgtttttaagcagtctctaggtatttaagckaagtttgagagtttctgaggtctagaatgtgatttttgaagagtagcgatgacaacagtgcattacaattatgcagcacagcataatgatacttcctacaaccaccactttcctttctgcttttcattcccttcctcaagtcattccagcctgcatctgtctggcctctctcatgtttttctctcttctcacccttcttccagctcctgtgagctcccagccagcatcaacatctgcacggctttcatcccttcgtccccttgtcatgtcccctccattggcatgtcactttctcatccc

SEQ ID NO: 79675 - DNA, 600 bp, Chicken  19866894371050_1
tattaaaaagcaggtagagttgacgtcattaatttcccactgaggtcattggaacatctaccaaattcagcagagaaacaattagacaaatcctacgtgtttttgaaaacttcactttagtcatcagcatcagcatgaatttactcagctcaggattctccctgtaatgtaacctttttgttctgctaaccccttcaataggtctcctctttcaaaaggtcctcagtaaattcaaatataaaggcaaactgaattttccatttctttcacatgcacattaatgccttgtgagtgttttaytatgcatccatatgaagtttgctgttgccttgggaaatctatgattttgcatcataaaaaattccttttatgtgattacaggaataccagcttagctttaatgaagaaaattatgtttccatattacagagattttggcttttaaaaagcaattctaaaaatgcacctaaagatgaaagcactgttattcagactatgattttaaaatcttttttcccaagatcaaactataacgtctcatcattcactaactttctcctttctttcagtttcagtcaccttattctcagaattcatctt

SEQ ID NO: 79676 - DNA, 600 bp, Chicken  19866894371050_2
aaaatgcacctaaagatgaaagcactgttattcagactatgattttaaaatcttttttcccaagatcaaactataacgtctcatcattcactaactttctcctttctttcagtttcagtcaccttattctcagaattcatcttgtgtctcacctgagcagcagtagcctctcattagctcatttttgcaatcctcagacagaaaaaaatctttaaaatgtcttcacggaatgaacgaataatcctttctgtgtatttaagtgctaatctgattgcttgagagacagcagccatttctctratcactggcatgcttccacaagattgtcccaaactcccgggaaaaaagatattaacattagagttattaaamaaaaatcacctgatagttagtattgcaaaggccaccaattaattagtgtgttagattttctcctctcaaccatctgtagaaatatgtaagagaataaaagactggcttgagtcatacaaaaaaatgtaatgaaacgtgaaaatccactatacaaatcaatttttgacaaattgcaacaaatttaaaatgtagctactattccaacactcattgttgcctatttaaagc

SEQ ID NO: 79677 - DNA, 596 bp, Chicken  19866894371050_3
ataacgtctcatcattcactaactttctcctttctttcagtttcagtcaccttattctcagaattcatcttgtgtctcacctgagcagcagtagcctctcattagctcatttttgcaatcctcagacagaaaaaaatctttaaaatgtcttcacggaatgaacgaataatcctttctgtgtatttaagtgctaatctgattgcttgagagacagcagccatttctctratcactggcatgcttccacaagattgtcccaaactcccgggaaaaaagatattaacattagagttattaaamaaaaatcacctgatagttagtattgcaaaggccaccaattaattagtgtgttagattttctcctctcaaccatctgtagaaatatgtaagagaataaaagactggcttgagtcatacaaaaaaatgtaatgaaacgtgaaaatccactatacaaatcaatttttgacaaattgcaacaaatttaaaatgtagctactattccaacactcattgttgcctatttaaagcattgtttgtgcaaacaatcagaactgagcttaaaatgacgactaatatgtaatgaatttacaagaaca

SEQ ID NO: 79678 - DNA, 599 bp, Chicken  19866894371051_1
  misc_feature (1)..(79): n is any nucleotide
nnnnnnnnnnnnnnnnnnnnnnnnnnnnnnnnnnnnnnnnnnnnnnnnnnnnnnnnnnnnnnnnnnnnnnnnnnnnnnntagcagtctggcaagaagataggaaagaggaacattgtggcccagcctttgcctcccctgttctggcagcagtcccagcttcagagagacaaggcagaatgaagacatcaaccctaagccacaaagagtactactagaactggctatgtaggaaccatgatcacacaaaccaacttgagatttgtgtatacaaatttcatcattctttttgttgctatcaygacttagggcatatcaccaggtccttcccatcaattttccactgaatgacatcccacatgataactgcaaagtggtttactcagctgaaaaggtaggtatagtgggtacttaacttatgcattggcagaatcatccttcctaataacttttgcctgtcaaaacaaaacacaacaacaaaaaaccaccaaacgaaaaacaggcttgcttgggaagatagagaaaatgcctactctcaattctatttctttacttttatttatttattaattgtagttatgtggttttggacgtattttgc

SEQ ID NO: 79679 - DNA, 599 bp, Chicken  19866894371053_1
  misc_feature (1)..(158): n is any nucleotide
nnnnnnnnnnnnnnnnnnnnnnnnnnnnnnnnnnnnnnnnnnnnnnnnnnnnnnnnnnnnnnnnnnnnnnnnnnnnnnnnnnnnnnnnnnnnnnnnnnnnnnnnnnnnnnnnnnnnnnnnnnnnnnnnnnnnnnnnnnnnnnnnnnnnnnnnnnnnnnatactaacttctttctcaaaactcagaagtgggataagtagataaactgggaggaaaaaaatgctattttgtaggttaagaaaaacaaaaacacattcagatatgtagtcatagctaaatgcattcaaaagtttaatcattyaatcaacaggatggagacaaatatgacagaagggccagaacagggatgccaagcagcagaaacaactaattatagctattttcagagcccaygctgcaaatagtcagtatatagacactasaggaaaaacaacacaactttaaatatatatatatacttctatttttttcttttacaactttgcatgtgactgagccaaatctcagtattaagaagcacctacctattcctcttcgcttagactctgcttcctctatagcaaacattaagaatayagggatgaggaagaagaaatacct

SEQ ID NO: 79680 - DNA, 599 bp, Chicken  19866894371053_2
  misc_feature (1)..(66): n is any nucleotide
nnnnnnnnnnnnnnnnnnnnnnnnnnnnnnnnnnnnnnnnnnnnnnnnnnnnnnnnnnnnnnnnnnatactaacttctttctcaaaactcagaagtgggataagtagataaactgggaggaaaaaaatgctattttgtaggttaagaaaaacaaaaacacattcagatatgtagtcatagctaaatgcattcaaaagtttaatcattyaatcaacaggatggagacaaatatgacagaagggccagaacagggatgccaagcagcagaaacaactaattatagctattttcagagcccaygctgcaaatagtcagtatatagacactasaggaaaaacaacacaactttaaatatatatatatacttctatttttttcttttacaactttgcatgtgactgagccaaatctcagtattaagaagcacctacctattcctcttcgcttagactctgcttcctctatagcaaacattaagaatayagggatgaggaagaagaaatacctaagtaagcrttctgaaatatatttccatgggattggcagcacatgtcctaaaatgttgggcttatacacgttttgacaccacattactacaa

SEQ ID NO: 79681 - DNA, 599 bp, Chicken  19866894371053_3
  misc_feature (1)..(37): n is any nucleotide
nnnnnnnnnnnnnnnnnnnnnnnnnnnnnnnnnnnnnatactaacttctttctcaaaactcagaagtgggataagtagataaactgggaggaaaaaaatgctattttgtaggttaagaaaaacaaaaacacattcagatatgtagtcatagctaaatgcattcaaaagtttaatcattyaatcaacaggatggagacaaatatgacagaagggccagaacagggatgccaagcagcagaaacaactaattatagctattttcagagcccaygctgcaaatagtcagtatatagacactasaggaaaaacaacacaactttaaatatatatatatacttctatttttttcttttacaactttgcatgtgactgagccaaatctcagtattaagaagcacctacctattcctcttcgcttagactctgcttcctctatagcaaacattaagaatayagggatgaggaagaagaaatacctaagtaagcrttctgaaatatatttccatgggattggcagcacatgtcctaaaatgttgggcttatacacgttttgacaccacattactacaaaaatgcaacgtgccagtgttgctctctac

SEQ ID NO: 79682 - DNA, 600 bp, Chicken  19866894371053_4
aatgcattcaaaagtttaatcattyaatcaacaggatggagacaaatatgacagaagggccagaacagggatgccaagcagcagaaacaactaattatagctattttcagagcccaygctgcaaatagtcagtatatagacactasaggaaaaacaacacaactttaaatatatatatatacttctatttttttcttttacaactttgcatgtgactgagccaaatctcagtattaagaagcacctacctattcctcttcgcttagactctgcttcctctatagcaaacattaagaatayagggatgaggaagaagaaatacctaagtaagcrttctgaaatatatttccatgggattggcagcacatgtcctaaaatgttgggcttatacacgttttgacaccacattactacaaaaatgcaacgtgccagtgttgctctctactattccatccatattgcactatttatgcatagcaaattgcctctatagcctaggaacttcacacagagtttacattcaaagcgcagttaggccctggatctaaaactctaaacccatctaaatccacaattagagcgtacctgctttaaaagtag

SEQ ID NO: 79683 - DNA, 569 bp, Chicken  19866894371053_5
ggatggagacaaatatgacagaagggccagaacagggatgccaagcagcagaaacaactaattatagctattttcagagcccaygctgcaaatagtcagtatatagacactasaggaaaaacaacacaactttaaatatatatatatacttctatttttttcttttacaactttgcatgtgactgagccaaatctcagtattaagaagcacctacctattcctcttcgcttagactctgcttcctctatagcaaacattaagaatayagggatgaggaagaagaaatacctaagtaagcrttctgaaatatatttccatgggattggcagcacatgtcctaaaatgttgggcttatacacgttttgacaccacattactacaaaaatgcaacgtgccagtgttgctctctactattccatccatattgcactatttatgcatagcaaattgcctctatagcctaggaacttcacacagagtttacattcaaagcgcagttaggccctggatctaaaactctaaacccatctaaatccacaattagagcgtacctgctttaaaagtagaa

SEQ ID NO: 79684 - DNA, 600 bp, Chicken  19866894371056_1
tcaagcgagctgtatctgatgagaagttcccagaacattttctcctccaaaccagctgaggctacacagacccaaacaatgaagagaaagattcagagatgagctagcttctctccttcctgttagctcaggccattctgggaggagtgagacagggagctcaggaaattcctggcttctctgcattcacatccgacctttagctggatctgaggctgctcatcccttgcatgagttatttctgacttgtgtgtatgaaacagcttcctagtgatctcttcattgagaggtgatgctcaytgccccagaggtgggggaagatttaactcatgtgccctcagattccctttcagctacgccagggacatccagaggaaracarggagcctctatgcctttacatgtgttcagaatgtacacgctaacaaccagacagaccactagagaaatctgcacaaagtaaggttggatagctctgatatcccacgaggggctaagctgcatgatggcctcataggyacagttgagtgtctttgcttttcaccccctgggttacagtgctgtaaatctcacaagggaaagtctcccagtgcagaagct

SEQ ID NO: 79685 - DNA, 600 bp, Chicken  19866894371056_2
atgaagagaaagattcagagatgagctagcttctctccttcctgttagctcaggccattctgggaggagtgagacagggagctcaggaaattcctggcttctctgcattcacatccgacctttagctggatctgaggctgctcatcccttgcatgagttatttctgacttgtgtgtatgaaacagcttcctagtgatctcttcattgagaggtgatgctcaytgccccagaggtgggggaagatttaactcatgtgccctcagattccctttcagctacgccagggacatccagaggaaracarggagcctctatgcctttacatgtgttcagaatgtacacgctaacaaccagacagaccactagagaaatctgcacaaagtaaggttggatagctctgatatcccacgaggggctaagctgcatgatggcctcataggyacagttgagtgtctttgcttttcaccccctgggttacagtgctgtaaatctcacaagggaaagtctcccagtgcagaagcttacaggcccattgagggtcctggtggaggctacatggagggagactggtacttytttgattttttttaatcagtattt

SEQ ID NO: 79686 - DNA, 600 bp, Chicken  19866894371056_3
agagaaagattcagagatgagctagcttctctccttcctgttagctcaggccattctgggaggagtgagacagggagctcaggaaattcctggcttctctgcattcacatccgacctttagctggatctgaggctgctcatcccttgcatgagttatttctgacttgtgtgtatgaaacagcttcctagtgatctcttcattgagaggtgatgctcaytgccccagaggtgggggaagatttaactcatgtgccctcagattccctttcagctacgccagggacatccagaggaaracarggagcctctatgcctttacatgtgttcagaatgtacacgctaacaaccagacagaccactagagaaatctgcacaaagtaaggttggatagctctgatatcccacgaggggctaagctgcatgatggcctcataggyacagttgagtgtctttgcttttcaccccctgggttacagtgctgtaaatctcacaagggaaagtctcccagtgcagaagcttacaggcccattgagggtcctggtggaggctacatggagggagactggtacttytttgattttttttaatcagtattttgaa

SEQ ID NO: 79687 - DNA, 600 bp, Chicken  19866894371056_4
tcatcccttgcatgagttatttctgacttgtgtgtatgaaacagcttcctagtgatctcttcattgagaggtgatgctcaytgccccagaggtgggggaagatttaactcatgtgccctcagattccctttcagctacgccagggacatccagaggaaracarggagcctctatgcctttacatgtgttcagaatgtacacgctaacaaccagacagaccactagagaaatctgcacaaagtaaggttggatagctctgatatcccacgaggggctaagctgcatgatggcctcataggyacagttgagtgtctttgcttttcaccccctgggttacagtgctgtaaatctcacaagggaaagtctcccagtgcagaagcttacaggcccattgagggtcctggtggaggctacatggagggagactggtacttytttgattttttttaatcagtattttgaacaatttgttttcatagtctggaaagatctgttcatagtcctttaaacgcagcaagatacgtgagacacagcgtaggcctgggagactttgtctgcaaaaaggaaattgcgtyggatggcagagattttaacagtgaa

SEQ ID NO: 79688 - DNA, 600 bp, Chicken  19866894371056_5
gctacgccagggacatccagaggaaracarggagcctctatgcctttacatgtgttcagaatgtacacgctaacaaccagacagaccactagagaaatctgcacaaagtaaggttggatagctctgatatcccacgaggggctaagctgcatgatggcctcataggyacagttgagtgtctttgcttttcaccccctgggttacagtgctgtaaatctcacaagggaaagtctcccagtgcagaagcttacaggcccattgagggtcctggtggaggctacatggagggagactggtacytytttgattttttttaatcagtattttgaacaatttgttttcatagtctggaaagatctgttcatagtcctttaaacgcagcaagatacgtgagacacagcgtaggcctgggagactttgtctgcaaaaaggaaattgcgtyggatggcagagattttaacagtgaactatggaaaaggaagaggaccagtggtaatcagtgatgtcttggcatggtttcctggggacagaaatgtggcaagtttccacagatgcatcacagtgagcgtctttcattcttccacctgcgtaatttggctt

SEQ ID NO: 79689 - DNA, 600 bp, Chicken  19866894371056_6
tacgccagggacatccagaggaaracarggagcctctatgcctttacatgtgttcagaatgtacacgctaacaaccagacagaccactagagaaatctgcacaaagtaaggttggatagctctgatatcccacgaggggctaagctgcatgatggcctcataggyacagttgagtgtctttgcttttcaccccctgggttacagtgctgtaaatctcacaagggaaagtctcccagtgcagaagcttacaggcccattgagggtcctggtggaggctacatggagggagactggtacttytttgattttttttaatcagtattttgaacaatttgttttcatagtctggaaagatctgttcatagtcctttaaacgcagcaagatacgtgagacacagcgtaggcctgggagactttgtctgcaaaaaggaaattgcgtyggatggcagagattttaacagtgaactatggaaaaggaagaggaccagtggtaatcagtgatgtcttggcatggtttcctggggacagaaatgtggcaagtttccacagatgcatcacagtgagcgtctttcattcttccacctgcgtaatttggctttc

SEQ ID NO: 79690 - DNA, 600 bp, Chicken  19866894371056_7
agggacatccagaggaaracarggagcctctatgcctttacatgtgttcagaatgtacacgctaacaaccagacagaccactagagaaatctgcacaaagtaaggttggatagctctgatatcccacgaggggctaagctgcatgatggcctcataggyacagttgagtgtctttgcttttcaccccctgggttacagtgctgtaaatctcacaagggaaagtctcccagtgcagaagcttacaggcccattgagggtcctggtggaggctacatggagggagactggtacttytttgaytttttttaatcagtattttgaacaatttgttttcatagtctggaaagatctgttcatagtcctttaaacgcagcaagatacgtgagacacagcgtaggcctgggagactttgtctgcaaaaaggaaattgcgtyggatggcagagattttaacagtgaactatggaaaaggaagaggaccagtggtaatcagtgatgtcttggcatggtttcctggggacagaaatgtggcaagtttccacagatgcatcacagtgagcgtctttcattcttccacctgcgtaatttggctttcatgctt

SEQ ID NO: 79691 - DNA, 600 bp, Chicken  19866894371056_8
taagctgcatgatggcctcataggyacagttgagtgtctttgcttttcaccccctgggttacagtgctgtaaatctcacaagggaaagtctcccagtgcagaagcttacaggcccattgagggtcctggtggaggctacatggagggagactggtacttytttgattttttttaatcagtattttgaacaatttgttttcatagtctggaaagatctgttcatagtcctttaaacgcagcaagatacgtgagacacagcgtaggcctgggagactttgtctgcaaaaaggaaattgcgtyggatggcagagattttaacagtgaactatggaaaaggaagaggaccagtggtaatcagtgatgtcttggcatggtttcctggggacagaaatgtggcaagtttccacagatgcatcacagtgagcgtctttcattcttccacctgcgtaatttggctttcatgcttaccagcgtgattctcctccactttgtacagatgagaatcaggattagttctactgatgtcagtgcattggcttttctggaaactgataggagctcagtcagcgctgagccctgcgccgagctttaacctttgtg

SEQ ID NO: 79692 - DNA, 600 bp, Chicken  19866894371072_1
gggtgggtgaaagtagaatctcctgagagttgaccccacaacctctatgggcagcctgtaccagcgctccacctcaaagcacagaagtactttctgattaaacctcctgtgttcctgtttgtgcccactgcctcttgtcctggcactgggaaccactgaacataacttactctatcctctttgcactctcccttcacgtatgagtatatatagacattgatgaaatccccctgagccttctacaggctgagcagtcccagctcttagcatctcatagtagaggtgtgccagttcctcccytggttatcttggtggcctctgctggactttttttgcaagtccatggtcttttgtactggggggtgcrgggctggacacagtactcaggtacagcctcactaatgctgagttgagcagaaggatcatctttcttcatcagtagtgctttgcctagagcagctaagaataccattagccttcttggcagcaagggcacaytgctgttccatgctcaactcggtgtccaccagaactgctttccagatgggtgtccccagcatgtcctgatacrtggggctgttcctccccaggtgcagggct

SEQ ID NO: 79693 - DNA, 600 bp, Chicken  19866894371072_2
tccacctcaaagcacagaagtactttctgattaaacctcctgtgttcctgtttgtgcccactgcctcttgtcctggcactgggaaccactgaacataacttactctatcctctttgcactctcccttcacgtatgagtatatatagacattgatgaaatccccctgagccttctacaggctgagcagtcccagctcttagcatctcatagtagaggtgtgccagttcctcccytggttatcttggtggcctctgctggactttttttgcaagtccatggtcttttgtactggggggtgcrgggctggacacagtactcaggtacagcctcactaatgctgagttgagcagaaggatcatctttcttcatcagtagtgctttgcctagagcagctaagaataccattagccttcttggcagcaagggcacaytgctgttccatgctcaactcggtgtccaccagaactgctttccagatgggtgtccccagcatgtcctgatacrtggggctgttcctccccaggtgcagggcttggcacctcttgctgctcagcctatccagtccacccaatctggtccttagctaccactggtgaatga

SEQ ID NO: 79694 - DNA, 542 bp, Chicken  19866894371072_3
tatgagtatatatagacattgatgaaatccccctgagccttctacaggctgagcagtcccagctcttagcatctcatagtagaggtgtgccagttcctcccytggttatcttggtggcctctgctggactttttttgcaagtccatggtcttttgtactggggggtgcrgggctggacacagtactcaggtacagcctcactaatgctgagttgagcagaaggatcatctttcttcatcagtagtgctttgcctagagcagctaagaataccattagccttcttggcagcaagggcacaytgctgttccatgctcaactcggtgtccaccagaactgctttccagatgggtgtccccagcatgtcctgatacrtggggctgttcctccccaggtgcagggcttggcacctcttgctgctcagcctatccagtccacccaatctggtccttagctaccactggtgaatgaattatgaaaatcccttagggacttcttgctgataccactgctctcagcagccagatgataagggatggatttt

SEQ ID NO: 79695 - DNA, 469 bp, Chicken  19866894371072_4
tcatagtagaggtgtgccagttcctcccytggttatcttggtggcctctgctggactttttttgcaagtccatggtcttttgtactggggggtgcrgggctggacacagtactcaggtacagcctcactaatgctgagttgagcagaaggatcatctttcttcatcagtagtgctttgcctagagcagctaagaataccattagccttcttggcagcaagggcacaytgctgttccatgctcaactcggtgtccaccagaactgctttccagatgggtgtccccagcatgtcctgatacrtggggctgttcctccccaggtgcagggcttggcacctcttgctgctcagcctatccagtccacccaatctggtccttagctaccactggtgaatgaattatgaaaatcccttagggacttcttgctgataccactgctctcagcagccagatgataagggatggatttt

SEQ ID NO: 79696 - DNA, 600 bp, Chicken  19866894371085_1
tgtttctcatgggacttccataagcaaaggagagaaaagctaatgctacaaaaggaaacaagttccaatacacaagcaatgctaagcttgaaagggatgcaagcatgctaaatgcaagactacgcaataaagcaaccttaataaatttgagaaaaacctatgcagaaaacctgaaaacaatttattaggacaaaggaagaattctaaacctatccagtaacatcaaaaattctcaagacagagaatcatcatcaaggtctcagaactgcagaagaggaacactgaggttagagttgatcmcagaatcaccaaggatggaaaagacctccaagatcatctagttcaactgtccatccatcatcaatatttccctactaaaccatgtccctcagtaccaaatctaaacggtttcctgaacacctccagaaatgaactcaaccacctccctgggcagcctgttccagcacctgaccactctttcagggaagaaatttttcctaatatacaacctgaatctcccctggcacaacttgaggccattccctctcatcctattgccaattatacaggaggccgacccccaccttgccacaacctccc

SEQ ID NO: 79697 - DNA, 599 bp, Chicken  19866894371100_1
  misc_feature (1)..(58): n is any nucleotide
nnnnnnnnnnnnnnnnnnnnnnnnnnnnnnnnnnnnnnnnnnnnnnnnnnnnnnnnnngtggcaaaacaaatgtcaagactgtaaggaatagctcctcaacgctcacccacatcggttacggctacacaagtccaattaatcttctgagaacaccatgaacctcacgagctaaactgatcatagttcagctgtccaaaatgctgagttggtgaattttagcatccaggaggtgctgacagtgcctgtgggctcctaaacgggtcatctgcacccctagcatgctgaaagacccagcccaragacacctttccaggaaattaaaatcatatgatccttgtgatctcaggttttatacaagatcctgtttttatctcccagattgcttcttggcaacctttccctgtctttctcctcctctcttttaaactcagcatgctcataatttcctcctcacaagtgagttatcatggacttcactggcacctcctacgtagttttttaactcacattattatgaaatgaggacataaagaaagagagcaagaatgccaggcaccagatgctgattaaacgtaaagctcctttgtaagacctgtaa

SEQ ID NO: 79698 - DNA, 599 bp, Chicken  19866894371108_1
  misc_feature (1)..(172): n is any nucleotide
nnnnnnnnnnnnnnnnnnnnnnnnnnnnnnnnnnnnnnnnnnnnnnnnnnnnnnnnnnnnnnnnnnnnnnnnnnnnnnnnnnnnnnnnnnnnnnnnnnnnnnnnnnnnnnnnnnnnnnnnnnnnnnnnnnnnnnnnnnnnnnnnnnnnnnnnnnnnnnnnnnnnnnnnnnnnaacttctggagtcaagaacagcacggtccttctgcccattgctgcacacttccatggcatgcagcaccacttgataattcccctggaaggcgaccagtgttcacagcccgctggccctgcactgccarcatttgctttgccagctcttgccgcctcgctgccctcattcttaccctcctttttgcctgcggagccaaaasaggcaactgtcctgagagaaaacactgcgacaaacgaagctggatgccttggacctccaacttcagggctgtccaggcaacatttcacctcttacagmggggacctgagggtgcccagaggctggcagggggacactgctgcacgccctgcaacagaaygggaaggaatcacagattattattattagagtcactacttcaagagccattttaatgggacaagtctc

SEQ ID NO: 79699 - DNA, 599 bp, Chicken  19866894371108_2
  misc_feature (1)..(100): n is any nucleotide
nnnnnnnnnnnnnnnnnnnnnnnnnnnnnnnnnnnnnnnnnnnnnnnnnnnnnnnnnnnnnnnnnnnnnnnnnnnnnnnnnnnnnnnnnnnnnnnnnnnnaacttctggagtcaagaacagcacggtccttctgcccattgctgcacacttccatggcatgcagcaccacttgataattcccctggaaggcgaccagtgttcacagcccgctggccctgcactgccarcatttgctttgccagctcttgccgcctcgctgccctcattcttaccctcctttttgcctgcggagccaaaasaggcaactgtcctgagagaaaacactgcgacaaacgaagctggatgccttggacctccaacttcagggctgtccaggcaacatttcacctcttacagmggggacctgagggtgcccagaggctggcagggggacactgctgcacgccctgcaacagaaygggaaggaatcacagattattattattagagtcactacttcaagagccattttaatgggacaagtctccctgccttgcacggggtgcggctccacagggatgggaagggtgcccgggccgcctgggaggttggggcgtgt

SEQ ID NO: 79700 - DNA, 599 bp, Chicken  19866894371108_3
  misc_feature (1)..(2): n is any nucleotide
nnaacttctggagtcaagaacagcacggtccttctgcccattgctgcacacttccatggcatgcagcaccacttgataattcccctggaaggcgaccagtgttcacagcccgctggccctgcactgccarcatttgctttgccagctcttgccgcctcgctgccctcattcttaccctcctttttgcctgcggagccaaaasaggcaactgtcctgagagaaaacactgcgacaaacgaagctggatgccttggacctccaacttcagggctgtccaggcaacatttcacctcttacagmggggacctgagggtgcccagaggctggcagggggacactgctgcacgccctgcaacagaaygggaaggaatcacagattattattattagagtcactacttcaagagccattttaatgggacaagtctccctgccttgcacggggtgcggctccacagggatgggaagggtgcccgggccgcctgggaggttggggcgtgttctgcgtgcagcaaaccctcgtattttctgtttatttttttccacagggaagaatcccattttccaaaaagcactgacgggtgaaagttgacgtgcaa

SEQ ID NO: 79701 - DNA, 561 bp, Chicken  19866894371108_4
tgcagcaccacttgataattcccctggaaggcgaccagtgttcacagcccgctggccctgcactgccarcatttgctttgccagctcttgccgcctcgctgccctcattcttaccctcctttttgcctgcggagccaaaasaggcaactgtcctgagagaaaacactgcgacaaacgaagctggatgccttggacctccaacttcagggctgtccaggcaacatttcacctcttacagmggggacctgagggtgcccagaggctggcagggggacactgctgcacgccctgcaacagaaygggaaggaatcacagattattattattagagtcactacttcaagagccattttaatgggacaagtctccctgccttgcacggggtgcggctccacagggatgggaagggtgcccgggccgcctgggaggttggggcgtgttctgcgtgcagcaaaccctcgtattttctgtttatttttttccacagggaagaatcccattttccaaaaagcactgacgggtgaaagttgacgtgcaaatcattgtagaaaaggctttttt

SEQ ID NO: 79702 - DNA, 600 bp, Chicken  19866894371110_1
agctaaagttggagatgggcagctttaatagggcagtgaaatattgccaagatgtaaggtggagtttgcatgctgatccttcttattcaatgagtcttacaggcaaaatgggaccctgttgttaaatttatatcccaggtgcacccaggggctcaacttcagttgaggcttcaagactgtaggcagacaaagtcagtatcccagcatacaaatacgtgattaaaggagttctttaactaccctgtaggttgtctggtctgatctagtgaggtttggtagtcctgaatctcatctagactygaaaattaacaaagattaaagctggtgtttaaatacaagcaccacattaactgttcttggatagctttatgggcatgcttttcctgagcaagtgatcctattaaatgggattaagatacaccagcatgcagagttaatcagtgacaatgctgcttgtacacaagcctttagacaggcaacttgctctattgcaactgggagaggctgagaaaacaactccccttcagtcctgctttatgaccacggtcagaactgcttctccgcccacccacccaaagcaatttggttgtaaaaattaac

SEQ ID NO: 79703 - DNA, 599 bp, Chicken  19866894371116_1
  misc_feature (1)..(27): n is any nucleotide
nnnnnnnnnnnnnnnnnnnnnnnnnnncaccgagcccctaatgaagtctaagtagtacaaatgccaggctgattccacagacaatgtggttttgtagaacaaacatgaatcacataaaaatacagctgagaaatgtaaattcatctcaccagggtgtaaaggcaaacccagccaaaggccagagacaatttgctggtttgtcttgctctggctggtgttttgcagggtagctctatccatgttggagttctcagtgcagcaaatgtaagcacagcaccacacacatctctttaagccccmaaagaagaagtcttaagcagtgaatagcaaattgctacarctgagtgaaggactctgagcacctggccatttttgagacaggaaaaaacaagccattctgaacatccttacaagtaattggaaacatactgttctctatcagtatggtcacgagagccaaatattgactaacagctctatgatgagtataacctgaacaaacacaggttgtaataaatggcagaggctgctcactccagtaaatataccataaacagaagtacgcaggggaactgctcaaacctctgttcatccaccgc

SEQ ID NO: 79704 - DNA, 600 bp, Chicken  19866894371116_2
atgaagtctaagtagtacaaatgccaggctgattccacagacaatgtggttttgtagaacaaacatgaatcacataaaaatacagctgagaaatgtaaattcatctcaccagggtgtaaaggcaaacccagccaaaggccagagacaatttgctggtttgtcttgctctggctggtgttttgcagggtagctctatccatgttggagttctcagtgcagcaaatgtaagcacagcaccacacacatctctttaagccccmaaagaagaagtcttaagcagtgaatagcaaattgctacarctgagtgaaggactctgagcacctggccatttttgagacaggaaaaaacaagccattctgaacatccttacaagtaattggaaacatactgttctctatcagtatggtcacgagagccaaatattgactaacagctctatgatgagtataacctgaacaaacacaggttgtaataaatggcagaggctgctcactccagtaaatataccataaacagaagtacgcaggggaactgctcaaacctctgttcatccaccgcagaataagataagagagcagaaatctctgcaaggtggaagc

SEQ ID NO: 79705 - DNA, 445 bp, Chicken  19866894371116_3
caggaaaaaacaagccattctgaacatccttacaagtaattggaaacatactgttctctatcagtatggtcacgagagccaaatattgactaacagctctatgatgagtataacctgaacaaacacaggttgtaataaatggcagaggctgctcactccagtaaatataccataaacagaagtacgcaggggaactgctcaaacctctgttcatccaccgcagaataagataagagagcagaaatctctgcaaggtggaagcaaggatcaatgatatgctgtgccactgaagatgaaaaytgtacacagcaaacacaggagttttcagcctcttccaagaaaacgacaaagtgcaggaccgtacagaatgagtctcctattgagggcctcgtatgaacagttggaaatgagtatggatgtaccgctgtggtctgaaactgaaata

SEQ ID NO: 79706 - DNA, 599 bp, Chicken  19866894371118_1
  misc_feature (1)..(40): n is any nucleotide
nnnnnnnnnnnnnnnnnnnnnnnnnnnnnnnnnnnnnnnnctcctgcaggagtgggatctgacctgtgtcacttaatggcacctccagcattgctttcggtgtccagagatgaggagaaatgtatccagaggcttccagcacgacagcaggaacggttccactgcagatctacatggctggaggctgagcaagagcagaacctgccccatttatttctgagagcttcacctttggctgcagcgggagcagggtgagcaatgtggctgcttccaggatatctgttaatctcttctttagtwctgaagaagccagaggcagagatatttcctgctgcagcaaaatatttgacagttattttccttcctggatattctgatcggaaaagacgcaacaccatcacacagagctcgggcagacctttctgaatcaagtcgcctatcaatacatggtgacattttccctcaatgaaataaagcagacaccttggaaatgaaggcgtcygggggcctggcaggaggcagctccatgcacgacgtgacgatgacggctgagcacagcgcaggctggcactgcatgcggctcccagcagtgcagctgc

SEQ ID NO: 79707 - DNA, 600 bp, Chicken  19866894371118_2
tgccccatttatttctgagagcttcacctttggctgcagcgggagcagggtgagcaatgtggctgcttccaggatatctgttaatctcttctttagtwctgaagaagccagaggcagagatatttcctgctgcagcaaaatatttgacagttattttccttcctggatattctgatcggaaaagacgcaacaccatcacacagagctcgggcagacctttctgaatcaagtcgcctatcaatacatggtgacattttccctcaatgaaataaagcagacaccttggaaatgaaggcgtcygggggcctggcaggaggcagctccatgcacgacgtgacgatgacggctgagcacagcgcaggctggcactgcatgcggctcccagcagtgcagctgctttgtggcaatgcatgcctgggttgggtctttgatggagcatattgggatgggagagcagtcggagygcagccatgatgcaattgatccacacgctgcagacagacacagttctggcctcctcgcacagcccagctcggaaacttgatattcaccaccaggaacacagagctctgtcatttaggcgaagggatattttgtgct

SEQ ID NO: 79708 - DNA, 600 bp, Chicken  19866894371118_3
ggatattctgatcggaaaagacgcaacaccatcacacagagctcgggcagacctttctgaatcaagtcgcctatcaatacatggtgacattttccctcaatgaaataaagcagacaccttggaaatgaaggcgtcygggggcctggcaggaggcagctccatgcacgacgtgacgatgacggctgagcacagcgcaggctggcactgcatgcggctcccagcagtgcagctgctttgtggcaatgcatgcctgggttgggtctttgatggagcatattgggatgggagagcagtcggagygcagccatgatgcaattgatccacacgctgcagacagacacagttctggcctcctcgcacagcccagctcggaaacttgatattcaccaccaggaacacagagctctgtcatttaggcgaagggatattttgtgctgctggcagtggtaggaagaccctatatgccctgtgtgtagccaacagggagccacgatggccttccccgccatgctaggagagcactacaataccttaagaagcaaggatagatggagctcacagcatttttctgatgcaacacacaatagcccccacgattgg

SEQ ID NO: 79709 - DNA, 600 bp, Chicken  19866894371129_1
atacaagcaattctgcagaagaactgtaactgggaagcaaatagaaacgatagctacactgtacaaagcctccatatctgatcatgaagtcaaagtgactatgaatgttaaagtcactgatggtgtcagatttctggtagcagaaattttgctatttcatagagctattgcataaaatattacatgtatccacattatatgtaaatgagaaaaagaatattctccacagataagttgcatcttaaatcgttgcttaccagaaatctaaaatgttagaaaaaaccctggcagaatcacatraactagaatagcaatagagagcactttggcatgctactcttcttagtatacatagttaaactgcagtaacataatactatgtaactaccatcctagtttaatcaattttagctcaaataacagtgaagaagaagccacactggctgtattataaatgtgtctaaagtagcaaccagagacaaatgtttgaagcgtaacctatgtagctgaaactgcatccctgccatgcagagctagcgagacatgtaatcaatcataagactcatgtttttgtgaagtaatgtaatatatctcacctaa

SEQ ID NO: 79710 - DNA, 600 bp, Chicken  19866894371130_1
tttagaattgataaaaatataatttaagctgcacatttgaactaggatatgcaatgctaaatataatctaatcaacataaattattgaaagggattttgacttagattttattttaagataatatgggcaaactttttaaattgtaaacattgaaactacagatcacttgagtgtggagccctggcagtgaaaatcatatatctatggatcataattgtaagagactaatcaatgttaactactaacttgatccaaagtatacctttctagacagttttctccatgtaacatcgtatatstgcccaagcggacaattgaatcaaagtacagaaattatcaactggagttaagtttgttatgagtcatttaagccttctcagagcctgtatgaaagcatttcttctcataaaataactgcttcataaaccatgtcaccaaaaagagatttttagtttcttgtgatctatttgcaattttgggatgatcacaaaaatacatgtatgttaattaaagtgtgtccttcaaataagaaaagtgatatataaatacatcaacgagtaacacatgaccagaatttttcatcataagaaatacaaaaa

SEQ ID NO: 79711 - DNA, 482 bp, Chicken  19866894371132_1
aaacactgcctgcctactcattgtaaaaacaaatcaaatacacaaacatgatttttaataaaagtttgagatcaaaagacatagtggctatgttctttgtgaaacagcaaagaatccttattttaatgtatttgaatagggtagatgtcactagcaaattacattacagtccctgggtaatgcaacaaggaaaataagcaataaaatacagcttgtttgaactcactgctacagtgaatggttggctttgctttaaaagctctgtccttgtcaatgcattgttattaaagacaaaaattkcttggctcctgctcgcatattatgaccttttctttataaataagtattttgtttctgtgattccaaccttagtttctgcaaggaaccaatggatagctgtgtcttagctaaatcatatgcgagctgctgtgtacaaaaatgacataatagttgctgggttctcattggctcctgaatttctt

SEQ ID NO: 79712 - DNA, 600 bp, Chicken  19866894371135_1
gaactccttgaactgcagtaaaaattgaaaacaccatcagtattaaaaaaaatatatctccattcattttcttcttagacacagctccatgagctgcttggtggtggtaacattcagatgacagctcaccagaaaaactggctgtccatcaacagattcagcacaaaatgctgtcagtgcttaaataggtccagtactgtatgggatatgtgtgtcgcttgatagagaactaatctcatcccagaggacgacacagagagcttttcctcctgctccatgccctgtaccttttactctatrtgacaaagtaatacaagatattcaaatgcaccactcacaaacacagctctcacctgcttgatctgatcagtttctgatatttgtccagccatattctgctctctgtgattctgtcacctgttctgaagataaaagttgagttctacacaaaaaacatacacacaaaccaccacrtttttgaagagaaccaagctgtacgtgttccttaagtgtacttaaatgcaacggtgccagcaaactttcaagccacccacttraagttatctgacatgtattcagctatccaagatagttcyagat

SEQ ID NO: 79713 - DNA, 600 bp, Chicken  19866894371135_2
cagtgcttaaataggtccagtactgtatgggatatgtgtgtcgcttgatagagaactaatctcatcccagaggacgacacagagagcttttcctcctgctccatgccctgtaccttttactctatrtgacaaagtaatacaagatattcaaatgcaccactcacaaacacagctctcacctgcttgatctgatcagtttctgatatttgtccagccatattctgctctctgtgattctgtcacctgttctgaagataaaagttgagttctacacaaaaaacatacacacaaaccaccacrtttttgaagagaaccaagctgtacgtgttccttaagtgtacttaaatgcaacggtgccagcaaactttcaagccacccacttraagttatctgacatgtattcagctatccaagatagttcyagatactaagttctttccagacctacctgctaactgctgtcctttaaacaccttataagcatttggaacagctgaaatgactatatgggaaggtggagaaaggtgtggaatttttataaaggctttcaaatacataaagtaaaactggagtggaggagaagcaagcagtaacattatc

SEQ ID NO: 79714 - DNA, 600 bp, Chicken  19866894371135_3
gagcttttcctcctgctccatgccctgtaccttttactctatrtgacaaagtaatacaagatattcaaatgcaccactcacaaacacagctctcacctgcttgatctgatcagtttctgatatttgtccagccatattctgctctctgtgattctgtcacctgttctgaagataaaagttgagttctacacaaaaaacatacacacaaaccaccacrtttttgaagagaaccaagctgtacgtgttccttaagtgtacttaaatgcaacggtgccagcaaactttcaagccacccacttraagttatctgacatgtattcagctatccaagatagttcyagatactaagttctttccagacctacctgctaactgctgtcctttaaacaccttataagcatttggaacagctgaaatgactatatgggaaggtggagaaaggtgtggaatttttataaaggctttcaaatacataaagtaaaactggagtggaggagaagcaagcagtaacattatctagcattttaattcagtgattttagcttgcatttgaaaaaagaacagtaagacaaaagaatataaaacagtgccaactctgaa

SEQ ID NO: 79715 - DNA, 600 bp, Chicken  19866894371135_4
tatrtgacaaagtaatacaagatattcaaatgcaccactcacaaacacagctctcacctgcttgatctgatcagtttctgatatttgtccagccatattctgctctctgtgattctgtcacctgttctgaagataaaagttgagttctacacaaaaaacatacacacaaaccaccacrtttttgaagagaaccaagctgtacgtgttccttaagtgtacttaaatgcaacggtgccagcaaactttcaagccacccacttraagttatctgacatgtattcagctatccaagatagttcyagatactaagttctttccagacctacctgctaactgctgtcctttaaacaccttataagcatttggaacagctgaaatgactatatgggaaggtggagaaaggtgtggaatttttataaaggctttcaaatacataaagtaaaactggagtggaggagaagcaagcagtaacattatctagcattttaattcagtgattttagcttgcatttgaaaaaagaacagtaagacaaaagaatataaaacagtgccaactctgaatgaaccagcatggatcagaaatggatgaatggattcaat

SEQ ID NO: 79716 - DNA, 600 bp, Chicken  19866894371135_5
acgagtcaatagattactctcttttaaagagaacctacgaaatatggttactgagaagaagcaaagcattgctgaggctactgtaacctctcacttgttttaagagaagtggacacagttgtcgtctgggagagcagctgctgaaatggatggcagttctactctcccatttctcagtctgttacaagaaaaaccaacagtgagaatgctgtcaatccactttaagttgatgattaaacagacagcccgagcccacagagaacagaaaagacttttgtcctctcccaagcacagaaagtkaaaagcttcagaccctcccagtgcctttctcacactcagcactgcttcactgtttccttacaataaacctgaaattttcctcttctgtcacttgtctggcaagcttaaaattatgcttactgagctgcagctccacaaagcttgtacacttgtacacttgcacttgggaagcagctccgacttaacctaatggcaccgccttactttacatatctgaagcaccactccctctgcaggtattttgtgcaccacaggcagtgaaattatatggcttcagcacatgtcttggtgcatggtcaa

SEQ ID NO: 79717 - DNA, 600 bp, Chicken  19866894371140_1
ctcattctgccttcatatcttcataaagaaattgcttcagctctttggtcatccttgtggctctcctctggaccaactccaactgtctgtgtatttcatatgctgggggctccagagctgtatgcagtactccagatgtggtctcatgagagcggagtagaggtggagaacaacctccctcaactttctggccacacttttgatgaagcccaggatataatgggctttcagggccaaaaatgatttagagtactgggaaagaaaccaaatggattacgacaatgaacaaggaaaaaaaakaaaataaaataaaaagttgggtagagcagtcagatacatggaaatgaaacaggggaaaaaaaatacatcttccagtgtagttttagaactatactggctaaaaatgtagtgtattatttcaagattttaaaaagttcatcatcttctctgcataatcttgcttaagaaacttgtaaaaattattttacaaaatctacaaaaactgcaaacacataaaaacgtttctctgcaacagctgtcctgataactttctgaatataagagagacctaactgaaaaatgaaacatgaatgaattaca

SEQ ID NO: 79718 - DNA, 600 bp, Chicken  19866894371144_1
cattgtgcaaccagcacatggcaggagatggagctagatgggtgttaaggtctgttccaacccaactattctatggttctgtgattttatgtcaacagaaccagaaacatttcgttctcaaaagtggaatgctgctttcagctccgagaaaactggaaaggaagggaagcagcaaggtgactgcaggggtttgcctcttgaggctcttggcctcttacctgccggcacagcagcttgctgagagtaggagaccgagggacgacgtgcgggggaaggaccttccagcggtgccagccctckcggccgggggagcgcacggccacgtggagggactcgggggggaccctcaaggaggagcacgtccccacgggctgcgagcggatggaggtgatggaccctgggaaacacagaagggacagtcagtgctgctgctgtggcgcccgtaggctccagcgtaaatgctgaagcatctgcgtttcatgtggctccgccccctccaggatattgcccattataaacttgatgctcatagcttctgttttctgtttcaggtaacagaaaccttctcttgcaacaccctgccctggcattcccaggagg

SEQ ID NO: 79719 - DNA, 600 bp, Chicken  19866894371144_2
gaagcatctgcgtttcatgtggctccgccccctccaggatattgcccattataaacttgatgctcatagcttctgttttctgtttcaggtaacagaaaccttctcttgcaacaccctgccctggcattcccaggaggggacaatactgacatgcacgggacagaattcccatttgctaccactcatcccaccactgcctgacacgaggcagacctgggctggctcccattcatggcacagaggctgctccctgagctcaataccaggcagggaccgctctcctcctgaaggctcccaccyccctggctgcacctaaaggcactccctcgtccccagccccttcatagtgctgctttactgaggttctgctttgtttgaaagatctttggttttttatcttttattttttgggctgcaggatttatagtcctcattagcttgaaacacagcgcctgttcctacgctgccgctccacgttcaaaacacagctatccatcacttcaagagatctcgcccagaggtcagggaactcgaacctgggacaaaagccatccagacagtttgcagttgcatttcagaaagagatttgttgttgggaag

SEQ ID NO: 79720 - DNA, 600 bp, Chicken  19866894371147_1
agcaagtacaagtagcaattcagctattccaggaaaggcgtactcatccaaaataaatccttctcatggtgtggtgtacccatggtaaaatgctgtaaaaagtgcatccaaatatattaatgctaactccagatggcagttcagtttggtctgcttctgagaccttattaaataaggtccactaattttcacatgaagatatttctttggagaagaaaggagaagggagcatttcataacttatttgggatacagcaatagaatttttaatacagtgctttgtacaaatgcaatatggcrtttgtacrtggatttgagatgggttgacagctttttattttaaatgtatatatcattaaactatgcatacttaattttctttaggaattcagagcaccttggtcattgcatccaacaggtatactgaaactgtgttgctttactcatgaaggaaaccttcacatcccagagcaagacagactatacagctccactatgcagagcctgaatggcagcactggaacaagtcacttcagaagacatggtcgtagactcacagtgagggggtgtccacactgcagcttgcttgactgcagtact

SEQ ID NO: 79721 - DNA, 600 bp, Chicken  19866894371147_2
caagtagcaattcagctattccaggaaaggcgtactcatccaaaataaatccttctcatggtgtggtgtacccatggtaaaatgctgtaaaaagtgcatccaaatatattaatgctaactccagatggcagttcagtttggtctgcttctgagaccttattaaataaggtccactaattttcacatgaagatatttctttggagaagaaaggagaagggagcatttcataacttatttgggatacagcaatagaatttttaatacagtgctttgtacaaatgcaatatggcrtttgtacrtggatttgagatgggttgacagctttttattttaaatgtatatatcattaaactatgcatacttaattttctttaggaattcagagcaccttggtcattgcatccaacaggtatactgaaactgtgttgctttactcatgaaggaaaccttcacatcccagagcaagacagactatacagctccactatgcagagcctgaatggcagcactggaacaagtcacttcagaagacatggtcgtagactcacagtgagggggtgtccacactgcagcttgcttgactgcagtacttttcaggg

SEQ ID NO: 79722 - DNA, 559 bp, Chicken  19866894371150_1
actgagaaggttttttagtgactgtgagaactcaggagtttgggtttttgggttgtctgaaggccaccagtagctgtgcactcatctagcaaagcaaagcgttggtgaagaccccagcaccagtacaagcatagacttggtgccaccagagcttccaaccagcatctggaaactgctggcatcgttgctgagcattgcaccttttgctacagcaggcaatacatcccatgggtttgtaccacgttatgcatagctgcactctaccaagtagagcatctctgcaagtagagatgagcagcmagtacatcctggagcagtccaagagggttttcaacaaagctgaagcacactcagcatgaaagctcaggacctacaggctctgagggagagggaggctcgttgtgacttcactccccatgcagcatgagagctgctcttcttaatcaccaggtctgagaagtgttggatgctccttggccatggcctacaaaaagtcacatcaatagagaagggcagtggaggggtaaataatgccattgtcaaccccaatatccatggg

SEQ ID NO: 79723 - DNA, 599 bp, Chicken  19866894371161_1
  misc_feature (1)..(105): n is any nucleotide
nnnnnnnnnnnnnnnnnnnnnnnnnnnnnnnnnnnnnnnnnnnnnnnnnnnnnnnnnnnnnnnnnnnnnnnnnnnnnnnnnnnnnnnnnnnnnnnnnnnnnnnnntaaagaaaaaagcacatttattttgtttatatttcataacgcagcataaacttgaatatagcagcaaatagtatcaacagaaaatccttgtaattttctctgggacttgtctggtacattagacaagagagcataaagccttcgtagctgttgtcgcttgaggtaaaagaagcagaaataagagaatgagacaastttgtaccatcagctggcagacattgccagttcaatggctagtgctgcccaaacttagttcatgtgcagcttgcagcatttcagcagggacacagtgaatatgactataggctggtgggagtgaaagagtaagacagaaggtagaaaagagggaggagaagggaaaggtaggagccagaagaaagaactggaaaaatactagcttggttygtaacctctttctcatttaagcataacattctgcaattattctacacagtctgccaaagatctggtaagaagatgaatagctagggatg

SEQ ID NO: 79724 - DNA, 594 bp, Chicken  19866894371161_2
cttgtctggtacattagacaagagagcataaagccttcgtagctgttgtcgcttgaggtaaaagaagcagaaataagagaatgagacaastttgtaccatcagctggcagacattgccagttcaatggctagtgctgcccaaacttagttcatgtgcagcttgcagcatttcagcagggacacagtgaatatgactataggctggtgggagtgaaagagtaagacagaaggtagaaaagagggaggagaagggaaaggtaggagccagaagaaagaactggaaaaatactagcttggttygtaacctctttctcatttaagcataacattctgcaattattctacacagtctgccaaagatctggtaagaagatgaatagctagggatgagttctgtgtgagcaggtatcaacacatgaaattaagacagtgtacatggccaaatactcacaaataatcaagtgaatgaaacttgagtgaagttcctagaaataacatgatcaaacaattttgttgaaattttcaagagactactgaaccgaatggaaaatattgctatatcacacattagtcacgtgacctttctccataata

SEQ ID NO: 79725 - DNA, 600 bp, Chicken  19866894371163_1
agttcacatgaaagcatttaggcagtgactgggcaactggcctgaatgagcacaaacagatctgcgtagagcattgttttgtttgcctgtgattcatcaatagtgaatgaagtctttccaacaaaactcatttttcagcgttgacctctgcctctttccctctgtgcttttccagaaaaacatgagggagtggtgcaatatcccttcctaagcggagggaaacatctttcaccactgctgctgccctctgccttccaccagatgaaggctgttccttgggcatgtgctcaggtcatagcytcttacaggcacacattgtttggcatattaactgctacggggcattttagccttcacgctcttctcgttagctggggagtgaacaagaagtgctcaagatgacagatttagagaaatacagatttcttttttactgagtaaattacattatacctcatgtacatagattacaatgtatcaatatattactgattttcagcgagccaagtctgatgagactatggtaaaaactgcaccctccagcacaaatgtaaaggacaaaaatcctcagctctgggaggaggtagcaggaataccaag

SEQ ID NO: 79726 - DNA, 600 bp, Chicken  19866894371173_1
agtgactggtttctctcgtttgaatatttctgaaggtctccaattatcagacagtcttttgcactgtgacccagaaatttcatctgaagccagtctgtgtaaatcatgggaaccaggatgtgagtttcctgactgaaggctggcatggtctgaatttccccaaaacactccctttaattacaaaattagcaatcccttctctcctgacatcctgttgagcatctgttttgaagtctggacagaggcagtcaaatcccagttcatttgctctggggctgttctggtccagaccttccacakrgaatgaataaacttcactcaactacttcagttatgaaaaacatgccagagacacatttgatttcacagtacatcttaaaatttacactttatggataggaggccttgaatttatagtataattttcttgcctcgggaagatcttgttctgccacggttttgactatgagacaagtcccattaccagagaagatggatttcccaggcagtcactgcataagaaatggggatggcacccttgtgaataacttgagtgatttggtacttgtcccatgtcaagaatgaaagaaagggtgagtg

SEQ ID NO: 79727 - DNA, 600 bp, Chicken  19866894371173_2
gtgactggtttctctcgtttgaatatttctgaaggtctccaattatcagacagtcttttgcactgtgacccagaaatttcatctgaagccagtctgtgtaaatcatgggaaccaggatgtgagtttcctgactgaaggctggcatggtctgaatttccccaaaacactccctttaattacaaaattagcaatcccttctctcctgacatcctgttgagcatctgttttgaagtctggacagaggcagtcaaatcccagttcatttgctctggggctgttctggtccagaccttccacakrgaatgaataaacttcactcaactacttcagttatgaaaaacatgccagagacacatttgatttcacagtacatcttaaaatttacactttatggataggaggccttgaatttatagtataattttcttgcctcgggaagatcttgttctgccacggttttgactatgagacaagtcccattaccagagaagatggatttcccaggcagtcactgcataagaaatggggatggcacccttgtgaataacttgagtgatttggtacttgtcccatgtcaagaatgaaagaaagggtgagtgt

SEQ ID NO: 79728 - DNA, 600 bp, Chicken  19866894371173_3
ttcacagtacatcttaaaatttacactttatggataggaggccttgaatttatagtataattttcttgcctcgggaagatcttgttctgccacggttttgactatgagacaagtcccattaccagagaagatggatttcccaggcagtcactgcataagaaatggggatggcacccttgtgaataacttgagtgatttggtacttgtcccatgtcaagaatgaaagaaagggtgagtgtgcacaaaacttggataacccagaccttagagctcttttacataatgctttagatgtggcaygtaagctgatgtggcaaaatggagaaagtgtttttgtcatggttttgctgtgtgtaattaaaagtagggactaaaattcttcacattcttagaatcacaaaatcatagaatggcctgggttgaaaaggaccacaatgatcatctagtttcaacccccctgctatgtgcagggtcgccaaccaccagaccaggctgccaaycaacatccagcctggccttgaatgcctccagagatgaggcatccacaacctccttgggcaacctgttccagtgtgtcaccaccctccgaatgaaaaactt

SEQ ID NO: 79729 - DNA, 567 bp, Chicken  19866894371173_4
tacttgtcccatgtcaagaatgaaagaaagggtgagtgtgcacaaaacttggataacccagaccttagagctcttttacataatgctttagatgtggcaygtaagctgatgtggcaaaatggagaaagtgtttttgtcatggttttgctgtgtgtaattaaaagtagggactaaaattcttcacattcttagaatcacaaaatcatagaatggcctgggttgaaaaggaccacaatgatcatctagtttcaacccccctgctatgtgcagggtcgccaaccaccagaccaggctgccaaycaacatccagcctggccttgaatgcctccagagatgaggcatccacaacctccttgggcaacctgttccagtgtgtcaccaccctccgaatgaaaaacttcctcctaatattcaacctaaacctcctcagtctcagttgaagacagaacttgcagttctctgctaaagcaacttgccaacagctgaagaagttgcttcgtccaatagcaaaagccaaactcatatatatcagaaagacatgtacttatatttcccccagtaaagttc

SEQ ID NO: 79730 - DNA, 600 bp, Chicken  19866894371181_1
ggggaaaccccatgacatttagcttcgattagacactgtgacatttagatggtcaaaataaagaaaagtaaatcacagtgcataccctgtttactgtgacagccagaacatattagcagagtttgtgccacactgaattaccctctactctgatatgacactgagtcacagtgtagagagggttgtattaaccaaatcctggcatctttattcatgtaaataatgctattgcatttgggaactatttgcatgtataggtactggaggagccaggaagctgcatggtcccctctggagggwtttttctccccaaaatttacagagctcttcatatcaaattctccttatcacatgccctttgcaaatactgtttccaaatgccagaagtcgagtgttctccttctgcatataattcagttaggaagaacacctctcaaaaacacaccccatgacagcaatacaactattttcggaataaagtcatttcatagcctcattttattcattccacagtagaggtttggcatcaaaaattcactctggacagcaacacgcacaatggttttgaagatctttgtcagcacatgctgtgttactaca

SEQ ID NO: 79731 - DNA, 600 bp, Chicken  19866894371186_1
tccttcacggagctttggagaacatagaagagaatacccttttataaccagacacaattaattaactgagcttcaggactttctcctttcttatggaaggacctgaactcacaaggccagccctgggcaaatgaactgtcttctgctccagctcctactgccctccttggactgaaaagcacaaacctgtattggtggccgtgatgtctgatttcagaccaagccaacagggttgggcggcagaaattccatctccatacctgcatgcacccataaaagcctcccaggaaggataactayggatggccacaatgtcatttttacaggttccctattcaggacctaacagcactttaatggaaaacgtccctcggtgatccataaatcaccgtttatcactccagaggcctccgcagtcactgagataatgcaccagtgtcataatattgatcgatggatatctcctccccacccctcagctccatcaaccagactgctctctcgcatgtcagggatgaaatactttggcgcggaagatggaatttggaagctgtccattcacaagctctcagcaagatgtccggtcttaacctgaattta

SEQ ID NO: 79732 - DNA, 600 bp, Chicken  19866894371187_1
ttcccagtttcctctacttccctgcaaatatgattaagaaacctgcaattgcatttcagtttctgatacatgaaactggtaatatattttccaagacctgaatatatacatagctgtgccccccctgcactgagtgcttggaggagaatgtaaatattggtgaaattaaggagcagaattgagggaagagagactcaaagtggaagtcattctccttccatcaaagaaagcactttgctctggagattcgcctccctaatccagactactaacagagcaaccaggggccttgagcatccmctcagccctgcacagccctaccatgcccactaggatacaggttctcaagtaggrttgaaatgcatggacttccctccagttccatgaagccaggcccatttacaatgactaatgatctggctcaagatatccaaggaaagtaacacattcattagctatcctaaaccgcaggacattacagtaaattaygacagctgctgtgtcaagcttttcaaaacttttctttatagctttaaatacagctggcacagggggtatctttttctaagaaaaaaataatccatagatcagtatcctgta

SEQ ID NO: 79733 - DNA, 600 bp, Chicken  19866894371187_2
ttcagtttctgatacatgaaactggtaatatattttccaagacctgaatatatacatagctgtgccccccctgcactgagtgcttggaggagaatgtaaatattggtgaaattaaggagcagaattgagggaagagagactcaaagtggaagtcattctccttccatcaaagaaagcactttgctctggagattcgcctccctaatccagactactaacagagcaaccaggggccttgagcatccmctcagccctgcacagccctaccatgcccactaggatacaggttctcaagtaggrttgaaatgcatggacttccctccagttccatgaagccaggcccatttacaatgactaatgatctggctcaagatatccaaggaaagtaacacattcattagctatcctaaaccgcaggacattacagtaaattaygacagctgctgtgtcaagcttttcaaaacttttctttatagctttaaatacagctggcacagggggtatctttttctaagaaaaaaataatccatagatcagtatcctgtactcatagtccagccacccctaagtgcccgtaatggtgttacttgccagcactta

SEQ ID NO: 79734 - DNA, 600 bp, Chicken  19866894371187_3
gagactcaaagtggaagtcattctccttccatcaaagaaagcactttgctctggagattcgcctccctaatccagactactaacagagcaaccaggggccttgagcatccmctcagccctgcacagccctaccatgcccactaggatacaggttctcaagtaggrttgaaatgcatggacttccctccagttccatgaagccaggcccatttacaatgactaatgatctggctcaagatatccaaggaaagtaacacattcattagctatcctaaaccgcaggacattacagtaaattaygacagctgctgtgtcaagcttttcaaaacttttctttatagctttaaatacagctggcacagggggtatctttttctaagaaaaaaataatccatagatcagtatcctgtactcatagtccagccacccctaagtgcccgtaatggtgttacttgccagcacttacgaagcagccacacacagtataaaggctttgctaacaccaattcacacatacagctttcagtcaaagtaaattcagaaacactttccttctctcatcattcccaaagtctgacattctccatgaaccaatgagtt

SEQ ID NO: 79735 - DNA, 599 bp, Chicken  19866894371188_1
  misc_feature (1)..(23): n is any nucleotide
nnnnnnnnnnnnnnnnnnnnnnncttattttaaattgaagctatatagaccaattaaaatagttggggtcagaaggaggaaaatgagagaagttggtggaaaaatcactgcattccagcaagcatttccttctgttttctcaatcacatttttactgagaattttatagaagtaggagaggacatttccaaaatgaggtctccaaaactgagagaatccctggatctgatgtttagtgtgcagtagcagggagacactgacaacaaacagctcttgatttgggtctgtgatagaacattyggaatgtaaaataagctctgtcagagctcagaaacttcacacayaagctggcaaaacccttagcagggacactgttgccatctgaagaaaattactgtcagtttggccaaagttgttttgttgttttggttttggcagtgttttttggggcggagggagaagaaaacatgaccagggcagacttccatgcatggttagacttctcaacacctttgcaaatctaacccttgctgcagagtccacagaatcagtttttgctgatgaattccaaatgtgggtttcataagtttctcctgagg

SEQ ID NO: 79736 - DNA, 600 bp, Chicken  19866894371188_2
atagaccaattaaaatagttggggtcagaaggaggaaaatgagagaagttggtggaaaaatcactgcattccagcaagcatttccttctgttttctcaatcacatttttactgagaattttatagaagtaggagaggacatttccaaaatgaggtctccaaaactgagagaatccctggatctgatgtttagtgtgcagtagcagggagacactgacaacaaacagctcttgatttgggtctgtgatagaacattyggaatgtaaaataagctctgtcagagctcagaaacttcacacayaagctggcaaaacccttagcagggacactgttgccatctgaagaaaattactgtcagtttggccaaagttgttttgttgttttggttttggcagtgttttttggggcggagggagaagaaaacatgaccagggcagacttccatgcatggttagacttctcaacacctttgcaaatctaacccttgctgcagagtccacagaatcagtttttgctgatgaattccaaatgtgggtttcataagtttctcctgagggacacaagcagacttcatgggctgccagctcccagaaatatgcct

SEQ ID NO: 79737 - DNA, 600 bp, Chicken  19866894371198_1
caaaagaactctgcaaacagaggcagccacctgcatgctattagcagctggcaacttgcagagcatggacacagccaaggaaggggctggaagggaagggactgctgcggagagagcctccagcagggcagcaaaggccagcattgcagcggtgcatttctaagcaaatccagcacagaaactcagcgcgctctggaccattgaggccttgtaggagtatatgaaagtaaggaggtgctgaaaagcaatgtggttcacaagggggcctgtgtgcagcattcctgtcagccaggcagagcwatgtgatgcaccatggctgataactggccccagaaccacgacccgaggcgtcagacatgcagacactcagctgctgaygctgctcatcctgcagctgctgggaaagtaagatctgagaggtaggatccaggagggaagatgtacagttagattctgtgctgacttcatgataagatggcactggcacagcrggaactgtcacctgcaatgctgctcttcaagagraaactgaaaacaggcctgctcaggttgttgcragctgaagttgtactcactggggctttgcagagtcagacgtag

SEQ ID NO: 79738 - DNA, 600 bp, Chicken  19866894371198_2
ggaaggggctggaagggaagggactgctgcggagagagcctccagcagggcagcaaaggccagcattgcagcggtgcatttctaagcaaatccagcacagaaactcagcgcgctctggaccattgaggccttgtaggagtatatgaaagtaaggaggtgctgaaaagcaatgtggttcacaagggggcctgtgtgcagcattcctgtcagccaggcagagcwatgtgatgcaccatggctgataactggccccagaaccacgacccgaggcgtcagacatgcagacactcagctgctgaygctgctcatcctgcagctgctgggaaagtaagatctgagaggtaggatccaggagggaagatgtacagttagattctgtgctgacttcatgataagatggcactggcacagcrggaactgtcacctgcaatgctgctcttcaagagraaactgaaaacaggcctgctcaggttgttgcragctgaagttgtactcactggggctttgcagagtcagacgtagcaagaagctcatctcactgaagaactacagtggaggtatggaggaagccattctggaccagatgtcctccagaagagg

SEQ ID NO: 79739 - DNA, 600 bp, Chicken  19866894371198_3
tctggaccattgaggccttgtaggagtatatgaaagtaaggaggtgctgaaaagcaatgtggttcacaagggggcctgtgtgcagcattcctgtcagccaggcagagcwatgtgatgcaccatggctgataactggccccagaaccacgacccgaggcgtcagacatgcagacactcagctgctgaygctgctcatcctgcagctgctgggaaagtaagatctgagaggtaggatccaggagggaagatgtacagttagattctgtgctgacttcatgataagatggcactggcacagcrggaactgtcacctgcaatgctgctcttcaagagraaactgaaaacaggcctgctcaggttgttgcragctgaagttgtactcactggggctttgcagagtcagacgtagcaagaagctcatctcactgaagaactacagtggaggtatggaggaagccattctggaccagatgtcctccagaagaggtcccttccagccttagccatcctgtgaaacatgctacagggggtcccactgatgacagtccaggccaaggtataaacacggctgttgccaagtgacagctagagcaacctgat

SEQ ID NO: 79740 - DNA, 600 bp, Chicken  19866894371198_4
agtaaggaggtgctgaaaagcaatgtggttcacaagggggcctgtgtgcagcattcctgtcagccaggcagagcwatgtgatgcaccatggctgataactggccccagaaccacgacccgaggcgtcagacatgcagacactcagctgctgaygctgctcatcctgcagctgctgggaaagtaagatctgagaggtaggatccaggagggaagatgtacagttagattctgtgctgacttcatgataagatggcactggcacagcrggaactgtcacctgcaatgctgctcttcaagagraaactgaaaacaggcctgctcaggttgttgcragctgaagttgtactcactggggctttgcagagtcagacgtagcaagaagctcatctcactgaagaactacagtggaggtatggaggaagccattctggaccagatgtcctccagaagaggtcccttccagccttagccatcctgtgaaacatgctacagggggtcccactgatgacagtccaggccaaggtataaacacggctgttgccaagtgacagctagagcaacctgatcttgctgtaggggtccctgttcattgcaggggat

SEQ ID NO: 79741 - DNA, 600 bp, Chicken  19866894371198_5
caagggggcctgtgtgcagcattcctgtcagccaggcagagcwatgtgatgcaccatggctgataactggccccagaaccacgacccgaggcgtcagacatgcagacactcagctgctgaygctgctcatcctgcagctgctgggaaagtaagatctgagaggtaggatccaggagggaagatgtacagttagattctgtgctgacttcatgataagatggcactggcacagcrggaactgtcacctgcaatgctgctcttcaagagraaactgaaaacaggcctgctcaggttgttgcragctgaagttgtactcactggggctttgcagagtcagacgtagcaagaagctcatctcactgaagaactacagtggaggtatggaggaagccattctggaccagatgtcctccagaagaggtcccttccagccttagccatcctgtgaaacatgctacagggggtcccactgatgacagtccaggccaaggtataaacacggctgttgccaagtgacagctagagcaacctgatcttgctgtaggggtccctgttcattgcaggggatttagactagatgatgtgttataggggaggagg

SEQ ID NO: 79742 - DNA, 600 bp, Chicken  19866894371201_1
caagatactgtttctttcagataagagcaatagagtaaatgtcaagatcagcaacaatgggctaatctggggagatgctgtactgcaatccgtaaagctccacattttctctccatctggatttccaaacctgtcatacttcagataacatctatatatttcggagtcagattcccagagggcaccattcagtcaatatgaaatgctatcaaatcatttggggtaaaaccttttgttgactttcttgacatctaactttatttaggaatttattcattggatacgtacagatgaggcaarttttgcttaaatgtattttctggaagtgctgtttttcmccaagaggatacatctcattttttaaagatcagtctttgtactgtgaagttcgtttatagctgcagagagcctgcgagcaggatataaaccagatcaccataccctatggctccagtgaatgtagggagaagcaatattgctcaccgacaaaaaatatggcaagtaaactgaaactatgtgtattttacacaactgaaatgtgtacttgcaattgcatgacagaagcaataatgggctgtgagcctatgtgagagggtatta

SEQ ID NO: 79743 - DNA, 600 bp, Chicken  19866894371201_2
atgtcaagatcagcaacaatgggctaatctggggagatgctgtactgcaatccgtaaagctccacattttctctccatctggatttccaaacctgtcatacttcagataacatctatatatttcggagtcagattcccagagggcaccattcagtcaatatgaaatgctatcaaatcatttggggtaaaaccttttgttgactttcttgacatctaactttatttaggaatttattcattggatacgtacagatgaggcaarttttgcttaaatgtattttctggaagtgctgtttttcmccaagaggatacatctcattttttaaagatcagtctttgtactgtgaagttcgtttatagctgcagagagcctgcgagcaggatataaaccagatcaccataccctatggctccagtgaatgtagggagaagcaatattgctcaccgacaaaaaatatggcaagtaaactgaaactatgtgtattttacacaactgaaatgtgtacttgcaattgcatgacagaagcaataatgggctgtgagcctatgtgagagggtattatcatcacagaatcgtcaaatcattaaagttagaaaggc

SEQ ID NO: 79744 - DNA, 337 bp, Chicken  19866894371201_3
tgaacagccaggatcaatttaactgttttaaaacagaaataaacatgctttcacttacaatatttgtcttcaaagagcacacaaacttttaagacctctccttatccaaatgttttacagagagctctggcttttttccttttcccatgcatgtgtccctctgcatcccatcatgccgcagcagcacaggcagctgcaggctggggcaggttgttctacagagatgcacgagggatgtgatggatcagtaatgcataaatgcacaatgaggagacgggctctccttttttgttttagcarattttgagctcctcggtgcatcaaacaatttgtcagt

SEQ ID NO: 79745 - DNA, 600 bp, Chicken  19866894371204_1
ccatcagacttggagggcaggcagaaggtaggtggtgggagttgggaagggatgtgcacccttcccccagccttgctgcacaaggacagtcattgctcttctctgtcaaaagctctaattcctaatttaggaggtaattctagtgcaaatgagtgcgccttgcagatagaattagagtctgtgtgatgatttggaaaatacaatcaatttactccaattgtttgtacatgtcagatctctccaataatgaagaatttactcctcgtgcatgaatacaaacaatgagctattagccatgcragatgagagagcctgtcagaataaaaaccccaagatgcgatgtgctacatcagaacatcagtgagaatgtgcccaggtctgtgccgtggctgcagggtggaagcactgtggcttcagtgcttggatctcctcctggctaggtgatggaaatcagctcctccatcrtggatgaggtgggaggaaggtgaagggaaagctcttgatccttctgccgtaaatggggaagagratctgctggatttggagctgcagtgcctctgaaatgaggtttgtattgatccctattgctaagccagccta

SEQ ID NO: 79746 - DNA, 600 bp, Chicken  19866894371204_2
atagaattagagtctgtgtgatgatttggaaaatacaatcaatttactccaattgtttgtacatgtcagatctctccaataatgaagaatttactcctcgtgcatgaatacaaacaatgagctattagccatgcragatgagagagcctgtcagaataaaaaccccaagatgcgatgtgctacatcagaacatcagtgagaatgtgcccaggtctgtgccgtggctgcagggtggaagcactgtggcttcagtgcttggatctcctcctggctaggtgatggaaatcagctcctccatcrtggatgaggtgggaggaaggtgaagggaaagctcttgatccttctgccgtaaatggggaagagratctgctggatttggagctgcagtgcctctgaaatgaggtttgtattgatccctattgctaagccagcctatatcaggttgctctcccaccactcttagtgagctctgctcccgagctgtggtagctgcagcccttaacagtgcttctctgcagctcctgtgttccccaagggtttgaggggctctggagctcctaaaggatgctacagtgcaacatcttttgaagtcctggctgg

SEQ ID NO: 79747 - DNA, 562 bp, Chicken  19866894371204_3
gtcagatctctccaataatgaagaatttactcctcgtgcatgaatacaaacaatgagctattagccatgcragatgagagagcctgtcagaataaaaaccccaagatgcgatgtgctacatcagaacatcagtgagaatgtgcccaggtctgtgccgtggctgcagggtggaagcactgtggcttcagtgcttggatctcctcctggctaggtgatggaaatcagctcctccatcrtggatgaggtgggaggaaggtgaagggaaagctcttgatccttctgccgtaaatggggaagagratctgctggatttggagctgcagtgcctctgaaatgaggtttgtattgatccctattgctaagccagcctatatcaggttgctctcccaccactcttagtgagctctgctcccgagctgtggtagctgcagcccttaacagtgcttctctgcagctcctgtgttccccaagggtttgaggggctctggagctcctaaaggatgctacagtgcaacatcttttgaagtcctggctgggactttgctgatgtgaccattataca

SEQ ID NO: 79748 - DNA, 599 bp, Chicken  19866894371207_1
  misc_feature (1)..(81): n is any nucleotide
nnnnnnnnnnnnnnnnnnnnnnnnnnnnnnnnnnnnnnnnnnnnnnnnnnnnnnnnnnnnnnnnnnnnnnnnnnnnnnnnnaactgcttgctgaaggaatgatttgaaccccagccctttaaatcttgaaactccacctcggaacacgtgagcagcttgcctaatgtcagccaatcttttctcagactcacaggacttgcatgtcagtatgaataccaagtctcctgcacatttagtgcctgaaatgtcagagacctcctggaagttcctggagcttgaatccacagaaaatcacagctygtctccagtcccctcttcaggcatctgggtccataattgctgcttctaaaaagttgccccagcaattgcttggccttaaagccacctaagctgtaagtatctcaggtttcattctgaagtcccctgagcactgaaaatctctagtactgctaaatacttcctgcatcaagtaatgatgagcatagctcacttctgtcctcctcagagcaaacaactctctctttcatggtccagaaaggaagctgagagcgtatttcacagatcaggcttcagaaaaggtggagactgctgccttgctt

SEQ ID NO: 79749 - DNA, 600 bp, Chicken  19866894371207_2
agagcgtatttcacagatcaggcttcagaaaaggtggagactgctgccttgcttcaaaaaccagctggtatccctggcatttaccttgctttcatccagcaaatcggtgattaaaatattaatcaaagctgagagaaccttcaacgcaattagggtcttcactttcccatctctcaccaccatgaatagtgatctaaaaatggtggggataaggaagaaaagttgaagaaacacaggcaacttgcaatgtttcatagcagttattctgcttttttgtgatgaatgatgaaggattaattwgaccaatcattttggtgcctaaggctcctttctggatttgattttgacatcgacattgacatcctacacccaytgcattcaggctcctaagccttcaagttgttcaagttaacaaagcatctacaaatgcatgtagcacccaggaatggccacctcagatcagcccagcatcttctctccaacagcagccaactgcagaggtccaggagaaatagagcaataaaaggacaagaggaaaaccaatcaattagagcccaaacagttcctgtttgcattacgtagctcactgtttccctgctc

SEQ ID NO: 79750 - DNA, 600 bp, Chicken  19866894371207_3
ctggcatttaccttgctttcatccagcaaatcggtgattaaaatattaatcaaagctgagagaaccttcaacgcaattagggtcttcactttcccatctctcaccaccatgaatagtgatctaaaaatggtggggataaggaagaaaagttgaagaaacacaggcaacttgcaatgtttcatagcagttattctgcttttttgtgatgaatgatgaaggattaattwgaccaatcattttggtgcctaaggctcctttctggatttgattttgacatcgacattgacatcctacacccaytgcattcaggctcctaagccttcaagttgttcaagttaacaaagcatctacaaatgcatgtagcacccaggaatggccacctcagatcagcccagcatcttctctccaacagcagccaactgcagaggtccaggagaaatagagcaataaaaggacaagaggaaaaccaatcaattagagcccaaacagttcctgtttgcattacgtagctcactgtttccctgctcatttaattggctattttcataagtaaacaaagagggtttgttgcaatattgagaccgataaaaataaataaat

SEQ ID NO: 79751 - DNA, 599 bp, Chicken  19866894371208_1
  misc_feature (1)..(111): n is any nucleotide
nnnnnnnnnnnnnnnnnnnnnnnnnnnnnnnnnnnnnnnnnnnnnnnnnnnnnnnnnnnnnnnnnnnnnnnnnnnnnnnnnnnnnnnnnnnnnnnnnnnnnnnnnnnnnnnctacgctgacccctcccaccccccccgaaaatacgataaagaaagccccgaaaacgatcgcgattcagtttgtttggaagggtcccctcggatcgctcaatcagtgctcgagcaattccgtaaacccctccctctcttttaaagccccttctgcatttcttgtcgtatcgacgagcatttatcgacgcsgtcctcattgtccagttttccctttcctaaaataagaaaggcaccgactcgccgtgccccaggtcggagcgcattgctgggttgcacagccgggctttgtgtgtatgcgtgtgtagatagagggctgtgcaaaagtggtgggcttttcgaaattcactttgacctccattgttggtgctcctttggctgccggtgccaaagccagcgcagccctctcttcttttatctaaaaaagaaaaaaaaaaaaaagtaaaaaaaaaaaatctgttatgcttaattttttggaatactgaggattc

SEQ ID NO: 79752 - DNA, 600 bp, Chicken  19866894371212_1
tgactggtgctgtcttccttcatgatagaagccttagaacatttgtggcttaaccagcactacaaaatctggagccgtttgcttgccctttccagcctgccagctagctgagggctgtgacgacatgcctgtgggtttgtccggctgaagcaccaccacaagccgcctcctgccctttgcccagctctggccagggatgttctaccctctttttatttcaaagcagctccttgccagcttcacacaatatttattctccctgctttgttgttttcttgctgttaatgttcctgttcttcyccataaatgtacttctagctgagatggaacttaggagcaacaagtactccatttccaacacagtgaacattttgccagagtgtcagaatgtaaaatcccctatcacatcacaaaagtctgtttcctactgcttctcctggtgtcagagggatgacgtcaggactctcctctcacacgcactgaactttgtcagccttcaaagacgttgcattaagaaaagacaataaaatggaacaccgtagtgttgggatctgatgctttgcctgtaaaagtgtcagcttgcaagcatagggtgaactt

SEQ ID NO: 79753 - DNA, 600 bp, Chicken  19866894371214_1
tcagcctacgtttaacacctgggctacttatgatacttcttttaagtattaggaagcagcttagtagtatattttggggaatatcccaaacagggaagaaagaccactgatttgtgtttactgaatactaatttcagaagatgtacattacattcatacaaacatagttcttcactgtgttttatacatcacagcctgatcaccagaatgattccagtggaaattatttattattttttcttattgttgcaattaattttaaagtgtttcaaaatgttttcttcttacccagacccaaartctacttaatctactactacctatcccaaaggtggcattcaaaactgatgctgccactgatatgttctgtcacaataatacaaaattgtaacaccttgttatcaaggcaaatagagtagtgggaaaggtagagtataaagtttggaaaagcttcctagtagtagtagtactgataaagaaagctatattactatacaaagagtgcaagatattcagtgtttttgatagagatacacagagaatctacgcatctggcaaatgcttttgtttgtaagtatgagagtggataaagatatgcca

SEQ ID NO: 79754 - DNA, 599 bp, Chicken  19866894371218_1
  misc_feature (1)..(116): n is any nucleotide
nnnnnnnnnnnnnnnnnnnnnnnnnnnnnnnnnnnnnnnnnnnnnnnnnnnnnnnnnnnnnnnnnnnnnnnnnnnnnnnnnnnnnnnnnnnnnnnnnnnnnnnnnnnnnnnnnnnnccccgacgggaccccactcctctgccggtgtcccccacccctcggcagaccctgctcccggtgtacatcgtacccctgatgccgtggtggcaagctggggaccgggatggtgacgccaagtggggacactgggtgggttcacggcgtggggtcaggagggtggcacgggaatggcagctgcccrctggtgtgggggtgggaagcgggctgcgagaagtgatgacagctgtgggcagagggggacaggtgacggcaagtggctggtagcgygtctgcgatggggacaccgagtgacacaaggagcgggtgacgggagggtggctgttggcayggatgatggagaggagaggtagggatgggtgctgtggagcatactgaaccccagggggtgacacgggcgggtgacaagtggctgtcggagggctggtggcaggaggaccggccgcaggtggcagggagccggccggctgtccccacagctga

SEQ ID NO: 79755 - DNA, 599 bp, Chicken  19866894371218_2
  misc_feature (1)..(30): n is any nucleotide
nnnnnnnnnnnnnnnnnnnnnnnnnnnnnnccccgacgggaccccactcctctgccggtgtcccccacccctcggcagaccctgctcccggtgtacatcgtacccctgatgccgtggtggcaagctggggaccgggatggtgacgccaagtggggacactgggtgggttcacggcgtggggtcaggagggtggcacgggaatggcagctgcccrctggtgtgggggtgggaagcgggctgcgagaagtgatgacagctgtgggcagagggggacaggtgacggcaagtggctggtagcgygtctgcgatggggacaccgagtgacacaaggagcgggtgacgggagggtggctgttggcayggatgatggagaggagaggtagggatgggtgctgtggagcatactgaaccccagggggtgacacgggcgggtgacaagtggctgtcggagggctggtggcaggaggaccggccgcaggtggcagggagccggccggctgtccccacagctgagccctccaccccccagctgggtgttcctgcacgagaaggcctaccaggtgcgggacactgtcatcgagtcctcggtggtgaccaaa

SEQ ID NO: 79756 - DNA, 600 bp, Chicken  19866894371218_3
cccccacccctcggcagaccctgctcccggtgtacatcgtacccctgatgccgtggtggcaagctggggaccgggatggtgacgccaagtggggacactgggtgggttcacggcgtggggtcaggagggtggcacgggaatggcagctgcccrctggtgtgggggtgggaagcgggctgcgagaagtgatgacagctgtgggcagagggggacaggtgacggcaagtggctggtagcgygtctgcgatggggacaccgagtgacacaaggagcgggtgacgggagggtggctgttggcayggatgatggagaggagaggtagggatgggtgctgtggagcatactgaaccccagggggtgacacgggcgggtgacaagtggctgtcggagggctggtggcaggaggaccggccgcaggtggcagggagccggccggctgtccccacagctgagccctccaccccccagctgggtgttcctgcacgagaaggcctaccaggtgcgggacactgtcatcgagtcctcggtggtgaccaaagtgaagggcatcgggaagtatggcaaccgcgtcctggacacagctgactacgtcaccccccc

SEQ ID NO: 79757 - DNA, 600 bp, Chicken  19866894371221_1
tatccccgcagctcagctcttcccgcgtattagcaacagctaatgaaatcagaaagtgtccgataaagcccggagaaaaatagaatggaaataaatgatgtcacctctgaaagcacacagcgaatacaggatgctggtgtgccaccagcctggaggtcggcttggctggcttctcttccaaagtgcacgtccagcagatggtgctgggaggtgatggggagatggcgccaccacggtcactgccagcatctccagtgcaagccctgtctgttaaagaaagcggccatcaaacacctgaartggttacacatcaatggccccgttggtgttcctygggaggccatgtggcaccgggccctgcagcaccaacaggacagccagctattgctcaccatccagagaagctttgtgtcaccgttttgggaacacgggtgggacagacgcagtcagacgctgactgtgattcaagcagctcctgactcagagccactgaagtcagcagaaagcctttacgtgatgctgctgggctcgagggccagcccccaaccccaaaactggcgaattccatgggaccccacggatgctgcttgcccacaatat

SEQ ID NO: 79758 - DNA, 600 bp, Chicken  19866894371221_2
aacagctaatgaaatcagaaagtgtccgataaagcccggagaaaaatagaatggaaataaatgatgtcacctctgaaagcacacagcgaatacaggatgctggtgtgccaccagcctggaggtcggcttggctggcttctcttccaaagtgcacgtccagcagatggtgctgggaggtgatggggagatggcgccaccacggtcactgccagcatctccagtgcaagccctgtctgttaaagaaagcggccatcaaacacctgaartggttacacatcaatggccccgttggtgttcctygggaggccatgtggcaccgggccctgcagcaccaacaggacagccagctattgctcaccatccagagaagctttgtgtcaccgttttgggaacacgggtgggacagacgcagtcagacgctgactgtgattcaagcagctcctgactcagagccactgaagtcagcagaaagcctttacgtgatgctgctgggctcgagggccagcccccaaccccaaaactggcgaattccatgggaccccacggatgctgcttgcccacaatatgtgacgcagctctgatggcactcaggccaccacc

SEQ ID NO: 79759 - DNA, 599 bp, Chicken  19866894371222_1
  misc_feature (1)..(80): n is any nucleotide
nnnnnnnnnnnnnnnnnnnnnnnnnnnnnnnnnnnnnnnnnnnnnnnnnnnnnnnnnnnnnnnnnnnnnnnnnnnnnnnntctctttcttttgaccgtctctatttattcttacacaaggaaccccactttttctattgactccaacagaaaataaaagcatcagctaaaacaaagggacaaggacatgaccaaaggtaatctggaaaaaaaaaaaaaaaaaactcatactccttcaaaattgcagatctttttaaattatttatttattggagttaagatggatgagaattatcaaagratctaaatacagggcagtttgaaggggctataataagcagcttttgagttagaggtagcaaaacattaagtaaatttctaatcagggtaatttttaaatgacctctaaatcaaaaatagtttgattatacactgtttgaagaaaattaattatccttctttttcttcaaagtatggaaattttcaggccaaaccaatttccaagcaaaagttaaagaagggcaaaaataggactttaaaagctggttgcaaccttaacaatagggagaacactctttttcygtaataaagagaaggttg

SEQ ID NO: 79760 - DNA, 600 bp, Chicken  19866894371222_2
ggatgagaattatcaaagratctaaatacagggcagtttgaaggggctataataagcagcttttgagttagaggtagcaaaacattaagtaaatttctaatcagggtaatttttaaatgacctctaaatcaaaaatagtttgattatacactgtttgaagaaaattaattatccttctttttcttcaaagtatggaaattttcaggccaaaccaatttccaagcaaaagttaaagaagggcaaaaataggactttaaaagctggttgcaaccttaacaatagggagaacactctttttcygtaataaagagaaggttgatgtgacaaaactgccttagagggcaatagatttgataacaagagggagtgaacaaaaactttaataaaatccagcacctacagagtttagstgaaacttctttcatgtgtgatgttgaatagtctgaaatgggacttacacaggcatctagctgctccttggataaagtttatttcttgaaggaaactgttcggtgtgcaaatgctatgagtcaaaatggacgtcccaaaatggggcactgcatttcttcctctctgaaacattactctgtaagtagaaca

SEQ ID NO: 79761 - DNA, 600 bp, Chicken  19866894371222_3
ttttaaatgacctctaaatcaaaaatagtttgattatacactgtttgaagaaaattaattatccttctttttcttcaaagtatggaaattttcaggccaaaccaatttccaagcaaaagttaaagaagggcaaaaataggactttaaaagctggttgcaaccttaacaatagggagaacactctttttcygtaataaagagaaggttgatgtgacaaaactgccttagagggcaatagatttgataacaagagggagtgaacaaaaactttaataaaatccagcacctacagagtttagstgaaacttctttcatgtgtgatgttgaatagtctgaaatgggacttacacaggcatctagctgctccttggataaagtttatttcttgaaggaaactgttcggtgtgcaaatgctatgagtcaaaatggacgtcccaaaatggggcactgcatttcttcctctctgaaacattactctgtaagtagaacagaaagctgaatgttttcagttcctataaattgagtaatgcaaagcttgtttcacacatggggccccagcttctcattccagtatcttaagttcttctgtcagttggtggt

SEQ ID NO: 79762 - DNA, 600 bp, Chicken  19866894371224_1
agtaccatcaaatagaaatcagcctaaagaaaaaacatatgcagctgtaatgaatgttgagctaaatttcctccttgtgctgacactaataactctttttttttttttacttacagctactcatgcttacctctctccaaggcatactaactttgaagagaaggtttatactgttccaatgataattagtgacaacggagtaccaccattggagagagaagtgaatcttgaaggtatgctaggctcagaactattatttcaagacaacagcaacatgtaagaataatcaatctgcactgytaaacttctcattaacttcatggcacttctttttgcagtaaacatctgcacatgttcaagtgaaaattcgtgttttataccagtagaacgtgagcactccaagccaagcaccggtcaggcaattgggattcttcttggcgtcctgatagtgatcggtaggtgatttcttctcagttgacatgaggtctggtctctgagatgctgctgctacatttctgacactgattcaattctgttaagagttgtcataaatgttgcagaataagcaaaagagagatttcatacctcagataatgatcc

SEQ ID NO: 79763 - DNA, 600 bp, Chicken  19866894371224_2
gttgtcataaatgttgcagaataagcaaaagagagatttcatacctcagataatgatcctgtaccacaatcgctgcaaacttgaaggttcttgatcatagaaacacatttcttcagtactgtatgtgcttctgcatgcatatataatggcatagaaagccgttatgacagaagaaaatgctacccatatagcatattgccactccattgctaactaccaccttttccccatcagtgaatggactggaagcctgtcttgggctttcatattatagtgaaaaaagcaaaaaagcgtccagtyatgtcatgttatttactgtctgtagatttccatcaactgctatccttagattataattatgatttctttcacctgcttcagctttggaggtttgcattttccagagtgagaataaattgttttgagctctggaaaactggcatttttatgaacaaagtagattatactaagcggtaccacgagcatgagctgatgctcctcygacaaatggcttaaaacttttttccgaaacaaaacatgatcttttttggtattcttcttatgaacataagtaaaaaattgatgaggatgactgttggt

SEQ ID NO: 79764 - DNA, 600 bp, Chicken  19866894371224_3
tccattgctaactaccaccttttccccatcagtgaatggactggaagcctgtcttgggctttcatattatagtgaaaaaagcaaaaaagcgtccagtyatgtcatgttatttactgtctgtagatttccatcaactgctatccttagattataattatgatttctttcacctgcttcagctttggaggtttgcattttccagagtgagaataaattgttttgagctctggaaaactggcatttttatgaacaaagtagattatactaagcggtaccacgagcatgagctgatgctcctcygacaaatggcttaaaacttttttccgaaacaaaacatgatcttttttggtattcttcttatgaacataagtaaaaaattgatgaggatgactgttggtgggttccagtaccctaggaagtaaagaacaaaaagaattctgtgcatgatactatgtgatttttgaatgtgatggtcacaagcaccagaatgggagaatgagccatgaagaataagaggaaagatccatggagaaaatcaaagacaatcaattaaatactttacagacctcatattcaaaagagtagggtgaagctacagga

SEQ ID NO: 79765 - DNA, 488 bp, Chicken  19866894371224_4
aattgatgaggatgactgttggtgggttccagtaccctaggaagtaaagaacaaaaagaattctgtgcatgatactatgtgatttttgaatgtgatggtcacaagcaccagaatgggagaatgagccatgaagaataagaggaaagatccatggagaaaatcaaagacaatcaattaaatactttacagacctcatattcaaaagagtagggtgaagctacaggataaaagtgggaaaaaaaagacaaacccaacaatctaagaacttatttaagacttatgccaatttgaaaagagaaygagtctccaagaacaagttcctatttacccaaaaagacaaagtcaaaacgctatacaccaaactcttagagcctgagaaaatgccaatgcatgtttgatgcatatatattcatattttgaagacrgaaagagaaaaaaaaaagtgattcaaaggaactaagatgggagaagccatgctcagatcaagt

SEQ ID NO: 79766 - DNA, 363 bp, Chicken  19866894371224_5
ccatgaagaataagaggaaagatccatggagaaaatcaaagacaatcaattaaatactttacagacctcatattcaaaagagtagggtgaagctacaggataaaagtgggaaaaaaaagacaaacccaacaatctaagaacttatttaagacttatgccaatttgaaaagagaaygagtctccaagaacaagttcctatttacccaaaaagacaaagtcaaaacgctatacaccaaactcttagagcctgagaaaatgccaatgcatgtttgatgcatatatattcatattttgaagacrgaaagagaaaaaaaaaagtgattcaaaggaactaagatgggagaagccatgctcagatcaagt

SEQ ID NO: 79767 - DNA, 597 bp, Chicken  19866894371233_1
ctccagaggtccatgggagccagaagtcctcttagttgagttcagatgtgcacaatgaggtgtctgtgtgtgagccccccatctgaatgcttggtctttattcaacagggacggtattgcattgctcgcgcagagacgctcagtgatgcctgaggtgcctggggtgatcctagttgtgtgctggtgcttgtaaagtgtggtggaaaatctctgagatagacacctccttcctgagcatcagctgagggccagaagggaggtattcttggccatcctaaatgccaccacagccctgtgctyagggcaccagtgtgccttttgcacctgtccccatgaagcatgaagtgttattccgctgaccaaatggatgagctcaccaacagaagagccagaccttcctctctgctcggtctgtgtcatactctgccattcaaggcgttacaaagttctgaaacacttacattctttcactgatgacacctcagtatgtttcaggctcacatttgaatggcatcatagtaagtctagagtcacgccagttcccagttgacaggaggctggcaaatgttgtctcattgtaagaaaggaaaagaaaga

SEQ ID NO: 79768 - DNA, 600 bp, Chicken  19866894371243_1
atccagtaacaatcttcccagctccctaactaggcacttaagacattcactagagagatgaactgcttttacaaggcagttgagagcaagacccaaaacgacccttcattttactacaaaagcctcgagaggatttgtcttcaatgatttatcttaaccaagtgatactttcaagcattttatctccaccttgtaaaacgttacatcagagattttgtagatcatactcatgtttcatgaacaggttctgcagatggaaggtctttcttcaaagcagaggcaacagtccaagcttctgcycagagcaagtgaaagaagtgaatgcctgtcctaagaaatacagtgcagtgatctgcagtttaactgttcgttatatcacctctaattatgtttctgctatacgacaagtaagaactttacccatgaacaaaacagtgcagagatattcttaattttggaggtggcctctgtgggttactggtatgtcagtatgctagcttatccccatgtttgggacctggtgatgtgactggcagagactccagggaaactggaagttcagcttcacagagggctgctgagactggctgctaatttaac

SEQ ID NO: 79769 - DNA, 600 bp, Chicken  19866894371243_2
ggaaactggaagttcagcttcacagagggctgctgagactggctgctaatttaactagcatagatctggctgaattaactgaaatctgcccaaaaacgtgcataaagaactggtctcactcaaaatctccttcatttcttccacaggtctgcgccatataactatcctcaagttgctaggagttggagaagatattggtggtgtcttagagttgtatccaattaatggtaagtgactgtttccagtttgttcactactactcatgaagagcattatgcagtactattttttttttttttyctgtaatttccttagagggatggatatgattgaatttttttctttccattgcttaagaaaaaatatggcagaaaagcaaactttcttgaaacacctatgctaaataccatatagcttctgtaggacagaaaagcccagagatgatctggaagtcactcacatcttcatcttccaccaaaatacagtcccaggtacagtctacacacgttgccatcattaacagagggatgtacatgcttaagagtttgcaaggctaatatctagcacattctcttatatagatccattatccatcatctg

SEQ ID NO: 79770 - DNA, 600 bp, Chicken  19866894371246_1
ctgaattctatgttgctgctaccttgttttctttacagttttccagctgtatttgtcctcccttcataaacactgttgccagtatttcgttttatctttgagtatacaaattgcatttccttaatctcccttcataaacagtgccctataatcctattatcactattgttgaccttctttggaattcctccaggttattaatgcctttataatgagaatcctgggatttaaactgttttctgagtgatgtttattcaaaaattgatagattatttcccttttcattttcctttacattcrctatttcttttctgtctgacatcttattatgttgaaagtggagctatgcaaataactttcatcactgaaaccttgtgggatgattcccacaaccagaatgtggctgttgatggctgcaagctgttcagaggggacaggagatgggggaggggaggaggcattgccctttacatcaagggaggaatagattgtgaagagctgtccctgaagaagggccacaagcagatcaaaagcctatgggtgagagttagagactgaggcaacaaaggaagccctgtggttggtctctacttcaggcca

SEQ ID NO: 79771 - DNA, 600 bp, Chicken  19866894371247_1
ttgttgataatggtcatcttataaacaccttcaagatatcaacccttaaaaacttgttgaaaaaaaaagatgaaagcaattcttgaacagtcttagatttcagtcacaaattcattggaaggaaatggaatcttgataggacaagggggagtggctttaagctaaaaatggggagatttaggttagatgttagggggaactttttactcagagtggtgtggcactggcacagctgtccagagaagctgtaggtgccccattcctggaggtgcttaagggctggctagatggggccctggrcagcctgagctggtgtggggcaaycctacccatggcagatgtgttgaaagtaggtgatctttgaggtcccctcaaacctaagccattctatgattctataataagtaataaaatatgtcttgctaaaaaaaggaagtgaaaatccctgcacttttctagtgctcactgcagatttttcctgtcagacgtgggagttacaaatagaactgtatgcatgtctagggacagtagtgtcactgaggtgagtcacctcgaaagaggacagttggtggaagtactgctttcttctctttgtaggag

SEQ ID NO: 79772 - DNA, 600 bp, Chicken  19866894371247_2
acaccttcaagatatcaacccttaaaaacttgttgaaaaaaaaagatgaaagcaattcttgaacagtcttagatttcagtcacaaattcattggaaggaaatggaatcttgataggacaagggggagtggctttaagctaaaaatggggagatttaggttagatgttagggggaactttttactcagagtggtgtggcactggcacagctgtccagagaagctgtaggtgccccattcctggaggtgcttaagggctggctagatggggccctggrcagcctgagctggtgtggggcaaycctacccatggcagatgtgttgaaagtaggtgatctttgaggtcccctcaaacctaagccattctatgattctataataagtaataaaatatgtcttgctaaaaaaaggaagtgaaaatccctgcacttttctagtgctcactgcagatttttcctgtcagacgtgggagttacaaatagaactgtatgcatgtctagggacagtagtgtcactgaggtgagtcacctcgaaagaggacagttggtggaagtactgctttcttctctttgtaggaggaagatccagatggtggctgcata

SEQ ID NO: 79773 - DNA, 514 bp, Chicken  19866894371248_1
gtgaccttgaaagtctgcgagttcgagcactgcggcctgcccccagctccctcctccaggctcctatgaaatttcacacgtgcatgtttctctcttggcttttctctggcagatattttgtcaaggtggcttgggcatggacgttctggcttctgctgcctttcatcggagtcaccacctacctgtttgccaagagcaagttcctctacggccccacaaagagcattctggcagctctgcggcgtctcagcacgctgctggtgggcactgccgtctggtatgtctgcactgaactcttcrtgtacatcgagaatctcaccggcacgtgctctacctcgagtaaactcagtgagcctcaccagctctatgccaccaagcaggagtgccatcggaacaacgggatatggaatggttttgatatctcagggcactgctttctgctctcatattgtgctcttatgattgtggaggagatggctgtgctggaaggcttgtccatagaccggaactcaag

SEQ ID NO: 79774 - DNA, 600 bp, Chicken  19866894371250_1
tcactaccttggttaatcaagggagaaggtcttataagcatgtactcggttgcaaaatcatgacactctccacttcccctccccgtaatagctcaaattcagatccagtatgtagcaagaaagaaggtataaaaagagcacaaggaaaatgaatgtgaacatgagctggaaaaaggaattcaaactgaaataaagggcagttattgatagtatgtgtgactaagggtagaatcttatcttaattatagacccatgatccagaattaccgcattgtttgctgataattaaatcaatgaagygattaaagatgtgagctggtgtcactgagatcaaaatctgactggtcaagagggaggttgtttaaaatacagtgttgtcgagagggagaatccaaattcagtactgtacttctgtgatcagcatcatttgggcacttgtaacttgactgcatgactattgagctatcctagatttcctataagtaatcttatcctaagatctgtttgctcttatatttctacttcttacatattactgtggcttaaaaaacaaaggcaacagagtaatttycgtgggaaaagcctatcttttgaggggct

SEQ ID NO: 79775 - DNA, 600 bp, Chicken  19866894371250_2
ttgtttgctgataattaaatcaatgaagygattaaagatgtgagctggtgtcactgagatcaaaatctgactggtcaagagggaggttgtttaaaatacagtgttgtcgagagggagaatccaaattcagtactgtacttctgtgatcagcatcatttgggcacttgtaacttgactgcatgactattgagctatcctagatttcctataagtaatcttatcctaagatctgtttgctcttatatttctacttcttacatattactgtggcttaaaaaacaaaggcaacagagtaatttycgtgggaaaagcctatcttttgaggggctgaaaaaaaaggccttctctgtatttatgcctaggtgggtttctctcaaaatttggattttctggaaaagctgctctccaagtggacaaaattctgttgcagtggtgaaagttttaggaggataattatggacaattgaaagctgtgagtacagatgggaatacttacatgaccttaattccagctgttgctattacgtggctgtaatgaaactactgccatggcattccttttaaattggttacactagagatgagtatgatcctttaaat

SEQ ID NO: 79776 - DNA, 600 bp, Chicken  19866894371251_1
ggggaaaaaaaatggctgcagaaactatatttcagataaacataatatggatgtgaatggcttttggcagaaaacttctacgcactaatttactgcaggttataaaaatgacagaaattgaaatgagagaaattctattttcacagtgaccaaaaacagtgggcaaggctcattttgctggttggtctggataatcttggagatattctccaaccttggtgattctatgactcgctgtattctaatataatgtctatccatctatctggttcaaacaactgccactaaaattgctcatcrttcttgggctcattaaacctgatccagttacacctcaggctacaaatggatacccaataacattttagactaataacgtaaattctatggttaaagtcacaataacggaccagggagctgctctaatggaactryaacacaaagaaagcagaaagccaggcatagtttttaaattattatcacaagctaccaaataaaatacattcacacattcttttcttttagccagaatcctatggagattgggattgttgaaatgcctaggaaacaaaaaaaaagaaatctttagttcactttagt

SEQ ID NO: 79777 - DNA, 590 bp, Chicken  19866894371251_2
ctattttcacagtgaccaaaaacagtgggcaaggctcattttgctggttggtctggataatcttggagatattctccaaccttggtgattctatgactcgctgtattctaatataatgtctatccatctatctggttcaaacaactgccactaaaattgctcatcrttcttgggctcattaaacctgatccagttacacctcaggctacaaatggatacccaataacattttagactaataacgtaaattctatggttaaagtcacaataacggaccagggagctgctctaatggaactryaacacaaagaaagcagaaagccaggcatagtttttaaattattatcacaagctaccaaataaaatacattcacacattcttttcttttagccagaatcctatggagattgggattgttgaaatgcctaggaaacaaaaaaaaagaaatctttagttcactttagttcaacaaacataaaaaaacataaaaagggtaggaatcagtggaagaaaggtacatgattcagttcataaatctaatgaagaatcttcagacaaaattaccttggggaatacaatcaagcagcaa

SEQ ID NO: 79778 - DNA, 589 bp, Chicken  19866894371251_3
tattttcacagtgaccaaaaacagtgggcaaggctcattttgctggttggtctggataatcttggagatattctccaaccttggtgattctatgactcgctgtattctaatataatgtctatccatctatctggttcaaacaactgccactaaaattgctcatcrttcttgggctcattaaacctgatccagttacacctcaggctacaaatggatacccaataacattttagactaataacgtaaattctatggttaaagtcacaataacggaccagggagctgctctaatggaactryaacacaaagaaagcagaaagccaggcatagtttttaaattattatcacaagctaccaaataaaatacattcacacattcttttcttttagccagaatcctatggagattgggattgttgaaatgcctaggaaacaaaaaaaaagaaatctttagttcactttagttcaacaaacataaaaaaacataaaaagggtaggaatcagtggaagaaaggtacatgattcagttcataaatctaatgaagaatcttcagacaaaattaccttggggaatacaatcaagcagcaa

SEQ ID NO: 79779 - DNA, 600 bp, Chicken  19866894371257_1
aattctttttttttttttcttttttttttttttccccccacaccagcacttctgaaattgcagttagcaacagcataatttcacattcaatacttctcacttatggtttccttttactgcctatgtcacaaattaatcctttcttctctgtttttgaagagcagaaagcatttttaaggggagagctcaaaactgaatacaaaaacctgccttctttcctactgctgaaagctaacagtgaaaatttaatctattccagtgcaagaagtaaatgtgacgatgtcactaagaatgcttacrttgcatmaaattgtaggtacactattagaaaagaaacaattataaaatcctcgcagacgttgtatgtgttagatttaggattcccctccctgccccccctcctctccagaataaaagcaaaaccaaatcctgatttaaatctgagaatcctatttggaaattaagcaccttttgtccagacagatgccacaaataaaggaaaagccgcatcaagaaattgattgtgccattacagaataaatgtgtacacttaaaatgagagtttcttaagcttattgctttaaagatcagagttgggaa

SEQ ID NO: 79780 - DNA, 600 bp, Chicken  19866894371257_2
tttttttttttcttttttttttttttccccccacaccagcacttctgaaattgcagttagcaacagcataatttcacattcaatacttctcacttatggtttccttttactgcctatgtcacaaattaatcctttcttctctgtttttgaagagcagaaagcatttttaaggggagagctcaaaactgaatacaaaaacctgccttctttcctactgctgaaagctaacagtgaaaatttaatctattccagtgcaagaagtaaatgtgacgatgtcactaagaatgcttacrttgcatmaaattgtaggtacactattagaaaagaaacaattataaaatcctcgcagacgttgtatgtgttagatttaggattcccctccctgccccccctcctctccagaataaaagcaaaaccaaatcctgatttaaatctgagaatcctatttggaaattaagcaccttttgtccagacagatgccacaaataaaggaaaagccgcatcaagaaattgattgtgccattacagaataaatgtgtacacttaaaatgagagtttcttaagcttattgctttaaagatcagagttgggaacaaaagc

SEQ ID NO: 79781 - DNA, 600 bp, Chicken  19866894371257_3
attgtgccattacagaataaatgtgtacacttaaaatgagagtttcttaagcttattgctttaaagatcagagttgggaacaaaagcaaatcaattgaaaggtatcaaatataataagctaccactgctggaagtaacaaattgactctgacttgtgcaaccagttcacaccatatgcctttctattctaatgtttcggtgaattgcttgagtaaataaattaattgcaccgtcatgaggaaacacacatggaatttgctttaccacaaggcagaatgtaactcagtaggcgacccaaayggatgagcagcagagctgtggggagcttcagcagcattcttggaaagccaccatttttgctgcagcagcaattatacaagagctggccaggactcacggagatgcagctttaaataaaacttggtatttactgaaatgcttcggagaacggttaatgttctttgctcaatatccttcattgttccagcagccctaaaagaggagttgcaagaactctggaaaagttcccatagcaacagttaagaggacagaccattttccttccagttgaggatgagcagcagcaacactgattctggt

SEQ ID NO: 79782 - DNA, 600 bp, Chicken  19866894371258_1
caaattcactgtctcagtcagtcacgcttcaatctgattaggcaagaagtatattggatagtactgaaacaaaactatgaagagaaaaaaggaaaaagaaaagccataaaggaagaaactgtagagtaatacaacagagaaaagattgcttgcaatgctgaagtaatatttgatctgttatcttctgatttgtgaatatatttctagctttattttaatatctgtagtacccagcatggttcaaccacatgagatcctaaagacaaggcccaaccttgttatttcacagtattgataccrtatcaygataccggacacaaaagaggctaaattcatctaaaacaaaggtggctcttttcttgggagcggctgataagtatgcagtctatagcccagggttttaagaaaatttttatttggctcacttgcatatcctgaagcaacaatgcatatcacacactaacagtgttgtttgaataatgcagtaggcactgatagatttgtgggtttctgatatttttgtttgttggtaatttttctgttgttgttcattttttcttgtttggtttctttttaggatatttaggatagtatgttgtg

SEQ ID NO: 79783 - DNA, 600 bp, Chicken  19866894371258_2
cactgtctcagtcagtcacgcttcaatctgattaggcaagaagtatattggatagtactgaaacaaaactatgaagagaaaaaaggaaaaagaaaagccataaaggaagaaactgtagagtaatacaacagagaaaagattgcttgcaatgctgaagtaatatttgatctgttatcttctgatttgtgaatatatttctagctttattttaatatctgtagtacccagcatggttcaaccacatgagatcctaaagacaaggcccaaccttgttatttcacagtattgataccrtatcaygataccggacacaaaagaggctaaattcatctaaaacaaaggtggctcttttcttgggagcggctgataagtatgcagtctatagcccagggttttaagaaaatttttatttggctcacttgcatatcctgaagcaacaatgcatatcacacactaacagtgttgtttgaataatgcagtaggcactgatagatttgtgggtttctgatatttttgtttgttggtaatttttctgttgttgttcattttttcttgtttggtttctttttaggatatttaggatagtatgttgtgagggag

SEQ ID NO: 79784 - DNA, 599 bp, Chicken  19866894371259_1
  misc_feature (1)..(35): n is any nucleotide
nnnnnnnnnnnnnnnnnnnnnnnnnnnnnnnnnnntgggagaagtttgcaagagctgcaaccgcgattcaggcagcactttgttgtgcagtgattcacttcctcgccccaaattaaaatgacctgggtcttttttttttgtttacattgtatttaatccaacaataattttctattaaataaacacacagtaaggtacagctgtaatttttgtagcttaaaacaattccagcagaaatatgaaagcgctgcacattgtatttgaagcaattttaaaaccttgatagtctttataaaaatraggaagcctgtatttaaaatggtgcggacattaagttgaatttgtcttgggacaataaatatatattaacattaaatgtactatttatttttaaacttactttaaagcatgcaggctcttcttcatcatggagcaaatgcatagctaattgtggtcagtatgctaaaaaaagtattttattcagagaatttgctctatcaagtaatgcaattackctctctgcacctgytacagtttctatatggaaattaataggaggcattactttcagagcaacctagcatatagaatagaaagtg

SEQ ID NO: 79785 - DNA, 600 bp, Chicken  19866894371259_2
cttaaaacaattccagcagaaatatgaaagcgctgcacattgtatttgaagcaattttaaaaccttgatagtctttataaaaatraggaagcctgtatttaaaatggtgcggacattaagttgaatttgtcttgggacaataaatatatattaacattaaatgtactatttatttttaaacttactttaaagcatgcaggctcttcttcatcatggagcaaatgcatagctaattgtggtcagtatgctaaaaaaagtattttattcagagaatttgctctatcaagtaatgcaattackctctctgcacctgytacagtttctatatggaaattaataggaggcattactttcagagcaacctagcatatagaatagaaagtgcaccatctagcaacagaatagatcttacgtgttactcactgaacaagtttcattacagttcatctacagcacgaacatcatggcaacgaaagcaggcactagagcctttctggaaggagcctgggaaacacttctgctatgaccacacatacgacaaacttgctaaacactgttttgatataaattaggagaataagaatcaataaaaaaaaaaga

SEQ ID NO: 79786 - DNA, 600 bp, Chicken  19866894371259_3
agcagaaatatgaaagcgctgcacattgtatttgaagcaattttaaaaccttgatagtctttataaaaatraggaagcctgtatttaaaatggtgcggacattaagttgaatttgtcttgggacaataaatatatattaacattaaatgtactatttatttttaaacttactttaaagcatgcaggctcttcttcatcatggagcaaatgcatagctaattgtggtcagtatgctaaaaaaagtattttattcagagaatttgctctatcaagtaatgcaattackctctctgcacctgytacagtttctatatggaaattaataggaggcattactttcagagcaacctagcatatagaatagaaagtgcaccatctagcaacagaatagatcttacgtgttactcactgaacaagtttcattacagttcatctacagcacgaacatcatggcaacgaaagcaggcactagagcctttctggaaggagcctgggaaacacttctgctatgaccacacatacgacaaacttgctaaacactgttttgatataaattaggagaataagaatcaataaaaaaaaaagattcaaatagagtca

SEQ ID NO: 79787 - DNA, 599 bp, Chicken  19866894371268_1
  misc_feature (1)..(133): n is any nucleotide
nnnnnnnnnnnnnnnnnnnnnnnnnnnnnnnnnnnnnnnnnnnnnnnnnnnnnnnnnnnnnnnnnnnnnnnnnnnnnnnnnnnnnnnnnnnnnnnnnnnnnnnnnnnnnnnnnnnnnnnnnnnnnnnnnnnnncccgtctcagggccatcatttctagggtggcaatgatgcaaggcaagaaggtgcctggtgccgaagctgctcgggctgttccatttatatttagctgacctacttgctgagcgggacaccgagggtcggggaatggctgacacttctggggcagcatttgtccccaktgggagcagcctgagtaggaaataaggaggcaaccctttggtgggagcaggggcacctggggtgttttcctgaaaagagctgcttctcatgtgctgctgcccttgccaagtggaagggacgtggtgttcccatccagcagcctccctggggtcccttggctctgagcgccgagctggcggggctggcacacctggggaaaggcacgtccccaaggtgggtcaaagcaaaatgcttgctgaggaaaaggaaattaattataggarctttgcttcactccaagcaactggaaaggctgatg

SEQ ID NO: 79788 - DNA, 600 bp, Chicken  19866894371268_2
aatggctgacacttctggggcagcatttgtccccaktgggagcagcctgagtaggaaataaggaggcaaccctttggtgggagcaggggcacctggggtgttttcctgaaaagagctgcttctcatgtgctgctgcccttgccaagtggaagggacgtggtgttcccatccagcagcctccctggggtcccttggctctgagcgccgagctggcggggctggcacacctggggaaaggcacgtccccaaggtgggtcaaagcaaaatgcttgctgaggaaaaggaaattaattataggarctttgcttcactccaagcaactggaaaggctgatgtttttttttctgttggctgataaactaattgtaaggacaaaagctcaacaaaagcaatgctcttaaatgctttcttaattaataattctcaataattagttgacgtcaawggccaataaacatttcaaagaaaggaagttgcagttaagtgcttgatacctctgttcctacaatggccacgcttgggttcttgaagctttgataaatccaacaataaaacacagggaaggccaaggctgatgtttgtgaaggaaaaaaatcatca

SEQ ID NO: 79789 - DNA, 600 bp, Chicken  19866894371268_3
gtggaagggacgtggtgttcccatccagcagcctccctggggtcccttggctctgagcgccgagctggcggggctggcacacctggggaaaggcacgtccccaaggtgggtcaaagcaaaatgcttgctgaggaaaaggaaattaattataggarctttgcttcactccaagcaactggaaaggctgatgtttttttttctgttggctgataaactaattgtaaggacaaaagctcaacaaaagcaatgctcttaaatgctttcttaattaataattctcaataattagttgacgtcaawggccaataaacatttcaaagaaaggaagttgcagttaagtgcttgatacctctgttcctacaatggccacgcttgggttcttgaagctttgataaatccaacaataaaacacagggaaggccaaggctgatgtttgtgaaggaaaaaaatcatcaggaaagcattacgcctgtggttaatgaggagggcagctgagcagccacgtggccttgcttccccccgctgcaatggcagctcccagtggatggcaccaagggtgcagctgagctcccccaaaccctggtgcccgagctgtgcccc

SEQ ID NO: 79790 - DNA, 600 bp, Chicken  19866894371268_4
gccaataaacatttcaaagaaaggaagttgcagttaagtgcttgatacctctgttcctacaatggccacgcttgggttcttgaagctttgataaatccaacaataaaacacagggaaggccaaggctgatgtttgtgaaggaaaaaaatcatcaggaaagcattacgcctgtggttaatgaggagggcagctgagcagccacgtggccttgcttccccccgctgcaatggcagctcccagtggatggcaccaagggtgcagctgagctcccccaaaccctggtgcccgagctgtgccccrcagccttgtgtgggcactgggggccactttcctggggcagcacgagggggcagagcagccagtgtctggggagtgctgctgctgagcatcctggatccatggagggcaccgctgtagtttcatcccgtgggcactcgctttgtgctgcctcctcctcctccttctccccctccttccatctactcctcctccgcctctgcctccacctccttcttctcctcctcctcatcttcttccttttccgcccagtaatccatccttagggcaatgtctcccagggcctgacagcgcagctaggtg

SEQ ID NO: 79791 - DNA, 543 bp, Chicken  19866894371276_1
attatgttggcccatggcgtcagaggtggatgttggtggtagggcagtagaggctgagccttcccaccaatattctgtagcatgttgttgctgtgtggcagatggaagcagacgggcactctgacacagtggcatctgatgtggaagtgcagatgaagcagaggtgtgtcactgaattcctccatgcagagaaaatggcacccactgacattcgtcaactcttgctgaacgtttatggacaccaaacagtggatgtcaacacagtgaaaattggactgcatgggcaacatttccctagcrgtgaygtaatcatagcagctgtgaagcagtgggtcacctccactgatgcatattattaaaagcaaggcatgcaggctctcgttcaacactggcaaaaaggcatagctactggtggtgactgtgttgaaaaatagcgttttgtagctgagaatgtgctctactgaatagtgtcattgtgctctttctatctgttgtagtttccatggaaataaacaggaggcattactttcagagcaatctatg

SEQ ID NO: 79792 - DNA, 538 bp, Chicken  19866894371276_2
gttggcccatggcgtcagaggtggatgttggtggtagggcagtagaggctgagccttcccaccaatattctgtagcatgttgttgctgtgtggcagatggaagcagacgggcactctgacacagtggcatctgatgtggaagtgcagatgaagcagaggtgtgtcactgaattcctccatgcagagaaaatggcacccactgacattcgtcaactcttgctgaacgtttatggacaccaaacagtggatgtcaacacagtgaaaattggactgcatgggcaacatttccctagcrgtgaygtaatcatagcagctgtgaagcagtgggtcacctccactgatgcatattattaaaagcaaggcatgcaggctctcgttcaacactggcaaaaaggcatagctactggtggtgactgtgttgaaaaatagcgttttgtagctgagaatgtgctctactgaatagtgtcattgtgctctttctatctgttgtagtttccatggaaataaacaggaggcattactttcagagcaatctatg

SEQ ID NO: 79793 - DNA, 600 bp, Chicken  19866894371281_1
atctagctgcttatttattaatagtaggatactcttttcacaaccactactctcttgacagagtctacaaaacataaatatgaataaagtcacttgcaagaatttactgctggagatgagtgaatattcctagagaaaaaaaaagtgcctggcacagtaatgtatagagcaagcgagactgatcccagatctgctgccaccgagatgtgtccggcttacagagataaaactgcaatgagggtccatgcctcagaattgttccacacatgtagcttatttttaaaggaagcctctgtatgrgraaaaaaaaaagtgccacttcggaaaggtgcagcagttcactcaatactctgaggacagagctgtagaaaggatgctggatgtggaagaatccgctccccaaaatctcataacctcgtcagcattaacatgaaactcatagatgccgtgtttacctggtgtgggtagggacttcacactaaatctaattaaatcgatgaacaaaaggactccggaatgtgcagggccatgaatggagcctgcctttcagaccatacaggctgcataattggggttttccttaggctttcagagcatttc

SEQ ID NO: 79794 - DNA, 600 bp, Chicken  19866894371281_2
ctagctgcttatttattaatagtaggatactcttttcacaaccactactctcttgacagagtctacaaaacataaatatgaataaagtcacttgcaagaatttactgctggagatgagtgaatattcctagagaaaaaaaaagtgcctggcacagtaatgtatagagcaagcgagactgatcccagatctgctgccaccgagatgtgtccggcttacagagataaaactgcaatgagggtccatgcctcagaattgttccacacatgtagcttatttttaaaggaagcctctgtatgrgraaaaaaaaaagtgccacttcggaaaggtgcagcagttcactcaatactctgaggacagagctgtagaaaggatgctggatgtggaagaatccgctccccaaaatctcataacctcgtcagcattaacatgaaactcatagatgccgtgtttacctggtgtgggtagggacttcacactaaatctaattaaatcgatgaacaaaaggactccggaatgtgcagggccatgaatggagcctgcctttcagaccatacaggctgcataattggggttttccttaggctttcagagcatttctc

SEQ ID NO: 79795 - DNA, 599 bp, Chicken  19866894371289_1
  misc_feature (1)..(68): n is any nucleotide
nnnnnnnnnnnnnnnnnnnnnnnnnnnnnnnnnnnnnnnnnnnnnnnnnnnnnnnnnnnnnnnnnnnnaataagatgattataaattgattcataacaggttagtgaagaatcacctgttgcactagagaacagaaagtcctttccaacttaactattctgagaacatcagtaagttttacacttttgaaaacaaagtattatgaatgaatcaaaccagcttactgatctatccctagggatttgcaactacatgctcctctatacaaaaattttgtagtaaagctacactttatccttygaaagaagtttatcccagaatgaaacatggtgctcttgtcttagaatttagtaatcctatctttcctgtacaattgtgcagccaaatgttatgctcataaaaaaattgtccaaaaagtgcacgcagtttcacacttcatagaagtaaatagtaaaataatacttttcttacagcatagcacatattctggattttttccataaataaaaccacatttattaactttaatttggtcgtaaattattcgctataattctgaacatccacctaaagttttaatttaaagattcacaatccag

SEQ ID NO: 79796 - DNA, 529 bp, Chicken  19866894371289_2
ccagaatgaaacatggtgctcttgtcttagaatttagtaatcctatctttcctgtacaattgtgcagccaaatgttatgctcataaaaaaattgtccaaaaagtgcacgcagtttcacacttcatagaagtaaatagtaaaataatacttttcttacagcatagcacatattctggattttttccataaataaaaccacatttattaactttaatttggtcgtaaattattcgctataattctgaacatccacctaaagttttaatttaaagattcacaatccagttgcagtatttgggsttactgtgccagtttaaactgtaggcacagagtgtgcagttatgaacatccacttcctctgaaatacagcatcagacttttacaaatgccagctataagctgcagcagtgaaacacgtctwttcaagacgtgtatcaagaagacatagctcaagtttaaataacaaaatgtgacatttctctttctacaagtggctggactgcacctattgcccatcctgttactgagg

SEQ ID NO: 79797 - DNA, 408 bp, Chicken  19866894371289_3
tcatagaagtaaatagtaaaataatacttttcttacagcatagcacatattctggattttttccataaataaaaccacatttattaactttaatttggtcgtaaattattcgctataattctgaacatccacctaaagttttaatttaaagattcacaatccagttgcagtatttgggsttactgtgccagtttaaactgtaggcacagagtgtgcagttatgaacatccacttcctctgaaatacagcatcagacttttacaaatgccagctataagctgcagcagtgaaacacgtctwttcaagacgtgtatcaagaagacatagctcaagtttaaataacaaaatgtgacatttctctttctacaagtggctggactgcacctattgcccatcctgttactgagg

SEQ ID NO: 79798 - DNA, 600 bp, Chicken  19866894371291_1
tttgctgctgtgtccaggctatgagtgcaacatggcacagagctcatgtgagttccaagtctgctccaagtccctgatctaggaacagataaagggagaaaatgttcagttatttttaattattcttttatttcttcgacactgtttctgaccaaacactcagcagatgacatggtagtcactgaaagaataaatgaggtatgttctgtatgctgaagggctgtgaggtccagattggtttgattgaatacgtggaataatagaggtgaataaaacattgaattcttaaaaaaaaaagtmactgaagtgctctaagctgaccctcctcccagtgctacaatgaagggtacccagtggcacagaagattcaaacaaggcagtcacaagcacgtgtctgtgctcactrttgccacaatagtacaaacccagagtgcttctactgacttcattaaaatgagtcattctggggaatcctgragatcgtatgatctaagagattacttctaaaagccttagttgaaattcctggcttactaaataatgcactccaagggcaaaaaggaattagcagcaatatagctgcatgtgctacctagtgtt

SEQ ID NO: 79799 - DNA, 600 bp, Chicken  19866894371291_2
cagttatttttaattattcttttatttcttcgacactgtttctgaccaaacactcagcagatgacatggtagtcactgaaagaataaatgaggtatgttctgtatgctgaagggctgtgaggtccagattggtttgattgaatacgtggaataatagaggtgaataaaacattgaattcttaaaaaaaaaagtmactgaagtgctctaagctgaccctcctcccagtgctacaatgaagggtacccagtggcacagaagattcaaacaaggcagtcacaagcacgtgtctgtgctcactrttgccacaatagtacaaacccagagtgcttctactgacttcattaaaatgagtcattctggggaatcctgragatcgtatgatctaagagattacttctaaaagccttagttgaaattcctggcttactaaataatgcactccaagggcaaaaaggaattagcagcaatatagctgcatgtgctacctagtgtttttgttattgtaatgggtttacagtttcctttgcgtttgccctgtgttattttttaagctaatttgggtaactaagtcttttaataccatttgtctaggtgggcca

SEQ ID NO: 79800 - DNA, 600 bp, Chicken  19866894371291_3
gtcactgaaagaataaatgaggtatgttctgtatgctgaagggctgtgaggtccagattggtttgattgaatacgtggaataatagaggtgaataaaacattgaattcttaaaaaaaaaagtmactgaagtgctctaagctgaccctcctcccagtgctacaatgaagggtacccagtggcacagaagattcaaacaaggcagtcacaagcacgtgtctgtgctcactrttgccacaatagtacaaacccagagtgcttctactgacttcattaaaatgagtcattctggggaatcctgragatcgtatgatctaagagattacttctaaaagccttagttgaaattcctggcttactaaataatgcactccaagggcaaaaaggaattagcagcaatatagctgcatgtgctacctagtgtttttgttattgtaatgggtttacagtttcctttgcgtttgccctgtgttattttttaagctaatttgggtaactaagtcttttaataccatttgtctaggtgggccaggaaagcttttgttggaattacagacttgtgagtgttagaatgttagaatagacagtggtgagatggagaa

SEQ ID NO: 79801 - DNA, 600 bp, Chicken  19866894371292_1
tgtctgatgatctgcctgaggccttgtgctgctctccgtgtatctccatcctacccaaataacacggtctggtgtggtcctcttccttgcttgctcctaggggacaaggtgcacgtgtgagattcaggccaggttggaaaggacctcctcagggagaggggaaggtagtgctgagattttataaaagaggggaaaaaagacaaaaaagaccctgatgggctttttttccactttttttttctaatttttatttttggtggccttttcatttcctcccatatttgaatgtctcctcatcarttatttctcccattaacagccaaagcgctcccaccagcttcgggagaaaaacaaaagcctgtggattgaaatacagtgctctccagtcatccgagacacagaaggctttttaatattttttaataccatatccttacagatctgctaatttacacaatatttatttaaatcccagtgattttagaggcatttcatagaatcatagaatagcttagaatggaggggaccttaaagatcatccagttctaacctcctgccaagggctggttgcccccccaccagctcaggcagcccagagcc

SEQ ID NO: 79802 - DNA, 600 bp, Chicken  19866894371294_1
ccaaaattctcttgtacccctcagcttcagctgacttgccttacctggggaaatgtggtgtcaaaaggaactgcgagataggctttgtaagatggtcagtgtttgaccagtgagtggcaaaatgcttttaacatagagtagttaagagcaaaaagtgtctctattgtcctgttaagcaatgaagaaaacaaaactacaaatgttggaagcagcagtgaattttaccttaacactcatccaatgaaagggttttctttgctcctgcctggccagaagcaatgagtatcattaatcattatwgaaattgaactgtgttggtcctaatggatgtgctagaacacagcttttttttgaagcaagacctctgttttcagtaaagttaaaagggggggggggggggggtaccaggcttcttcctcactcaaacatggcagtgtgacatcatacagaaatgaacagtatttgtttgcatatgcacaaatacacactgtgtatgcctctggatgcaatgtatgtattttaccataatgatatgcgtttatagagtaaacattttatttcttctcatataaatcagaactagcgaaaggattttattac

SEQ ID NO: 79803 - DNA, 600 bp, Chicken  19866894371305_1
aagctggtgagcctcacctctgtgcttggaagatcatggagcaaaccctcccggaagagacgttaaggcacatgagggatgagtgggtgatctgagacagccagcatcactttaccacgggaaggtcgtgcctgaccaatctcgtggccttctgtgatggagtgatggcatcagtggacaaaggcaaggcgacagatttgatctacctgaacttctgcaaagacattgacatggtcctccacaccatcttcttatctttaaactggagagatatggatttgaaaggtgcataaggaattkgttgggaggtcgcagtcagagttgtcgtcaatagccctacatctgggtggaggctggtgactagtggaatcttccaggggtctgtcttggtaccagtactcttcaacatctttatgagggacataaatgatggaatcaagtgcagcctcagtaagtttgctgataacatcaagctgagtggtgcagttgatacagcagaaggagaggatgccatccagagggaccttgataaactcaaacagtgggccctaatgaggttcaacaaggcaaaacaatgttttgcacttgggtcagggtaat

SEQ ID NO: 79804 - DNA, 600 bp, Chicken  19866894371311_1
aagtcagaaaggaaaaatacagcgtggtgaaaaggccaaggaagaacaaaaacgcctgggcaaggcccagcaagaggaagcaaggatgagtagagcctgcagaagggtttgcactgcctctgaagagaaatgcctgatgtcggataaagccgggaacccaacgggtggggggacaggagatgctaccttgaggaatctgcctattacaggattaggggttacagtccctctctctgaggacacagaatgccagactctggcccgaggggtttaggtggtgacatctgtccaggcgtgtcrgtaggaactctgcaatgcacagaggggaatactgtccaaacctgtggtatctaaacataggtgtcatgaaaatattagatatttctgtggaagagaaaaaaatacagaggaacatgaagccaagacacacgtttctttaaggagtaaaatgtgcccctccaacactgtgattctagagcatatttataccgtgtttaaaaaacatttgtcaagcatatcgaaaacccagaagttccctgtcacacagcttaattccttatattccgtctatatgcatatatggggccagtttgttagggg

SEQ ID NO: 79805 - DNA, 600 bp, Chicken  19866894371313_1
gtggaagagtcagtaagctgcaggggtacgcctgttttagcaaagcttgacatgcgtagacctcatttttactggctgaaatgcttcttccccagttctttaacataaacaaaaatcaacgtttaggactgatgtggagaagggaaaaaatctcaactgtagagttgttaccatgtgctctggccagcagcaggcattgctgcaggctgattacagccagtaggaaagacaaggcattcctgagtgcaactgcaaggattcagagcctggagttagagttctgaccactagcagctcccyctgccttttcatccatctcacctcttgctcttgacatatcatgatggtgtcaggttcagagaaatgaattgggagcccattttttttttccccgagtgcagataaaagttttacagtttcttcagcacagccaatagttcagatactggacagagttgaaaacagtgtgtactgatgtgttttcacatgagacaagctggtgactcccactgtctgcttgtgtgagcccatattccccccagtgtgttagtggtaagtttggagcagtcacagtgtgagtgatggaggtgttgtagggtc

SEQ ID NO: 79806 - DNA, 600 bp, Chicken  19866894371329_1
cagtgtatgtctgttgttgataactagttcacagccaggctcattcttgttctaaagctcctatgcttatactttcgtattcattgctgacatttctgcatgtgctgttttattcttccttgtcctgtatcctttctacctattgaaactataaatattttcaaactaaaaatacacattttttttccttctgtcagattatggcacacatactcttgctgatccgttacatggtattctgccaaacaaaactggtaaaaggaaacataacagaaaatgagttttgagaagcagggtaastgtttgttaagcttatttttgttgttattattgtgggaaatagtagcttaagttaactttttgtgtgagaatcttttagctgactttgagtgtagcataactggcttatacaaatctgttcaacatgtggccactcttgtatgaatcattttctaccggtggctgatgtgaagaaaactggctgttgtaagcaaatgacgtgtattgctgaattttaaaacttcccagcaaagcaccacttaaaatctgtcagaacatatatggacatagctgtacaatccataacctctctgagcatgt

SEQ ID NO: 79807 - DNA, 551 bp, Chicken  19866894371331_1
aatgtaatacggcttgggtgattaaaactgtcaagtaatattgcatattgaatggagactagtttgtcattaccatgaggattagaaagtgtaatcttcattaaaacatcagtggatttactgctgtttgccttggaacaagatatttgctcagaattttctagttagtaaatttagcaagtgcagggcaatttaagagagcagagctggatagtgtcatagcttatcctgcaggaaaggtgttggaacgatcctgtaagtctgacagatgcagtggatccaattctattggtctggatygtgtgcagtcacataaatgtattaatcaccatcacttaaattggcttcccttgtctcagctgtaaggggagacccagtgtttttgtgctgtgtaaggattatcattttctgtccctaaatgtgttatgtgtacatatttgtgtattactaaagcctgtcctttgtgaggcctgaaacacattttgggtaaggctctcatctgtcccacagagacttctttcttctccttttctaacaggtgctgtattttt

SEQ ID NO: 79808 - DNA, 599 bp, Chicken  19866894371332_1
  misc_feature (1)..(33): n is any nucleotide
nnnnnnnnnnnnnnnnnnnnnnnnnnnnnnnnnttccccaagtataattctagttagttcacagctcctctcttgcctgcagctaccagaagtaaactgcttggggtttatctgaactgtaagaaaagcagtcttttcccttttaattctgacttcatatacgaaagtatcataaatctggaacgtgtatttctattaattctaggacttaatgtcactttgttttctgagatgaactaccttgaaacaaatttcagtcacgctagtgcaagtaaaccttgcaaaaagtcttctaaaagsagatgagacatacagtctagtgtaccagaaagcaaacagcttgcactcaaaaaccttctctgaattcttgggtgagctttgagataatattgcagctttagcacctttgatactcagtgatcatttcatcaaaattgaataatcaacaaaagtaattttattttcgaaggtataaaatagtactattatagcattaaatcagtactaagtgcgtgaagrgcataaaaatttcatacagtttttatgttctggtatcattaatgttgtctgggattttcttaaactcaagaacatttcaa

SEQ ID NO: 79809 - DNA, 600 bp, Chicken  19866894371332_2
ttgttttctgagatgaactaccttgaaacaaatttcagtcacgctagtgcaagtaaaccttgcaaaaagtcttctaaaagsagatgagacatacagtctagtgtaccagaaagcaaacagcttgcactcaaaaaccttctctgaattcttgggtgagctttgagataatattgcagctttagcacctttgatactcagtgatcatttcatcaaaattgaataatcaacaaaagtaattttattttcgaaggtataaaatagtactattatagcattaaatcagtactaagtgcgtgaagrgcataaaaatttcatacagtttttatgttctggtatcattaatgttgtctgggattttcttaaactcaagaacatttcaaagcctgtaactcctactggaatctattcctatatctgggctgagagctggaggtaattttaaactgtgttacagatgccaggtacataaaacgaagttttacttttcccttgggagagatgagtatcgctatctgctccattttagcttacttggcacttgcatctatagcaagaaaaggaagaagttaactgcattatctaggcctgacctaaatgtgc

SEQ ID NO: 79810 - DNA, 600 bp, Chicken  19866894371332_3
tatcgctatctgctccattttagcttacttggcacttgcatctatagcaagaaaaggaagaagttaactgcattatctaggcctgacctaaatgtgccattatttttccaggttgagaaaaacatgcagtttttaaaagaaaaaagctgagagcccttggcagcttactgatttgtttactttcttttaacactattgcaagacaaaagttgtgcagatttcatttgagtctacaaagcaagtaaataaacaagaacctacaagatgtgttcagactgctcaataaaaagcaaattttcwaactctcttccctttctgcatggtaatagtagctaaagttacatggctgagtctactgaattggcaattccatttggaagttaaggtatgtaaaaatcaatctgactaatgaattttttacccctatgatcagttaatttgtagcgggttcttcgttgttgcttttatttgtttttcctttttttggaagaataaggactgcaagatacttcattattctggattacctttctcacatctgagctctttggttctgttgtccaagttataattctagacacagcaagtcttgtctcacta

SEQ ID NO: 79811 - DNA, 599 bp, Chicken  19866894371333_1
  misc_feature (1)..(173): n is any nucleotide
nnnnnnnnnnnnnnnnnnnnnnnnnnnnnnnnnnnnnnnnnnnnnnnnnnnnnnnnnnnnnnnnnnnnnnnnnnnnnnnnnnnnnnnnnnnnnnnnnnnnnnnnnnnnnnnnnnnnnnnnnnnnnnnnnnnnnnnnnnnnnnnnnnnnnnnnnnnnnnnnnnnnnnnnnnnnnccatctcatcctaaaagtaatgccaagaagattttgtgtgagtccttcaatagcttgtgtctctctgttgacagcttagctttagccagagtattcagtgaacactttaacctgttacagctgcgtwagaagcacttccagcttcttttccccttcctgtattgctgttcactctcagcatgtgtagctgtttacatggctatatgacaaataaatttggagagtggagctggctgaaaatagccaattctttgtatggttttatttccagctggatttatcccagccttctcatgtatggctgtccaagggctgtgactggtacaaagggaaacgaggatggaaattagcagccagaagtgtgggggaggacatgatagcttcttttggcagatgctctggtttttgcagtttaaatttcttggt

SEQ ID NO: 79812 - DNA, 600 bp, Chicken  19866894371333_2
tccagctggatttatcccagccttctcatgtatggctgtccaagggctgtgactggtacaaagggaaacgaggatggaaattagcagccagaagtgtgggggaggacatgatagcttcttttggcagatgctctggtttttgcagtttaaatttcttggtgagctatagtctcaggccttgtagatgtttttagtgctctgccatttttaagagtagaaaagtttgagacttgtaagacttgagatttgagtgaaaaatttgaaactcattttcaaatgaggaacttctgttttgctgtrtatttcctgctgtgacaatgcaggatttttttacatccttcatgacttaaatttcagacctccaaaactagaaaatggtcgtaaatggcaaataagtaaataaatgtcatgcagtaatttatattgtaagcaggacactgtataatccatatatacatacataattcctgaatcttcaaaatgccagcctgattttgtatagtgccaagcttaaactatgggctgagtggtattgtatggttactagttggactaatttagacaccgttctcctgaagaagggaatayataacatgttat

SEQ ID NO: 79813 - DNA, 600 bp, Chicken  19866894371333_3
tgttttgctgtrtatttcctgctgtgacaatgcaggatttttttacatccttcatgacttaaatttcagacctccaaaactagaaaatggtcgtaaatggcaaataagtaaataaatgtcatgcagtaatttatattgtaagcaggacactgtataatccatatatacatacataattcctgaatcttcaaaatgccagcctgattttgtatagtgccaagcttaaactatgggctgagtggtattgtatggttactagttggactaatttagacaccgttctcctgaagaagggaatayataacatgttattctcatataataagaagacagagccagcagcgacgtgaagttcagcaaaggaaattctaggtatactgaacctggaatggaccaatgccagacaggcacaggctgggagacagacagctggagagcagttcagtgggaaggaacctgggggttgctggtgacagcatgctcaacatgagccaccagtgtggcctggttgccaagtggcaaaccacactgtggggtgtattaaacacagcatagccagccagtcgaaagaggtgattctcccactatatttagtgttag

SEQ ID NO: 79814 - DNA, 345 bp, Chicken  19866894371333_4
ggaatggaccaatgccagacaggcacaggctgggagacagacagctggagagcagttcagtgggaaggaacctgggggttgctggtgacagcatgctcaacatgagccaccagtgtggcctggttgccaagtggcaaaccacactgtggggtgtattaaacacagcatagccagccagtcgaaagaggtgattctcccactatatttagtgttagtgtaacctcaccaacactgaagtagtatagttctgtgcaaagaaatttttatactgcaggctccactatataactttatgttaaratacatgaaagtgccctggaggaggggaacagagctggtaatggg

SEQ ID NO: 79815 - DNA, 600 bp, Chicken  19866894371335_1
gatatgttctatagggtgtaagagcaatcacattaggaaaatcacactgtttacaatgcaaacaaagaaaaaagtgaattggtttgtgtcattttttacaaaaaagggtacacagcttctgcaagaaaagaagattaaggtaatcaatacgtacttttgataatctttttccaatggacttaacatttctatattaaaaactgtttctttcaaaatttcaggatcaggtaatttgttagcagttgcaaagtggaaattagtaactttgtggactcctagattcagtgctattacatactwcttgtttcagcttttgaggaccaatccctgcaagtggtttagtaatgagtaggcagtccttaactacagaactctcaccattctactgccagcagcatctacataaactaatgcaaattgtgtatgtgaaagtgtaaggtttgcgtggcacgcatgaaaatttgcctcaactgcctatgaacagagaaattgaaatccatttataattttattttttaatttaaaatctgttaagttaccagcatttctaatttttttttttttacagtaggtacttctcagcaaactgtgtaacacttt

SEQ ID NO: 79816 - DNA, 599 bp, Chicken  19866894371344_1
  misc_feature (1)..(223): n is any nucleotide
nnnnnnnnnnnnnnnnnnnnnnnnnnnnnnnnnnnnnnnnnnnnnnnnnnnnnnnnnnnnnnnnnnnnnnnnnnnnnnnnnnnnnnnnnnnnnnnnnnnnnnnnnnnnnnnnnnnnnnnnnnnnnnnnnnnnnnnnnnnnnnnnnnnnnnnnnnnnnnnnnnnnnnnnnnnnnnnnnnnnnnnnnnnnnnnnnnnnnnnnnnnnnnnnnnnnnnnnnnnnnnntttaaaatatgggatttctggaagaaaagtaagtaggtgttaaaataggactcacatggcagttttcctaataaaakattctgtaacttcgttaaagtttttgatagagcgtgcaggtaacattttacttctgaatcaattctgacataatcaaggcaatcatatttgttaacaggaagatttcaaagaaaattatatcatcaatttatagtattcactgacttacagtgtttagtgagcccttagtacacggctttcatttttctggagaatttatgaatattctaggataaagcttacatattatttttacaaaaatagaatcaactgacaacatttatttttatttttccctggttgcttcattttagtttct

SEQ ID NO: 79817 - DNA, 600 bp, Chicken  19866894371347_1
gcagatataaggtctgtgtgcaaaaataccacctcatttaacccctttctgccataccccagaatttttgggatatctgggagtgataaatctcagtcaaaaaactccttttgggatagtagtcaaggcagccaggatttcacttccccaattgcatgtcttcaccatacacccttaggcactactgccttccccagcttaggtagatcaattaatttgttcacatgagcatgccctaaacagtctgagtcaaaattagccagatgagctaacacagctaaaatggcaggccttcactamccagryagcactcacaagagcagccttgctagcagattccatgggaaaggatcttacaaggagaggtagccagggcaacagcaaaaaggcacaaaatgtacttactacaggtgggaaggccaagctccagagagctaagttttgctaaatcagtgaatgtagtgcctaaacaacwctaacaacctagaaccaaccaaagatgaagagcaggcacagaatacatttgtgacttttggagatcaggcctaaaatacatatttaccactaatgctgtctcgggtagatcatgctctccacagt

SEQ ID NO: 79818 - DNA, 600 bp, Chicken  19866894371347_2
tataaggtctgtgtgcaaaaataccacctcatttaacccctttctgccataccccagaatttttgggatatctgggagtgataaatctcagtcaaaaaactccttttgggatagtagtcaaggcagccaggatttcacttccccaattgcatgtcttcaccatacacccttaggcactactgccttccccagcttaggtagatcaattaatttgttcacatgagcatgccctaaacagtctgagtcaaaattagccagatgagctaacacagctaaaatggcaggccttcactamccagryagcactcacaagagcagccttgctagcagattccatgggaaaggatcttacaaggagaggtagccagggcaacagcaaaaaggcacaaaatgtacttactacaggtgggaaggccaagctccagagagctaagttttgctaaatcagtgaatgtagtgcctaaacaacwctaacaacctagaaccaaccaaagatgaagagcaggcacagaatacatttgtgacttttggagatcaggcctaaaatacatatttaccactaatgctgtctcgggtagatcatgctctccacagtagcac

SEQ ID NO: 79819 - DNA, 600 bp, Chicken  19866894371347_3
ataaggtctgtgtgcaaaaataccacctcatttaacccctttctgccataccccagaatttttgggatatctgggagtgataaatctcagtcaaaaaactccttttgggatagtagtcaaggcagccaggatttcacttccccaattgcatgtcttcaccatacacccttaggcactactgccttccccagcttaggtagatcaattaatttgttcacatgagcatgccctaaacagtctgagtcaaaattagccagatgagctaacacagctaaaatggcaggccttcactamccagryagcactcacaagagcagccttgctagcagattccatgggaaaggatcttacaaggagaggtagccagggcaacagcaaaaaggcacaaaatgtacttactacaggtgggaaggccaagctccagagagctaagttttgctaaatcagtgaatgtagtgcctaaacaacwctaacaacctagaaccaaccaaagatgaagagcaggcacagaatacatttgtgacttttggagatcaggcctaaaatacatatttaccactaatgctgtctcgggtagatcatgctctccacagtagcact

SEQ ID NO: 79820 - DNA, 600 bp, Chicken  19866894371347_4
taggcactactgccttccccagcttaggtagatcaattaatttgttcacatgagcatgccctaaacagtctgagtcaaaattagccagatgagctaacacagctaaaatggcaggccttcactamccagryagcactcacaagagcagccttgctagcagattccatgggaaaggatcttacaaggagaggtagccagggcaacagcaaaaaggcacaaaatgtacttactacaggtgggaaggccaagctccagagagctaagttttgctaaatcagtgaatgtagtgcctaaacaacwctaacaacctagaaccaaccaaagatgaagagcaggcacagaatacatttgtgacttttggagatcaggcctaaaatacatatttaccactaatgctgtctcgggtagatcatgctctccacagtagcactttcactgcattatccctatggttttcatgcatccctctccacaactctcccagatcacttttaatgctgtgaaaagatttgcacattgtttttctttccccagcatccttgttcaccacctgcacgcaggcctgctgaaaatgagaaaagagatttcacagtttgtcta

SEQ ID NO: 79821 - DNA, 600 bp, Chicken  19866894371353_1
taatgaaaagtaaacataccatttaaaatgcagatcagaatcccaagtacatgctggtcttgctaagtggaactactggtcagtatttcggacgtcaataattcgatcagcttgctttaatgtacttagaactgcaaaattacaggttcatctcaaagatattttgcattatggttaagccttcaggtaagatcactctttcttaaagagccaaatgagctctagacaaaattcctgatggagaatctaacacagaatatgctttacgaaatcacagaattgcaggggttggaagggacmtcaaaagatcaagtccacccccctgctaaagcaaaygtgtcatcatacaaccttagaagarggcagataggttctattatatgtacttaaagacaaatttatcatcaaaaatgaaagtggtagtactacttaatattgctcatctgcaaagtttggagtgcctatgatactacttgaaatttttagggttctatgaggaactcagtttccaaggcctgcctctgggttcctgatttgtagacacattaagtgaygaagattctgatactagaaaggatgcataaagagctrttctgtrtt

SEQ ID NO: 79822 - DNA, 600 bp, Chicken  19866894371353_2
agaatcccaagtacatgctggtcttgctaagtggaactactggtcagtatttcggacgtcaataattcgatcagcttgctttaatgtacttagaactgcaaaattacaggttcatctcaaagatattttgcattatggttaagccttcaggtaagatcactctttcttaaagagccaaatgagctctagacaaaattcctgatggagaatctaacacagaatatgctttacgaaatcacagaattgcaggggttggaagggacmtcaaaagatcaagtccacccccctgctaaagcaaaygtgtcatcatacaaccttagaagarggcagataggttctattatatgtacttaaagacaaatttatcatcaaaaatgaaagtggtagtactacttaatattgctcatctgcaaagtttggagtgcctatgatactacttgaaatttttagggttctatgaggaactcagtttccaaggcctgcctctgggttcctgatttgtagacacattaagtgaygaagattctgatactagaaaggatgcataaagagctrttctgtrttttaatttattctcagtcctggggaaaaaaagtgttt

SEQ ID NO: 79823 - DNA, 600 bp, Chicken  19866894371353_3
gctaagtggaactactggtcagtatttcggacgtcaataattcgatcagcttgctttaatgtacttagaactgcaaaattacaggttcatctcaaagatattttgcattatggttaagccttcaggtaagatcactctttcttaaagagccaaatgagctctagacaaaattcctgatggagaatctaacacagaatatgctttacgaaatcacagaattgcaggggttggaagggacmtcaaaagatcaagtccacccccctgctaaagcaaaygtgtcatcatacaaccttagaagarggcagataggttctattatatgtacttaaagacaaatttatcatcaaaaatgaaagtggtagtactacttaatattgctcatctgcaaagtttggagtgcctatgatactacttgaaatttttagggttctatgaggaactcagtttccaaggcctgcctctgggttcctgatttgtagacacattaagtgaygaagattctgatactagaaaggatgcataaagagctrttctgtrttttaatttattctcagtcctggggaaaaaaagtgtttttggctttgtcttgaaactgcgtaa

SEQ ID NO: 79824 - DNA, 573 bp, Chicken  19866894371353_4
gaatatgctttacgaaatcacagaattgcaggggttggaagggacmtcaaaagatcaagtccacccccctgctaaagcaaaygtgtcatcatacaaccttagaagarggcagataggttctattatatgtacttaaagacaaatttatcatcaaaaatgaaagtggtagtactacttaatattgctcatctgcaaagtttggagtgcctatgatactacttgaaatttttagggttctatgaggaactcagtttccaaggcctgcctctgggttcctgatttgtagacacattaagtgaygaagattctgatactagaaaggatgcataaagagctrttctgtrttttaatttattctcagtcctggggaaaaaaagtgtttttggctttgtcttgaaactgcgtaaacagcatcactgttgctaatccacttacatggatgggtaggattgctgctattaaagcagtatctaatttagacgaagggtaaggaatcgagctttgatagaaaatctggttagtgcctctcggttgaagagcatcatggaagaattataatattgctatctgaca

SEQ ID NO: 79825 - DNA, 536 bp, Chicken  19866894371353_5
gaagggacmtcaaaagatcaagtccacccccctgctaaagcaaaygtgtcatcatacaaccttagaagarggcagataggttctattatatgtacttaaagacaaatttatcatcaaaaatgaaagtggtagtactacttaatattgctcatctgcaaagtttggagtgcctatgatactacttgaaatttttagggttctatgaggaactcagtttccaaggcctgcctctgggttcctgatttgtagacacattaagtgaygaagattctgatactagaaaggatgcataaagagctrttctgtrttttaatttattctcagtcctggggaaaaaaagtgtttttggctttgtcttgaaactgcgtaaacagcatcactgttgctaatccacttacatggatgggtaggattgctgctattaaagcagtatctaatttagacgaagggtaaggaatcgagctttgatagaaaatctggttagtgcctctcggttgaagagcatcatggaagaattataatattgctatctgaca

SEQ ID NO: 79826 - DNA, 529 bp, Chicken  19866894371353_6
cmtcaaaagatcaagtccacccccctgctaaagcaaaygtgtcatcatacaaccttagaagarggcagataggttctattatatgtacttaaagacaaatttatcatcaaaaatgaaagtggtagtactacttaatattgctcatctgcaaagtttggagtgcctatgatactacttgaaatttttagggttctatgaggaactcagtttccaaggcctgcctctgggttcctgatttgtagacacattaagtgaygaagattctgatactagaaaggatgcataaagagctrttctgtrttttaatttattctcagtcctggggaaaaaaagtgtttttggctttgtcttgaaactgcgtaaacagcatcactgttgctaatccacttacatggatgggtaggattgctgctattaaagcagtatctaatttagacgaagggtaaggaatcgagctttgatagaaaatctggttagtgcctctcggttgaagagcatcatggaagaattataatattgctatctgaca

SEQ ID NO: 79827 - DNA, 600 bp, Chicken  19866894371380_1
ggataaaactacatctccatctactgcacatacattcaagcagctattctgccatctggaggatttttctgatgttccataaaagctctatccaaacaccatccactttggtctgcatttacaagacagtggtcgagtttctgagcaataaatgctaatttatgttaatgatgcatttctcttttattagatttctaagagtttcatgctttttggttgaaaatttctatctatcaatctgtataatggcaggttgactaacatctctatgccctgtgtagcacaaaatgtacctggtgyttctgtgtaagtacatgatgctcataaacctaccaaaactttactcacctttcattaacattttctatcaaccactttagattttcaaactggacactaattggaccagttagcccaaaaggtgctacatttgcatgccctgatgactcctttgtttttttgaagaacatcaagggcsctaactgcctgctattgtttttatatattccacagagcatacagagatcatcaggaattacatgcaggaggtgcatctggagggccataggctttctacttcaagctgtctaaaataaacag

SEQ ID NO: 79828 - DNA, 600 bp, Chicken  19866894371380_2
ctcttttattagatttctaagagtttcatgctttttggttgaaaatttctatctatcaatctgtataatggcaggttgactaacatctctatgccctgtgtagcacaaaatgtacctggtgyttctgtgtaagtacatgatgctcataaacctaccaaaactttactcacctttcattaacattttctatcaaccactttagattttcaaactggacactaattggaccagttagcccaaaaggtgctacatttgcatgccctgatgactcctttgtttttttgaagaacatcaagggcsctaactgcctgctattgtttttatatattccacagagcatacagagatcatcaggaattacatgcaggaggtgcatctggagggccataggctttctacttcaagctgtctaaaataaacagctcacaaaatctcctgcatttctattttcgctctcccagtaaaagagcagtttcactctttaagcatttttttattcctgagaactgtcacttagtgtacagacagctggcctggagctcagaagatggatgcccctcctgcctttctcactgccctggtgaacaactgtttgcatgc

SEQ ID NO: 79829 - DNA, 600 bp, Chicken  19866894371387_1
ttctaaattagaaaaaaaaaggaccataatcactcctggtctgcgaagggttcagagcacttcataaaactgtctagaacttaccttccacaaacaacaaaagacaaagaacagccgaattcaccaaacataaaagaagagatgaacaacagacatctcacaggtcttgttacaggctgccagtataccaaagttaacatcagtggtcccggtcatgggagtatttttagctgaagagttaaacctggagaagagctcaatcctttacactgcacatgagacacaatctgggaagcaccraaagcgaacagaggcactgccaggaaatgctgggkggtggtaaatctaagactatgcagcaatgtatctgaaccatcagctgcagaggcttcttcatttatagccttttttaaaatagcttttagaaaagttacatttctcctcctgccagctcatgccaaagaaacccataggcagagcagtagtactagactggcgcagtcttctggaattgcattatttaaggatgagaaaaacagaaggtaagacatatcaaaccacaggcagacaaaatactactgtaagagatccaatttctaa

SEQ ID NO: 79830 - DNA, 600 bp, Chicken  19866894371387_2
ctggtctgcgaagggttcagagcacttcataaaactgtctagaacttaccttccacaaacaacaaaagacaaagaacagccgaattcaccaaacataaaagaagagatgaacaacagacatctcacaggtcttgttacaggctgccagtataccaaagttaacatcagtggtcccggtcatgggagtatttttagctgaagagttaaacctggagaagagctcaatcctttacactgcacatgagacacaatctgggaagcaccraaagcgaacagaggcactgccaggaaatgctgggkggtggtaaatctaagactatgcagcaatgtatctgaaccatcagctgcagaggcttcttcatttatagccttttttaaaatagcttttagaaaagttacatttctcctcctgccagctcatgccaaagaaacccataggcagagcagtagtactagactggcgcagtcttctggaattgcattatttaaggatgagaaaaacagaaggtaagacatatcaaaccacaggcagacaaaatactactgtaagagatccaatttctaataaagcagaaacaatctaatcaagtagtcacaggt

SEQ ID NO: 79831 - DNA, 600 bp, Chicken  19866894371387_3
tctgaaccatcagctgcagaggcttcttcatttatagccttttttaaaatagcttttagaaaagttacatttctcctcctgccagctcatgccaaagaaacccataggcagagcagtagtactagactggcgcagtcttctggaattgcattatttaaggatgagaaaaacagaaggtaagacatatcaaaccacaggcagacaaaatactactgtaagagatccaatttctaataaagcagaaacaatctaatcaagtagtcacaggtaatctgaagagatttgtacttctggagatawactctctactcacttctaacaacacctgcaacctctctgcaattccctgcctccaagaaattgcctatcattacaggagagccctggaactccagatccctaaaaattggagtagattactatagaatcataatcacatcatggattttcagtttttagtttgcatttcaaaaagtgtgtttgctcagacattgtgccatacacttaccattaaaaaattcagtctttacctgactttcctcatggccttttccattttctaactttgagacaggcttaggctttcttagctttaagttg

SEQ ID NO: 79832 - DNA, 599 bp, Chicken  19866894371391_1
  misc_feature (1)..(165): n is any nucleotide
nnnnnnnnnnnnnnnnnnnnnnnnnnnnnnnnnnnnnnnnnnnnnnnnnnnnnnnnnnnnnnnnnnnnnnnnnnnnnnnnnnnnnnnnnnnnnnnnnnnnnnnnnnnnnnnnnnnnnnnnnnnnnnnnnnnnnnnnnnnnnnnnnnnnnnnnnnnnnnnnnnnnngttggtttttgcagatgcctgcaaaagataaatctgagatcaactggggactggtgctggttaatgatattgatcctttatctggacaatccaatgatgaagcgaatggacacagttttgacagtggagaggaartgtgttgcattcaggctgtgtctggtagtgcaaccaacatgagggtacatttttttcagctgatgtccatttatagctttgtgcaaaatgaccttggctctgatttcagtaggtagccagtggaaatatgactcggaatactgaggtattcttrtgtcttccttctgtggaaactgttaactttgaggacgcactgaggttactgatcgtgttcacaagacctttacactccatacgtagcctgtctatcctgtgctgctcataagcattgaactgttttgtgcacactgtctggtcat

SEQ ID NO: 79833 - DNA, 599 bp, Chicken  19866894371391_2
  misc_feature (1)..(11): n is any nucleotide
nnnnnnnnnnngttggtttttgcagatgcctgcaaaagataaatctgagatcaactggggactggtgctggttaatgatattgatcctttatctggacaatccaatgatgaagcgaatggacacagttttgacagtggagaggaartgtgttgcattcaggctgtgtctggtagtgcaaccaacatgagggtacatttttttcagctgatgtccatttatagctttgtgcaaaatgaccttggctctgatttcagtaggtagccagtggaaatatgactcggaatactgaggtattcttrtgtcttccttctgtggaaactgttaactttgaggacgcactgaggttactgatcgtgttcacaagacctttacactccatacgtagcctgtctatcctgtgctgctcataagcattgaactgttttgtgcacactgtctggtcattctgtagctgcaaaagaatcctgtaaatgtgggattacagcagwggtatgatcaaaatrtgcattgtktaggtcaagcactggatttacaacctgtgtataacagggtatgtacatagaaacttctgtctgggaagtctcagacagatggtgtg

SEQ ID NO: 79834 - DNA, 600 bp, Chicken  19866894371391_3
ggtacatttttttcagctgatgtccatttatagctttgtgcaaaatgaccttggctctgatttcagtaggtagccagtggaaatatgactcggaatactgaggtattcttrtgtcttccttctgtggaaactgttaactttgaggacgcactgaggttactgatcgtgttcacaagacctttacactccatacgtagcctgtctatcctgtgctgctcataagcattgaactgttttgtgcacactgtctggtcattctgtagctgcaaaagaatcctgtaaatgtgggattacagcagwggtatgatcaaaatrtgcattgtktaggtcaagcactggatttacaacctgtgtataacagggtatgtacatagaaacttctgtctgggaagtctcagacagatggtgtgactgcactgaagcatcagaacatggataactrgggacctttgtggaatcctaataatatagtctgcagtagccatatatacatactgaaattagaatctctgaaataagaatgtctttctttggctgttaattgtccaaacacaacattaagtgatataatcatttctctaactgctaacaatcctttac

SEQ ID NO: 79835 - DNA, 600 bp, Chicken  19866894371391_4
gctgatgtccatttatagctttgtgcaaaatgaccttggctctgatttcagtaggtagccagtggaaatatgactcggaatactgaggtattcttrtgtcttccttctgtggaaactgttaactttgaggacgcactgaggttactgatcgtgttcacaagacctttacactccatacgtagcctgtctatcctgtgctgctcataagcattgaactgttttgtgcacactgtctggtcattctgtagctgcaaaagaatcctgtaaatgtgggattacagcagwggtatgatcaaaatrtgcattgtktaggtcaagcactggatttacaacctgtgtataacagggtatgtacatagaaacttctgtctgggaagtctcagacagatggtgtgactgcactgaagcatcagaacatggataactrgggacctttgtggaatcctaataatatagtctgcagtagccatatatacatactgaaattagaatctctgaaataagaatgtctttctttggctgttaattgtccaaacacaacattaagtgatataatcatttctctaactgctaacaatcctttacaagatctcagcccta

SEQ ID NO: 79836 - DNA, 600 bp, Chicken  19866894371391_5
catttatagctttgtgcaaaatgaccttggctctgatttcagtaggtagccagtggaaatatgactcggaatactgaggtattcttrtgtcttccttctgtggaaactgttaactttgaggacgcactgaggttactgatcgtgttcacaagacctttacactccatacgtagcctgtctatcctgtgctgctcataagcattgaactgttttgtgcacactgtctggtcattctgtagctgcaaaagaatcctgtaaatgtgggattacagcagwggtatgatcaaaatrtgcattgtktaggtcaagcactggatttacaacctgtgtataacagggtatgtacatagaaacttctgtctgggaagtctcagacagatggtgtgactgcactgaagcatcagaacatggataactrgggacctttgtggaatcctaataatatagtctgcagtagccatatatacatactgaaattagaatctctgaaataagaatgtctttctttggctgttaattgtccaaacacaacattaagtgatataatcatttctctaactgctaacaatcctttacaagatctcagccctaatcaactgc

SEQ ID NO: 79837 - DNA, 600 bp, Chicken  19866894371391_6
aggacgcactgaggttactgatcgtgttcacaagacctttacactccatacgtagcctgtctatcctgtgctgctcataagcattgaactgttttgtgcacactgtctggtcattctgtagctgcaaaagaatcctgtaaatgtgggattacagcagwggtatgatcaaaatrtgcattgtktaggtcaagcactggatttacaacctgtgtataacagggtatgtacatagaaacttctgtctgggaagtctcagacagatggtgtgactgcactgaagcatcagaacatggataactrgggacctttgtggaatcctaataatatagtctgcagtagccatatatacatactgaaattagaatctctgaaataagaatgtctttctttggctgttaattgtccaaacacaacattaagtgatataatcatttctctaactgctaacaatcctttacaagatctcagccctaatcaactgctgtactcaacacagagttattgtaagtttgagaacatttatattctgtaaaagcagtaaatgtaatatgtcatgccattcataatgctgttttcagtgaaggagccatcatgtttatc

SEQ ID NO: 79838 - DNA, 600 bp, Chicken  19866894371391_7
tgtcccttggtatgtggccaaacaaatttgagctggatgctcaaaatgcattagagctgatcacattcaagcagagggtcagctatgccatttacaggcagccaccaatatttaaggagaactgctataaaaagtaattaaaacttctgaattcttcctttgaaatagtactaaagggcatcatggcatttagtaaacctgactaggaacaaatgcccaaatgcatttcaagacatattggtatgaaagtggcaaagaactaaaggctgttttgcatctaaaacaggagaatatttcagktcttaaaatagggaacattccaaatagtaactgcatctgtacttcacaaatggagctattaaaatcacaagaaaaggtgtgccttattctctatgggtagtatctgagccaaattaatatcacatgcatttacaccttaatgaatagcttaaaaagcctaatcctttggaaagattcctataagctttcatgtaatttggatcaggataattacagagaaagaaaaaaaaaacctttcaatgcaaaaacaaaacatttgatctttcagatagttgtaaaacatagccaacaaaaagattt

SEQ ID NO: 79839 - DNA, 600 bp, Chicken  19866894371391_8
catttcaagacatattggtatgaaagtggcaaagaactaaaggctgttttgcatctaaaacaggagaatatttcagktcttaaaatagggaacattccaaatagtaactgcatctgtacttcacaaatggagctattaaaatcacaagaaaaggtgtgccttattctctatgggtagtatctgagccaaattaatatcacatgcatttacaccttaatgaatagcttaaaaagcctaatcctttggaaagattcctataagctttcatgtaatttggatcaggataattacagagaaagkaaaaaaaaacctttcaatgcaaaaacaaaacatttgatctttcagatagttgtaaaacatagccaacaaaaagattttgctttggatcttaaaaatatgttcaaatcaaaggaatgtttcaatttgcctgaaaaggcagtttggtaccagtatctaacatacctctgaaaaaatcaatacttacaatgttcacatctaaattaagagcatttttttatttcagcatcaacrgtgtggtggtaaatatgctactgttctggacaacagcttgtcttggcattggtctcatccatgtctaat

SEQ ID NO: 79840 - DNA, 600 bp, Chicken  19866894371391_9
agcctaatcctttggaaagattcctataagctttcatgtaatttggatcaggataattacagagaaagaaaaaaaaaacctttcaatgcaaaaacaaaacatttgatctttcagatagttgtaaaacatagccaacaaaaagattttgctttggatcttaaaaatatgttcaaatcaaaggaatgtttcaatttgcctgaaaaggcagtttggtaccagtatctaacatacctctgaaaaaatcaatacttacaatgttcacatctaaattaagagcatttttttatttcagcatcaacrgtgtggtggtaaatatgctactgttctggacaacagcttgtcttggcattggtctcatccatgtctaataacactataaatcttgtgagaaatgccagactttctcaaagcaaacagctgggccagtagagactgccaaattcttgaagtctgtgaaatcagtttcagtaaacatgggatattcattggtaaagaaaactattttttttttaacttccctgaagctaacagaatttacaccttattttcctctaaggcaccgtggagcttggagcagctcttattttatccaaagcaact

SEQ ID NO: 79841 - DNA, 600 bp, Chicken  19866894371394_1
acaatagaagccctccaagcagcacctcccacaaccagctgctttttggtacagctctgacccccagtacctggctcctgctatctgccattgccaagcaaataatagactcacagaacggcctgggttgcaaaggaccacaaatgctcatccagttccaaccccctgctatgtgcagggtcgccaaccagcagcccaggctgcccagagccacatccagcctggccttgaatgcctgcagggatggggcatccacagcctccttgggcagcctgttcagtgcgtcaccaccctctgggkgaaaatgtggctcttgtgctgctgagtgggctgggagcattttacctgggggagagcagactyggatttttgtgggttgtactggggaagtgaactgccagaatgaaatatctgaagaccaagtgaaattaataagtattgattcaagaaggcctatctttacaggtggaattcagttaaagcatagggtaaataggttctcgggacaaaaaaacctttttgttttcagcatcacagcactttcttgaagtaaaatctactcctataatcatgttgctataaatcaaaaggtgggaaata

SEQ ID NO: 79842 - DNA, 600 bp, Chicken  19866894371394_2
ccagtacctggctcctgctatctgccattgccaagcaaataatagactcacagaacggcctgggttgcaaaggaccacaaatgctcatccagttccaaccccctgctatgtgcagggtcgccaaccagcagcccaggctgcccagagccacatccagcctggccttgaatgcctgcagggatggggcatccacagcctccttgggcagcctgttcagtgcgtcaccaccctctgggkgaaaatgtggctcttgtgctgctgagtgggctgggagcattttacctgggggagagcagactyggatttttgtgggttgtactggggaagtgaactgccagaatgaaatatctgaagaccaagtgaaattaataagtattgattcaagaaggcctatctttacaggtggaattcagttaaagcatagggtaaataggttctcgggacaaaaaaacctttttgttttcagcatcacagcactttcttgaagtaaaatctactcctataatcatgttgctataaatcaaaaggtgggaaataccagatgtgaaaactgtaacacgaatgaatgaacacagaagattcagaagaaagaatagcgtt

SEQ ID NO: 79843 - DNA, 600 bp, Chicken  19866894371395_1
ccaaaactgaacacaatacttgaaataaggcctcaccaatgcaagtacagagaggtgatcctgctgactacactacttctgatacataaagtgaaacatcttctacagttcatcaattcatcttgctctgcagcacttgcactaaaatatgcctggagacaccgcatgagtatgaccccaagaaagaggagatgggtttactctgtgctttgtctcttatcctacagtgacagatgctgcacgctgcccctcactccactgtggaataaggagggtggcctttgataaccacagcgttcrttggaggacagtcttgctcagctgtttgcctgcatgtgctgggacaggctgcagctgccttctcaactccctttaaagtcttacctttgtaaagagtgtcccgggggtcaggcttcagcatgtcagcagggtgtgccttgcttcccgtgctatcagtagcccgtctcttgtggctggccraagtctgcgggatgtgcccaacctcatccatctttaacagtgtctcatctagaaaccagagagagaacggaagagggaggaagagctcattcatcccttgtcccaggcagmacttttccc

SEQ ID NO: 79844 - DNA, 581 bp, Chicken  19866894371395_2
agaaagaggagatgggtttactctgtgctttgtctcttatcctacagtgacagatgctgcacgctgcccctcactccactgtggaataaggagggtggcctttgataaccacagcgttcrttggaggacagtcttgctcagctgtttgcctgcatgtgctgggacaggctgcagctgccttctcaactccctttaaagtcttacctttgtaaagagtgtcccgggggtcaggcttcagcatgtcagcagggtgtgccttgcttcccgtgctatcagtagcccgtctcttgtggctggccraagtctgcgggatgtgcccaacctcatccatctttaacagtgtctcatctagaaaccagagagagaacggaagagggaggaagagctcattcatcccttgtcccaggcagmacttttccccagcatcagcatttccaaatggtattgcacaacagcaatgcctacatggtactcatcaggagcttcatcagtgcttgagggaaggaagggctctgactgggaaagctggagatactgaacacagctatcaatcagcgaaagcaaacaaacacaatgatgag

SEQ ID NO: 79845 - DNA, 470 bp, Chicken  19866894371395_3
cagcgttcrttggaggacagtcttgctcagctgtttgcctgcatgtgctgggacaggctgcagctgccttctcaactccctttaaagtcttacctttgtaaagagtgtcccgggggtcaggcttcagcatgtcagcagggtgtgccttgcttcccgtgctatcagtagcccgtctcttgtggctggccraagtctgcgggatgtgcccaacctcatccatctttaacagtgtctcatctagaaaccagagagagaacggaagagggaggaagagctcattcatcccttgtcccaggcagmacttttccccagcatcagcatttccaaatggtattgcacaacagcaatgcctacatggtactcatcaggagcttcatcagtgcttgagggaaggaagggctctgactgggaaagctggagatactgaacacagctatcaatcagcgaaagcaaacaaacacaatgatgag

SEQ ID NO: 79846 - DNA, 600 bp, Chicken  19866894371396_1
attttctctgtatgtctctgctgtgttaaaactcataaaaatgtgttgttatataaattagtttaatcttgttgaatattcattaacatgtatggagataatcccatttaggcaactcagtacattcacttgaatgtttttttcacttgctatatgacttatgttgttacgtcttgttcattttaaactatgtccatcatattctacgaggcttccattaagaaaacatagctattgaaatgtatttccattacctttaattactcctagtatgaaataaactagtttattttttcttaragtggcaaacaattttcttgaccaaagttttaaccctgcccacattgcctaactcaaaccctctgtcagtaaatggaatgggatggagatagagacggagatggaggtatgtgggctcatttaccccatcagagctgtaggcaagacctagtagctgaataattgacttgtgggtggcctggctctccttgcacaatgcttggtcacaacccctgtctctctgcctggcatgactccctaattcatctgtctttacttaccacccagttcagccagggaagtcaataaaatcctgtcttt

SEQ ID NO: 79847 - DNA, 599 bp, Chicken  19866894371403_1
  misc_feature (1)..(111): n is any nucleotide
nnnnnnnnnnnnnnnnnnnnnnnnnnnnnnnnnnnnnnnnnnnnnnnnnnnnnnnnnnnnnnnnnnnnnnnnnnnnnnnnnnnnnnnnnnnnnnnnnnnnnnnnnnnnnnngcattattgaagaagaggaggaggaggaagaggatgatgaagggggagtctctgtgaacaaaaggaagaaggaggatgacactgaggtagggaatttcttgctgtgtttcagcatgtttgcatggcacttcccctggcccatacctatccaaaagattctgatatgtatgagagcaactccagtggaarctttgtactgggacttttgttgttcttctyggcctcatctcactgattccatcatgggttgtcacttggtttttggtttttctgaaggtgctctgaatgcacrtgacctgmartggggcttttgtgaatgaggagtgctctgttctgagccttcgtggtatttttgcttatatcaaagacccatcagcattcgggcrgttgtacaatcaattgcagcctaagaatgtaaattcctccaaggaaatcattgcagctggtttaccccattgtttttcagacagtgcacaaactatttgtgc

SEQ ID NO: 79848 - DNA, 599 bp, Chicken  19866894371403_2
  misc_feature (1)..(81): n is any nucleotide
nnnnnnnnnnnnnnnnnnnnnnnnnnnnnnnnnnnnnnnnnnnnnnnnnnnnnnnnnnnnnnnnnnnnnnnnnnnnnnnnngcattattgaagaagaggaggaggaggaagaggatgatgaagggggagtctctgtgaacaaaaggaagaaggaggatgacactgaggtagggaatttcttgctgtgtttcagcatgtttgcatggcacttcccctggcccatacctatccaaaagattctgatatgtatgagagcaactccagtggaarctttgtactgggacttttgttgttcttctyggcctcatctcactgattccatcatgggttgtcacttggtttttggtttttctgaaggtgctctgaatgcacrtgacctgmartggggcttttgtgaatgaggagtgctctgttctgagccttcgtggtatttttgcttatatcaaagacccatcagcattcgggcrgttgtacaatcaattgcagcctaagaatgtaaattcctccaaggaaatcattgcagctggtttaccccattgtttttcagacagtgcacaaactatttgtgccagcaaaaagcagataattaaatgccctga

SEQ ID NO: 79849 - DNA, 599 bp, Chicken  19866894371403_3
  misc_feature (1)..(8): n is any nucleotide
nnnnnnnngcattattgaagaagaggaggaggaggaagaggatgatgaagggggagtctctgtgaacaaaaggaagaaggaggatgacactgaggtagggaatttcttgctgtgtttcagcatgtttgcatggcacttcccctggcccatacctatccaaaagattctgatatgtatgagagcaactccagtggaarctttgtactgggacttttgttgttcttctyggcctcatctcactgattccatcatgggttgtcacttggtttttggtttttctgaaggtgctctgaatgcacrtgacctgmartggggcttttgtgaatgaggagtgctctgttctgagccttcgtggtatttttgcttatatcaaagacccatcagcattcgggcrgttgtacaatcaattgcagcctaagaatgtaaattcctccaaggaaatcattgcagctggtttaccccattgtttttcagacagtgcacaaactatttgtgccagcaaaaagcagataattaaatgccctgaaaaatgcagttgtctttcagtctataggtgtagctcctgctgactttctcactccttatttgtataccttggt

SEQ ID NO: 79850 - DNA, 600 bp, Chicken  19866894371403_4
gcattattgaagaagaggaggaggaggaagaggatgatgaagggggagtctctgtgaacaaaaggaagaaggaggatgacactgaggtagggaatttcttgctgtgtttcagcatgtttgcatggcacttcccctggcccatacctatccaaaagattctgatatgtatgagagcaactccagtggaarctttgtactgggacttttgttgttcttctyggcctcatctcactgattccatcatgggttgtcacttggtttttggtttttctgaaggtgctctgaatgcacrtgacctgmartggggcttttgtgaatgaggagtgctctgttctgagccttcgtggtatttttgcttatatcaaagacccatcagcattcgggcrgttgtacaatcaattgcagcctaagaatgtaaattcctccaaggaaatcattgcagctggtttaccccattgtttttcagacagtgcacaaactatttgtgccagcaaaaagcagataattaaatgccctgaaaaatgcagttgtctttcagtctataggtgtagctcctgctgactttctcactccttatttgtataccttggttgtgatttg

SEQ ID NO: 79851 - DNA, 600 bp, Chicken  19866894371403_5
attattgaagaagaggaggaggaggaagaggatgatgaagggggagtctctgtgaacaaaaggaagaaggaggatgacactgaggtagggaatttcttgctgtgtttcagcatgtttgcatggcacttcccctggcccatacctatccaaaagattctgatatgtatgagagcaactccagtggaarctttgtactgggacttttgttgttcttctyggcctcatctcactgattccatcatgggttgtcacttggtttttggtttttctgaaggtgctctgaatgcacrtgacctgmartggggcttttgtgaatgaggagtgctctgttctgagccttcgtggtatttttgcttatatcaaagacccatcagcattcgggcrgttgtacaatcaattgcagcctaagaatgtaaattcctccaaggaaatcattgcagctggtttaccccattgtttttcagacagtgcacaaactatttgtgccagcaaaaagcagataattaaatgccctgaaaaatgcagttgtctttcagtctataggtgtagctcctgctgactttctcactccttatttgtataccttggttgtgatttgga

SEQ ID NO: 79852 - DNA, 600 bp, Chicken  19866894371403_6
gtagggaatttcttgctgtgtttcagcatgtttgcatggcacttcccctggcccatacctatccaaaagattctgatatgtatgagagcaactccagtggaarctttgtactgggacttttgttgttcttctyggcctcatctcactgattccatcatgggttgtcacttggtttttggtttttctgaaggtgctctgaatgcacrtgacctgmartggggcttttgtgaatgaggagtgctctgttctgagccttcgtggtatttttgcttatatcaaagacccatcagcattcgggcrgttgtacaatcaattgcagcctaagaatgtaaattcctccaaggaaatcattgcagctggtttaccccattgtttttcagacagtgcacaaactatttgtgccagcaaaaagcagataattaaatgccctgaaaaatgcagttgtctttcagtctataggtgtagctcctgctgactttctcactccttatttgtataccttggttgtgatttggacagaaaataaggagcaaaaactgtctgctgacagtgtgcaatccaccagagggagccagcatttttacatacgcttccatatgg

SEQ ID NO: 79853 - DNA, 599 bp, Chicken  19866894371415_1
  misc_feature (1)..(94): n is any nucleotide
nnnnnnnnnnnnnnnnnnnnnnnnnnnnnnnnnnnnnnnnnnnnnnnnnnnnnnnnnnnnnnnnnnnnnnnnnnnnnnnnnnnnnnnnnnnnnntcttacttttgccggttgtgggtgagctctccacaagtcagtaacatgtcaagcaggatgcgggtatgaggaagctggaggagaaggagagagctttgtcagaaagcagctttctgtattggttgtattgcaattgagcagggagttggggattcattcagcacagtggtggtgacactgcccaactaagaccatcttgtgatcastgctgaggaagattctgagtatgaattcttctgaagaaggaggaaagaaattaccctggaaaatgtaggagwaagttcttcaccaaaagggaggtcaggcactggaacaggcttcccagggcagcaatcccagggcagcagcatttggacaacactcagacaggacaggcagcttgattttttggtggttctctgaggacttggactcgatgatccgtgagcgtstcttccaatccagagtattctatgattccatgattcctccaacacatccttagatttctcagaggaggtgtaaa

SEQ ID NO: 79854 - DNA, 599 bp, Chicken  19866894371415_2
  misc_feature (1)..(22): n is any nucleotide
nnnnnnnnnnnnnnnnnnnnnntcttacttttgccggttgtgggtgagctctccacaagtcagtaacatgtcaagcaggatgcgggtatgaggaagctggaggagaaggagagagctttgtcagaaagcagctttctgtattggttgtattgcaattgagcagggagttggggattcattcagcacagtggtggtgacactgcccaactaagaccatcttgtgatcastgctgaggaagattctgagtatgaattcttctgaagaaggaggaaagaaattaccctggaaaatgtaggagwaagttcttcaccaaaagggaggtcaggcactggaacaggcttcccagggcagcaatcccagggcagcagcatttggacaacactcagacaggacaggcagcttgattttttggtggttctctgaggacttggactcgatgatccgtgagcgtstcttccaatccagagtattctatgattccatgattcctccaacacatccttagatttctcagaggaggtgtaaaagacataaaaatataacatgtcytgtgcacacctcattactacagaaaatccacaaggagatgttctgcaat

SEQ ID NO: 79855 - DNA, 600 bp, Chicken  19866894371415_3
aattgagcagggagttggggattcattcagcacagtggtggtgacactgcccaactaagaccatcttgtgatcastgctgaggaagattctgagtatgaattcttctgaagaaggaggaaagaaattaccctggaaaatgtaggagwaagttcttcaccaaaagggaggtcaggcactggaacaggcttcccagggcagcaatcccagggcagcagcatttggacaacactcagacaggacaggcagcttgattttttggtggttctctgaggacttggactcgatgatccgtgagcgtstcttccaatccagagtattctatgattccatgattcctccaacacatccttagatttctcagaggaggtgtaaaagacataaaaatataacatgtcytgtgcacacctcattactacagaaaatccacaaggagatgttctgcaatagcaacccgagastgaaaatgagttcagctataaaatgccagccaaaagctccttttgacagagctcccatgagggaaatagtaaggaagagttactcactgtatgagaccagacagcttacaagaaggctttccatccactcgtaacactaca

SEQ ID NO: 79856 - DNA, 600 bp, Chicken  19866894371415_4
gaattcttctgaagaaggaggaaagaaattaccctggaaaatgtaggagwaagttcttcaccaaaagggaggtcaggcactggaacaggcttcccagggcagcaatcccagggcagcagcatttggacaacactcagacaggacaggcagcttgattttttggtggttctctgaggacttggactcgatgatccgtgagcgtstcttccaatccagagtattctatgattccatgattcctccaacacatccttagatttctcagaggaggtgtaaaagacataaaaatataacatgtcytgtgcacacctcattactacagaaaatccacaaggagatgttctgcaatagcaacccgagastgaaaatgagttcagctataaaatgccagccaaaagctccttttgacagagctcccatgagggaaatagtaaggaagagttactcactgtatgagaccagacagcttacaagaaggctttccatccactcgtaacactacagtgtggatacaraatttatttttatttccatatttgaccccttaaactgtctttggtaatatcctctaatcataattttaaagtcatcggactcttc

SEQ ID NO: 79857 - DNA, 600 bp, Chicken  19866894371415_5
aaaagggaggtcaggcactggaacaggcttcccagggcagcaatcccagggcagcagcatttggacaacactcagacaggacaggcagcttgattttttggtggttctctgaggacttggactcgatgatccgtgagcgtstcttccaatccagagtattctatgattccatgattcctccaacacatccttagatttctcagaggaggtgtaaaagacataaaaatataacatgtcytgtgcacacctcattactacagaaaatccacaaggagatgttctgcaatagcaacccgagastgaaaatgagttcagctataaaatgccagccaaaagctccttttgacagagctcccatgagggaaatagtaaggaagagttactcactgtatgagaccagacagcttacaagaaggctttccatccactcgtaacactacagtgtggatacaraatttatttttatttccatatttgaccccttaaactgtctttggtaatatcctctaatcataattttaaagtcatcggactcttcttcagattccttcctgtgatttggatagatcagtatgctgtgttcacagaatagcttaactc

SEQ ID NO: 79858 - DNA, 600 bp, Chicken  19866894371415_6
gagtattctatgattccatgattcctccaacacatccttagatttctcagaggaggtgtaaaagacataaaaatataacatgtcytgtgcacacctcattactacagaaaatccacaaggagatgttctgcaatagcaacccgagastgaaaatgagttcagctataaaatgccagccaaaagctccttttgacagagctcccatgagggaaatagtaaggaagagttactcactgtatgagaccagacagcttacaagaaggctttccatccactcgtaacactacagtgtggatacaraatttatttttatttccatatttgaccccttaaactgtctttggtaatatcctctaatcataattttaaagtcatcggactcttcttcagattccttcctgtgatttggatagatcagtatgctgtgttcacagaatagcttaactcaggtgagaatttttattccaagccagaactgagtttgatttggtagttgagttactttaatcttaaatgaagtcacagtttggcctggtctggcctagttcctgacaagagggaaaagggactcatggacccatgtcccaggagagggaaata

SEQ ID NO: 79859 - DNA, 600 bp, Chicken  19866894371416_1
aagtgctggccatgaaactgctgttataccatggtctttcgcattgtaagggggtgactaggctgtggtaatatcacacttggcctcttacctaatggtctgagattttaattcttgctttcaggttcagaatatgagaagtaccttcctattacactgcagttgctaaggtcttatgaatagttgggtcaggaaaaaaagagaataaagaagcagtatgaggagcaaataggcttaaaaagtgaatctatttgttctatttgtatcagatgtatttttttatactaaattatgtagtcyttatagtcttgtttggccttacatgacacacctttgcttacctgaatctttttccttctctctcttcatttatgtaatgattataatgtagagtttgcaagatcctgtgaataaactaagagaaacagcagaaaaggaggacctgcaaactgagagcaccaaatcagaagatcagcagagtcagtaagtcatatatgctgtatctcaatttaataagtatccctatctatgtacaatctgctttctagttacataagtcaccaaacatttaaaactggaaatatagatacagataatttg

SEQ ID NO: 79860 - DNA, 600 bp, Chicken  19866894371424_1
atctgtggagcagtatccaggcaggcttgtctgcagtctgaccttagaaagaatttttcacattccaacacaaaaatactgcttcttatactgtacaggctttttaacctctcttctacctcatttttttaatgataagctttcctgcacagcacatacaatactctttctttttaaaaaacaaaacaaacccaacaaatacaaagctaaaaaactcggtcccctgtccacatgtggacgtgcacgcacattcttgctttagtgaggcttcttgtggtattctgtggggattaagagatrttgatatagctaaaaacctcagcaaatacctcctcgttttctattatttgtaaaccagagttgtacaagaggtgaatagtttatgtagattagagccctctttccactggtgcttgcaaaacacgaagctttcaacctgcagagagtttttgacttgtcctgttgttaataaatgaattgtaaccctttcctgacatccaaggtttttctttaagccaaagggcacaattgagtaatactctcagtgagataatacagatatgctgagaactgtgaggttatttgattctctagactttg

SEQ ID NO: 79861 - DNA, 600 bp, Chicken  19866894371424_2
acctcagcaaatacctcctcgttttctattatttgtaaaccagagttgtacaagaggtgaatagtttatgtagattagagccctctttccactggtgcttgcaaaacacgaagctttcaacctgcagagagtttttgacttgtcctgttgttaataaatgaattgtaaccctttcctgacatccaaggtttttctttaagccaaagggcacaattgagtaatactctcagtgagataatacagatatgctgagaactgtgaggttatttgattctctagactttggtacaaagggtctgmaaagccacttcccaaacacagtgagctttagttttccatattccccaggaaatcccatggctgggtycagcaactctttccaaagcaatgtttgaactgaactgacctgtgcgaggcttatatttccagatctgaattaattaaatccaataaaagaggctagtgaataataccatacagagtacacatgggaaaaatagtgccggtttatttttaaagctgttctctgcatgctatgggagagcgtaggtttgatttgcatccgttttcctttttatctccagttttggtccagacacg

SEQ ID NO: 79862 - DNA, 600 bp, Chicken  19866894371424_3
atgtagattagagccctctttccactggtgcttgcaaaacacgaagctttcaacctgcagagagtttttgacttgtcctgttgttaataaatgaattgtaaccctttcctgacatccaaggtttttctttaagccaaagggcacaattgagtaatactctcagtgagataatacagatatgctgagaactgtgaggttatttgattctctagactttggtacaaagggtctgmaaagccacttcccaaacacagtgagctttagttttccatattccccaggaaatcccatggctgggtycagcaactctttccaaagcaatgtttgaactgaactgacctgtgcgaggcttatatttccagatctgaattaattaaatccaataaaagaggctagtgaataataccatacagagtacacatgggaaaaatagtgccggtttatttttaaagctgttctctgcatgctatgggagagcgtaggtttgatttgcatccgttttcctttttatctccagttttggtccagacacgtggtggcaattccaacggtgctctgtgccacttccccttcctgtacaacaaccgcaactatactgac

SEQ ID NO: 79863 - DNA, 377 bp, Chicken  19866894371426_1
agtagagaatttctacacagtgagaagtattttatagaatcacagaatcattaaggttggaaaagacttctaagatcatctagtcctagcagtactgcccaccatgcctgtgtcccatagtaccacatccacacattttgtgaacacctccagggacagtgactccaccatctccctgggcagcctttgccactgcctcaacactcctctggagaagtttttccctatgacagaatcactgaggttgcaaaagacctccaagatcaccgagtctaaccacacacctaccatcactatttmyccaccaaaccacgtcccttactacaatatctaaacattgtgatgctgggatttatttacaaaagaacataattata

SEQ ID NO: 79864 - DNA, 376 bp, Chicken  19866894371426_2
gtagagaatttctacacagtgagaagtattttatagaatcacagaatcattaaggttggaaaagacttctaagatcatctagtcctagcagtactgcccaccatgcctgtgtcccatagtaccacatccacacattttgtgaacacctccagggacagtgactccaccatctccctgggcagcctttgccactgcctcaacactcctctggagaagtttttccctatgacagaatcactgaggttgcaaaagacctccaagatcaccgagtctaaccacacacctaccatcactatttmyccaccaaaccacgtcccttactacaatatctaaacattgtgatgctgggatttatttacaaaagaacataattata

SEQ ID NO: 79865 - DNA, 600 bp, Chicken  19866894371431_1
agcagggcttgtcaagcacagtcctggcttttgcagagaggctgcttgacggagtgctagttattggtgatctctcattcctctgaggtagcaaagcaaacaatggaaacaatatatgcttgcatctgatctacagcttttctcagacttagacacagatgcattggaaatcaagttgtcctggctgaagtccctggtgaaaaggagccgagcactccattggtgtatatcacacaactgctctagtattagttgcacagcagtcttcgttaccgcaaagcatctctggatgcagtgacraggggagaggattgtgtcagaaagcaagcatgcagtgcctggtatttcatccaaggcctaattaggattagaggaactttccatttggatcagactttggatctgacccaagaagaactgcctgakgcacggatggtcagaagagatttacagagcaggaggaaaacattctagcccttgcctgggctactcttgactgatatcaattagaaatcycagtttacatgaacatcaaaacccctcaaactctaagctgagtttaatatgtaatctctgttgagagccgaaccctgcctgcta

SEQ ID NO: 79866 - DNA, 600 bp, Chicken  19866894371431_2
tgatctacagcttttctcagacttagacacagatgcattggaaatcaagttgtcctggctgaagtccctggtgaaaaggagccgagcactccattggtgtatatcacacaactgctctagtattagttgcacagcagtcttcgttaccgcaaagcatctctggatgcagtgacraggggagaggattgtgtcagaaagcaagcatgcagtgcctggtatttcatccaaggcctaattaggattagaggaactttccatttggatcagactttggatctgacccaagaagaactgcctgakgcacggatggtcagaagagatttacagagcaggaggaaaacattctagcccttgcctgggctactcttgactgatatcaattagaaatcycagtttacatgaacatcaaaacccctcaaactctaagctgagtttaatatgtaatctctgttgagagccgaaccctgcctgctacctgcaggaagagaaacaagaaagggaaaagttattcatgggaatgtctgaacactaatatctcatgggaaaacctctctgtttctacctccccgctccttttttaaggagcctctctcctctttg

SEQ ID NO: 79867 - DNA, 600 bp, Chicken  19866894371431_3
ccattggtgtatatcacacaactgctctagtattagttgcacagcagtcttcgttaccgcaaagcatctctggatgcagtgacraggggagaggattgtgtcagaaagcaagcatgcagtgcctggtatttcatccaaggcctaattaggattagaggaactttccatttggatcagactttggatctgacccaagaagaactgcctgakgcacggatggtcagaagagatttacagagcaggaggaaaacattctagcccttgcctgggctactcttgactgatatcaattagaaatcycagtttacatgaacatcaaaacccctcaaactctaagctgagtttaatatgtaatctctgttgagagccgaaccctgcctgctacctgcaggaagagaaacaagaaagggaaaagttattcatgggaatgtctgaacactaatatctcatgggaaaacctctctgtttctacctccccgctccttttttaaggagcctctctcctctttgtccatccagataggagaagcagggagaaagactttgaaaacggatcagttctcaaacttcagtagttctcaaagcagtagttttgaaaaa

SEQ ID NO: 79868 - DNA, 600 bp, Chicken  19866894371451_1
ttcaagacagaaactatagttagagttgtacatgaagatgtatgacatgagtagaaaacctttaggtaactcaccaacttatccaagagaaatagactagactgtcactcaatgagttaagcacatcatcttaaggatagtcaaagtggtacctcaattctactagcactgcactcagacaataatgcaggcagaactgaattggaattctgtttgtggaaggcttttgggttatgttttaaatgtttcaggaaaggaaacagctcatttagcatctgcacggaccattcaaaacagctyagggatttaatagagctcctaaccagaaggaaaattccatctgaactatatgacaaaggactttctcttttaagcaattttcctgcttgtggactttctcccttgcagaataccgaaaggctaagactgacacaaggtggcagcaaacagcacatcaattaatgccatttttccctttcaaaaacttgcacagataaacttcctagtctcttgcttcttaacgttgaagctgtgctactagaaaataccatggatgagggtacatccacaatgacagtgaaaaagctgtatcatatgaat

SEQ ID NO: 79869 - DNA, 600 bp, Chicken  19866894371451_2
atgacttccaaaggtaaggtagaattccatgggttagaaaagttattgttgacatggtaaaatggagacctactaaatcttgatttgcatacagaaagtgaacacggaattatttcctgacttccagtatgagaactaagtggcaccaacgtctatgcactgcagtctaagctaccataggaagatcctacttacaagacattacactggagaacaccttgcaacatcacataagaatttacataggttcagaacaacagtttctggaaaagaacaaaccacaaagacctttcttttgargataaaggccatacagcaataaaatgctgaaggctgggagagtatcctagggagccatcatggtatgttggcattgcttycatactctttgctacagatattcagtattagctgaccagaaaagggatggtgtgttaagtgacccaactgtctgactttctagaaccattcctacgatatatttgagttacatatatttttactgcttccccaaattcatgcttttgagtatttctctatgcatagcctagttaattttttgaaagagtgttatttggaagaataaaaagccagaaaaaa

SEQ ID NO: 79870 - DNA, 600 bp, Chicken  19866894371451_3
tgatttgcatacagaaagtgaacacggaattatttcctgacttccagtatgagaactaagtggcaccaacgtctatgcactgcagtctaagctaccataggaagatcctacttacaagacattacactggagaacaccttgcaacatcacataagaatttacataggttcagaacaacagtttctggaaaagaacaaaccacaaagacctttcttttgargataaaggccatacagcaataaaatgctgaaggctgggagagtatcctagggagccatcatggtatgttggcattgcttycatactctttgctacagatattcagtattagctgaccagaaaagggatggtgtgttaagtgacccaactgtctgactttctagaaccattcctacgatatatttgagttacatatatttttactgcttccccaaattcatgcttttgagtatttctctatgcatagcctagttaattttttgaaagagtgttatttggaagaataaaaagccagaaaaaatgaaaaaattagaattgtgaagaaatggatgtatatcttcctgcatgaagaaaacacaaaacactgatgtattggagtag

SEQ ID NO: 79871 - DNA, 600 bp, Chicken  19866894371454_1
aagtgcagaaggttcccttgaggaagcacagctctggggatggtttgctgtctggaacagtgattgaagagctgatgctgcccaaaaggaagaactcaattgtggccatgcaggcaggaagagtgagcacagagcacaggtgtgaagaggcagtagaagagccaaacacagcaaataaggtaaaagcacaaaagcagatgaacgtcatcagtttaacctgaactccagaggaaaaacatcagctctgattggctttgtgtcatttaggaggaggtaaaacaaaataatgaattagttttytttgctctttccctgaacagcattactaaattcaatccagctggtgcctgagcacaacagkgcatgtgcgyggctttcttctcattgtgagcttcctcctttcaagactatacatcctcatttctctgcttttcgagaacaaagacagcactgttttgttatcatacagctacttactcagagctgagctgtgcaagaaaccctaacatggtagaaaaagtatgaatgaaggatttgatcagagcaaggggaagagggaaaggggaatacagatgaggtttgtgttgccactgcagttat

SEQ ID NO: 79872 - DNA, 600 bp, Chicken  19866894371454_2
gattgaagagctgatgctgcccaaaaggaagaactcaattgtggccatgcaggcaggaagagtgagcacagagcacaggtgtgaagaggcagtagaagagccaaacacagcaaataaggtaaaagcacaaaagcagatgaacgtcatcagtttaacctgaactccagaggaaaaacatcagctctgattggctttgtgtcatttaggaggaggtaaaacaaaataatgaattagttttytttgctctttccctgaacagcattactaaattcaatccagctggtgcctgagcacaacagkgcatgtgcgyggctttcttctcattgtgagcttcctcctttcaagactatacatcctcatttctctgcttttcgagaacaaagacagcactgttttgttatcatacagctacttactcagagctgagctgtgcaagaaaccctaacatggtagaaaaagtatgaatgaaggatttgatcagagcaaggggaagagggaaaggggaatacagatgaggtttgtgttgccactgcagttatcacaaacagtaggggcacttgaattgcattggaaaaggtcacaataaggcccctcactgcc

SEQ ID NO: 79873 - DNA, 600 bp, Chicken  19866894371454_3
ctgatgctgcccaaaaggaagaactcaattgtggccatgcaggcaggaagagtgagcacagagcacaggtgtgaagaggcagtagaagagccaaacacagcaaataaggtaaaagcacaaaagcagatgaacgtcatcagtttaacctgaactccagaggaaaaacatcagctctgattggctttgtgtcatttaggaggaggtaaaacaaaataatgaattagttttytttgctctttccctgaacagcattactaaattcaatccagctggtgcctgagcacaacagkgcatgtgcgyggctttcttctcattgtgagcttcctcctttcaagactatacatcctcatttctctgcttttcgagaacaaagacagcactgttttgttatcatacagctacttactcagagctgagctgtgcaagaaaccctaacatggtagaaaaagtatgaatgaaggatttgatcagagcaaggggaagagggaaaggggaatacagatgaggtttgtgttgccactgcagttatcacaaacagtaggggcacttgaattgcattggaaaaggtcacaataaggcccctcactgccaaattcttgg

SEQ ID NO: 79874 - DNA, 599 bp, Chicken  19866894371457_1
  misc_feature (1)..(152): n is any nucleotide
nnnnnnnnnnnnnnnnnnnnnnnnnnnnnnnnnnnnnnnnnnnnnnnnnnnnnnnnnnnnnnnnnnnnnnnnnnnnnnnnnnnnnnnnnnnnnnnnnnnnnnnnnnnnnnnnnnnnnnnnnnnnnnnnnnnnnnnnnnnnnnnnnnnnnnnngctgtgtgaacaagaggtgctaggcagttagtcactggagagttcagcttgtgccatgcatcagctcagccttgggaagacccttgctgtgatgctaccagcctgctcccgtcccatttcccagcacccctgcagggacacagcctgygttcctgctgcccgctccggcctccgggccacccaggcagtgctccctctgacagcagcatcccctggctgcagatatttatagatcccgtccatgtcctgggctaggaagtcatccgtaatctcttacagatgttggtgggaacaaagccagccagtgactcgaaagggccgcccagcggtgtaatggatggagacctatttctgagtcacctctgacactgcctgccctcacctgctctccctcttcccccagaggctcactggggctcccctgtgcccaaaagccttcccttgggc

SEQ ID NO: 79875 - DNA, 587 bp, Chicken  19866894371457_2
cacccaggcagtgctccctctgacagcagcatcccctggctgcagatatttatagatcccgtccatgtcctgggctaggaagtcatccgtaatctcttacagatgttggtgggaacaaagccagccagtgactcgaaagggccgcccagcggtgtaatggatggagacctatttctgagtcacctctgacactgcctgccctcacctgctctccctcttcccccagaggctcactggggctcccctgtgcccaaaagccttcccttgggcagggtctgatccccgtccttacacacatcytccaacattacagacagccccgtgctttggccaccttcagggctcagcagcaccctgggtacatgcacatctctgttccctgcacacagcatgtatcaccttccccttaaaaacttatgtcaccttctcaggttttctcctttatctctcagcatctcctacacrggaacaaaggtctctttttgacatcctttcccattttaattcaccatctccaatttccccttcaccttctgggtcaaagcctaagtccaaacagtcccttctctgcccatcactgccttctg

SEQ ID NO: 79876 - DNA, 422 bp, Chicken  19866894371457_3
gacctatttctgagtcacctctgacactgcctgccctcacctgctctccctcttcccccagaggctcactggggctcccctgtgcccaaaagccttcccttgggcagggtctgatccccgtccttacacacatcytccaacattacagacagccccgtgctttggccaccttcagggctcagcagcaccctgggtacatgcacatctctgttccctgcacacagcatgtatcaccttccccttaaaaacttatgtcaccttctcaggttttctcctttatctctcagcatctcctacacrggaacaaaggtctctttttgacatcctttcccattttaattcaccatctccaatttccccttcaccttctgggtcaaagcctaagtccaaacagtcccttctctgcccatcactgccttctg

SEQ ID NO: 79877 - DNA, 600 bp, Chicken  19866894371459_1
agagtttctgatgctcaacaaagcaccaaagatgagatctgatttcttgtctcttgctgtctcaactaggatttggtcacagatatctaaagaggaagcctaagtgaaaaacagccaaagatttcttagctatagaaagtgaaaagcatgatctagagctcaaaaagtacaactactgaacctatgtttctcaccactatgatgtaattaaatgagtataccaactttttttcttttctttttaactgttgtcttaacgatgcaacagagccttaggactgaattaaaagtgcacactgygctttgaaaatgcagaataaacgtgtccagtaccagaccagctgacacaagtagatctaaactgattttccccacacagaaataccaaagccacagcttgcaaatgatagttggaggagccttacctgtgaaagcccccatgactgtgaagttatgaagaacaaagtgcacagagcatggaacagttcccctgggccagcatgcatccctgccagcagattgctctgagccattggagagcagggggttaatatcctgtacaggtgcacattgtgcccagtaaacaataaggccctaaag

SEQ ID NO: 79878 - DNA, 582 bp, Chicken  19866894371467_1
gctctaagagaagcaagctaaccttcatgagatttagacttgttttgtaaggacctcaccttcaatgtgtgaagcctgcaaccaaaattggtaactactgcattatcaatagaaaaatcacacagatacagttagggctagatccacagagcagctcccctgcaagcaggattcagaattaaatgaaagaatgtatgaggtgtcaagtgctctgggttccccctagtgcactcctcattatttagtccataccacctactggatttactggctcaccaagctctccttggagactggttragacttctgcttgtcacaagaatttcactacttcctcttttctgcttccaaaaatagaaaaatatctctgtacttgaagctgttggacacttgactgaatttaccttatacctacatgtatgtcgcttttcagtttgggtttcagttataaaaatggaagaccacttttctattaaaccctgttcgtatcatccttctcatccagcaaaaacaaaacccatgacagcaattcagcctctgagttcagaagctatgaactgctgacaagatttcagttttcag

SEQ ID NO: 79879 - DNA, 599 bp, Chicken  19866894371469_1
  misc_feature (1)..(9): n is any nucleotide
nnnnnnnnnctgctggctgggggctctgcagccaaaggctgagtaaagcagctgagcctataaaccagctgggcactgcagcactgccaccagcgtggctcttcctgtggccaacatttgactggacttcagcgtatgttcctaggatacaaacagaaaaatattttcactctcctacgtgtcattcaggggagaaatttcgcccccagaaccgacctttttatgtaacaccaactaaatacacattttcatctaagtggagatactttgttagaaataaatgtgcttataagcatttgraagtgtaaaggtgatatttataaagtgaccagaacacccaccacgctttgcataagccagtgaaaataacagctgctgagttttatcagctttagagcaccacaggagcagcacagagagtggttcaactgtgatgtgtcagtgctgagcacagctgactaatgtgctgctgtagctaaaggcagggtaatcgtatagagactgtaagtatgatgataaaatgagtcacggtgytatrctttttcaaatgttttctcctaatatccacatctgtactgtgtttatgagagtaaaagcag

SEQ ID NO: 79880 - DNA, 600 bp, Chicken  19866894371469_2
ctaaatacacattttcatctaagtggagatactttgttagaaataaatgtgcttataagcatttgraagtgtaaaggtgatatttataaagtgaccagaacacccaccacgctttgcataagccagtgaaaataacagctgctgagttttatcagctttagagcaccacaggagcagcacagagagtggttcaactgtgatgtgtcagtgctgagcacagctgactaatgtgctgctgtagctaaaggcagggtaatcgtatagagactgtaagtatgatgataaaatgagtcacggtgytatrctttttcaaatgttttctcctaatatccacatctgtactgtgtttatgagagtaaaagcagtgaaaattcctgcaggtcaaaataactttattcttaagagtatacctagggtgttgtcttccctccatcccagtggtaaacatgttgatgttggagtagaggaagggctggtatttttcctggatgaatgaagtacagctttatcattctgcattaactcttttgggtgctgtgtatacatttttaagctactatgctgtgttctgactatttccaagccataaaaactgagggt

SEQ ID NO: 79881 - DNA, 600 bp, Chicken  19866894371469_3
atacacattttcatctaagtggagatactttgttagaaataaatgtgcttataagcatttgraagtgtaaaggtgatatttataaagtgaccagaacacccaccacgctttgcataagccagtgaaaataacagctgctgagttttatcagctttagagcaccacaggagcagcacagagagtggttcaactgtgatgtgtcagtgctgagcacagctgactaatgtgctgctgtagctaaaggcagggtaatcgtatagagactgtaagtatgatgataaaatgagtcacggtgytatrctttttcaaatgttttctcctaatatccacatctgtactgtgtttatgagagtaaaagcagtgaaaattcctgcaggtcaaaataactttattcttaagagtatacctagggtgttgtcttccctccatcccagtggtaaacatgttgatgttggagtagaggaagggctggtatttttcctggatgaatgaagtacagctttatcattctgcattaactcttttgggtgctgtgtatacatttttaagctactatgctgtgttctgactatttccaagccataaaaactgagggttttt

SEQ ID NO: 79882 - DNA, 599 bp, Chicken  19866894371471_1
  misc_feature (1)..(121): n is any nucleotide
nnnnnnnnnnnnnnnnnnnnnnnnnnnnnnnnnnnnnnnnnnnnnnnnnnnnnnnnnnnnnnnnnnnnnnnnnnnnnnnnnnnnnnnnnnnnnnnnnnnnnnnnnnnnnnnnnnnnnnnnnatcattcagcatcactttcagggactcacaatagctaggctgaccacgggtttaaagtacaaaaaataacatctgccaagtcttaggacagatctgagagggtggtgagatgttggaatgggttgtccagaggggctgtggatgccccatccctggaggtgctcaaggccaggttggaygaggccctgggcaatctgatctagtgcttgatctagaggttggcaaccctgcctgaagcagggaggctggaasttgatgatcctttccaacccaagccgttctatgattctatgatcattttgaagtgaaagcaaatttttcttaatcaaccgcattcttyctctccctgtggccttgcaactttatgagctgctcttgtactatgctgagtatgttctcagatttgtcacacctgtgagaggtaggatgaagaggagctggcatactgacactgaatagtaacgggagagccttcagc

SEQ ID NO: 79883 - DNA, 599 bp, Chicken  19866894371471_2
  misc_feature (1)..(48): n is any nucleotide
nnnnnnnnnnnnnnnnnnnnnnnnnnnnnnnnnnnnnnnnnnnnnnnnatcattcagcatcactttcagggactcacaatagctaggctgaccacgggtttaaagtacaaaaaataacatctgccaagtcttaggacagatctgagagggtggtgagatgttggaatgggttgtccagaggggctgtggatgccccatccctggaggtgctcaaggccaggttggaygaggccctgggcaatctgatctagtgcttgatctagaggttggcaaccctgcctgaagcagggaggctggaasttgatgatcctttccaacccaagccgttctatgattctatgatcattttgaagtgaaagcaaatttttcttaatcaaccgcattcttyctctccctgtggccttgcaactttatgagctgctcttgtactatgctgagtatgttctcagatttgtcacacctgtgagaggtaggatgaagaggagctggcatactgacactgaatagtaacgggagagccttcagcagaatatccgcactgctactccctataatcacatcaggtaatagaaagacgtattcctttcacatacagcaca

SEQ ID NO: 79884 - DNA, 600 bp, Chicken  19866894371471_3
tgaccacgggtttaaagtacaaaaaataacatctgccaagtcttaggacagatctgagagggtggtgagatgttggaatgggttgtccagaggggctgtggatgccccatccctggaggtgctcaaggccaggttggaygaggccctgggcaatctgatctagtgcttgatctagaggttggcaaccctgcctgaagcagggaggctggaasttgatgatcctttccaacccaagccgttctatgattctatgatcattttgaagtgaaagcaaatttttcttaatcaaccgcattcttyctctccctgtggccttgcaactttatgagctgctcttgtactatgctgagtatgttctcagatttgtcacacctgtgagaggtaggatgaagaggagctggcatactgacactgaatagtaacgggagagccttcagcagaatatccgcactgctactccctataatcacatcaggtaatagaaagacgtattcctttcacatacagcacaagacctgaatttccagcctctccttttgtgagttctccactcttcatacgaagcttcataggaagagctattgtgggagttgaaatgcc

SEQ ID NO: 79885 - DNA, 600 bp, Chicken  19866894371471_4
ctccctgtggccttgcaactttatgagctgctcttgtactatgctgagtatgttctcagatttgtcacacctgtgagaggtaggatgaagaggagctggcatactgacactgaatagtaacgggagagccttcagcagaatatccgcactgctactccctataatcacatcaggtaatagaaagacgtattcctttcacatacagcacaagacctgaatttccagcctctccttttgtgagttctccactcttcatacgaagcttcataggaagagctattgtgggagttgaaatgcctygcttttagtgcctctgggttgtgtcattacaggtggaagaagcactccctgcacccaccgcacagatactattcagatacatctccttgtggttttttgcctgtgtatttttcataatgaacaatgcaataaacatggtgtgtttgcagtgttaaatcatgttcccaaagggagcagtttgtataacaagataaaattatcacattataataactaaatatgcatcagtctaaagcatgctccaattaatcatcaaaagtttgcaccgcctctttaggtcttaattaagcagaatgtttg

SEQ ID NO: 79886 - DNA, 525 bp, Chicken  19866894371486_1
aaacttaaaaagaaaactagcaaatccaaacagttttatacatgtgaaatgaaatcttcggtctgatttgcaaagatgatgaagaaataccaaaattgttctgtggatccttaagtgtgtcaaatgtaaaatgaaaaaggtggttgccatgttcaaaacttcagatgtgcatttgctgcccttatcatctgaatggccagattttgctttaaggtatcttggtacccctagtcgctgaatataacagggaaaggaggagaaaaacttatgcttgaagttcagttttgatcattgtccccygtcatttgctgttggaaacatttagttcagctcagtggtttgaatgtcagtcaacattagtggcactatatcaaaattcatttccattcactataagtatgtatgtatgtatttgaacttcaggtagtttaaatatctggaacttatgttgacaaagtttattcaatttataaacagctttgctcttggctttttacatgatctttccaggaaaaacctttaaag

SEQ ID NO: 79887 - DNA, 600 bp, Chicken  19866894371488_1
ccacagagcccaggtctacacagcatccccaggtgtcacatatgaaaatcttcataccattcagtggagatggagggaattcatttactgtcatgcaatactcataatccaagggatttttcagcagaaggctgcacaagaagacctctcagtgcagcatcacatgcaaagcatgagtgtttggacatgagtgttccccttggctttgctatcccagaaagatgcaggtgccacagaggcagcccggctgaaaccgagcccagggcaggctttcacctttgggatgctcccaccatgatsttaccatggggaggaattggtctatttcagagcccactcaaagttcaccaactgatgtacgcacaacgggagyagtgcaggttcctctcccagaggawtaaagccagcrccccrccttgtgcaccctgcacagctctcccttctttcccaccaccagggctggccctgcagatggtgtcacaaatgatgtcaccccacacgtccctggaggctgtatgtctcttgcccagagcaaatgtcaccccgaaggagcaatgttttccccacgggaagccgagtgccgcagrctgcagcgrykgg

SEQ ID NO: 79888 - DNA, 600 bp, Chicken  19866894371488_2
agggaattcatttactgtcatgcaatactcataatccaagggatttttcagcagaaggctgcacaagaagacctctcagtgcagcatcacatgcaaagcatgagtgtttggacatgagtgttccccttggctttgctatcccagaaagatgcaggtgccacagaggcagcccggctgaaaccgagcccagggcaggctttcacctttgggatgctcccaccatgatsttaccatggggaggaattggtctatttcagagcccactcaaagttcaccaactgatgtacgcacaacgggagyagtgcaggttcctctcccagaggawtaaagccagcrccccrccttgtgcaccctgcacagctctcccttctttcccaccaccagggctggccctgcagatggtgtcacaaatgatgtcaccccacacgtccctggaggctgtatgtctcttgcccagagcaaatgtcaccccgaaggagcaatgttttccccacgggaagccgagtgccgcagrctgcagcgrykggaagcgcaaagcccgacgtccccatgcacctgaagtacctctaaagcccagggagaaacacacctcctctctcc

SEQ ID NO: 79889 - DNA, 600 bp, Chicken  19866894371488_3
tactcataatccaagggatttttcagcagaaggctgcacaagaagacctctcagtgcagcatcacatgcaaagcatgagtgtttggacatgagtgttccccttggctttgctatcccagaaagatgcaggtgccacagaggcagcccggctgaaaccgagcccagggcaggctttcacctttgggatgctcccaccatgatsttaccatggggaggaattggtctatttcagagcccactcaaagttcaccaactgatgtacgcacaacgggagyagtgcaggttcctctcccagaggawtaaagccagcrccccrccttgtgcaccctgcacagctctcccttctttcccaccaccagggctggccctgcagatggtgtcacaaatgatgtcaccccacacgtccctggaggctgtatgtctcttgcccagagcaaatgtcaccccgaaggagcaatgttttccccacgggaagccgagtgccgcagrctgcagcgrykggaagcgcaaagcccgacgtccccatgcacctgaagtacctctaaagcccagggagaaacacacctcctctctccccacccccagatgggtttccaaaca

SEQ ID NO: 79890 - DNA, 600 bp, Chicken  19866894371488_4
caagggatttttcagcagaaggctgcacaagaagacctctcagtgcagcatcacatgcaaagcatgagtgtttggacatgagtgttccccttggctttgctatcccagaaagatgcaggtgccacagaggcagcccggctgaaaccgagcccagggcaggctttcacctttgggatgctcccaccatgatsttaccatggggaggaattggtctatttcagagcccactcaaagttcaccaactgatgtacgcacaacgggagyagtgcaggttcctctcccagaggawtaaagccagcrccccrccttgtgcaccctgcacagctctcccttctttcccaccaccagggctggccctgcagatggtgtcacaaatgatgtcaccccacacgtccctggaggctgtatgtctcttgcccagagcaaatgtcaccccgaaggagcaatgttttccccacgggaagccgagtgccgcagrctgcagcgrykggaagcgcaaagcccgacgtccccatgcacctgaagtacctctaaagcccagggagaaacacacctcctctctccccacccccagatgggtttccaaacagatttgcaggc

SEQ ID NO: 79891 - DNA, 600 bp, Chicken  19866894371488_5
gatttttcagcagaaggctgcacaagaagacctctcagtgcagcatcacatgcaaagcatgagtgtttggacatgagtgttccccttggctttgctatcccagaaagatgcaggtgccacagaggcagcccggctgaaaccgagcccagggcaggctttcacctttgggatgctcccaccatgatsttaccatggggaggaattggtctatttcagagcccactcaaagttcaccaactgatgtacgcacaacgggagyagtgcaggttcctctcccagaggawtaaagccagcrccccrccttgtgcaccctgcacagctctcccttctttcccaccaccagggctggccctgcagatggtgtcacaaatgatgtcaccccacacgtccctggaggctgtatgtctcttgcccagagcaaatgtcaccccgaaggagcaatgttttccccacgggaagccgagtgccgcagrctgcagcgrykggaagcgcaaagcccgacgtccccatgcacctgaagtacctctaaagcccagggagaaacacacctcctctctccccacccccagatgggtttccaaacagatttgcaggctccag

SEQ ID NO: 79892 - DNA, 600 bp, Chicken  19866894371488_6
tcccaccatgatsttaccatggggaggaattggtctatttcagagcccactcaaagttcaccaactgatgtacgcacaacgggagyagtgcaggttcctctcccagaggawtaaagccagcrccccrccttgtgcaccctgcacagctctcccttctttcccaccaccagggctggccctgcagatggtgtcacaaatgatgtcaccccacacgtccctggaggctgtatgtctcttgcccagagcaaatgtcaccccgaaggagcaatgttttccccacgggaagccgagtgccgcagrctgcagcgrykggaagcgcaaagcccgacgtccccatgcacctgaagtacctctaaagcccagggagaaacacacctcctctctccccacccccagatgggtttccaaacagatttgcaggctccagacctctcgtgtctgctctgaactcctcggtggaggcggaggaaacgctgctcagcgcataatgaattgcaggcacgcgctcccctgagcggctgtttggaaggcgtcccacgctgctcgtgccaagtgtgctggccaggggagctcagcggtattagcgtgtcccagctaatt

SEQ ID NO: 79893 - DNA, 600 bp, Chicken  19866894371488_7
gatsttaccatggggaggaattggtctatttcagagcccactcaaagttcaccaactgatgtacgcacaacgggagyagtgcaggttcctctcccagaggawtaaagccagcrccccrccttgtgcaccctgcacagctctcccttctttcccaccaccagggctggccctgcagatggtgtcacaaatgatgtcaccccacacgtccctggaggctgtatgtctcttgcccagagcaaatgtcaccccgaaggagcaatgttttccccacgggaagccgagtgccgcagrctgcagcgrykggaagcgcaaagcccgacgtccccatgcacctgaagtacctctaaagcccagggagaaacacacctcctctctccccacccccagatgggtttccaaacagatttgcaggctccagacctctcgtgtctgctctgaactcctcggtggaggcggaggaaacgctgctcagcgcataatgaattgcaggcacgcgctcccctgagcggctgtttggaaggcgtcccacgctgctcgtgccaagtgtgctggccaggggagctcagcggtattagcgtgtcccagctaattagggctgtg

SEQ ID NO: 79894 - DNA, 600 bp, Chicken  19866894371488_8
atsttaccatggggaggaattggtctatttcagagcccactcaaagttcaccaactgatgtacgcacaacgggagyagtgcaggttcctctcccagaggawtaaagccagcrccccrccttgtgcaccctgcacagctctcccttctttcccaccaccagggctggccctgcagatggtgtcacaaatgatgtcaccccacacgtccctggaggctgtatgtctcttgcccagagcaaatgtcaccccgaaggagcaatgttttccccacgggaagccgagtgccgcagrctgcagcgrykggaagcgcaaagcccgacgtccccatgcacctgaagtacctctaaagcccagggagaaacacacctcctctctccccacccccagatgggtttccaaacagatttgcaggctccagacctctcgtgtctgctctgaactcctcggtggaggcggaggaaacgctgctcagcgcataatgaattgcaggcacgcgctcccctgagcggctgtttggaaggcgtcccacgctgctcgtgccaagtgtgctggccaggggagctcagcggtattagcgtgtcccagctaattagggctgtga

SEQ ID NO: 79895 - DNA, 600 bp, Chicken  19866894371488_9
tsttaccatggggaggaattggtctatttcagagcccactcaaagttcaccaactgatgtacgcacaacgggagyagtgcaggttcctctcccagaggawtaaagccagcrccccrccttgtgcaccctgcacagctctcccttctttcccaccaccagggctggccctgcagatggtgtcacaaatgatgtcaccccacacgtccctggaggctgtatgtctcttgcccagagcaaatgtcaccccgaaggagcaatgttttccccacgggaagccgagtgccgcagrctgcagcgrykggaagcgcaaagcccgacgtccccatgcacctgaagtacctctaaagcccagggagaaacacacctcctctctccccacccccagatgggtttccaaacagatttgcaggctccagacctctcgtgtctgctctgaactcctcggtggaggcggaggaaacgctgctcagcgcataatgaattgcaggcacgcgctcccctgagcggctgtttggaaggcgtcccacgctgctcgtgccaagtgtgctggccaggggagctcagcggtattagcgtgtcccagctaattagggctgtgag

SEQ ID NO: 79896 - DNA, 600 bp, Chicken  19866894371502_1
tgcaagagtctcatccaagccacagtctttctccattctcctctttaaaccagagctggtcctgcatttcccacagacaatgctaaggtcacctgctgagcacacatcagcacagattcagatccccagaggtgcaacaggtgttcctgacgaatgtgttgtatagtgaagtcttcatcaaactcatggattctggagtatgggattttaggagaactggtaaggaattcattctgaaatcttttgctccagaatgtttcacaatagatgtgatagctatgttttctattgagattatgkatccatttttccatacaaatgttaaactatataaactgcttaggactaggggcttgctttactcactgctttagtattctgaaacaactaarattccttttagtaactttagtaacttcagcattgaagctgaaattgataattaactgtctttcagcttaaaagattattataaagtcaagcacctaacccagataattactataactgacatttttctttgaattcttcaccttcttacattctgtgatataaaataccttatctgtgtcttcagatgacagcttttaagaaagtata

SEQ ID NO: 79897 - DNA, 600 bp, Chicken  19866894371502_2
ctgctgagcacacatcagcacagattcagatccccagaggtgcaacaggtgttcctgacgaatgtgttgtatagtgaagtcttcatcaaactcatggattctggagtatgggattttaggagaactggtaaggaattcattctgaaatcttttgctccagaatgtttcacaatagatgtgatagctatgttttctattgagattatgkatccatttttccatacaaatgttaaactatataaactgcttaggactaggggcttgctttactcactgctttagtattctgaaacaactaarattccttttagtaactttagtaacttcagcattgaagctgaaattgataattaactgtctttcagcttaaaagattattataaagtcaagcacctaacccagataattactataactgacatttttctttgaattcttcaccttcttacattctgtgatataaaataccttatctgtgtcttcagatgacagcttttaagaaagtatattttttttttcccctgaaaatatcatctacatattttttggaagttcattctaaagatgttaactaattggatttgacctacactgaacatc

SEQ ID NO: 79898 - DNA, 600 bp, Chicken  19866894371503_1
ttgaaatgtcttctagacatcttttctacacagtttatataacttccctataaatattccaagtaatttcttccatttctagatcatgggaatgtctctatacaattagctttattaaaatacttttatcctttgtgccatttatcaaataagaagacgttttcattcttttactcatcaaatttatgatagccttttgattgaagctaggtactctatgaaatatttgcctaaaagaaaatcattaccttcagtggaatgaaattcatagatgacgctgtgttggagaacatgtagackagcttgaaatgctcactttagacttcagtatctctacttcagaagtcctatttctccagacatatccaatctcgctcttttatccaaatctgacctcataaatttcaactcatgtttgagttgcctttgtttcttctgataataactcaatgtcatatccatctctacacaccaatttcagagcaggactcattagaccaaayatatttttaagttagtgttgctctgtggaaaccatgacagagttttgaacaacttaagttgtcagaaaataagttttaacctttcttcaatatgtat

SEQ ID NO: 79899 - DNA, 561 bp, Chicken  19866894371503_2
aagctaggtactctatgaaatatttgcctaaaagaaaatcattaccttcagtggaatgaaattcatagatgacgctgtgttggagaacatgtagackagcttgaaatgctcactttagacttcagtatctctacttcagaagtcctatttctccagacatatccaatctcgctcttttatccaaatctgacctcataaatttcaactcatgtttgagttgcctttgtttcttctgataataactcaatgtcatatccatctctacacaccaatttcagagcaggactcattagaccaaayatatttttaagttagtgttgctctgtggaaaccatgacagagttttgaacaacttaagttgtcagaaaataagttttaacctttcttcaatatgtataagtagtcatatcctggatgaaactatatgagacacaggaaccgaatctacattttctgcatctaaactgagactttggagcactttgaatttttgaattcaagttatacattcattcatggataaatcttcatcagaaagagtcatgtcatataagcgcttat

SEQ ID NO: 79900 - DNA, 600 bp, Chicken  19866894371509_1
gctgcaaaatatcctcagttatttcatctttcctgccgagaaaggctaaacataaccgctcaggagtctggcacgaggaactcgggtcgcttactcaaaagaggagcagcgagccagaccttcagctgcactcactcaacatcagagcgcatctattgggtgaaacgcttaacccccactgggaagggcttctgcagtcatagcagcatagaatcattggagttggaaagggacctttaaaggccacctggtccaatcccactgcaaagaacagggacacccacagctccatcagggtgmcagctggaggtgtctctgtcctgaccgtgcaccaggctgccttggagagggaagtgggtgcatgggaacgaggtgtcacttctcgtacctccagggggagcgatctgtttcagcaacaacagggaaaagtcagcttcattcacgaggaaggaagcaacgggggaggaaggaacggctgtttgttaatgttgcctgaagctaaacattaatgaagtgcaacacttaagatgcttgcgtgcctcagcgacgtccaccacgctcacatgttgcctttctaattatgtaggttaaagcatgagg

SEQ ID NO: 79901 - DNA, 600 bp, Chicken  19866894371512_1
tgagcgcaagtgcttgcacctgaaatttctaggcacaaagaaagcctcactaagtcacttttggcaacaaaaatccatacagatcaagatctctcagcctctttcttgcagaccttgtagttatcctttaggctgtaaaccttttgtgattctacacagtttagagtttatcattgagatcagctgcacctgcaaatgaaaaatgtttaaaatacttatggttgtgctttcagttacacacactgaggctcactgaagtgaaatccagcctaacttcagaacaatttcatgtagtcctayatggtgctttgccatatttcaattttactttgattttatttgacagtttgttggtcaaaagaactcctcgaagtgtgggatatcggccagactgtaagtaactctctgacaaccactgttcatttttaaaaatgcattgatacgttgtgtactctttggccaaagtccatgggtgttccagatatttttcatgaatggtttttgattgattttaaatgcaaacaaacaaacaracccacccaacttgagtttaaatatttgcaattagtttactatatgaagacttagatatttttggtc

SEQ ID NO: 79902 - DNA, 419 bp, Chicken  19866894371512_2
ttacacacactgaggctcactgaagtgaaatccagcctaacttcagaacaatttcatgtagtcctayatggtgctttgccatatttcaattttactttgattttatttgacagtttgttggtcaaaagaactcctcgaagtgtgggatatcggccagactgtaagtaactctctgacaaccactgttcatttttaaaaatgcattgatacgttgtgtactctttggccaaagtccatgggtgttccagatatttttcatgaatggtttttgattgattttaaatgcaaacaaacaaacaracccacccaacttgagtttaaatatttgcaattagtttactatatgaagacttagatatttttggtccacgtgaatcccttttcaggtggaaattctccatgcttacaggtagtcaaga

SEQ ID NO: 79903 - DNA, 600 bp, Chicken  19866894371513_1
cagactgttgacaagtttaatagctgtacctccatcaaatctgaaaagatcatagatgactgtttttctcttactaagaagttcgtttaagtagaagtagtgaaaacaaaatattaaagacatgttcatttaatttcgaaacctagcgaacaaagaactgagttcttagaaacaatttagcacatagccattttcaaattttaaatctcagactgttaattatggaacaatagagttatcaaaaggttttcatgccctttacttacgcacaagaaacaagtccactgagaaatcttttayattagaagaaaaaaatctcctcactacttcaaggtatttcagaagtgttagacactggttcactccagcaactctgagtgcgaatgcctggcatgtttttcatctacttaactgcttatttgcccctcaaaacattgaatttgttcatctctggatgttcccattaaactatccttccacaatgtataggctactacttatagtctgcttagcaaraattgtgctcattgctgtgtgtacagctagttctgaactttaaactgccagtaattactgaaaggagtatcaacacactactgt

SEQ ID NO: 79904 - DNA, 600 bp, Chicken  19866894371513_2
taattatggaacaatagagttatcaaaaggttttcatgccctttacttacgcacaagaaacaagtccactgagaaatcttttayattagaagaaaaaaatctcctcactacttcaaggtatttcagaagtgttagacactggttcactccagcaactctgagtgcgaatgcctggcatgtttttcatctacttaactgcttatttgcccctcaaaacattgaatttgttcatctctggatgttcccattaaactatccttccacaatgtataggctactacttatagtctgcttagcaaraattgtgctcattgctgtgtgtacagctagttctgaactttaaactgccagtaattactgaaaggagtatcaacacactactgtagactcattaatgggtattgaataacactaaaaaaatgccacttagtttcaacacaaaacattaggtcgttgttttccatgagatgcaaaatggaaaaacttttacagcattaactcattaaaaggaaaaattacacagagaaagcacacaagtctattggaaggttcttagagttgttatacaagttacaatggaactaattctagtcatagaat

SEQ ID NO: 79905 - DNA, 373 bp, Chicken  19866894371513_3
acaaatacacattaatgttacaaaaaacagctcttgaaacagttacacaggaagcctttgttcttatctaagccatacgtacttcaacacaactgagtactaagacaaaaagtcaacaaataaaagagtactataacaaaagattaaaagaaaatagtaactgaaattgaaatccttctaacaaataatacttcctcaagaatcctttgaaaatacaacacgtgaatactaagagctttaaaaacattgtgtggcaattgaacagatcaatacgatctgctaaggaccagcacaataaaraggcacaaccaatgaaaggaaaaagattgcttacctacatcagaagatcattaatttgcaagaaaaatcttca

SEQ ID NO: 79906 - DNA, 600 bp, Chicken  19866894371514_1
attcagtgtaagtctgaatgatttctttagtgcttttgcattttggtggaaaaaggtatgcgataactgtgcctgttcaaacatatttggtaaagccaaaatacctgtcagttgatctgcaagtctattgccttctgttaatggtccgggcaaggtggtatgggattgaacatttatgatgaagtaacattcctttcacgtattaataaaaaaacaaatacagtaacgcgaatagttgcttgttagacacctcttttaaatatgccacttctatcctggtcactattccagtgacatatrctgactctgtaaccatatgaatagcatcagaccattttttaaatacctgcaccaccgcagctaactctactatctgtggagatccctctacaatatgaatatcagacatccactgtccttgagagtcctgccaaacaataaccraatgtcccctcctccctgatccatctgtaaagacagtttatgcatctaatgaaataggagagcatttaggaagatcctgtaaccaaaaatggaattgtaataatctgtgccctggcggatgcactgatattgttccagggaagccttccatggcca

SEQ ID NO: 79907 - DNA, 600 bp, Chicken  19866894371514_2
tccgggcaaggtggtatgggattgaacatttatgatgaagtaacattcctttcacgtattaataaaaaaacaaatacagtaacgcgaatagttgcttgttagacacctcttttaaatatgccacttctatcctggtcactattccagtgacatatrctgactctgtaaccatatgaatagcatcagaccattttttaaatacctgcaccaccgcagctaactctactatctgtggagatccctctacaatatgaatatcagacatccactgtccttgagagtcctgccaaacaataaccraatgtcccctcctccctgatccatctgtaaagacagtttatgcatctaatgaaataggagagcatttaggaagatcctgtaaccaaaaatggaattgtaataatctgtgccctggcggatgcactgatattgttccagggaagccttccatggccacctgaaaaagcagtgaactttgaaacaactattgtaacgtatttacagatattggcaaaatgagcactgaaggcttcaatccagtcagcgacagtagtctttgccgtcccctgatgatgagggtggtgatcatttcaacccctg

SEQ ID NO: 79908 - DNA, 600 bp, Chicken  19866894371523_1
tcagttaaatatagtgtgaagaagcatgacatagaacagtatccacaggtttcaaaatcaagtatttgctttgaaatactttcatcctttcagtcctatgctttaagatctaatcatgttcagaaaagagccactataattttcaaataataagagaagaaggaatatttctgtgattcttggaaaattttgttttattttattttttaactatctaatgaactacattgaaaatacaacgtatttcttcctatagcattaaaatgatcataaaaccaaatggatacattcaatatgtgygcattcttgtgagtaacacaattaagttgcatgtgaatcatacagtctagcatctctgcacttttgatgaatttcttatttaattgtatttcttggctagacaaacaaatcccataatacatgcaggattaaaataatttaggcatttggcttttgtcttttaaataaaccaactaccaaactttaaactagaataattacagagaaatcgatatatctaataatgccattcagaccttaattcttacatattcattccagaacgtatagaacaaatccagctttctctgtctatgcttt

SEQ ID NO: 79909 - DNA, 600 bp, Chicken  19866894371524_1
tcattaatgaattcattaaatgttctgtctcctgcagagataacagagaggtgtgctcatttccccacagccagcggagtagctgcagtgtcacaagatttctaattgagcaaatgcaatgccttcactttttatgtctaaaaacaagtaaataccagtatcagaatatctcttccttaatgagtttgtttgctccagaatgcagcatttttccactggaatggagaacattaaaaaacacaaaaatttgcttgcaattattgcacagagagatattacataatttggagggataaatgrttgtaaatttaactctaactgactaaatattgtagcacatagagaggtgttggtttcttatcaaagcaggtactttgatatctggtagtacagaatagtacccagtccacatttaagttaattacagaatactaggaagtaacagatgtgctgcagatggctagggtgattaaaataaaaaagctcacaaataaaggttttacaggtttggaagctaacaatatataaatgggttaagaagcactatgttagaaaaatcacatttttttactatttgaactgagaatgtatttgtttcct

SEQ ID NO: 79910 - DNA, 537 bp, Chicken  19866894371525_1
agagagaagaagaaaaaaaaaaaaaagccagagataaaacgagagaaacctcggcagtaaaaacagcatcttggtaaatagactattaaaaaaattctgacctgctttatggctttcttggctgccgttcagctgcgctgccctgccggcacggagagaaggtagcggggccggcgtctgtgtggatgctcagagccccgggacgcggctccccccgccagcagccacggggcgttaaatttagccacataatgatggccctgacgaggcagccttttgtagccacgctgtaattactgsctggggaaggggaaggggggctcccacacccccatccaacccgcagctttctggggaagcgggggtacggctgcgagggatgaggggacggctgctgagccccgtgctgctccctgcktgggcagggggctcgccccacctttggggttggggacagcggtgagctaagctggcccgggcagagaccccacggcacagagcttggtgttctggcctctctgagccccggcactggga

SEQ ID NO: 79911 - DNA, 419 bp, Chicken  19866894371525_2
agagagaagaagaaaaaaaaaaaaaagccagagataaaacgagagaaacctcggcagtaaaaacagcatcttggtaaatagactattaaaaaaattctgacctgctttatggctttcttggctgccgttcagctgcgctgccctgccggcacggagagaaggtagcggggccggcgtctgtgtggatgctcagagccccgggacgcggctccccccgccagcagccacggggcgttaaatttagccacataatgatggccctgacgaggcagccttttgtagccacgctgtaattactgktgggcagggggctcgccccacctttggggttggggacagcggtgagctaagctggcccgggcagagaccccacggcacagagcttggtgttctggcctctctgagccccggcactggga

SEQ ID NO: 79912 - DNA, 599 bp, Chicken  19866894371528_1
  misc_feature (1)..(44): n is any nucleotide
nnnnnnnnnnnnnnnnnnnnnnnnnnnnnnnnnnnnnnnnnnnnattaaagcttttgaatcggagtctgggggatcccagtaaatattcttaccatatttatctccgtcttctcccttggcgctgatcctcctgcccagcacttggatgtgcttcccgcttgtcctgctgtacagctgatagagccggagctgcttcctgctcacgtcgtctcttgctcgcgtttggttctccacgtgtatccgaaaatctacattctcctcggcaacaaacatctgaaagtgatggggagggaaaaagraaagagaacagaccatgaaacaaaataagcaccttggacagaaagattacacatcaacctgccaaagggcacatggcgcaagatgactgggatttggctgcccttcacttgacagtcgaggccgtggtatcaggcactcaaaatgtaattctacccagagctggctctagacagtaaaccaaacctgagtttttacaatcaaactgtgtgtgggggggggtggctgagtaaaaacttctgctcggtcctgctttgatttaatcctggtcagccacgctggccgtaaattaggcttgctt

SEQ ID NO: 79913 - DNA, 599 bp, Chicken  19866894371531_1
  misc_feature (1)..(87): n is any nucleotide
nnnnnnnnnnnnnnnnnnnnnnnnnnnnnnnnnnnnnnnnnnnnnnnnnnnnnnnnnnnnnnnnnnnnnnnnnnnnnnnnnnnnnnntagggatttttacatggtctaattgaaatccaaaccctttaatttgggcatgaggttttgtagcttttggcatcattctacaagcatctgagtaatcaaattgccctaattggacagcaaggctttctgccaggacatggcaatccttgggtggcaaggaccagtgtatgccagtcccacatagaggcctgggcattgggaaggtgttaacasaggcagggattgggcagggccttgctgtgctcaggtgagtccctgctctcctgatggccttgagctttcctgctatgttctgcagcgtgctatgggacacgrctattttttagtatcaccaaacatatttttactctcaaaggaatacttagctatctgcaaaaattatgttaggagtttaatgaaatacttccccatgcaagacttttgtctcgttcccccacagaaataaccctggctagatcttgtgtctgtagtatctgtaaaatacagaaatctgaacaccatttaaaagaaaa

SEQ ID NO: 79914 - DNA, 600 bp, Chicken  19866894371531_2
ggtctaattgaaatccaaaccctttaatttgggcatgaggttttgtagcttttggcatcattctacaagcatctgagtaatcaaattgccctaattggacagcaaggctttctgccaggacatggcaatccttgggtggcaaggaccagtgtatgccagtcccacatagaggcctgggcattgggaaggtgttaacasaggcagggattgggcagggccttgctgtgctcaggtgagtccctgctctcctgatggccttgagctttcctgctatgttctgcagcgtgctatgggacacgrctattttttagtatcaccaaacatatttttactctcaaaggaatacttagctatctgcaaaaattatgttaggagtttaatgaaatacttccccatgcaagacttttgtctcgttcccccacagaaataaccctggctagatcttgtgtctgtagtatctgtaaaatacagaaatctgaacaccatttaaaagaaaacctaacagatatatatcttttctttccacacaaaggtgtttcaagggaatagcaaccccactgatgttgtttacagaccttttcccaaaccagttttaacacg

SEQ ID NO: 79915 - DNA, 600 bp, Chicken  19866894371532_1
tctgagcctttcacatctgcatgacttgctggttttggtacatttgatattacctgagagcggatttttaacgctggcccgagttttaatcccatggtatctaggagatgttcctctgttagcagtgggagggtttctccatcgatagcgtggtctttgaatgtctgatgaaaagaaaataatatcaaagggtgctctaacagacttcaccagttattctttatgcttaatcctgaggtgtagacaacaaacagaggaaataattgcagtgttttaccttcacgtttctctcataactgsagtgtgatgtcctttgttcagatagatggacatctgcacattttcctgtggcttatctacttgtttttagcaagtgggggcttagtgatcttttggtgttacttagtgttggtttggtgtgtttgctgttttttattggttcttggttggttggttggttgttgttttgtaacatgctgacaactagtaaacctctgtatttgtcgtatttatttgttgatcttaamtctaggtgatcctaaagaccttaaaatgtgactgcgactgttaggaatgtttgtcatcacctgggcatagtca

SEQ ID NO: 79916 - DNA, 600 bp, Chicken  19866894371532_2
taatcctgaggtgtagacaacaaacagaggaaataattgcagtgttttaccttcacgtttctctcataactgsagtgtgatgtcctttgttcagatagatggacatctgcacattttcctgtggcttatctacttgtttttagcaagtgggggcttagtgatcttttggtgttacttagtgttggtttggtgtgtttgctgttttttattggttcttggttggttggttggttgttgttttgtaacatgctgacaactagtaaacctctgtatttgtcgtatttatttgttgatcttaamtctaggtgatcctaaagaccttaaaatgtgactgcgactgttaggaatgtttgtcatcacctgggcatagtcagagcagcctgggaggctaatgatgaagttgtacacatcatcaaccgtccayttgcggatatcttcaatggtggaaatgtcttctccgttcaggatcaggccatgggctgctttacggaggaaacacagatgttatttttgtagaaatctgctggcaaaccaataggaaaagattgttgatgtaagattacgtacacttatacagaacctcatacgttaacagcacca

SEQ ID NO: 79917 - DNA, 600 bp, Chicken  19866894371532_3
cttatctacttgtttttagcaagtgggggcttagtgatcttttggtgttacttagtgttggtttggtgtgtttgctgttttttattggttcttggttggttggttggttgttgttttgtaacatgctgacaactagtaaacctctgtatttgtcgtatttatttgttgatcttaamtctaggtgatcctaaagaccttaaaatgtgactgcgactgttaggaatgtttgtcatcacctgggcatagtcagagcagcctgggaggctaatgatgaagttgtacacatcatcaaccgtccayttgcggatatcttcaatggtggaaatgtcttctccgttcaggatcaggccatgggctgctttacggaggaaacacagatgttatttttgtagaaatctgctggcaaaccaataggaaaagattgttgatgtaagattacgtacacttatacagaacctcatacgttaacagcaccatgtagtcaccgatacagtaatccttgacaccaaaatcacttgatagttgtaactaatcttggagggtttgcttctatttgctgtatgcagtgtaaataccagtcactacatgtacagatcacac

SEQ ID NO: 79918 - DNA, 600 bp, Chicken  19866894371537_1
tagcctcaccttgaacacggcatgcaggtttgggcaccaaaatgtaagtaggacaaaaatgttagagtgtcaaaaggaggattaaaaagatggtgaaggatctggagggcaagatgtatgagaagcagctgaggtccctgagttcgctcagcgcagagcagaagagctgaggggaggcctgatggcggctgcagctcctcacagggagcggaggggcagcgctgagctctgctctgtgtgacagcgacagggcccgagggaacggcatggagctgtgtcaggggaggcagctgggggttrgggacaggggctgcaccagagggcggtgggcatggaacgggctgcccagggcagtgggcacaaccccaagcgctggagtttaaggagtgtttggacagtgctctcagacacagtgttggaattccaggtggtctgtgtggagcatgggagttggactcagtgatccctgtgggtctcctccaactcaggatattctgttattcatgattctatgactgtccgttctcagctgaccttggaagcccagcacgggaacatttcagaaccttttataccctacctgaatagcgaaagccggca

SEQ ID NO: 79919 - DNA, 600 bp, Chicken  19866894371557_1
aacaattaatgaccgctaccgatgaaccctcccccccgcagctcccggcccgacggacgcagacgcgaacccagcgccgctttcaggtggaagaaaccgcagcggaagaagtacggtctgctgagcagctccgatgaacgcgtggagatggcatctctggacagcgatgaggacaccgtgtttgagacgcagaacctgaggcggtgagcggcgtccccgcccctcgtgtcccctagggaagcgcccacgctgcccccagaggggcacggagtgaacctcagcttcacatcgcctcccttygctgtcacaccgagagccccgtgtccctcttgctgcgtgctctggggacagacccgcacggccctgcagggcaggaggagctgctgtggctcccagcacagtgctgggcacacattgctgcccgcggggctgcgtgccctcattccctgcatcacacagcttggcttgtccggagctgagggttgstgtccccatgagcacagctcgtctgagcacagcggtgcaggcagtgctggtggctgcgctcacgttgtgctttttctttccttttcagatgatttgggaccagtggcacaactg

SEQ ID NO: 79920 - DNA, 600 bp, Chicken  19866894371557_2
acgcagaacctgaggcggtgagcggcgtccccgcccctcgtgtcccctagggaagcgcccacgctgcccccagaggggcacggagtgaacctcagcttcacatcgcctcccttygctgtcacaccgagagccccgtgtccctcttgctgcgtgctctggggacagacccgcacggccctgcagggcaggaggagctgctgtggctcccagcacagtgctgggcacacattgctgcccgcggggctgcgtgccctcattccctgcatcacacagcttggcttgtccggagctgagggttgstgtccccatgagcacagctcgtctgagcacagcggtgcaggcagtgctggtggctgcgctcacgttgtgctttttctttccttttcagatgatttgggaccagtggcacaactgagcggaccgagcgagggctgcgagtcctcggctggagtcagcgatgctgcagttttagctttgagaattgcttctaatgactgcgaattaacagcacaaactctttggtcgctggggagggcaaagggggaccaaacctgttttccttcacacgtctgttttcggggagaggtggagctgcgaagg

SEQ ID NO: 79921 - DNA, 600 bp, Chicken  19866894371557_3
tgcgctgagtgctgcatggggtggtgctcaggaagatgtaccagaagtgactgtggggtggcattgagtgctgcaggacggtgcccactgcctgcatggggcttttgggtgctcttctgactgtggcagcagcctggagcttggcaggctcagctttcccttccgtgatgtccaatcccttccttggagggctttgtgccatcggctgcgccccgtggtggggtgggggcagcagcatcgccttaggtcagacaggggagtttggggagggagcagcggggtgagcagcgagtgggtgaygggtataaatccctgcacgggtttacaaaacaaagagctgtttgcaaacaaaatgtatgggatggtctgtggggctgcacaggtgttctgcgccccgagggggggagaaacgcgtccacctgagaacctgagctgctgcgtaagggatgggagagccagggcctctctcagctgtggttctgggtctgctcagacatcatctccctttgcagctgctgctgctccccgttggctgtgcttcagctgcgtcccatcagctgagcagaaggaacagcagttgcgcggtgtttgggttccatg

SEQ ID NO: 79922 - DNA, 600 bp, Chicken  19866894371561_1
gaatgcaagttgtagtaaaggataacccaagacagctgaagttgctgtccattacaattgaaacatgcagtgaataaaggcaagaagtgttctggagattaatgcaagagttttattcaagtttctgttcaaatccttggtgatatttggcaaataaactcacagagctctgagcactacagagacagttatttatgactgacaaaacgcacaagataccagaccatattgctttgcaacagagacaggctatgccagatgtttcatgagaccatatattttcattccttaattaaaagyaaaaaaaacycacaagaagtcccaagtcacaatcattacaaagctttgaaggaaaaacctaaatcaagtctcttacaattctctgaggacttaaattttaagtacccaataaaatggacagataactgtataagcatggatctcttcaccacttttaattaaatgtgactcatctcagtcacaattttcttggaaccttcaggtgcgcttttctcagaggggagagaatacagaataggacaagaattcagttaaccgagaagttaacctcactctggaggggaggagtgtacaragwtc

SEQ ID NO: 79923 - DNA, 600 bp, Chicken  19866894371561_2
tgtagtaaaggataacccaagacagctgaagttgctgtccattacaattgaaacatgcagtgaataaaggcaagaagtgttctggagattaatgcaagagttttattcaagtttctgttcaaatccttggtgatatttggcaaataaactcacagagctctgagcactacagagacagttatttatgactgacaaaacgcacaagataccagaccatattgctttgcaacagagacaggctatgccagatgtttcatgagaccatatattttcattccttaattaaaagaaaaaaaaacycacaagaagtcccaagtcacaatcattacaaagctttgaaggaaaaacctaaatcaagtctcttacaattctctgaggacttaaattttaagtacccaataaaatggacagataactgtataagcatggatctcttcaccacttttaattaaatgtgactcatctcagtcacaattttcttggaaccttcaggtgcgcttttctcagaggggagagaatacagaataggacaagaattcagttaaccgagaagttaacctcactctggaggggaggagtgtacaragwtccaatatrtta

SEQ ID NO: 79924 - DNA, 594 bp, Chicken  19866894371561_3
aaagaaaaaaaaacycacaagaagtcccaagtcacaatcattacaaagctttgaaggaaaaacctaaatcaagtctcttacaattctctgaggacttaaattttaagtacccaataaaatggacagataactgtataagcatggatctcttcaccacttttaattaaatgtgactcatctcagtcacaattttcttggaaccttcaggtgcgcttttctcagaggggagagaatacagaataggacaagaattcagttaaccgagaagttaacctcactctggaggggaggagtgtacaragwtccaatatrttacatggaacaacaaaattgcaaaacgatgtgccacacattgtctgtcaaatgtcatatttccttcttccttccaacagaaagggaatagaaagaatctacagaacacagcatctcaagagaatagcaagttcataatatgtacaaacaagcactaaagcagaataatcttcagaaaagaaaaacgtgtgcctatttctccacacccagtgcaacaagaacttcttttccattcaaaaggcacacaatcttcttggaaaagagggcagagaagaaggggat

SEQ ID NO: 79925 - DNA, 591 bp, Chicken  19866894371561_4
gaaaaaaaaacycacaagaagtcccaagtcacaatcattacaaagctttgaaggaaaaacctaaatcaagtctcttacaattctctgaggacttaaattttaagtacccaataaaatggacagataactgtataagcatggatctcttcaccacttttaattaaatgtgactcatctcagtcacaattttcttggaaccttcaggtgcgcttttctcagaggggagagaatacagaataggacaagaattcagttaaccgagaagttaacctcactctggaggggaggagtgtacaragwtccaatatrttacatggaacaacaaaattgcaaaacgatgtgccacacattgtctgtcaaatgtcatatttccttcttccttccaacagaaagggaatagaaagaatctacagaacacagcatctcaagagaatagcaagttcataatatgtacaaacaagcactaaagcagaataatcttcagaaaagaaaaacgtgtgcctatttctccacacccagtgcaacaagaacttcttttccattcaaaaggcacacaatcttcttggaaaagagggcagagaagaaggggat

SEQ ID NO: 79926 - DNA, 582 bp, Chicken  19866894371561_5
acycacaagaagtcccaagtcacaatcattacaaagctttgaaggaaaaacctaaatcaagtctcttacaattctctgaggacttaaattttaagtacccaataaaatggacagataactgtataagcatggatctcttcaccacttttaattaaatgtgactcatctcagtcacaattttcttggaaccttcaggtgcgcttttctcagaggggagagaatacagaataggacaagaattcagttaaccgagaagttaacctcactctggaggggaggagtgtacaragwtccaatatrttacatggaacaacaaaattgcaaaacgatgtgccacacattgtctgtcaaatgtcatatttccttcttccttccaacagaaagggaatagaaagaatctacagaacacagcatctcaagagaatagcaagttcataatatgtacaaacaagcactaaagcagaataatcttcagaaaagaaaaacgtgtgcctatttctccacacccagtgcaacaagaacttcttttccattcaaaaggcacacaatcttcttggaaaagagggcagagaagaaggggat

SEQ ID NO: 79927 - DNA, 600 bp, Chicken  19866894371563_1
ttacaaaaaactgtgagaacttcaggtgaactctaatcaacacagtaaatggtcaagagagcataatcaacctctatgccacatcagaagtcagtgtcgatcaatagaaaaagaaacatttcagaaaggactgtcggaatgcatcttgaacttgaatagtttctacattagctatgactatttagaaaaaaagggatcagtgaagagagaatagtgagtctgctaagtgtgttacttgttaaaaaataacacaacaataataataatttaaaataaaaggattaggattgaaaataaagyagcagtgacttcatcacgtgcatcagtgctgttacttcatgtttatatagctggtgttcagtctgattattctacttggagcaaaaaattaaaaatagatgtatcccaagaayaaacaatgtgatttaagtcactgagaaggtcttgaattagtaaagtttgggatttatagaagtcacataggaggagtatgttctcagggctttcataattaaggccacctagacctagccacatgacacatgttgccagctctgggtatttacacactcttagccattattatggcctttttctatc

SEQ ID NO: 79928 - DNA, 600 bp, Chicken  19866894371563_2
aaacatttcagaaaggactgtcggaatgcatcttgaacttgaatagtttctacattagctatgactatttagaaaaaaagggatcagtgaagagagaatagtgagtctgctaagtgtgttacttgttaaaaaataacacaacaataataataatttaaaataaaaggattaggattgaaaataaagyagcagtgacttcatcacgtgcatcagtgctgttacttcatgtttatatagctggtgttcagtctgattattctacttggagcaaaaaattaaaaatagatgtatcccaagaayaaacaatgtgatttaagtcactgagaaggtcttgaattagtaaagtttgggatttatagaagtcacataggaggagtatgttctcagggctttcataattaaggccacctagacctagccacatgacacatgttgccagctctgggtatttacacactcttagccattattatggcctttttctatcccctacttattatttcaccttatgttgcttgtgtcacatgaaattttgaattaaaagttctttgtctgttttaggcacagctgcctgtatgtttacttgaatacaagtgcaca

SEQ ID NO: 79929 - DNA, 600 bp, Chicken  19866894371563_3
catcattctctccctctctgctagcttcctgttaagttctattgtgattctccaatgcagtcattatattctctagatatttgatttacataattgaagcagtccagcttattttaggaaaattacaactttgtggaaaaaaaataacttatacagtaattatggcaaagatgttctgctttgtgtcagacacaatgaaattagtgggtttaaaaattaagaacaagggtctttaagctctcggtgtcgtttttaaaataagaatgaatactgttaagaaacagctttgcatgttaatcrcagtggctgagaacatttcttgctaaagatatatgatgttcaaaattattaaaaaaatactgagggaaggaaattgatttttttttactgtaaaatttacctgtcattctgcaagataagttacaaccatatctggccattaaagaagattattgtaagaaaagtcacctactacagaaaaagaaatgttgagtgcatgttgatttcagccaaggtttatgcaacttactttatatcaaggaagcaagattatgagtggtttggttctcattattgtatagttcctttgcacgtagggtt

SEQ ID NO: 79930 - DNA, 600 bp, Chicken  19866894371564_1
tgtttaaccgaaaagcatgtttcatcatctaaagatgagtgtaatctcagcagtcatttctgatgttcctccatcccatgtcacttactgctttagcttgtctaagtatttatacagaagtcaccaggagatggagccaatagagagcctctaagactccaccatctacacgaccctgccctcttacggatttacgcaggagagacaacctgcgcactttttcgggggtaaaactgggaagcagaggagagaaccactactttatctcttccgctctcaattccaagtctcagaaaaccwgagttttgcctactgaaggcacttcaacacacactgatcaatttaagtaaagaccaaacacccacaaatgcttctagtggcctcccctctccgttcggtaaaatrcaaaagccttagttttaatgtaagctacttaatttgatgtgcaartatattaagcaaatttagtagtgcacataaatgctgagggatttctgtgttctgtttttaacttacccgcatatggagccattcctacaatagttggcatcagccctctgtagaacccactaaaaccaccttcctttgaaagaaaaatac

SEQ ID NO: 79931 - DNA, 600 bp, Chicken  19866894371564_2
gtatttatacagaagtcaccaggagatggagccaatagagagcctctaagactccaccatctacacgaccctgccctcttacggatttacgcaggagagacaacctgcgcactttttcgggggtaaaactgggaagcagaggagagaaccactactttatctcttccgctctcaattccaagtctcagaaaaccwgagttttgcctactgaaggcacttcaacacacactgatcaatttaagtaaagaccaaacacccacaaatgcttctagtggcctcccctctccgttcggtaaaatrcaaaagccttagttttaatgtaagctacttaatttgatgtgcaartatattaagcaaatttagtagtgcacataaatgctgagggatttctgtgttctgtttttaacttacccgcatatggagccattcctacaatagttggcatcagccctctgtagaacccactaaaaccaccttcctttgaaagaaaaatacatttcacggtttgtggcaagaaatacaacaaatgtcttaagctatacatctgtttgtacaaattcacaacagcaatctgactagcatcatgtagcaacaaggagc

SEQ ID NO: 79932 - DNA, 600 bp, Chicken  19866894371564_3
ctaagactccaccatctacacgaccctgccctcttacggatttacgcaggagagacaacctgcgcactttttcgggggtaaaactgggaagcagaggagagaaccactactttatctcttccgctctcaattccaagtctcagaaaaccwgagttttgcctactgaaggcacttcaacacacactgatcaatttaagtaaagaccaaacacccacaaatgcttctagtggcctcccctctccgttcggtaaaatrcaaaagccttagttttaatgtaagctacttaatttgatgtgcaartatattaagcaaatttagtagtgcacataaatgctgagggatttctgtgttctgtttttaacttacccgcatatggagccattcctacaatagttggcatcagccctctgtagaacccactaaaaccaccttcctttgaaagaaaaatacatttcacggtttgtggcaagaaatacaacaaatgtcttaagctatacatctgtttgtacaaattcacaacagcaatctgactagcatcatgtagcaacaaggagctaacatcaagttgcatttcttgtgtctgaagaattgatgggacaa

SEQ ID NO: 79933 - DNA, 600 bp, Chicken  19866894371571_1
atgtgggggacatcgggacaggcaacagcatgggactgacccccaggcatggctggccagcagctcaccccgtcccacgctgtccggcagcctacagagagacaggatgggatgatctgaggatgcggccaccaaagtgccacctccaagagtcctgtcctaatggaaggtaatgggaggatctgggggatcaggaggaaccagcagctttgtgtctatgggggatgaccttgggcatctcccactgaccaggagcagcgtggtcagcagagatactccatcctctaagaacctgcaaakgtctcccaggatgacacaggagggaacaaaacagagggaggggaggatggggacacrcaaagagcaaatgcagctgtgggacatcagcccggaggaagaaagcagtaagcaccatgagacttttgctggagagcaattagactcacttcactcctctctccagccccacatcagtgtttcaatgactcctaaattgccttggaaacgagcaggcaagacccagacatcacacttccaggacagctctcctctcacacggatgtgattaaccttgcaggtatacattattaacctggagcc

SEQ ID NO: 79934 - DNA, 600 bp, Chicken  19866894371571_2
cagcagctcaccccgtcccacgctgtccggcagcctacagagagacaggatgggatgatctgaggatgcggccaccaaagtgccacctccaagagtcctgtcctaatggaaggtaatgggaggatctgggggatcaggaggaaccagcagctttgtgtctatgggggatgaccttgggcatctcccactgaccaggagcagcgtggtcagcagagatactccatcctctaagaacctgcaaakgtctcccaggatgacacaggagggaacaaaacagagggaggggaggatggggacacrcaaagagcaaatgcagctgtgggacatcagcccggaggaagaaagcagtaagcaccatgagacttttgctggagagcaattagactcacttcactcctctctccagccccacatcagtgtttcaatgactcctaaattgccttggaaacgagcaggcaagacccagacatcacacttccaggacagctctcctctcacacggatgtgattaaccttgcaggtatacattattaacctggagccacttctattcccagccagggagtgtgggctcagacacatctaattagtttcctctga

SEQ ID NO: 79935 - DNA, 599 bp, Chicken  19866894371574_1
  misc_feature (1)..(38): n is any nucleotide
nnnnnnnnnnnnnnnnnnnnnnnnnnnnnnnnnnnnnntgcaaagcttagttagtcttgagtgtctctaaacttatatccactacacgtgtgcccttgtgctctccttttagtgagtcacagcaatattttgatagtattttgataccttccacagtgttaagataacagacaactcaaaggacaggaggaataaacctgaacagacaggacaagatgtacaggtaagagatcaaattctgccaatttgctgcacattgatattctctgtagtaagtgagctgatctatgtgtgtgtgcrcacatacatatttttctttaagcccaagttacattcatgctgtgtgtgtggtttctcaagaactgaagagtgaataacgacctatggtttcatcctaaaatatcaaagctctctatacagtatccacagaaatgatccacttccattataccaggaataaaagtcagagcarttttcaccattttccctttctctcagcctctgacatcaaaatcaccatgacagctttctgcagcactgagcttaaaccttaagtgggattatttaaaagatgttttactgtttttctgctgtacaaa

SEQ ID NO: 79936 - DNA, 600 bp, Chicken  19866894371574_2
aactcaaaggacaggaggaataaacctgaacagacaggacaagatgtacaggtaagagatcaaattctgccaatttgctgcacattgatattctctgtagtaagtgagctgatctatgtgtgtgtgcrcacatacatatttttctttaagcccaagttacattcatgctgtgtgtgtggtttctcaagaactgaagagtgaataacgacctatggtttcatcctaaaatatcaaagctctctatacagtatccacagaaatgatccacttccattataccaggaataaaagtcagagcarttttcaccattttccctttctctcagcctctgacatcaaaatcaccatgacagctttctgcagcactgagcttaaaccttaagtgggattatttaaaagatgttttactgtttttctgctgtacaaaaaaataataaagagtttgcagctattacctaaggaatatcactttggagggacatttgtaacacactttcagaaagtgaccattccttctagaggtgaaatgcaaaacatcaatcacttgtttttaaagaaaaggctgttattttgacaaactgtacttctctctttgaaagt

SEQ ID NO: 79937 - DNA, 600 bp, Chicken  19866894371583_1
aaccaaacattatatattttattaaccttttcactgaatgtctacacttctgagaatattattgtaattctaaatttgtattttatcttttaaaaaagagaagcaggggtcaatggcaatgcaaaatcacctttccttattaagctattcaggtgtcagtgcagttcgtatcactaggtctgcactcatcacagatcatggttcatatgtaaatggatgttataaatgtgaatatggtcagagaattttcttcatttccagagttaaagctcatttaaatacttctcagtttcaaatttmtttctaaaacaatgatcttctgcagaaattccttggagcttaggagattttgatttgcctgggtcagtgggcactcataacttctgagtattctctgtgcttaaaaaaaaaaaaataaactgtgttgaaaatctttttttgaaacctctggaaaaaaaatgtaggggcttttcaacttctctatcttaggcccaaaaacaaaatgagattttgcctgctggagctctgtatttcagatccattgaagtaatgctaaacagtagttagtttaacagcttgaattatctttcattttgttta

SEQ ID NO: 79938 - DNA, 600 bp, Chicken  19866894371583_2
ctttcattttgtttaagtctgagattagtttttgatgttatgagatgaaaaaagtatatgcaggtgttcaggcagtactggatctcatggaaaaaccctcagaattaatccattatttgtgtggagatcctctttctggaaccacagtactgaggtactaccccctctgccttgctgctaacagccagctttgctggggggaagaaatgttaatgttggtggaatacacttctgcagagatttcagtgttacctggtcttctgtaagcccaggcagcttttgctttctgttgtgatgttrgatatcactattgattttcattaatgcattctagggaccatgcatgaccactttgttgctttcyagctcaatccaaatggttataaacaaaaaatgcaggttaaggaaaacacatataaatgtttgcttttcatgagggagaatagacaactcagttactagtgtttatccaagtttaaaggagtgtgagcagactgtttaatctctgtgtttaaaatgagtatgacacagactattctatttcctcttcacagaagagaactttaggaatgcactagtttttgcacagtactatatctt

SEQ ID NO: 79939 - DNA, 580 bp, Chicken  19866894371583_3
tgttcaggcagtactggatctcatggaaaaaccctcagaattaatccattatttgtgtggagatcctctttctggaaccacagtactgaggtactaccccctctgccttgctgctaacagccagctttgctggggggaagaaatgttaatgttggtggaatacacttctgcagagatttcagtgttacctggtcttctgtaagcccaggcagcttttgctttctgttgtgatgttrgatatcactattgattttcattaatgcattctagggaccatgcatgaccactttgttgctttcyagctcaatccaaatggttataaacaaaaaatgcaggttaaggaaaacacatataaatgtttgcttttcatgagggagaatagacaactcagttactagtgtttatccaagtttaaaggagtgtgagcagactgtttaatctctgtgtttaaaatgagtatgacacagactattctatttcctcttcacagaagagaactttaggaatgcactagtttttgcacagtactatatcttgagggttttcttaaagatttcatttgcatttaaatttttttcat

SEQ ID NO: 79940 - DNA, 600 bp, Chicken  19866894371591_1
gcatttttttacagtaagtaattggtgatgttgttatggggataaaatggtaaccatgagacaatatttcaattaaaatgccctcatcttggataagtgtgagaaactctgctctgaaaaagcagcaagaacatatatgggaaaaaaccgatatggaatacaggctgctgctgctgcccagttattatgaaagactgtttacgtgaggattttctaagaaggagccaaaagaactttaggtggggcagaagcaccgcctgttatgatgttacccgatgcttactattgcactcttacttkccaaattgtaattattttgggctgaaatttcccatggtaggtgtctatctcgggccgtcttttcaggctctgtagagggagtgaagggttctgctgacatgatcgagcctttctaaaaaagttggacaaaatatattcttctgttcacaataaaaagaacaataaaaaaagaaggtgctggagctcagccttgcaggaagatgagaagaggtggcacagtgtgacgttcaggctgaggttatacttatcaaccctgtgaaaatctgcattggttaaattggttattagtgcaaatctaaa

SEQ ID NO: 79941 - DNA, 600 bp, Chicken  19866894371592_1
gactccattattctgtgtgagttgcaaagggacacagtttgtaaacaggcaccgagacttcccaaaacagctaactcttcagagggagctgcaggctttaacctccaaatagccatgctacaatgaggaaacggtacagaccctcagcatttttgttttaatgttcacaatacaccagtaaatggcaggagaaaatgtgaatcaaaaactgagcgtgttttaaagctctgcaaagtagcagcctgaagacaatgtataaataaaggcaagtcatgtcaaacagcattccacagtcatgcrtcgaatgaaaagcagaaagacttgtctgtttgaagagaacaattgtgatcrtttatatgcaagccagcctcctgtatattgactcaggatttcaccatttagtagcaactcttactaaaagctcagtgcgtgtgtgtgtatatatatatgtattataaacaagattatgaaaaacccactgtatactaggctgtatttctaggcactaattagtcaggagttcattcagagtgccttttctctaagagtgatgtatcaaaattgtgtttgccatcctaagaaaaaaatcccactactgag

SEQ ID NO: 79942 - DNA, 600 bp, Chicken  19866894371592_2
ccgagacttcccaaaacagctaactcttcagagggagctgcaggctttaacctccaaatagccatgctacaatgaggaaacggtacagaccctcagcatttttgttttaatgttcacaatacaccagtaaatggcaggagaaaatgtgaatcaaaaactgagcgtgttttaaagctctgcaaagtagcagcctgaagacaatgtataaataaaggcaagtcatgtcaaacagcattccacagtcatgcrtcgaatgaaaagcagaaagacttgtctgtttgaagagaacaattgtgatcrtttatatgcaagccagcctcctgtatattgactcaggatttcaccatttagtagcaactcttactaaaagctcagtgcgtgtgtgtgtatatatatatgtattataaacaagattatgaaaaacccactgtatactaggctgtatttctaggcactaattagtcaggagttcattcagagtgccttttctctaagagtgatgtatcaaaattgtgtttgccatcctaagaaaaaaatcccactactgagtacaatgtttgctggcccacagagttagtgttctagaacaaatctcctcca

SEQ ID NO: 79943 - DNA, 600 bp, Chicken  19866894371593_1
cagaccaagaatgggcttagtactaaactcctttgcacaccagtctggatgttcagcagcctccactactctaagtgctgactcagtgaccactacgtggattaaagtttaatctctttaaccctgacctcaatatacagctttacgctgataaggtgtgtaatgccaggatatcatatgtgatgtgtggtgaggaacaacggtttcatagcacacagaagagtctcccaaacagtctggttcaacagaaagtgtaaatccagttcccaggctctgagagcaacctactcactgtacagyttggataaaaccagaggatcagtctgttcttagtattcaagatcacaactcctttgtcagcaaacaacatgctcagtcattagctacagmgttgacctcaaatatcacatgcacacactgcaagtgatataagcactgggctctatcgtcagtcttgcctatcatttatctcccctgcagtgaatcacaaaaacctgtcacctcaccctgtgcctgaacagtttcatttctacaacaggggagtgstgtgctggggacaaatgytggaacagagcctggagtgcagacagccaaaaaccc

SEQ ID NO: 79944 - DNA, 600 bp, Chicken  19866894371593_2
cactacgtggattaaagtttaatctctttaaccctgacctcaatatacagctttacgctgataaggtgtgtaatgccaggatatcatatgtgatgtgtggtgaggaacaacggtttcatagcacacagaagagtctcccaaacagtctggttcaacagaaagtgtaaatccagttcccaggctctgagagcaacctactcactgtacagyttggataaaaccagaggatcagtctgttcttagtattcaagatcacaactcctttgtcagcaaacaacatgctcagtcattagctacagmgttgacctcaaatatcacatgcacacactgcaagtgatataagcactgggctctatcgtcagtcttgcctatcatttatctcccctgcagtgaatcacaaaaacctgtcacctcaccctgtgcctgaacagtttcatttctacaacaggggagtgstgtgctggggacaaatgytggaacagagcctggagtgcagacagccaaaaacccagtgtgaagaggctgatgtgcaaggctaggagaaaggcagtggcagaacagcagctagcaccagtcacacagtctgcattcttctacagg

SEQ ID NO: 79945 - DNA, 600 bp, Chicken  19866894371593_3
agaaagtgtaaatccagttcccaggctctgagagcaacctactcactgtacagyttggataaaaccagaggatcagtctgttcttagtattcaagatcacaactcctttgtcagcaaacaacatgctcagtcattagctacagmgttgacctcaaatatcacatgcacacactgcaagtgatataagcactgggctctatcgtcagtcttgcctatcatttatctcccctgcagtgaatcacaaaaacctgtcacctcaccctgtgcctgaacagtttcatttctacaacaggggagtgstgtgctggggacaaatgytggaacagagcctggagtgcagacagccaaaaacccagtgtgaagaggctgatgtgcaaggctaggagaaaggcagtggcagaacagcagctagcaccagtcacacagtctgcattcttctacaggaatctcatgcacagctcttcacttgctagtgatttatgccactgaatgggctggacatagtacaactatctaccaaaatgtccccagtgagcagagaacagagcagttggtcaaaaaacagcagaaaatccattagcttctctgacggcacttcag

SEQ ID NO: 79946 - DNA, 600 bp, Chicken  19866894371593_4
tcccaggctctgagagcaacctactcactgtacagyttggataaaaccagaggatcagtctgttcttagtattcaagatcacaactcctttgtcagcaaacaacatgctcagtcattagctacagmgttgacctcaaatatcacatgcacacactgcaagtgatataagcactgggctctatcgtcagtcttgcctatcatttatctcccctgcagtgaatcacaaaaacctgtcacctcaccctgtgcctgaacagtttcatttctacaacaggggagtgstgtgctggggacaaatgytggaacagagcctggagtgcagacagccaaaaacccagtgtgaagaggctgatgtgcaaggctaggagaaaggcagtggcagaacagcagctagcaccagtcacacagtctgcattcttctacaggaatctcatgcacagctcttcacttgctagtgatttatgccactgaatgggctggacatagtacaactatctaccaaaatgtccccagtgagcagagaacagagcagttggtcaaaaaacagcagaaaatccattagcttctctgacggcacttcagcattgacttgctccttaa

SEQ ID NO: 79947 - DNA, 600 bp, Chicken  19866894371593_5
ggataaaaccagaggatcagtctgttcttagtattcaagatcacaactcctttgtcagcaaacaacatgctcagtcattagctacagmgttgacctcaaatatcacatgcacacactgcaagtgatataagcactgggctctatcgtcagtcttgcctatcatttatctcccctgcagtgaatcacaaaaacctgtcacctcaccctgtgcctgaacagtttcatttctacaacaggggagtgstgtgctggggacaaatgytggaacagagcctggagtgcagacagccaaaaacccaytgtgaagaggctgatgtgcaaggctaggagaaaggcagtggcagaacagcagctagcaccagtcacacagtctgcattcttctacaggaatctcatgcacagctcttcacttgctagtgatttatgccactgaatgggctggacatagtacaactatctaccaaaatgtccccagtgagcagagaacagagcagttggtcaaaaaacagcagaaaatccattagcttctctgacggcacttcagcattgacttgctccttaactccactttgcagagcagcaaaatctctttgcaaagag

SEQ ID NO: 79948 - DNA, 600 bp, Chicken  19866894371593_6
gataaaaccagaggatcagtctgttcttagtattcaagatcacaactcctttgtcagcaaacaacatgctcagtcattagctacagmgttgacctcaaatatcacatgcacacactgcaagtgatataagcactgggctctatcgtcagtcttgcctatcatttatctcccctgcagtgaatcacaaaaacctgtcacctcaccctgtgcctgaacagtttcatttctacaacaggggagtgstgtgctggggacaaatgytggaacagagcctggagtgcagacagccaaaaacccagygtgaagaggctgatgtgcaaggctaggagaaaggcagtggcagaacagcagctagcaccagtcacacagtctgcattcttctacaggaatctcatgcacagctcttcacttgctagtgatttatgccactgaatgggctggacatagtacaactatctaccaaaatgtccccagtgagcagagaacagagcagttggtcaaaaaacagcagaaaatccattagcttctctgacggcacttcagcattgacttgctccttaactccactttgcagagcagcaaaatctctttgcaaagagg

SEQ ID NO: 79949 - DNA, 600 bp, Chicken  19866894371599_1
taaccatctaatatgttttcctgtgaaaatacagatcatacatttcagctggtggttcaacttgagaattgggagctcatatctgggtattttctgtagatgattcctttggtccttttacacatcccagattatggtgcttaatttcagtttcacaggccttgtaattggctctgtaggagagcagttttcttcaagaccagtttaccaagtaagctgtggtgctgagtgacataccttcattttattccattctatccatccttgctctttgtgtaaacattatcagctttacttctrtgtcatggttaaaaaaaatacattgcatcactggctgggaatcagttctctacacagctctttactctaaataattgattattacttatttaagaaacttagtatcaagagagtcttttccaattgtttattgctatgtgactgttgagtatccctgtttctcagagtcagaagtttgtgtgatgatagagttcaaagcttaaaacatgttcagaaagatgttgttaacatttgctgtcagttggtaggagtatttgatttgacaagacttgtcttctccctgaatctgttgagtaccac

SEQ ID NO: 79950 - DNA, 600 bp, Chicken  19866894371599_2
tatatagagctgctaaaaccttggcacctgtaattgtggcagacgtgagcatggctgcagctggaccctgaatggattgatctgtgacctctgctcagcactcctgagagagtacagcaggaagtttcaaattatactcacagcatgtgatccttaagctattctagagtgttaaaccctctgtcctctgctagaagacctgtaatttgtgtcggtatcagaagtcctgtgtaagggctgcaggctttagaagtgcttttcctctcttctgtccatgttcactccctgcacagagaactrgacagcaaaatgcaggagatgccttatatcaaagatatcttcctctgtgaattcttctttgggctaacttaagtttctgtaccacagaagtcacttagtttcaaggccaggtttctttcacgaaggtatggtgaaatgggattgttagaaacttgtaaccaacatccagcctaacattcatgttttgatccaaccttagtgaatgcgtacctacgttcacacctcactgcattgctttgacttactgcagtgcagtatccacttgagctgtagagaataggatcatgcatgacctcagtt

SEQ ID NO: 79951 - DNA, 600 bp, Chicken  19866894371603_1
cccacctgcgaagggactgcacagcctctggataacagcatggagtctgactgccagcacaaacacgccaacaacgcgggaaacgtgcacagggctgctgagagctgcattaagagcacagttaagattgccaaagtgaccatgtctgtctccacagacacgactgctgaagcattgtaagtcagagacttctcagcgttgtgagaaaaggagttggttaaaaaaaaaaaaattaattcaacaacagagaataccaaacccgtggcttaacgtgtttgtacctccctgtaatatcttttyggtttgtcattgtaagctaagcaatggttgtgttaagagcattaccatccgccagttctttgagttttacaattagggatccaagctaaattttcaaaagttgtttggttgtttctttttccccctcaaaaagtgtttactggataatagcaagtttcctgcaagarcacaggaaaaacaccaagctagcaaaagttccttttaggggtgcgaagaaaaattgtgaaacctaattgaaaacgaatgcatcctaaatcagtaccattcaataagaaaaagccttgtcatcatgctgtccat

SEQ ID NO: 79952 - DNA, 600 bp, Chicken  19866894371603_2
tgaagcattgtaagtcagagacttctcagcgttgtgagaaaaggagttggttaaaaaaaaaaaaattaattcaacaacagagaataccaaacccgtggcttaacgtgtttgtacctccctgtaatatcttttyggtttgtcattgtaagctaagcaatggttgtgttaagagcattaccatccgccagttctttgagttttacaattagggatccaagctaaattttcaaaagttgtttggttgtttctttttccccctcaaaaagtgtttactggataatagcaagtttcctgcaagarcacaggaaaaacaccaagctagcaaaagttccttttaggggtgcgaagaaaaattgtgaaacctaattgaaaacgaatgcatcctaaatcagtaccattcaataagaaaaagccttgtcatcatgctgtccatctcaatgtgaaatgtatttcatgtctgtaagtaataggagtttttgattttttccaaaagcggcagtgctgagttttagaagttttgtaaaatgtgttgtgtcctgtgaattgtatgctgttttattatgtgttattgatatttgtccgattaaacaaagtgataag

SEQ ID NO: 79953 - DNA, 600 bp, Chicken  19866894371606_1
agctgaccccagataaatgcattagaatatgtattttaatatttcttatttgaaactgcataataaaagtggggtatgaaatatatccttgcttgtgtagtcttgcctcttaaatctatggtaaaattcatcctgatttcaacaggagatatgaagggaatagagaatgtctttgagagtttaatttgaaaggacaaatctgcaagggattttagtgaaatgtcactgcatctctgcaaaagatatacttttacagtagaatctgcagttgtgagttagatgtttgtttctatataaaamgtataggaaagatggaatccacaaagatgttttgcaaagaagcacttcaggaaatattgaggttaaggatatacttttaagcttttgcttcactttacactgtgtttttttattttggattgtaggaggtgccttcttccaccttgaattcaccggtctaaaaccctgagttacaacattttacttcctaataaaaggtctttcgttttccagcttttagttaacaaaggacctgagttttcttcctcacatggcactacagtctcccacctcccagaggggtgctccattctctccagc

SEQ ID NO: 79954 - DNA, 599 bp, Chicken  19866894371617_1
  misc_feature (1)..(218): n is any nucleotide
nnnnnnnnnnnnnnnnnnnnnnnnnnnnnnnnnnnnnnnnnnnnnnnnnnnnnnnnnnnnnnnnnnnnnnnnnnnnnnnnnnnnnnnnnnnnnnnnnnnnnnnnnnnnnnnnnnnnnnnnnnnnnnnnnnnnnnnnnnnnnnnnnnnnnnnnnnnnnnnnnnnnnnnnnnnnnnnnnnnnnnnnnnnnnnnnnnnnnnnnnnnnnnnnnnnnnnnnnngcggaggcccgcgccttcctcagtgaggagatgattgctggtgagcagggaggggagcggggccccatcctgacccacacakggggcccgtcccattgcctgagccccagcactgaccgctcttccctgcagagttcaargctgccttcgacatgtttgatgcggacggtggtggggacatcagcaccaaggagttgggcacggtgatgaggatgctgggccagaaccccaccaaagaggagctggatgccatcatcgaggaggtggacgaggatggtgagcagcttccatgggggtggcgggtggctggagcrcacagcctgacccacatcacggtccctccccgcaggcagcggcaccatcgacttcgaggagttcctg

SEQ ID NO: 79955 - DNA, 599 bp, Chicken  19866894371617_2
  misc_feature (1)..(160): n is any nucleotide
nnnnnnnnnnnnnnnnnnnnnnnnnnnnnnnnnnnnnnnnnnnnnnnnnnnnnnnnnnnnnnnnnnnnnnnnnnnnnnnnnnnnnnnnnnnnnnnnnnnnnnnnnnnnnnnnnnnnnnnnnnnnnnnnnnnnnnnnnnnnnnnnnnnnnnnnnnnnnnnngcggaggcccgcgccttcctcagtgaggagatgattgctggtgagcagggaggggagcggggccccatcctgacccacacakggggcccgtcccattgcctgagccccagcactgaccgctcttccctgcagagttcaargctgccttcgacatgtttgatgcggacggtggtggggacatcagcaccaaggagttgggcacggtgatgaggatgctgggccagaaccccaccaaagaggagctggatgccatcatcgaggaggtggacgaggatggtgagcagcttccatgggggtggcgggtggctggagcrcacagcctgacccacatcacggtccctccccgcaggcagcggcaccatcgacttcgaggagttcctggtgatgatggtgcgccagatgaaagaggacgccaagggcaagtctgaggaggagctgg

SEQ ID NO: 79956 - DNA, 600 bp, Chicken  19866894371617_3
cttcctcagtgaggagatgattgctggtgagcagggaggggagcggggccccatcctgacccacacakggggcccgtcccattgcctgagccccagcactgaccgctcttccctgcagagttcaargctgccttcgacatgtttgatgcggacggtggtggggacatcagcaccaaggagttgggcacggtgatgaggatgctgggccagaaccccaccaaagaggagctggatgccatcatcgaggaggtggacgaggatggtgagcagcttccatgggggtggcgggtggctggagcrcacagcctgacccacatcacggtccctccccgcaggcagcggcaccatcgacttcgaggagttcctggtgatgatggtgcgccagatgaaagaggacgccaagggcaagtctgaggaggagctggccaactgcttccgcatcttcgacaagtgagtggggcagtgcctgttggcacctgtccttggtggcgagcggagccgcatcctgcccttactctcccacaggaacgctgatgggttcatcgacatcgaggagctgggtgagattctcagggccactggggagcacgtcaccgagga

SEQ ID NO: 79957 - DNA, 600 bp, Chicken  19866894371617_4
ggcaccatcgacttcgaggagttcctggtgatgatggtgcgccagatgaaagaggacgccaagggcaagtctgaggaggagctggccaactgcttccgcatcttcgacaagtgagtggggcagtgcctgttggcacctgtccttggtggcgagcggagccgcatcctgcccttactctcccacaggaacgctgatgggttcatcgacatcgaggagctgggtgagattctcagggccactggggagcacgtcaccgaggaggacatagaagacctcatgaaggattcagacaagaacaaygacggccgcattgacttcgatggtgagcggcagccccggtcctgcagcttgctcagcccctttgggctgcgtgtgtggcgcagctgggtctgacggtgccgctctcttgcagagttcctgaagatgatggagggtgtgcagtaagggatcagacattcctcgggccggatgcggcagccagccctgctcctctgcccaggagcggctccgctgcagcrcctggccttgctgcccacccgctggagccctgcagcagctcgtgcccctcggccggcggctgagcttttccttgactctgac

SEQ ID NO: 79958 - DNA, 600 bp, Chicken  19866894371617_5
gggtgagattctcagggccactggggagcacgtcaccgaggaggacatagaagacctcatgaaggattcagacaagaacaaygacggccgcattgacttcgatggtgagcggcagccccggtcctgcagcttgctcagcccctttgggctgcgtgtgtggcgcagctgggtctgacggtgccgctctcttgcagagttcctgaagatgatggagggtgtgcagtaagggatcagacattcctcgggccggatgcggcagccagccctgctcctctgcccaggagcggctccgctgcagcrcctggccttgctgcccacccgctggagccctgcagcagctcgtgcccctcggccggcggctgagcttttccttgactctgacagatgtggtttatggatgaacctcattaaaaggggaaaggctgagctgccagtatgggagtgcctgggggggctgtggcactgtaccccatgcagggggacatgggggagcgtgcaatgccatgccgtaccctgtaccagccaggctgacctgtgagtgcacgagcagcagttcccatgggctgctgggtgggtgccagccagcactgagctcagagt

SEQ ID NO: 79959 - DNA, 600 bp, Chicken  19866894371623_1
tcctgaacaattcaaagtctgccctttggaagtccaaggtagcagttttgctgttccccctcctaaatagctatcatgcatgatatcatgcagagcactgttattattgtgactcctgaagaaactttctgggcaaatggcattaggctgaaaagaataaaccttaattaaatgtataataactatttttttaatatatgcatttaacagcaatttttacatagagagactaagatatttcacatgctatgtgcacataatacagtattccttatttttccaactgtagttggtttatcwtctttttgtttgtttgtttcagtgttttgctccatattgttttagcatggatctcataattcattacagttgcaaagataaatggttcagtgacattatctctgaaaacttttacgcctggaacatatttaatgggaccatgtccatcagaagtattaattaatgatttttggctttatgcctaatagtttccaggaatgtcacttattattatactgatactttattttcataatttttgattcacataaaagttatttccatttcatgtaatatatatgcacatatgcattcatgtat

SEQ ID NO: 79960 - DNA, 600 bp, Chicken  19866894371633_1
ctggagttgtctgggtagatttgaatgtgtaagattttattgttttccttgttacaggcagtttcattatccatccagtgtttgcaatggttcatgaggcactgcagcagattacagagataactttctaatgtttcatctggaaattgaataagtagaactttttcaattgcaacaatgtgaaatgagctttcaggattttagatttggaaaacagctaattaggtgcagtttcaggctctcctgctgggatgactattgatatactgaagtaaagtttggactgtgcaagttgtctcrgtctttagccctgtgaaatcagtctgtaacgccaagctggtggtgggcatgatgactcaacaagaagtcaatgttctggtccatggagttcattctgtcacagctcagatttgcctaagatgatacacagccatgatgagattgtttttttcacctcccctgttgatggtgatcctagctggtgaaaccagctggtactcttggtgactctaccgattttgatttccgaacccctcaaaatcatgagtcttttgaattgaaatctactgacacaggcccctcgtgttggccagtgaaaga

SEQ ID NO: 79961 - DNA, 600 bp, Chicken  19866894371635_1
cagctgtatacagcaaacataaggaagcaggcagagagctcaaggtagcagtaccataattgtgcttgatgaggtaggcaatggtcacatttgccagttgtttaaattttctcaagtggcagatgcaggcttagtgagtctgtaagttgatattttgggagacagcaaaacaaagacacggcaaggggggtctgtccagtaaagaagggagatgagcagaagaggaagcataactgcttgaagaaatgtttttctgttgtgtgaaagtaccttagatctgccgtactgatatgtccctgygtaatctttgccagctttcagcaatcagtaatatgagcagttaatacttataaatctacattagcaaatgtgaatatcctttacaaggatatcttggacaaggtagatatactgtggattgaaggtggggtggaaactgaagatggtagggtggagtagaaaaggaaggacatacagaagtgagtgtcatgattgcaatattattctttggtaatgtgcaaaaattggactccattaattgtgacaaatcatgagaacaaagattcttgtagacatttaccttatctaacatatttttaa

SEQ ID NO: 79962 - DNA, 600 bp, Chicken  19866894371641_1
gtgtaggagactaggttctatccaaaagtaaaaatccataaccatctgttgtttgtgttgcaagcatttcgcaactgccatctccactgttcacgtcatttcatcttcacagcaatatcactgaaaccacccactgagataaaatcacaaatattttgaacatacccatatgatacattattttccaaattaatattcaacaaagtcacagtgagaacttctttttagtttacttttgtgttgtcacctgaaaaacctttcaagagtttgctaaaacgtgatggttaagctcaaacttgrataatgaaaaaaacacaggaaaaaaaaaaaaagagagagagagagagagagaaagagggaagagaggttgctcagagaggttatggtctctttccatgaagatatccaagacctgcctggacacccacctgagtgacctactgtagggaactggctttagcaggggagttggagttgatgatatctagaggtcacttctaactgctataattctgtgattctgcatctctgtgaatcaattagatgttgcattttttaactgtaagcatgttttcaaaaatggtaatggtgaccacttaa

SEQ ID NO: 79963 - DNA, 600 bp, Chicken  19866894371642_1
agaaatgatacagcagtaatttaaaaattaatcgtattcccacgatccacagcagaggatggaaaaaggcaagttatgaagttcagtagtacaaaacagaaggatttttttatttttccacctatacgaaggaatataacactgacgtgcctctggaaaacttgcaagccctgcacctggcacaaaccgctgacatctccttatcccgaacctttcctaattcaaagaaaagtgaaaacatgttctgaaatctggttccatgttccattgtcacgtacaggagacttaagcattaggaargaggagaaaacctgttcagtgagattataccagaagaacatcacagaactcattcccttccctgmaaagcagaacatgggctgtgtaagaacataaaccagcacaatggctctgtgtatcacaacgcctctatactcaaaaaaaccaaaccaaacaaatggaaaagtacatcccatgggcattcatcgggggcatctccttagaaaggcagtagccaggaaaaggaatgtggccacaagatcttagatggtttcttaaatttcatgtgcagcagcatcaaaatttacatctctccatcca

SEQ ID NO: 79964 - DNA, 600 bp, Chicken  19866894371642_2
aaggcaagttatgaagttcagtagtacaaaacagaaggatttttttatttttccacctatacgaaggaatataacactgacgtgcctctggaaaacttgcaagccctgcacctggcacaaaccgctgacatctccttatcccgaacctttcctaattcaaagaaaagtgaaaacatgttctgaaatctggttccatgttccattgtcacgtacaggagacttaagcattaggaargaggagaaaacctgttcagtgagattataccagaagaacatcacagaactcattcccttccctgmaaagcagaacatgggctgtgtaagaacataaaccagcacaatggctctgtgtatcacaacgcctctatactcaaaaaaaccaaaccaaacaaatggaaaagtacatcccatgggcattcatcgggggcatctccttagaaaggcagtagccaggaaaaggaatgtggccacaagatcttagatggtttcttaaatttcatgtgcagcagcatcaaaatttacatctctccatccaaagctgttgagggatgggtggaaatgttacacactgctgtaatgtaagacagaacccagactggc

SEQ ID NO: 79965 - DNA, 599 bp, Chicken  19866894371649_1
  misc_feature (1)..(13): n is any nucleotide
nnnnnnnnnnnnnataaaatagtcttactgctactatggaactcaatggctatagtttcttgagatttatgttttggaggtaaagccaaattaaaagaccctgcctttgccaactttcacccatctcttcagccctacatccagggtccttgccattgcattacactggcaaaattatttctgcatctaattttttaactatatattggtatcatctggaattttaaaaaatacccaaagaaataatttgctattaattttagcttcaatgacacagtttccagtcttgaacctaacaaygcaactgcagggttgcatgtgtagaccatattagccactgatgactcactcagataccaaatcacaaaatcaccaagtgattgcattacacttctgatttaatgaaacagacttgcacagctgttcttcagattgagttaaagcatttctgtatgcaagacaatgtgaggatttactttgatgaccactacttcacctccaagcatctagtgtttacatwcatcttatgaacaatgagcttcgtgccaaatcatgcaggtgaataagctgaaggctttatactatgtgcattttcatgt

SEQ ID NO: 79966 - DNA, 600 bp, Chicken  19866894371649_2
attttaaaaaatacccaaagaaataatttgctattaattttagcttcaatgacacagtttccagtcttgaacctaacaaygcaactgcagggttgcatgtgtagaccatattagccactgatgactcactcagataccaaatcacaaaatcaccaagtgattgcattacacttctgatttaatgaaacagacttgcacagctgttcttcagattgagttaaagcatttctgtatgcaagacaatgtgaggatttactttgatgaccactacttcacctccaagcatctagtgtttacatwcatcttatgaacaatgagcttcgtgccaaatcatgcaggtgaataagctgaaggctttatactatgtgcattttcatgtgtaacatacagatttaaaagtatttatccacaacactggttaaagttgaaccttagtttccctgaaatttgtttcattcctacctcttttgtatagtccttgggcactccagcatacacatctgttccattaggtctattgatgacaatgccttttgttggatttctgaaagtttaaagcaatataaatacaaataattagtaatgtgccatacaacaacc

SEQ ID NO: 79967 - DNA, 600 bp, Chicken  19866894371659_1
aaccttctgattctatacaagatagaagtgactgtggattattttatttttttttttatgtccaccgtgaaattctgtctctaaattcattgtccattattaaaagtcataataatatcctgactttttattactattactacagtaattcttagaaaacctagtcacgtatgaaggctgtagtgtcctaaatacttatagaaaagaatggcacagtgtacagcccgttgtcactgaaaactcagagtcagaaagctgtaggcaaaacacaactagtgagcaactcacgtaaacacagcrgttgaaatgagaagacagcggtcagataaattagcaacacwaaaaaaaatggaaaatggctattttttcccccacagccattataagatgagattaaagtgagacttgaagaaaaaattggagaaaggtttctgtaggatggaggatactgctggaggagagctgctgaaatttttccacggtattacaagagctggaagtctaaaggtgtggtrtaactgttcaatagagaagggaacatccatccgtgcaaaaacagccctttactgcatccagctctacagcccccagcacgagaga

SEQ ID NO: 79968 - DNA, 600 bp, Chicken  19866894371659_2
ttttatttttttttttatgtccaccgtgaaattctgtctctaaattcattgtccattattaaaagtcataataatatcctgactttttattactattactacagtaattcttagaaaacctagtcacgtatgaaggctgtagtgtcctaaatacttatagaaaagaatggcacagtgtacagcccgttgtcactgaaaactcagagtcagaaagctgtaggcaaaacacaactagtgagcaactcacgtaaacacagcrgttgaaatgagaagacagcggtcagataaattagcaacacwaaaaaaaatggaaaatggctattttttcccccacagccattataagatgagattaaagtgagacttgaagaaaaaattggagaaaggtttctgtaggatggaggatactgctggaggagagctgctgaaatttttccacggtattacaagagctggaagtctaaaggtgtggtrtaactgttcaatagagaagggaacatccatccgtgcaaaaacagccctttactgcatccagctctacagcccccagcacgagagatatggacctcttggagccctgaggatrctcagggagttgga

SEQ ID NO: 79969 - DNA, 600 bp, Chicken  19866894371659_3
gtgtacagcccgttgtcactgaaaactcagagtcagaaagctgtaggcaaaacacaactagtgagcaactcacgtaaacacagcrgttgaaatgagaagacagcggtcagataaattagcaacacwaaaaaaaatggaaaatggctattttttcccccacagccattataagatgagattaaagtgagacttgaagaaaaaattggagaaaggtttctgtaggatggaggatactgctggaggagagctgctgaaatttttccacggtattacaagagctggaagtctaaaggtgtggtrtaactgttcaatagagaagggaacatccatccgtgcaaaaacagccctttactgcatccagctctacagcccccagcacgagagatatggacctcttggagccctgaggatrctcagggagttggagcacctctcttgtaaagaaaggctgagggagctggcacgtttagcctggagatgggaaggctctgaggagaccaytttgaggcctcccagtacctaaaggcgcctggaggaaagatgggaarggatttttcacaagggcatgtggtgatagggcaagggtgaatttatttaaac

SEQ ID NO: 79970 - DNA, 600 bp, Chicken  19866894371659_4
aaattagcaacacwaaaaaaaatggaaaatggctattttttcccccacagccattataagatgagattaaagtgagacttgaagaaaaaattggagaaaggtttctgtaggatggaggatactgctggaggagagctgctgaaatttttccacggtattacaagagctggaagtctaaaggtgtggtrtaactgttcaatagagaagggaacatccatccgtgcaaaaacagccctttactgcatccagctctacagcccccagcacgagagatatggacctcttggagccctgaggatrctcagggagttggagcacctctcttgtaaagaaaggctgagggagctggcacgtttagcctggagatgggaaggctctgaggagaccaytttgaggcctcccagtacctaaaggcgcctggaggaaagatgggaarggatttttcacaagggcatgtggtgatagggcaagggtgaatttatttaaactaagagggtagatttagatgtagatgtaaggaaggaattctttactgagagggaggtgaggccctagcacaggctgcccagagaagccatggttgccccactcctggagctg

SEQ ID NO: 79971 - DNA, 600 bp, Chicken  19866894371659_5
attggagaaaggtttctgtaggatggaggatactgctggaggagagctgctgaaatttttccacggtattacaagagctggaagtctaaaggtgtggtrtaactgttcaatagagaagggaacatccatccgtgcaaaaacagccctttactgcatccagctctacagcccccagcacgagagatatggacctcttggagccctgaggatrctcagggagttggagcacctctcttgtaaagaaaggctgagggagctggcacgtttagcctggagatgggaaggctctgaggagaccaytttgaggcctcccagtacctaaaggcgcctggaggaaagatgggaarggatttttcacaagggcatgtggtgatagggcaagggtgaatttatttaaactaagagggtagatttagatgtagatgtaaggaaggaattctttactgagagggaggtgaggccctagcacaggctgcccagagaagccatggttgccccactcctggagctgttaaggccaggctggatgtgccctgcgcagcctgagctggtgggaggtgtcccagaccacagtggggggttaggactgggtgagcttta

SEQ ID NO: 79972 - DNA, 576 bp, Chicken  19866894371659_6
tgctgaaatttttccacggtattacaagagctggaagtctaaaggtgtggtrtaactgttcaatagagaagggaacatccatccgtgcaaaaacagccctttactgcatccagctctacagcccccagcacgagagatatggacctcttggagccctgaggatrctcagggagttggagcacctctcttgtaaagaaaggctgagggagctggcacgtttagcctggagatgggaaggctctgaggagaccaytttgaggcctcccagtacctaaaggcgcctggaggaaagatgggaarggatttttcacaagggcatgtggtgatagggcaagggtgaatttatttaaactaagagggtagatttagatgtagatgtaaggaaggaattctttactgagagggaggtgaggccctagcacaggctgcccagagaagccatggttgccccactcctggagctgttaaggccaggctggatgtgccctgcgcagcctgagctggtgggaggtgtcccagaccacagtggggggttaggactgggtgagctttaagatgccttccaacccaaaccat

SEQ ID NO: 79973 - DNA, 600 bp, Chicken  19866894371660_1
attaccgtaacttagcttgaaaaataggaaactgaggtagagaaacaggaaattgtttctgcagtaagagagcaggccaacaatcactgaaggacaagcacagcccggattgtttgagcagccactccatctgaaacgggcagaaaacaaaccatggatatttagcatatgtgatgcaattgaaggctggcaatgggtgataaagtcgaaagacctgcaagctttcaggattcagagtagtttggcataattagctgaaagcttttaggggcctacagcaggatgggaagcccctgcagrtgcccttatgttcttagtgcagcttcaggagtcgctgcrtggagcccagggcgcccatgggatgccaggcaaaagccaagctcagaacagatccwaagcaaacccaggcagccgtcaggtctgccaaatctgtaaggaaaattaaaaataaaaatacctatctgcaaaagcagaragcaaaagacacttcgtaagcatgagccccaatggcctccatctctcattgtcygcgctgacttctggcgtaggaaaacgggctatatggagcttcatttaaaggtcaccctgtttccttccttg

SEQ ID NO: 79974 - DNA, 600 bp, Chicken  19866894371660_2
gagaaacaggaaattgtttctgcagtaagagagcaggccaacaatcactgaaggacaagcacagcccggattgtttgagcagccactccatctgaaacgggcagaaaacaaaccatggatatttagcatatgtgatgcaattgaaggctggcaatgggtgataaagtcgaaagacctgcaagctttcaggattcagagtagtttggcataattagctgaaagcttttaggggcctacagcaggatgggaagcccctgcagrtgcccttatgttcttagtgcagcttcaggagtcgctgcrtggagcccagggcgcccatgggatgccaggcaaaagccaagctcagaacagatccwaagcaaacccaggcagccgtcaggtctgccaaatctgtaaggaaaattaaaaataaaaatacctatctgcaaaagcagaragcaaaagacacttcgtaagcatgagccccaatggcctccatctctcattgtcygcgctgacttctggcgtaggaaaacgggctatatggagcttcatttaaaggtcaccctgtttccttccttgatcttttaccacgagcaattttagaagccactcaacatc

SEQ ID NO: 79975 - DNA, 600 bp, Chicken  19866894371660_3
aagcacagcccggattgtttgagcagccactccatctgaaacgggcagaaaacaaaccatggatatttagcatatgtgatgcaattgaaggctggcaatgggtgataaagtcgaaagacctgcaagctttcaggattcagagtagtttggcataattagctgaaagcttttaggggcctacagcaggatgggaagcccctgcagrtgcccttatgttcttagtgcagcttcaggagtcgctgcrtggagcccagggcgcccatgggatgccaggcaaaagccaagctcagaacagatccwaagcaaacccaggcagccgtcaggtctgccaaatctgtaaggaaaattaaaaataaaaatacctatctgcaaaagcagaragcaaaagacacttcgtaagcatgagccccaatggcctccatctctcattgtcygcgctgacttctggcgtaggaaaacgggctatatggagcttcatttaaaggtcaccctgtttccttccttgatcttttaccacgagcaattttagaagccactcaacatcttagaacagagcgtataaacaatttctgcttatcctgccattgaagtgcatttaac

SEQ ID NO: 79976 - DNA, 600 bp, Chicken  19866894371660_4
gcaattgaaggctggcaatgggtgataaagtcgaaagacctgcaagctttcaggattcagagtagtttggcataattagctgaaagcttttaggggcctacagcaggatgggaagcccctgcagrtgcccttatgttcttagtgcagcttcaggagtcgctgcrtggagcccagggcgcccatgggatgccaggcaaaagccaagctcagaacagatccwaagcaaacccaggcagccgtcaggtctgccaaatctgtaaggaaaattaaaaataaaaatacctatctgcaaaagcagaragcaaaagacacttcgtaagcatgagccccaatggcctccatctctcattgtcygcgctgacttctggcgtaggaaaacgggctatatggagcttcatttaaaggtcaccctgtttccttccttgatcttttaccacgagcaattttagaagccactcaacatcttagaacagagcgtataaacaatttctgcttatcctgccattgaagtgcatttaaccaattcccatcagcctgcaatggcggctgagaaacagctccgaaacgcacaagttgtgccagtcaccaaagcccaacgtg

SEQ ID NO: 79977 - DNA, 600 bp, Chicken  19866894371660_5
attcagagtagtttggcataattagctgaaagcttttaggggcctacagcaggatgggaagcccctgcagrtgcccttatgttcttagtgcagcttcaggagtcgctgcrtggagcccagggcgcccatgggatgccaggcaaaagccaagctcagaacagatccwaagcaaacccaggcagccgtcaggtctgccaaatctgtaaggaaaattaaaaataaaaatacctatctgcaaaagcagaragcaaaagacacttcgtaagcatgagccccaatggcctccatctctcattgtcygcgctgacttctggcgtaggaaaacgggctatatggagcttcatttaaaggtcaccctgtttccttccttgatcttttaccacgagcaattttagaagccactcaacatcttagaacagagcgtataaacaatttctgcttatcctgccattgaagtgcatttaaccaattcccatcagcctgcaatggcggctgagaaacagctccgaaacgcacaagttgtgccagtcaccaaagcccaacgtgaagcagtgccaaagcagagagagacaagcagtcattctacagctcacgtgttgc

SEQ ID NO: 79978 - DNA, 600 bp, Chicken  19866894371662_1
ctctttggaattgtttctctagtgttcttgatttaatgtctttctaattgttctacttaagtctcagccaggatcattatctcacctctctgtgaagtgcaggttgttgactgtgaaaatcccctagcacggtccagtgttccccgaacccaagcttctcagttttgctcccatcctgtggctagcgattcccttccagcattttctgtgcggcgccttctcctgcttgtgggtctgaaagggtccctgggatgagctcattaccttctctatccatcagctctccagcaatgtcttcaygtcccattaccatcaaatctctgcactttaatttcacaaactcatccaacaccaaaggacaacrgtaggctgtcctcaccttttctgctgaggtgtaacacaaacacacgtggctccgtgcagaggcacagtgtggtctgggctctggttcctcttccagctgatggcgaagggtatgtggcgccgctcagccacttccaatccatgccttccattggtcaccaaatcacatttattgttcaggactgttcctttccctttgtaggagggaaagcaaagtgcatccagcttaacatggcg

SEQ ID NO: 79979 - DNA, 600 bp, Chicken  19866894371662_2
cagccaggatcattatctcacctctctgtgaagtgcaggttgttgactgtgaaaatcccctagcacggtccagtgttccccgaacccaagcttctcagttttgctcccatcctgtggctagcgattcccttccagcattttctgtgcggcgccttctcctgcttgtgggtctgaaagggtccctgggatgagctcattaccttctctatccatcagctctccagcaatgtcttcaygtcccattaccatcaaatctctgcactttaatttcacaaactcatccaacaccaaaggacaacrgtaggctgtcctcaccttttctgctgaggtgtaacacaaacacacgtggctccgtgcagaggcacagtgtggtctgggctctggttcctcttccagctgatggcgaagggtatgtggcgccgctcagccacttccaatccatgccttccattggtcaccaaatcacatttattgttcaggactgttcctttccctttgtaggagggaaagcaaagtgcatccagcttaacatggcgtttctactcatacagttggaaaagttccatgcctgagaggagggaaccatatcccgacggaact

SEQ ID NO: 79980 - DNA, 599 bp, Chicken  19866894371663_1
  misc_feature (1)..(68): n is any nucleotide
nnnnnnnnnnnnnnnnnnnnnnnnnnnnnnnnnnnnnnnnnnnnnnnnnnnnnnnnnnnnnnnnnnnnggcaggatggagtggtgtggggctgcagggcagtgggaggaccagagtggtgttggggagctgaaagctcagtgctgtgtgatgtggacacaagggggctggagcatctcggcggtaggtgctgcaggacaggtctttttgctctcttaagatggaatagttcactaaatactgctgtaaatagcaatgcatgggagagtgcacccaaaagaaataaaacaagacatcttgmgaggggaggagtgcaagtggtacgattgaaaaacagggatatggtgctcactttgtaataacgagcataagttgttttcagtgttgtgcactggagtcatccatttcaaggcgaggttgcaggaaccactacatggtggctttacagcctgctgtaaacgactgaaagagtatgcaggctcatggggagtttaatgcgggcaataaataccatgtcaagatttcttaatctcttggaaaatcagataagggctcgaggcaagataaggagcgaattgcagagctgtggttctggtatta

SEQ ID NO: 79981 - DNA, 600 bp, Chicken  19866894371674_1
ttatacatcaccagtccattccgcactaataatcatgctatccctgaacaactggctagcactttcatcttttctgttcaaaaaaaatctgcagcattgggtatttaagtgtttaaatagtaaaagttaactcaatattaggctttccattttgtttaagcacctgaatttctctgaagtgcaatattagcatttcttcagctgcaaaacaacaaaaaggtataacacatccataaagcaagcagttataataatatgtagtctgatatctgtctgttgtctcagtggtagtgacgaaaygttgactcaaatcagctacattcagttccaacaggtatccatcattgacaacagactacatacttcaaatttctgcatggggctcattagtaaactgcttggacaataagaatgacatgaaaaaaaattaagacttcattatgtctctactacattgtagagtgggttggatgacctcatgaaacagaggcagctgcctttgaaagatgcattatttaaaaaccaagcaaaataaaaacagcagagacagaggtaagcaatgagtgaacgactgtctgacgggttagagactgtttgttg

SEQ ID NO: 79982 - DNA, 600 bp, Chicken  19866894371696_1
ctagtgtgtggaggcattccacattaaaagtaaaagtctgaatcctggacaatacagttccatcttcactgatacctgctgtggaagtgaagcctaggtaggatcacaataggtgaaaagcaagaagctgtcctgtgggagataccacttttgtgagtgctttattgacgtactcctccattcctcatcatttttagggacaggatgcagctagcctatctgggccactagtctaattcataacttcctaagacccatcagaccaggagaaaatagcagtgttatcaatttgccttgtayagggaattgagcctttggagcttctgacagtcaggcctcttgctcagatcccgaccaaagcagcagttaaagtctaagtgtgtgagactgtgtctgtgccacattactccattgtattctgtgatgatgttgcagaggtgcagttagagccccaaagtttccagcaaaaaaaaaagtgagtgtacttgatgggcctaagctccctcttgctgaaatgatatcactgactttattaggcagcggattaggcttgcattggtctgcacgggcacatttcaaatctgtgctagccagcagagt

SEQ ID NO: 79983 - DNA, 600 bp, Chicken  19866894371696_2
tgtgagactgtgtctgtgccacattactccattgtattctgtgatgatgttgcagaggtgcagttagagccccaaagtttccagcaaaaaaaaaagtgagtgtacttgatgggcctaagctccctcttgctgaaatgatatcactgactttattaggcagcggattaggcttgcattggtctgcacgggcacatttcaaatctgtgctagccagcagagttcccagataagcgattaatagcactaagcattttggttaatatcagggcaaagagacactccttttgatatgccatttcrgttaaatgcattctccttctgttcaacttgtctgacactgcagtgttaagccaagaacttatctaagtaaaaagattaaacgtatctctgaggaatgcacaacatcattacagttgaatcatgaggttaaagagttgcactgaggttgcagaatatcagatagaggagtgagactgaaaggataaatccttacttatttagcatagttgccctattccacctgctaatgaaatcagtatgtaaagtgcattagaaaggggatctgcgtgtttgatgtttcagtacaagttacattgcagc

SEQ ID NO: 79984 - DNA, 600 bp, Chicken  19866894371699_1
gaaaacacttgtttctgaaaccagtcatgagatgaaagtgtgtgagaaacaagtatttgcagctgcatgaaagtgacgatctgccatttgcaattattcttcttttcttgatctataggacttaggagtgcttatatatggctccttttgtccacccgaccagccaggctttgtgctggcctgcctgcactgcacccatagggcttctgcctcagacacaaagttggcagcctaatcctcatcatttgctcttgcagggggtcctgaaggctttgcagttatggccaggtcaccctgctstctccagacatctcagccacctacagggaccctattagacactgagaatctacagcaccacattctattggtaccagagtcrcttcccttcttcacttctctatttgttggacaccagagatgacctgtaagtaagtttgctttaaatctaagtggagccaaacatttcacacattctctcctgccaagatattctatatttaggaatgtacatggcaacggccctcctgcagacttttaagagctttgaaaacataattaagtttcaccattcctgaagctggtgtatgttaggacatc

SEQ ID NO: 79985 - DNA, 600 bp, Chicken  19866894371699_2
gccatttgcaattattcttcttttcttgatctataggacttaggagtgcttatatatggctccttttgtccacccgaccagccaggctttgtgctggcctgcctgcactgcacccatagggcttctgcctcagacacaaagttggcagcctaatcctcatcatttgctcttgcagggggtcctgaaggctttgcagttatggccaggtcaccctgctstctccagacatctcagccacctacagggaccctattagacactgagaatctacagcaccacattctattggtaccagagtcrcttcccttcttcacttctctatttgttggacaccagagatgacctgtaagtaagtttgctttaaatctaagtggagccaaacatttcacacattctctcctgccaagatattctatatttaggaatgtacatggcaacggccctcctgcagacttttaagagctttgaaaacataattaagtttcaccattcctgaagctggtgtatgttaggacatcttttttcaatgtgtgcaaggtgaggatcatcaagtggtttaacatctcacctgcatcaggtatttatgaagaacactcaagc

SEQ ID NO: 79986 - DNA, 600 bp, Chicken  19866894371699_3
gtacatggcaacggccctcctgcagacttttaagagctttgaaaacataattaagtttcaccattcctgaagctggtgtatgttaggacatcttttttcaatgtgtgcaaggtgaggatcatcaagtggtttaacatctcacctgcatcaggtatttatgaagaacactcaagctaagcatataccctcatttttgctggctgtcaaccataaagcatttgtgagcagccccacttttatccccaccactaaccttaaggtttgtctctctggtacctatggacaccacaactaatatcyatttgaaaatacaactygctcctatttcggaaatgctcttttccttaagactgttcacttgcrgcccaggagccacaaaatggtaagaagagggacgaggatgagttaccttactcctgagatacacagctcacagtggggagtggtaggaaactacaccactttacacaatgctgggaacagaattgaacccaatggtgtctcctgcatgtgtcacagacagggaagggtaaaagtctgccactctcaccggacaaaattccaatgccttgtttgccccacagatcacttttctgcata

SEQ ID NO: 79987 - DNA, 600 bp, Chicken  19866894371699_4
tcctgcagacttttaagagctttgaaaacataattaagtttcaccattcctgaagctggtgtatgttaggacatcttttttcaatgtgtgcaaggtgaggatcatcaagtggtttaacatctcacctgcatcaggtatttatgaagaacactcaagctaagcatataccctcatttttgctggctgtcaaccataaagcatttgtgagcagccccacttttatccccaccactaaccttaaggtttgtctctctggtacctatggacaccacaactaatatcyatttgaaaatacaactygctcctatttcggaaatgctcttttccttaagactgttcacttgcrgcccaggagccacaaaatggtaagaagagggacgaggatgagttaccttactcctgagatacacagctcacagtggggagtggtaggaaactacaccactttacacaatgctgggaacagaattgaacccaatggtgtctcctgcatgtgtcacagacagggaagggtaaaagtctgccactctcaccggacaaaattccaatgccttgtttgccccacagatcacttttctgcatagaccagccataaaacgt

SEQ ID NO: 79988 - DNA, 570 bp, Chicken  19866894371699_5
ttcctgaagctggtgtatgttaggacatcttttttcaatgtgtgcaaggtgaggatcatcaagtggtttaacatctcacctgcatcaggtatttatgaagaacactcaagctaagcatataccctcatttttgctggctgtcaaccataaagcatttgtgagcagccccacttttatccccaccactaaccttaaggtttgtctctctggtacctatggacaccacaactaatatcyatttgaaaatacaactygctcctatttcggaaatgctcttttccttaagactgttcacttgcrgcccaggagccacaaaatggtaagaagagggacgaggatgagttaccttactcctgagatacacagctcacagtggggagtggtaggaaactacaccactttacacaatgctgggaacagaattgaacccaatggtgtctcctgcatgtgtcacagacagggaagggtaaaagtctgccactctcaccggacaaaattccaatgccttgtttgccccacagatcacttttctgcatagaccagccataaaacgtgttgcattgctcccat

SEQ ID NO: 79989 - DNA, 600 bp, Chicken  19866894371700_1
gcagaaatgagtaatgaaaatgggcttacatacattcagtctgacttggtaagggggaaacaaacttttaggttctacatgaaagggactgaacagtgtgggacgatgccacacttcagtttttatcccccagcctcattgactgcaatttccccccctgacatacttagtaaatacctcttatgcccagctgaaggctttttacagtaccaaatgctactctggtagcctgtagaccacaattcataacataaagtttactgcacctcttggaagtattgacaacagtgcagtgcccayttaagcagcagttgccagaagatgggggctctgcctgcctccaaaaagtttccaagaatcacagagagattcactgtgacgctgacatcagaaaacatcagggacctgcaatcttacttggccatggaaagaccaatttccttcttctgctgttcagctaagaggatactgcatggccatctgatgtacaaaaagagaccaccagaatgaaatagttactgtgctccagcctctgctgattttgttatttctatccatatttactacttgatataacagagctgcagtgcttctgcttgt

SEQ ID NO: 79990 - DNA, 600 bp, Chicken  19866894371700_2
aaaaactgaatgaaatgtataatctgcattgtgggaaaacagagacgcacagttggtagagacccaaagtgagctcagagcacggagctgcagtaaaacagtctgacgcatcagtcagccactgaatagggaaatgcatccaaattggctaaacgctttttggtacatttatgcggtgatgtacaacttagagatttatttcttttttatttttgcctcatgtgaacaggcatccagcactgccatgacagcaaagaacaccagtcagtcatatattgaggtaaaccactcttctttggygtctctcaaagcttacagcaaactgtatgatttgggctgagaaatggccctgcagctttggagctgtctgaggtaggtgaccagtgcctgcacaggttgaacttgagagactgtcatgggagcagcgcacacctcatgctacaaaggctttccaacattttataggaagagttcactggtttgtctcatattacagctgcagcatctcaaacataggatatcctgtcttcccaaaatgctcgttaaccccagactcctggatcacacccgttacccctgccactccagcagcagcgcgta

SEQ ID NO: 79991 - DNA, 600 bp, Chicken  19866894371709_1
ctctggaggatgctcattcagacctaagaaaaacaacagaaaagacagtacagtaactgaaacaataagaatggtgagggaagccaagccaaggcctaccaggtctgagtgaccagtcatagattctgacttcaggccatgcctggtgattctgctgctgggcagtctcctgagggctgctccatgaagaacagccagctgcctcagagctgagagcagcaaacccttttggtcacaagaggaaacagctctgagtcaaaagcacccagggaaatgtgccggtgagtaacacagtgccayttacacacagtcacactgctgacttcaactgttctagccacttttactaccttttattttggcacgttcctctataactgcttatcttcagatttaaccatttcctcactggctggtaagaagttcaaccagaagcatcctgccatggattgtcaattcccttaaattaaacccaacaatttccaagctatcagttttttcaactgatacaccaactccttatgcaggactcaacatccttgtctgaaccaatcactctgcagcagctgtggtgcagtgctggcagatgctgagaggctc

SEQ ID NO: 79992 - DNA, 600 bp, Chicken  19866894371710_1
ttgccacctttcaaatatggagtggaaaattgtggtaaatgcttttcttttatttttaatccagcatcataagctatattttcatcagttgtttgggttttattttgcagtcgggttacaccactagatttcaatccttcctaatttatttaggaaaaaaagagttcacttttcttgtcctgcgagtgatgaagagctctcccgacttgccttgactccaggcagcaggcttggtctcacaccaactttctgtagctgtactttgctttgaccactgcctgttctcctttcctccttccyccygagttctgcacagaagtagcactgccctcctgctgaccgcagagctcccgcagtccrtattagtgatgtgctgatttaaggaacactttgactactactttattttttttatacttaagtaactcagtstcctcccctttagctacctgtcaaggtatccagatttctttgttctctgaaactcyttgctttttgttttctgtatttgatgagaagagcttttctatcctctgcatcatccatcagtggtcatcaaaacacgagttgtagctgtgtgtgatgagggcatctcctggt

SEQ ID NO: 79993 - DNA, 600 bp, Chicken  19866894371710_2
ccacctttcaaatatggagtggaaaattgtggtaaatgcttttcttttatttttaatccagcatcataagctatattttcatcagttgtttgggttttattttgcagtcgggttacaccactagatttcaatccttcctaatttatttaggaaaaaaagagttcacttttcttgtcctgcgagtgatgaagagctctcccgacttgccttgactccaggcagcaggcttggtctcacaccaactttctgtagctgtactttgctttgaccactgcctgttctcctttcctccttccyccygagttctgcacagaagtagcactgccctcctgctgaccgcagagctcccgcagtccrtattagtgatgtgctgatttaaggaacactttgactactactttattttttttatacttaagtaactcagtstcctcccctttagctacctgtcaaggtatccagatttctttgttctctgaaactcyttgctttttgttttctgtatttgatgagaagagcttttctatcctctgcatcatccatcagtggtcatcaaaacacgagttgtagctgtgtgtgatgagggcatctcctggttag

SEQ ID NO: 79994 - DNA, 600 bp, Chicken  19866894371710_3
ccagcatcataagctatattttcatcagttgtttgggttttattttgcagtcgggttacaccactagatttcaatccttcctaatttatttaggaaaaaaagagttcacttttcttgtcctgcgagtgatgaagagctctcccgacttgccttgactccaggcagcaggcttggtctcacaccaactttctgtagctgtactttgctttgaccactgcctgttctcctttcctccttccyccygagttctgcacagaagtagcactgccctcctgctgaccgcagagctcccgcagtccrtattagtgatgtgctgatttaaggaacactttgactactactttattttttttatacttaagtaactcagtstcctcccctttagctacctgtcaaggtatccagatttctttgttctctgaaactcyttgctttttgttttctgtatttgatgagaagagcttttctatcctctgcatcatccatcagtggtcatcaaaacacgagttgtagctgtgtgtgatgagggcatctcctggttagtcactgctaaaatgtggtgtttaataatggcttaaaagcagaacttcaactggatga

SEQ ID NO: 79995 - DNA, 600 bp, Chicken  19866894371710_4
gcagtcgggttacaccactagatttcaatccttcctaatttatttaggaaaaaaagagttcacttttcttgtcctgcgagtgatgaagagctctcccgacttgccttgactccaggcagcaggcttggtctcacaccaactttctgtagctgtactttgctttgaccactgcctgttctcctttcctccttccyccygagttctgcacagaagtagcactgccctcctgctgaccgcagagctcccgcagtccrtattagtgatgtgctgatttaaggaacactttgactactactttartttttttatacttaagtaactcagtstcctcccctttagctacctgtcaaggtatccagatttctttgttctctgaaactcyttgctttttgttttctgtatttgatgagaagagcttttctatcctctgcatcatccatcagtggtcatcaaaacacgagttgtagctgtgtgtgatgagggcatctcctggttagtcactgctaaaatgtggtgtttaataatggcttaaaagcagaacttcaactggatgagatgatgttctacagataaaggttggccgttgtttgttaatgaatg

SEQ ID NO: 79996 - DNA, 600 bp, Chicken  19866894371710_5
aatccttcctaatttatttaggaaaaaaagagttcacttttcttgtcctgcgagtgatgaagagctctcccgacttgccttgactccaggcagcaggcttggtctcacaccaactttctgtagctgtactttgctttgaccactgcctgttctcctttcctccttccyccygagttctgcacagaagtagcactgccctcctgctgaccgcagagctcccgcagtccrtattagtgatgtgctgatttaaggaacactttgactactactttattttttttatacttaagtaactcagtstcctcccctttagctacctgtcaaggtatccagatttctttgttctctgaaactcyttgctttttgttttctgtatttgatgagaagagcttttctatcctctgcatcatccatcagtggtcatcaaaacacgagttgtagctgtgtgtgatgagggcatctcctggttagtcactgctaaaatgtggtgtttaataatggcttaaaagcagaacttcaactggatgagatgatgttctacagataaaggttggccgttgtttgttaatgaatgtctgtcttttgtcaggggtaattagt

SEQ ID NO: 79997 - DNA, 600 bp, Chicken  19866894371710_6
atgaagagctctcccgacttgccttgactccaggcagcaggcttggtctcacaccaactttctgtagctgtactttgctttgaccactgcctgttctcctttcctccttccyccygagttctgcacagaagtagcactgccctcctgctgaccgcagagctcccgcagtccrtattagtgatgtgctgatttaaggaacactttgactactactttattttttttatacttaagtaactcagtstcctcccctttagctacctgtcaaggtatccagatttctttgttctctgaaactcyttgctttttgttttctgtatttgatgagaagagcttttctatcctctgcatcatccatcagtggtcatcaaaacacgagttgtagctgtgtgtgatgagggcatctcctggttagtcactgctaaaatgtggtgtttaataatggcttaaaagcagaacttcaactggatgagatgatgttctacagataaaggttggccgttgtttgttaatgaatgtctgtcttttgtcaggggtaattagtgcagcttggtaggagataaacaagagttcaggcagaaagcagctgaacttcaatct

SEQ ID NO: 79998 - DNA, 600 bp, Chicken  19866894371713_1
caagactagctgggccaccagctgtcatagcacaataaaaatacctactttgctatgaaactgatccaaagcaattcagaaggaattaaaatggagaaccagaaatattattttgcaagggaaggatggaaatatttcaaggattattccttccaaaattagaaataaagtatttgtagataatgtaaagcatctgattcacgctgagctcaacaggaccaatgacataggagctgatgcttcactcagactgtcaggtttactgaattacctgcaaaatgtccagttcaacagaagctwcgacttcacacagaatcaagacagaactcttagtctcaccacatgtgaaaatacccttcagctaacaccttacctcatctccctggtggccgtagaagcctccaagagaaaaatacaggaatacaattaaaatttgctcactcctcttcagagtctttcccctccatccagtaacttgcggctaaggaaacttctgaatgaaaatgctaattttgtgattgttcccattgtggattttctcactgtgaatttgtctaaacacaatgtggaaaattgctccacagtttcccaggatgaagc

SEQ ID NO: 79999 - DNA, 599 bp, Chicken  19866894371717_1
  misc_feature (1)..(18): n is any nucleotide
nnnnnnnnnnnnnnnnnntgcgtgcagagagggacacaactcttcataaagaagagtagtgaaagcgcagagggagtggcagatggctgagtggcacagaagatttttgagaagttttgcaaggataacagttgcagaggctttttcaggaagcaagactgttaacccacctgccactgcttcacccagctggttgagagcactgtacagccctgtcacttgagggattagggttaaaatcaaaatatgtcaccctgtgggatgcacgtaatttatggagctctccctcattcagctagraagacgggcataaacaagggaagagtttagttcaagcctgactattgttcttttcacattctggtctctgggtaagcgtttattagcatctcctcagcagaattagcattcaaataattgtatctgtgttttaaattgaacactggaaaaaaaacaaaatgttttgtgacctcagttactattgttactcttactgtttggactgtttcgagtccatttacctcaaggcagacttgtaagatcaacaactcactgtggcaatccacatcagagagaccagcaataacacaggacaaaaa

SEQ ID NO: 80000 - DNA, 600 bp, Chicken  19866894371719_1
agatgctcaatgggtttacaacatcattcattctgtttacattgcaagtacttttgcagaccaaccctccccccgtcaatctctataaaacagtccatgaaagtatagcagaggaactcctaaaacagcatcgactttgaggaacagcctaagcattgtcagcttcagcttcaaacatcgatggggggcagtgaggttcccacaggtgctgccctatgtatgcaggaggaactgcagctgtgggaaaggccaagaaattggatttttcctaagaaatacaattccattgggacttagggrtcagaaactgaaagaactttaggactggggctggaggaagcactaggraagtcaaagcaatgcttttaattccagtgagtagtttgatttggctgtgcagcattttgtgggtgtttgctgtgcttggcagcayctcagacatcccatcctgtgacttccccttgcggggtggcccctccatgcccacagtgagagcccaagtccagcagccacactggcactgttggctataaatcacagctaatctaaaactctgagtcaccttgacctgatgctgctcaggatttggaaagcatttgt

SEQ ID NO: 80001 - DNA, 600 bp, Chicken  19866894371719_2
tacttttgcagaccaaccctccccccgtcaatctctataaaacagtccatgaaagtatagcagaggaactcctaaaacagcatcgactttgaggaacagcctaagcattgtcagcttcagcttcaaacatcgatggggggcagtgaggttcccacaggtgctgccctatgtatgcaggaggaactgcagctgtgggaaaggccaagaaattggatttttcctaagaaatacaattccattgggacttagggrtcagaaactgaaagaactttaggactggggctggaggaagcactaggraagtcaaagcaatgcttttaattccagtgagtagtttgatttggctgtgcagcattttgtgggtgtttgctgtgcttggcagcayctcagacatcccatcctgtgacttccccttgcggggtggcccctccatgcccacagtgagagcccaagtccagcagccacactggcactgttggctataaatcacagctaatctaaaactctgagtcaccttgacctgatgctgctcaggatttggaaagcatttgtattctctctcttacaccttgatgtcattaacactgacaggcacattgc

SEQ ID NO: 80002 - DNA, 600 bp, Chicken  19866894371719_3
actttgaggaacagcctaagcattgtcagcttcagcttcaaacatcgatggggggcagtgaggttcccacaggtgctgccctatgtatgcaggaggaactgcagctgtgggaaaggccaagaaattggatttttcctaagaaatacaattccattgggacttagggrtcagaaactgaaagaactttaggactggggctggaggaagcactaggraagtcaaagcaatgcttttaattccagtgagtagtttgatttggctgtgcagcattttgtgggtgtttgctgtgcttggcagcayctcagacatcccatcctgtgacttccccttgcggggtggcccctccatgcccacagtgagagcccaagtccagcagccacactggcactgttggctataaatcacagctaatctaaaactctgagtcaccttgacctgatgctgctcaggatttggaaagcatttgtattctctctcttacaccttgatgtcattaacactgacaggcacattgctgcacgcacaatgtcctgatttctgtgcaggacttgcacttgtgctggaattatctccagggtggtagcacctgtccctctcagg

SEQ ID NO: 80003 - DNA, 600 bp, Chicken  19866894371723_1
gaaatcctggcagcccttgaatagtgagtagcgttgtgttactgagctcaggcctcactttttgttcacgtgactgatcaggtactcagaacgaggtaactttaagatatgtgttacctttcaaactgatggtgtgaatgttctgtgtgatggttgttgtaacaagtcacctcttcaccatgtgaagaccaccttgaaatacatgaaaaaaaaatgaaaaaaagctgatttttttccatcatttaaaataaatacctttaaaattataagtgtggacttaacagctgtgcctcttgtaamatcagcagcaagaaaaccccactgtgaccataagcctggggcagaagtgcttggcttttagatctcctccatgcaatgctatgccaatacctgtgctgatggaattggttaggataatgcctcaaagcacaggcccgctgggtggtttttgttccccctgtccacatacatctgtagaagcaaataccattctcagtattagttatttcaacagaactagaacaaactggaataggacttgcataagacaagcacatttttacttttattattccttttattttgctgtgcaatcaaaga

SEQ ID NO: 80004 - DNA, 600 bp, Chicken  19866894371746_1
acagtcaaggttttatacaggaatgacaaattcaagtgcaatgagtttattatatgtcactagcgcatagcattttaacaaggtacattaaatcatcttctgaaaagctgaatttggtgtctcagctgttcgttatttgcaccaagaatcacaatggagtttgggttttacccttacttgctgtgagatttgtaaatgcccttatccgtgcttctggtggttgtgttgctgcagctgtggtcatctcaggacatgagcaagatgggatttgtagatagaagtaatacttcatcaggcccrcaactgatgaagggcttttgtaactcaggtcgatcccttttttctgtctttactggtcactgtagtaaaagatactactttatctctgcaggctgtgtcttgtgttccttcagattctattatactaggctggacttaactttaactactgttcctgttctctggggcttaccggtggtcttattcatggtaataaatgaaaagagagtgcttggggattcaaggagcctttctgagaaataccagataagacacctttctcctccgagcgctgtgacgctggagctttgtggatgaaat

SEQ ID NO: 80005 - DNA, 600 bp, Chicken  19866894371746_2
ttgatgccgttcaccgtcgtcctccttgggcggtgagattatacatgtgatttattttacgagtattattatttgattgcgttttcttcactacgttgtcgtgtaagtttggagaagagaggtgtgcagtgttcctcgctgaagttgcgttgcttaggggcttgcttcgatgtaactgacccaagctgtggggtaggtggcacctggagcaggtggagaacgggagctgaaccacagctgctttttcatctcgcctcgttctgtgcagccgtgagtcgtggtgaaatggaaacaaggggraagaaggcagggcctgcagcrccttgcttgccactctttgcttgagctgtggtctttggtcggtcttccctcatcccaggcgcagaaagagggatttcactgcagctctgtggctgttcttactgaggagcrcggagtgctccagctgtgccactaaagcacctggaaagctttcagaaagcttgtgttcagtgctaacaacagtttgggagcatgtttaatggagctagctccgagatactcatcttatagcttgtttcagcagggagggaaaaaaacaacacctattgacttaatttt

SEQ ID NO: 80006 - DNA, 600 bp, Chicken  19866894371746_3; identical to SEQ ID NO: 80005

SEQ ID NO: 80007 - DNA, 600 bp, Chicken  19866894371746_4; identical to SEQ ID NO: 80005

SEQ ID NO: 80008 - DNA, 600 bp, Chicken  19866894371746_5
atgccgttcaccgtcgtcctccttgggcggtgagattatacatgtgatttattttacgagtattattatttgattgcgttttcttcactacgttgtcgtgtaagtttggagaagagaggtgtgcagtgttcctcgctgaagttgcgttgcttaggggcttgcttcgatgtaactgacccaagctgtggggtaggtggcacctggagcaggtggagaacgggagctgaaccacagctgctttttcatctcgcctcgttctgtgcagccgtgagtcgtggtgaaatggaaacaaggggaaaraaggcagggcctgcagcrccttgcttgccactctttgcttgagctgtggtctttggtcggtcttccctcatcccaggcgcagaaagagggatttcactgcagctctgtggctgttcttactgaggagcrcggagtgctccagctgtgccactaaagcacctggaaagctttcagaaagcttgtgttcagtgctaacaacagtttgggagcatgtttaatggagctagctccgagatactcatcttatagcttgtttcagcagggagggaaaaaaacaacacctattgacttaattttttt

SEQ ID NO: 80009 - DNA, 600 bp, Chicken  19866894371746_6
ctccttgggcggtgagattatacatgtgatttattttacgagtattattatttgattgcgttttcttcactacgttgtcgtgtaagtttggagaagagaggtgtgcagtgttcctcgctgaagttgcgttgcttaggggcttgcttcgatgtaactgacccaagctgtggggtaggtggcacctggagcaggtggagaacgggagctgaaccacagctgctttttcatctcgcctcgttctgtgcagccgtgagtcgtggtgaaatggaaacaaggggaaagaaggcagggcctgcagcrccttgcttgccactctttgcttgagctgtggtctttggtcggtcttccctcatcccaggcgcagaaagagggatttcactgcagctctgtggctgttcttactgaggagcrcggagtgctccagctgtgccactaaagcacctggaaagctttcagaaagcttgtgttcagtgctaacaacagtttgggagcatgtttaatggagctagctccgagatactcatcttatagcttgtttcagcagggagggaaaaaaacaacacctattgacttaattttttttagcaccttcgcacttat

SEQ ID NO: 80010 - DNA, 509 bp, Chicken  19866894371746_7
tcctcgctgaagttgcgttgcttaggggcttgcttcgatgtaactgacccaagctgtggggtaggtggcacctggagcaggtggagaacgggagctgaaccacagctgctttttcatctcgcctcgttctgtgcagccgtgagtcgtggtgaaatggaaacaaggggaaagaaggcagggcctgcagcrccttgcttgccactctttgcttgagctgtggtctttggtcggtcttccctcatcccaggcgcagaaagagggatttcactgcagctctgtggctgttcttactgaggagcrcggagtgctccagctgtgccactaaagcacctggaaagctttcagaaagcttgtgttcagtgctaacaacagtttgggagcatgtttaatggagctagctccgagatactcatcttatagcttgtttcagcagggagggaaaaaaacaacacctattgacttaattttttttagcaccttcgcacttatttagcaggggcagatgtttc

SEQ ID NO: 80011 - DNA, 600 bp, Chicken  19866894371748_1
gagcatcgtgtgggcatccaggggctccctaggatgtgcacacacgtataagggcacacagagtgaaagccttagcagagataaggttttaaagactgtaattaaccacacgggcagctggctgtcacccagctccttgcataacacacgggcccggcggactcacagatgactgcgctgctgtcagagccatttgccgggcacctgttggaagagccgtcaggtcggcgcagagctaattacattgacacctttcactcgggatgagacaagtctggaaaacaaactgccaaaagaccyggcggctcctcagctcccctgcagtgcctcctgaggcttcatcctccccgtgcgctgggactgactgggatggtcaggagctgccttgcacaagcacagcacacgctgccagcctgtgtcaccaggcagacctcgcgcagaggtggctgtgaggagctggtgctccctccagcaggagatccctctgtggggtggccatggggcagcaccacgccacagccgaggccccattcggtgcccttgagcacactgagggtctgtgggacgtggggcaggggacaggctctgtgcgaggtggga

SEQ ID NO: 80012 - DNA, 600 bp, Chicken  19866894371755_1
ggtttagcctccttaaaaatgggtcatttgagtgtagcctttaatatgaatctggagatttactaaaaattgtgcctttgtagcaaaggtcatataaatgtaaaacttacctttcatcttttcccttgtatttcatgcagtgctgataacaaacccaatcagcaaggcagaagtttgtgcaagcactgaatttcccttgctaccaatctgggtttgcattttatttttatattgaagatacataccttaaaattgagtctgatagtagagatattactggtaaatagttccactgaacayacctgcttaaaatactttttgctcacttaaaatacatagaagaaagatttcctaatactgtctctcttagatgtgatagatcccatctctctacataagggaaaatgagcccatttcagttcctgtcttacattaaaatactcagttaagtgcatactaactgtaatgaatctggagcaaataaagtggagttcgaaggatgcagcaagaaacattttaaggctgtaactactgtcctaataaattaaatattatgagaggatgtcagagtgtacaagaccaagactactactggactgg

SEQ ID NO: 80013 - DNA, 600 bp, Chicken  19866894371758_1
agttacagaaaaaaaaacaggcttttccattgctttgcatttcattgatatcgtggtcaacttccaaactgcctacagatagtttgattatctattctggtatagagttcataatattttaacagttcgaggtaggttgatctttgttgccattgttttgccttttaaaagttataccaattctgcctttctggttttcacttgtacagtttgctttcattcatcctttaaaaaaaactttgcacgtagactgtgtaactggaagctatgtagtgaaaactaatacataacattaggaayagatttgttaaaaatagtagtttgtgcctgagacccaacatctaaaatattcgtacgcacatttattgttaatctggacccctggaacaaatatccctgttgcacatggtttttttttttatttttttatttattttattattattattattatttttttaagccagaagaaagctatcctacaaacttttgctttcaggtgtgtaggcttctcagtattgcctcatcaagcaccagagcattctttggtctactttgtagtgataaaaattacacactggcactcttatgacctttatt

SEQ ID NO: 80014 - DNA, 599 bp, Chicken  19866894371760_1
  misc_feature (1)..(128): n is any nucleotide
nnnnnnnnnnnnnnnnnnnnnnnnnnnnnnnnnnnnnnnnnnnnnnnnnnnnnnnnnnnnnnnnnnnnnnnnnnnnnnnnnnnnnnnnnnnnnnnnnnnnnnnnnnnnnnnnnnnnnnnnnnnnnnnnataggttattacagattggctagtgtaaactccaggtgttgagaacatgatttattctattagtattaaaaaggtgttttctatggccatattaaaaaattatactaacttgggcttgccactgctctgtgtgtggcatatgccaatttaaacttgtcatttcctctaattkaaggatatgtcctcagaagatcattaatttggggtggagttggggatcatagtgcagctgtggcctattaacctccatgtggccgttaatccctgcaaagcaccttccccaagaatgcctgctactgccatatagtcagagacgtagaatcaaaataaattacatttcggagcatattttacactttaaacggcatttttttttaataaatgaatttcacatattatgtgatgtatgactccagtaaccaatagtgccattttctagtgaaatcactatttattgaactacataactcc

SEQ ID NO: 80015 - DNA, 600 bp, Chicken  19866894371760_2
acgtagaatcaaaataaattacatttcggagcatattttacactttaaacggcatttttttttaataaatgaatttcacatattatgtgatgtatgactccagtaaccaatagtgccattttctagtgaaatcactatttattgaactacataactccaaaagagctaggatttgggctacaggctgttgagctcaatagtaaatgactcaccgggtgagaccttaatgtctaatccatagagtggtagaggacccagcttccttttctgatgcagctcaataaatgtcaaattcttttkgggaaatcctcatcagctcatcttccaggtgctgaaagtggaggatcaggaacactgtgtcatcaccaggtgagcagcagtatctgaccccatgctgtgagatgatcaaagggctgaagcacctctgttacaaagagttggggttgttcagcctggagaagagaaggccccagtgtgacttcattgcagcctacctgcacctacagggacctgcaagaaagcgggcgagggactgtagtgacagcacaaggggtaatggcttgaagctaaaagaaggcagatttagattagatattagga

SEQ ID NO: 80016 - DNA, 600 bp, Chicken  19866894371763_1
agttttggtaagcgttggtcagcttgccataggagcatttttgaaggtggtacatggggcattcagttttacttacacaaacacacacgaaaatgcacgtatgcctgcatgtgaaatgagcacccagcaaatagtgagcagctgatgggtgatgtgggacagacccgccagttgtgcacagcgcattcaattctgctgagtataagcttatacatacagtgtgtttctttggagctgtacttgtggagaacctcacagagagtgactggatagagcggtgtctgcctgagtctgccgtcrgcacgcaagaatgtatttaaaagttggaagttctttcagccctgttaatcttactaaagcctaatgatgacgtgtaaaatactaacagcaccgatttattttgtgttgattttagctggaataggaagatagattttggcagatgggaccagcgctcccagatggtagagaaaattaggagggatatgaagatgtgaaaaaggagtaaggtgtgcagagcagtaataggaggggaaaaagtttaaccattttgagtgatgccgatttaaaagccaaggcagtgagcaaataaaaataatg

SEQ ID NO: 80017 - DNA, 600 bp, Chicken  19866894371763_2
ttactaaagcctaatgatgacgtgtaaaatactaacagcaccgatttattttgtgttgattttagctggaataggaagatagattttggcagatgggaccagcgctcccagatggtagagaaaattaggagggatatgaagatgtgaaaaaggagtaaggtgtgcagagcagtaataggaggggaaaaagtttaaccattttgagtgatgccgatttaaaagccaaggcagtgagcaaataaaaataatggtgtctgtctgagggttttaaatcctaggagactcagatgctcagttatygttaggattgaacttattagtctgaaaggtgggttatcgtgtaaagatttaaccaatgttctgttgctgtgggagtctggcgttggttggagttacggtgtggaaagcggcggtaaattcttcagatgggttgaaaactgcgtttggccctgtggagagaattcttttcctctttgtgctcagttttctatcccttcttcccctcccttccccacggcccatgctgccagcaccaacctgacccaaataccgtggcggaggtggcttcacccggcggggcaggccgggatccgctcgccc

SEQ ID NO: 80018 - DNA, 600 bp, Chicken  19866894371767_1
tgtccagccagcttttttcattttgcagtaagtattctcccctctattgctaaaggctaaaatactgaatttaattccaatcacacaaaaaagcaaaacacacaaaaaaagaaaatcccaacctcccccacaatcaattcaatcagggattacctgcacaaaattaagggacaaatgagctagtgacaagcacatggaagttcttaatgatccttattaaaaagccatttagaggatgtcttcacttctctcctgaccaaacaaacccttgcatgattgcaatcatcacaaaagttgctrgtttttttgtgggttttttttgtttctttttttttaatatcctacacatcaagatgcttgcttgccttcttactcctatgcatttttaaagaattcagcagraaatcaccttacagtcatgctttatcccttggattattacctgaagcacagagaccaggaatatcattttgagactcccaaagttgtttgaaagaaataatcctaaactggactgtgccatagaaggaatgacctaatgtttacagatcatacagtgaactgaaaaaaaaggcaagatatcaaaaatacattaaaagt

SEQ ID NO: 80019 - DNA, 498 bp, Chicken  19866894371767_2
caaaaaaagaaaatcccaacctcccccacaatcaattcaatcagggattacctgcacaaaattaagggacaaatgagctagtgacaagcacatggaagttcttaatgatccttattaaaaagccatttagaggatgtcttcacttctctcctgaccaaacaaacccttgcatgattgcaatcatcacaaaagttgctrgtttttttgtgggttttttttgtttctttttttttaatatcctacacatcaagatgcttgcttgccttcttactcctatgcatttttaaagaattcagcagraaatcaccttacagtcatgctttatcccttggattattacctgaagcacagagaccaggaatatcattttgagactcccaaagttgtttgaaagaaataatcctaaactggactgtgccatagaaggaatgacctaatgtttacagatcatacagtgaactgaaaaaaaaggcaagatatcaaaaatacattaaaagt

SEQ ID NO: 80020 - DNA, 599 bp, Chicken  19866894371769_1
  misc_feature (1)..(159): n is any nucleotide
nnnnnnnnnnnnnnnnnnnnnnnnnnnnnnnnnnnnnnnnnnnnnnnnnnnnnnnnnnnnnnnnnnnnnnnnnnnnnnnnnnnnnnnnnnnnnnnnnnnnnnnnnnnnnnnnnnnnnnnnnnnnnnnnnnnnnnnnnnnnnnnnnnnnnnnnnnnnnnngtgatatcccttattaaggaaacaaatctactgctgcccacacaaacctggcattatctcctcacagtgttagaaattactgacatcagaacatgccaagtcatgcagctgaggttgtgaaaatgaaagatatcattgacraaagggcttgtactgctctcctatgatgttcctgaatttcatgaaagtcaacaattctattggcctggtttttgactcttcgtcctctggagaatttcaagggattgaagattttgttcattccaaaaaaaggaaaaggagagaaaagctctgtctgacagacgaacatgaaagcaaggcacagatttagccactcctaagcaggtaggcagaagggacttgatttaaggcatcaagcttccttttatgtgcaaagtgaagtttgtcagccctagcttcagtttggcttctttgttcgc

SEQ ID NO: 80021 - DNA, 600 bp, Chicken  19866894371769_2
cttgtactgctctcctatgatgttcctgaatttcatgaaagtcaacaattctattggcctggtttttgactcttcgtcctctggagaatttcaagggattgaagattttgttcattccaaaaaaaggaaaaggagagaaaagctctgtctgacagacgaacatgaaagcaaggcacagatttagccactcctaagcaggtaggcagaagggacttgatttaaggcatcaagcttccttttatgtgcaaagtgaagtttgtcagccctagcttcagtttggcttctttgttcgctgccccrgagaccaacggctcaggaattacagctccaaggctccagcatctctgccatctcatgcacagcaaaccatcaagaaaagtggaagcctaaggctggagttgccatctggtcttctacattgatggaagtctcagtagttggtctgtctgacttgtcagacacccacctggttttggtctgttcctatcaaggacaggtgattttgaggattcagcaattcctggaggaggaccagtagtctccactagccatctgtgattttctctgccatcttctggtctacttttcaacttttctcaa

SEQ ID NO: 80022 - DNA, 532 bp, Chicken  19866894371779_1
gaatgtagaacacaatgtgattgaatgtgatatcaccaaaagggtaaaatagacctcatgtctcaaagcgttatgagataatacagacagggaactatgatgcagctagtgttcagagagtttatgtctgagtcagctgagaagttgaagaaggctaaagtaaggtgtcagatgaattggtcagttctgttcttgcaagtaaactagaaaggagaagactgctgaagacgaaattaaagctaatatagaccagagaaagcagggccttgatggttgaaactattgggaaaacctttgatmaagtggaatcaggtaagtgtgtgaagatgaggaaaggattatcttcctttgacttctgcgggtctcatgctaaaagaattgacttcatctgttaagaaaaataaaatagatactacaaatggggtgatattatctaactgttggttcttatccaaatttgacctatcccagatagcccattaccgacttctagccctttttttttttttttttttttttttttttgggggaa

SEQ ID NO: 80023 - DNA, 600 bp, Chicken  19866894371795_1
cccccccgaggtgctcaccagcggttagtgtgcagacaaagtgctggaatgccatcaatcaatggagcactccgctctgtttacagctttcacagcgctgcatgccgcgctgctccccaaagctgctctcggccagacttcaatggatgcttttcaaagtgatttaaaaggtgatttttaaaaatcacatggcaacaaggaaagtacttaggaacaaagcccacagcagggctgtgacagagtgctgtggagcagctccccccgctgtgctgcgttcctgcccggctggggggggctgcrggggcactcacacagtgctctgtacatacagtgcatgaggacaactccactgctccacatctattggggatcagtgctgccctggagactgctgtggccaggggcagtgctggggttgaagacccactctaaaaacagagctaacattgggttagatatcagaagaatgaacactttgcatcctttaaccacagatgctgaggaggacgtatatcaggatgccttgaggatggagccagcttggcaagaaaacccaagttctgtgtatcttcacctaaacgaccttcatgataatactaa

SEQ ID NO: 80024 - DNA, 600 bp, Chicken  19866894371795_2
gtgctgccctggagactgctgtggccaggggcagtgctggggttgaagacccactctaaaaacagagctaacattgggttagatatcagaagaatgaacactttgcatcctttaaccacagatgctgaggaggacgtatatcaggatgccttgaggatggagccagcttggcaagaaaacccaagttctgtgtatcttcacctaaacgaccttcatgataatactaaagatgacatccagaggtcacagagtccctgcctgggtgaagacccctccactgagcaggcacagtgtggggcmggggctgtgaccaccctgcaggcagtggggcagcactgtgggcactgatcagcagcagacgctrctcctggagcagtgcaggcattcgggtgctgcatggcctttacagccttatcacgcctcagaaacagccataaaggtcaaagccattagtgttggagttctgaattaagcccgctgcaattagccctgaaaagaaaactggagatcgtgtaagatagctgcgcaggtatctcctgtaattgataattacctggtgtacagacatgtgcacttgctttgaaaaatgtaattgtttct

SEQ ID NO: 80025 - DNA, 600 bp, Chicken  19866894371795_3
gagctaacattgggttagatatcagaagaatgaacactttgcatcctttaaccacagatgctgaggaggacgtatatcaggatgccttgaggatggagccagcttggcaagaaaacccaagttctgtgtatcttcacctaaacgaccttcatgataatactaaagatgacatccagaggtcacagagtccctgcctgggtgaagacccctccactgagcaggcacagtgtggggcmggggctgtgaccaccctgcaggcagtggggcagcactgtgggcactgatcagcagcagacgctrctcctggagcagtgcaggcattcgggtgctgcatggcctttacagccttatcacgcctcagaaacagccataaaggtcaaagccattagtgttggagttctgaattaagcccgctgcaattagccctgaaaagaaaactggagatcgtgtaagatagctgcgcaggtatctcctgtaattgataattacctggtgtacagacatgtgcacttgctttgaaaaatgtaattgtttctcatctgaagagaccgctttattttaatggtctgcaattatttttattttagatgtactgatgcc

SEQ ID NO: 80026 - DNA, 599 bp, Chicken  19866894371804_1
  misc_feature (1)..(11): n is any nucleotide
nnnnnnnnnnnacaggaaacaaagtactgcctttgagtgcacattactctaacacgttcccagctgcctctggttttgatcttgaatggcaaggctaaagatgtgtctggaagagttgctagtccatgagagaagggaacatctctaaccttgaacacagagagactaataatccacctcccccagtgctggggcagagaggctttgatgagcactttggcaatgctgtaggaagaggctgcaatataatgttaagtaattagatggctgcacagcaaaaggaaaataaagtccaaatcrtttctgttcaaagcagattccaatgaaggagcagacagctgcgtgaccagagccaggctgcagtgaactctgtgagtgactggagagggcaatgggcttcaaggtcttgagaaatacaaatcctagccacgaggctggggcaacaaaaaaaaaagctcagcagctggggagtccttgggagaagatgggaaatcctcttcaaaggaaggcttttcccacccagatcttggcaagccatgagcagttacgttttgcttatccaaggtcccttcctggccagccagctgcagatttcacac

SEQ ID NO: 80027 - DNA, 600 bp, Chicken  19866894371807_1
atatgacaaaatatatcccgttcagagtgactttcaggtttcattgttttctatatgaaaaaaaaaaaaagccaccaccagaggaaaggtaattgaggctgtattgtaatcacagtgacatttctaacaatttcgtcagataaaacacattacgcttacttgtaaccttgtccctttcgtgtctttagcataattacttttaaatttttgtttatctctctggtatctgccactctacagcccaaatttccttataaaagctagattatgttacctacagaggtgtggttttcccttgakttccctaaattttgtaaacgtaatactatagatagcaaggtgcaaatgtttcattttccaatgggaaatgaaaaattttaatgcagtagccatgtgtttgacagccttgttgtatatcagttttcacaaaacactattgaatgctaccacaaaagaacaaaaatgagcttttatttttcctttatcttcgtatattacacatctgtttgaatcgaacttattcatttcagtcatgatatttaactcccaaataacatttttaatgaaagaaatcacattgaattatatatgatacaaaat

SEQ ID NO: 80028 - DNA, 600 bp, Chicken  19866894371810_1
cttgttatgttgattgaaacttagaaagctttttaaccagttgaattatggtctgtatctgaagtgaaaccctgctttcttaactgctctcatttcctgtatcattccgcctgtttgctgcattcattgcagttcagctttgcagtgtatttggttacgcacagcgtttctttgggagctgggcaggaggagcagcacacacacatgggctgagtttgactgttagctgctaattgtatgggcagtggggatctggatctttttccattttgttgtaaaaaaaagacttctcttttccakgggagaggcagtagcttggaactgtttggagagctcaagatttcagagtagrgatgagagaaaatgttatcttatgaactgtaaatgtggtgttttaaatttggctgctgtgcccccgaggttggcggataatgggaaagccatcrctcagagcccgagcagctctcagctcatggcttcacaggctttgtaagagcagcgcctgggagctgagctggatgaggctgagctcctcacagctgggctggttcttgcagcctgaaatatgaagtgaggcagcacacgagctgagtgccctga

SEQ ID NO: 80029 - DNA, 600 bp, Chicken  19866894371810_2
ctgtatctgaagtgaaaccctgctttcttaactgctctcatttcctgtatcattccgcctgtttgctgcattcattgcagttcagctttgcagtgtatttggttacgcacagcgtttctttgggagctgggcaggaggagcagcacacacacatgggctgagtttgactgttagctgctaattgtatgggcagtggggatctggatctttttccattttgttgtaaaaaaaagacttctcttttccakgggagaggcagtagcttggaactgtttggagagctcaagatttcagagtagrgatgagagaaaatgttatcttatgaactgtaaatgtggtgttttaaatttggctgctgtgcccccgaggttggcggataatgggaaagccatcrctcagagcccgagcagctctcagctcatggcttcacaggctttgtaagagcagcgcctgggagctgagctggatgaggctgagctcctcacagctgggctggttcttgcagcctgaaatatgaagtgaggcagcacacgagctgagtgccctgagaccgcttgtatggggctgtggaaggcagaaggtgatttaaaaggacgtttc

SEQ ID NO: 80030 - DNA, 600 bp, Chicken  19866894371810_3
gtatttggttacgcacagcgtttctttgggagctgggcaggaggagcagcacacacacatgggctgagtttgactgttagctgctaattgtatgggcagtggggatctggatctttttccattttgttgtaaaaaaaagacttctcttttccakgggagaggcagtagcttggaactgtttggagagctcaagatttcagagtagrgatgagagaaaatgttatcttatgaactgtaaatgtggtgttttaaatttggctgctgtgcccccgaggttggcggataatgggaaagccatcrctcagagcccgagcagctctcagctcatggcttcacaggctttgtaagagcagcgcctgggagctgagctggatgaggctgagctcctcacagctgggctggttcttgcagcctgaaatatgaagtgaggcagcacacgagctgagtgccctgagaccgcttgtatggggctgtggaaggcagaaggtgatttaaaaggacgtttccttttcagctgaacatttttctttggagtttctggaagcagaagaggtgcagtgaatgggcgaggagcattttgagagaactaactcagatttt

SEQ ID NO: 80031 - DNA, 600 bp, Chicken  19866894371811_1
ttgagaggaagctctgtaagacaaagtataaggagatccacatcaaataagttcaaattcatcagaagttttagatttttaacaattgagatacctggccatcacgacagttcaacatctgtgacaggttccatatcactagaaagcatgcattaattgtagtggttattctaaaagatatgtgctaattctcaaaagatgaccatagagtccactgcacacactgcagccagcagcagtggcactacttggaatgccaacaggtctggatgaatagatgttgcagattaagaaatgccstctgtgccagttctgagttcactggacaaaaggaagaggttcctcatgaaaggattctcatatattcttataaggaacatttgctttcatagtatatcatactatacctagatattggcagttatatttgttacttgttctctgctccggttggttaagcatttctgttttgcatggacatacagtttggtgaaaaatataagaaataaattaaatcttgtctgttgcccaaataaaacttcaaggagaagtactgttatactgctactgtattacagtatttaatactgcagagtttga

SEQ ID NO: 80032 - DNA, 599 bp, Chicken  19866894371818_1
  misc_feature (1)..(89): n is any nucleotide
nnnnnnnnnnnnnnnnnnnnnnnnnnnnnnnnnnnnnnnnnnnnnnnnnnnnnnnnnnnnnnnnnnnnnnnnnnnnnnnnnnnnnnnnnctctgctagtactgataggccagtgacttcaggaaaaggacccactggctctttcatctgtctgtgtaatcccccctgaattgtcagtggtaacatttgcatggagagacttgcagaacaaagcaaagttttctttgtgtcgttaatgtcattcccagttctgggctctgcagttccacctatgccagaggaaaacactgtcatttctccrggagctccatgttacgtgggatagcattttctgagactgcagctgtggggttcaaagcccaaatcaccaacctgcycaggaacacagacagaatcactactagagtaagaagcaatgcaggacaacatggtggtctcctgggtctttaatatgtctatcatgtggagtatcgtagagctgaacaatataggccttttaattagaggtggaggcagatacctcatgcatccatgccagaaatatccaacctgcctgctttaaatagcttttcatccatggccgagctctttaaactttct

SEQ ID NO: 80033 - DNA, 599 bp, Chicken  19866894371818_2
  misc_feature (1)..(13): n is any nucleotide
nnnnnnnnnnnnnctctgctagtactgataggccagtgacttcaggaaaaggacccactggctctttcatctgtctgtgtaatcccccctgaattgtcagtggtaacatttgcatggagagacttgcagaacaaagcaaagttttctttgtgtcgttaatgtcattcccagttctgggctctgcagttccacctatgccagaggaaaacactgtcatttctccrggagctccatgttacgtgggatagcattttctgagactgcagctgtggggttcaaagcccaaatcaccaacctgcycaggaacacagacagaatcactactagagtaagaagcaatgcaggacaacatggtggtctcctgggtctttaatatgtctatcatgtggagtatcgtagagctgaacaatataggccttttaattagaggtggaggcagatacctcatgcatccatgccagaaatatccaacctgcctgctttaaatagcttttcatccatggccgagctctttaaactttctccttttattaaaacagctcaactgagaccattttaatgtgcccccatctagttattttattggaaaatattaaaag

SEQ ID NO: 80034 - DNA, 600 bp, Chicken  19866894371827_1
tgacagttgcaagataatcaccttaagttcataatctgcataagttcggggctacgcatatcataatgtatttattttaaagaacattaagcattttcgaatggtttgagtgtgtacgtataatgcatccctatgatatgcccctagaatgggtgtcgctaatgattgagagcgtccctttagataaatctgtccaaaggggtgcttctacagaaaggttcatgttgcaattccatccagcagaaattcatcactctttactaccctgaaaactccaggagcgatggctctgtaggtggmagctggatgtacgtaatgcatagaatcgtacagacacgaaggttggaaaagacctctaagatcatctcgtccaatcatcagctcaaccccaccatgcccttcattgccacgtctgcccttctcttgaaaacctcatatggtrtgcatagatggcaayaggtatggcacagcagctccccttcygcccagctcccmcctgccttgcttgggaagaagtctagctgttctcacagctcctgcctacacctctgcaaaactgaatttggaacgtgagtattaaaatagtgcattctcaaataa

SEQ ID NO: 80035 - DNA, 600 bp, Chicken  19866894371827_2
cctagaatgggtgtcgctaatgattgagagcgtccctttagataaatctgtccaaaggggtgcttctacagaaaggttcatgttgcaattccatccagcagaaattcatcactctttactaccctgaaaactccaggagcgatggctctgtaggtggmagctggatgtacgtaatgcatagaatcgtacagacacgaaggttggaaaagacctctaagatcatctcgtccaatcatcagctcaaccccaccatgcccttcattgccacgtctgcccttctcttgaaaacctcatatggtrtgcatagatggcaayaggtatggcacagcagctccccttcygcccagctcccmcctgccttgcttgggaagaagtctagctgttctcacagctcctgcctacacctctgcaaaactgaatttggaacgtgagtattaaaatagtgcattctcaaataattgcttatcctggccttggtgactatgaagacttatttaaacacgtgggtagatttaaaaaagctcttaagagacctaagtgtaaacagcagtcaagaagcaccctgctacatttttatataaaaaaggcaccagcattttt

SEQ ID NO: 80036 - DNA, 600 bp, Chicken  19866894371827_3
gctaatgattgagagcgtccctttagataaatctgtccaaaggggtgcttctacagaaaggttcatgttgcaattccatccagcagaaattcatcactctttactaccctgaaaactccaggagcgatggctctgtaggtggmagctggatgtacgtaatgcatagaatcgtacagacacgaaggttggaaaagacctctaagatcatctcgtccaatcatcagctcaaccccaccatgcccttcattgccacgtctgcccttctcttgaaaacctcatatggtrtgcatagatggcaayaggtatggcacagcagctccccttcygcccagctcccmcctgccttgcttgggaagaagtctagctgttctcacagctcctgcctacacctctgcaaaactgaatttggaacgtgagtattaaaatagtgcattctcaaataattgcttatcctggccttggtgactatgaagacttatttaaacacgtgggtagatttaaaaaagctcttaagagacctaagtgtaaacagcagtcaagaagcaccctgctacatttttatataaaaaaggcaccagcattttttagactatgaaaagt

SEQ ID NO: 80037 - DNA, 600 bp, Chicken  19866894371827_4
ataaatctgtccaaaggggtgcttctacagaaaggttcatgttgcaattccatccagcagaaattcatcactctttactaccctgaaaactccaggagcgatggctctgtaggtggmagctggatgtacgtaatgcatagaatcgtacagacacgaaggttggaaaagacctctaagatcatctcgtccaatcatcagctcaaccccaccatgcccttcattgccacgtctgcccttctcttgaaaacctcatatggtrtgcatagatggcaayaggtatggcacagcagctccccttcygcccagctcccmcctgccttgcttgggaagaagtctagctgttctcacagctcctgcctacacctctgcaaaactgaatttggaacgtgagtattaaaatagtgcattctcaaataattgcttatcctggccttggtgactatgaagacttatttaaacacgtgggtagatttaaaaaagctcttaagagacctaagtgtaaacagcagtcaagaagcaccctgctacatttttatataaaaaaggcaccagcattttttagactatgaaaagtattctatcgtctgaaagtaataagat

SEQ ID NO: 80038 - DNA, 600 bp, Chicken  19866894371827_5
aaaggggtgcttctacagaaaggttcatgttgcaattccatccagcagaaattcatcactctttactaccctgaaaactccaggagcgatggctctgtaggtggmagctggatgtacgtaatgcatagaatcgtacagacacgaaggttggaaaagacctctaagatcatctcgtccaatcatcagctcaaccccaccatgcccttcattgccacgtctgcccttctcttgaaaacctcatatggtrtgcatagatggcaayaggtatggcacagcagctccccttcygcccagctcccmcctgccttgcttgggaagaagtctagctgttctcacagctcctgcctacacctctgcaaaactgaatttggaacgtgagtattaaaatagtgcattctcaaataattgcttatcctggccttggtgactatgaagacttatttaaacacgtgggtagatttaaaaaagctcttaagagacctaagtgtaaacagcagtcaagaagcaccctgctacatttttatataaaaaaggcaccagcattttttagactatgaaaagtattctatcgtctgaaagtaataagatattctgggtatg

SEQ ID NO: 80039 - DNA, 599 bp, Chicken  19866894371828_1
  misc_feature (1)..(140): n is any nucleotide
nnnnnnnnnnnnnnnnnnnnnnnnnnnnnnnnnnnnnnnnnnnnnnnnnnnnnnnnnnnnnnnnnnnnnnnnnnnnnnnnnnnnnnnnnnnnnnnnnnnnnnnnnnnnnnnnnnnnnnnnnnnnnnnnnnnnnnnnnnnnatgccagcaaaggctcttctttgtccacaaagggcttccaggaaatacttcagaactgtgaccctcttgcagtcggctgcaataacctgcggggtgagggcgagggggttggggagagggaaaggaaaacaaagtcagtgcaaaggggaggcaacaggcygaggggagcatggggccggagggccctgcggcacatggagggcactgcgttgtttggagtcccctttgccttacagatggggatggaagggatttgcccagcgtccccagggagggacgagcgatgatgcagtcggtccttaccgytctgttttggctcaaacrtcagcacccccctcgctgagagcaggagggagggatgcaggtgtggggcaggcgggcaggggcacgaacaccagctccatcccgaccccatcctgcaggccggccccacaggccgttaggcgagcccttgtcagg

SEQ ID NO: 80040 - DNA, 600 bp, Chicken  19866894371828_2
gcaaaggctcttctttgtccacaaagggcttccaggaaatacttcagaactgtgaccctcttgcagtcggctgcaataacctgcggggtgagggcgagggggttggggagagggaaaggaaaacaaagtcagtgcaaaggggaggcaacaggcygaggggagcatggggccggagggccctgcggcacatggagggcactgcgttgtttggagtcccctttgccttacagatggggatggaagggatttgcccagcgtccccagggagggacgagcgatgatgcagtcggtccttaccgytctgttttggctcaaacrtcagcacccccctcgctgagagcaggagggagggatgcaggtgtggggcaggcgggcaggggcacgaacaccagctccatcccgaccccatcctgcaggccggccccacaggccgttaggcgagcccttgtcagggaggctgggatggatctggccagaaggaaactcaatagctcaggtaattatccatttatgaggctctcaaatggagtttccagagcacgggagcacggtgcctccgtggcctttgcctgtgcctccaccatgaccctcctcatcccc

SEQ ID NO: 80041 - DNA, 600 bp, Chicken  19866894371828_3
ccacaaagggcttccaggaaatacttcagaactgtgaccctcttgcagtcggctgcaataacctgcggggtgagggcgagggggttggggagagggaaaggaaaacaaagtcagtgcaaaggggaggcaacaggcygaggggagcatggggccggagggccctgcggcacatggagggcactgcgttgtttggagtcccctttgccttacagatggggatggaagggatttgcccagcgtccccagggagggacgagcgatgatgcagtcggtccttaccgytctgttttggctcaaacrtcagcacccccctcgctgagagcaggagggagggatgcaggtgtggggcaggcgggcaggggcacgaacaccagctccatcccgaccccatcctgcaggccggccccacaggccgttaggcgagcccttgtcagggaggctgggatggatctggccagaaggaaactcaatagctcaggtaattatccatttatgaggctctcaaatggagtttccagagcacgggagcacggtgcctccgtggcctttgcctgtgcctccaccatgaccctcctcatcccccatcgccgtggggctccg

SEQ ID NO: 80042 - DNA, 600 bp, Chicken  19866894371830_1
tgggaaactaattgctctgaattgttaatagtaacattatttttctggcaatcatttcttttgaatacccaaaatgagcatgaaacagctcctttgaccggacataaaagttaaatgtcccaatgttgatcaaattaacttcagctatgtgacaatggactatatttgtgagaaaataatgaagggcacaaaggggagctttatgccaagatttcacagttgtaatgtaaaaatgtttctgttgaactaggccagggaacatttcaataggaaaacagaagagcactgtcactttccttraaaaaaaaaatcgttttatggatctgaatgctctggatgatttcagcaggtttatacggctggcacaccaagaaacatcataccgggctgacatctcggcatccccgtccttcacagactttgccactacttttacagaaccctctcctacggtctgtatttaatccctgatcaggctattaaattcagcaggcacttttccctagaaaagggctacacgactaacacagcaacatgaacatgaattaattaatgcagaggtatggaagactgagattaaatgtaaaacacaattccttt

SEQ ID NO: 80043 - DNA, 472 bp, Chicken  19866894371839_1
tgaactttcttaagccacacagggaattttatctcatcctgttccctccacatttcttttctaaatatttatagtaaaaatgagctaaataaacaaaaatgcttcctaatctctaggatatttaaaaccttttagtgatttttcatgcttcttcctgctggactgaaatgaagaaagatggtggtgagattttcaatctgcacttaaattgttgcaacacttacataggcttttgagattgccctctacaaaacaagggccactgataaatcatgtcatttgactagccattatcactaykcatcaagtcctcctttgaaaaaataatttgataatccatcaaagaactggatgtgaaagttgctcttgcataagatgacagacaggctgaagttgctaattgactgtgctgtaggtagtcctgtatttccttaatgaagctgctaattggcagtatttgtatttaatacaa

SEQ ID NO: 80044 - DNA, 471 bp, Chicken  19866894371839_2
gaactttcttaagccacacagggaattttatctcatcctgttccctccacatttcttttctaaatatttatagtaaaaatgagctaaataaacaaaaatgcttcctaatctctaggatatttaaaaccttttagtgatttttcatgcttcttcctgctggactgaaatgaagaaagatggtggtgagattttcaatctgcacttaaattgttgcaacacttacataggcttttgagattgccctctacaaaacaagggccactgataaatcatgtcatttgactagccattatcactaykcatcaagtcctcctttgaaaaaataatttgataatccatcaaagaactggatgtgaaagttgctcttgcataagatgacagacaggctgaagttgctaattgactgtgctgtaggtagtcctgtatttccttaatgaagctgctaattggcagtatttgtatttaatacaa

SEQ ID NO: 80045 - DNA, 600 bp, Chicken  19866894371840_1
aacctcataaaacccctagttcactatgactatatccatatgtttaggagtactgtcaatatggaagtgatctttccgttgtacttgcatatgttatattttactggtaatttacatgatggcttttaaggccctggcagatgattttggaaaaagatttgataaaaatcactgctgagacgcaatacaccttatttttggtcctccaatgttcaagagaagggatatacttcactataacatttgccttaccacccaaatgcctcaaaacctatacatactttttttttttttttaaaygttttaagttttttttttaacattggttatattgcccacctttgttactgaaagaatattaacaagacatcattttggcaaattaaatcttaaacatggcttttcaataggatttaaagggtgactatccctagagctccatgttaaaaygtagttttcaaaatcttacaagagtaatgcttaaaatattgtacatagttaacctaattaaaataattagcttcaaaatgacaagttgatgagctaagtaaagcctacactatgtaacatttgcttggaaacttgatttgtcagttatgc

SEQ ID NO: 80046 - DNA, 600 bp, Chicken  19866894371840_2
aaaaagatttgataaaaatcactgctgagacgcaatacaccttatttttggtcctccaatgttcaagagaagggatatacttcactataacatttgccttaccacccaaatgcctcaaaacctatacatactttttttttttttttaaaygttttaagttttttttttaacattggttatattgcccacctttgttactgaaagaatattaacaagacatcattttggcaaattaaatcttaaacatggcttttcaataggatttaaagggtgactatccctagagctccatgttaaaaygtagttttcaaaatcttacaagagtaatgcttaaaatattgtacatagttaacctaattaaaataattagcttcaaaatgacaagttgatgagctaagtaaagcctacactatgtaacatttgcttggaaacttgatttgtcagttatgcataataaaaattccagtcatcaagaaaattacaaaatttcttttatcataacatgatttcttttcacccatcaacttcttttatcttacaatagataaataccaacatgttctcatttttttttttaattttttttacactaaaccacac

SEQ ID NO: 80047 - DNA, 600 bp, Chicken  19866894371840_3
taattaaaataattagcttcaaaatgacaagttgatgagctaagtaaagcctacactatgtaacatttgcttggaaacttgatttgtcagttatgcataataaaaattccagtcatcaagaaaattacaaaatttcttttatcataacatgatttcttttcacccatcaacttcttttatcttacaatagataaataccaacatgttctcatttttttttttaattttttttacactaaaccacacaggattgatgcatttggttagactaccattttaccatttccatcgttaaattcytttttttttttttttaatataacttggtaaaatttcatctcttctagattccaaaagtacctacaaaacccatgcaattttaccattttaatatactatggaatatcatacaaagtaaggcatttcagtgtcatgtataaccaagttactgtcaatccaaaaatttctgcacatcaataaaaagatatctaagaacttaggaacaatattcttctcactactgtataaaaataaccacaattaataggtatcttgtgtaatatttactccattgtctcgtttcccgaaactgtgacaagc

SEQ ID NO: 80048 - DNA, 600 bp, Chicken  19866894371847_1
atatatatgtgcatatatatatacacatatatgtactatacatagatagtgtatatgtatacatatatatatgaaaactgttttttaactggggtttggatgacttggaatcatccagaaaattgaaatcatccagtctgtgctctgagattgttctgaaagttttcaacatttctcctctgtggttttttttgtttttttttgtaaattcattaatttacaaatgacaatccaaatatatgaagggtgtcagcacatgtatgaatcatgctggaaagattatctatagatgttcaacaytgcacaccgtttcactccaggactgggtttataatctccctgaaagtaaaaaaaatacccagccactgcaccactttgatgaaaattaaaatacgaaaggatgtggactgaattatttaacatgtgaatacataggaaatgaaccatataatgtgttggaaaaaaaaaaatcttcatcagctgcatatgctgtgttgttctagcagtggtaggtaatgatagattcagagacaggtaacatggaggagaaaataggataggaaggtaacaatctaagacagaagccagacttgacattac

SEQ ID NO: 80049 - DNA, 600 bp, Chicken  19866894371850_1
tgctcctgtgcacaaaatagaatatttttcctcttgaaaattaagatttgaattgccaccagaggcaggaaaagaaatcttagataatttagaaaagacgcagaattttagttgcagtgttatgaatgtaagactagaaatagaaatatgacttctaaagctcaagagcagtactgattacagctgagtaaataaaaactatgttgtcttatctatatgagcactatataagcacataacaatgcattaataagcacggaaacacacataaatactgttaacagaaaccgcaagacttcrttgaaatgttaataccgttagtaagagtggcctatagaatacatgagctacagcactagtttgcttattggatggctaaatagatgtacacatacagtggtttgtgtaacaaagttccgaatcacagaacccaaacagtatattagagcaagcaaaacacagaacagtgcacaaagagaaaaccactttgaaaaactaaaaccagatccacatttaacaaagaaaaaagttctttcagtcatgagcatatctaagattttgtttatttatttatttatttatgtgttcatttatttattt

SEQ ID NO: 80050 - DNA, 599 bp, Chicken  19866894371854_1
  misc_feature (1)..(50): n is any nucleotide
nnnnnnnnnnnnnnnnnnnnnnnnnnnnnnnnnnnnnnnnnnnnnnnnnnccccacccaccttctcacagaaggggaatacgattccctctcagagacagatgactgcatgtggctctgggggaaaataattttcaagacactgaaccctaatagagaatttcctgctctgcctctgctcttagcacagcagggcttagcaatagcctgttgctaaggcagcccggtcaggctgccttagggaaaagagagcatctcttagggaaggctgggctttctatggctggctttaagaattggrtctggcagacagaccgctgccagtgcaaatccatggagagtccacatttgatgtattcatggaaggaaatgccttgtcagaagtgggaggctgagctgggtagctgcagtctcaaacragtcttaaccactgctctgtggcagcagtcatctaatctccagctgacacaggctcaagggatagctgcaaagttcatactcagcagaaacaggcacaatcctccagccatgtggtaagcataaaaaaggctgctcatcttcatctggcagctgggatgctgatcagacaccccagttaca

SEQ ID NO: 80051 - DNA, 600 bp, Chicken  19866894371854_2
gggggaaaataattttcaagacactgaaccctaatagagaatttcctgctctgcctctgctcttagcacagcagggcttagcaatagcctgttgctaaggcagcccggtcaggctgccttagggaaaagagagcatctcttagggaaggctgggctttctatggctggctttaagaattggrtctggcagacagaccgctgccagtgcaaatccatggagagtccacatttgatgtattcatggaaggaaatgccttgtcagaagtgggaggctgagctgggtagctgcagtctcaaacragtcttaaccactgctctgtggcagcagtcatctaatctccagctgacacaggctcaagggatagctgcaaagttcatactcagcagaaacaggcacaatcctccagccatgtggtaagcataaaaaaggctgctcatcttcatctggcagctgggatgctgatcagacaccccagttacaaaatcaaacagtgaaaggcaggcacacacctaccaggaaatgagcaaaaatgcgactcttccaattgctggacactaccaggctgtatcccctgtcttgagccttctccttcgtgtcct

SEQ ID NO: 80052 - DNA, 600 bp, Chicken  19866894371855_1
tgtgtgtagttctagttcatctgattcctgctaacagcttcatttcaatattattttttctgcagttaatgaccaaaactacacattgatgactacttttattcatccagtattttctccagtaacgtttgtattttcactacatttctagccctcatgagactatttatcaaattcatatttccagactgattttactaatcttggcccgtgtgaacctcatgaagctcaacaaggccaagtgctgcatcttgacatggggcaatctcaaatatcagtttgggctgggggatgaatgartggagactagacacaaagtttggggatattagtggctgaaaaattgaatatgagtcaatagtgagaccttgcagcccagaaagccaaccatatcttggcctgcattgtagccagcatatcaagggagatgattcttaccctctgcccttgtgagaccccacctagagtactgcggtcagctcttggacctccagaacaagaaaaatgtagagctgttaaaagatatgctgagaactggggttgtttagcctggagaaggctccaaggagacataatagcaaccttccagtaattaaagga

SEQ ID NO: 80053 - DNA, 600 bp, Chicken  19866894371860_1
ggacttctggctgcagatctcatatcatatatctcatttgagcataatcatgctctaactgcagcaggaaaagttaaggaaaagacagaacagtagtgaggcaatgtttcagggaggtcacttgctctttataatgtttttcagtttcagtatgacacaaatacgtaatagcattaaaaaatatcccaatgtcactaacttttatttcagcagtaactgtatttcactagctggctttgggcaagtcactaaggttgcatttgaaaagtgtctgcaggtcataatttttctaagggcgcygagtagcttcttgacatactgatttgtgctggaattggtgcgctgcacttctgaaaatcagacctccaaatgtctcagaaaaaaaagagtttaaaaagaaaaaacaacattcacaaagctatgaaaactctggtcttaacatctcaattttaaaaaagatgacagatatactgcctgttgagaaagtatgaaacttaaacagtcaatttgtgtaaggctttttcagttttccatagaaaaggcaactgattatacaccagttatacaccagttatacgccagtgaaaatcttagctcaaa

SEQ ID NO: 80054 - DNA, 600 bp, Chicken  19866894371862_1
aaaagtgagaacagcataagtgtactggggggaagctaaaaaaaattactatcataaacatctcaagtaaggttcccttcacatttatagaagcatatccatttgtattctaaaaatatatgtttttacttactgtgcaaatatccactcaataataacatattattgggcagaacttctccactttctttttatgctaaatctccactccttgcttaaggaaagtcatcactagagttgagagatgtcactttctaagcctaaagaagtttgtttctccacccacaaggcttattcccraatttatctatggcaactgagcttcaacaattgctgaaaactatgatgttgtgaattaaaaatatgcttcaaaaatataattttgtaatgagaaaaaaatatgcaagcaaattctgatatcagaactagaaactgaaaccatcagtaaactaatttagtaacttctgcattcttagattactgttgttttttgggttttgttttgtttgtttgtttgttttttcaggtgggtgggactaccactactctgtcccagtaacaagccttaaatcttttaggggccttaagagctctgttgtt

SEQ ID NO: 80055 - DNA, 544 bp, Chicken  19866894371872_1
ccgcctacttgtcttaattgatccgcgccttatggtctgagctttcagtttaatgagctctatccagctgttgcatctgtctgcaaaggaactgtaatcaattgacgttgctgaaaacacagacagaaaaacaaaagaaaaaacaaagaaaaaaatatggatgatgtctctccctcatctcaatgctccttctgaggaagcaattatctgtgtctgagagagatcgaacatccctttccaggtctgtttaaaagaaaagctacagtataagtttggacttgtccaagccagtgtaccgayttctggtgatgtcacagttgtgaaccaactgcctgactgggaactcagcactgaaaaaacatgcaaatacagtcattaactcctcacgccagatttgtcattaatttttgttttaatcccacattaggtattgaattttggggttttgtttacctaggccttctttaactttaatttttgttgttattcctttcctcctgaagagctgcagatgacgattttaacttcctaacaacctttatca

SEQ ID NO: 80056 - DNA, 521 bp, Chicken  19866894371878_1
attgctattggagggaaggagcacagaaagcaccccgaggtgctgacggcgagagaggacgtgacgaagggttcccctgctgcacctcgcctgcacgtccagtgcaacggtaccacatctgagtgcatgctgatttggtgctgaagaggcacttgcaggcggtccttgtgcccaacagagccccgtgctgctctgcccctgcccacatggcagcacccacatccctgcgggtccgagcagctgggcagagccccgccatgctcacaggacagcgctgctgcgcaccgagtgctgcaaacrctgtctggaggaggaaagccttgaggagggctgaaggctgagttcaggttgctcctgcagtgatgcacggctggtgcctcttccaggggcttcaccccacattcccaaatgccccattccagtggctgtgcagacacagccccatcccggtgtgtggtgctggtgtcctgaatcggctgcaggcagtgcagggatgctcagctcacagtgccccaagagga

SEQ ID NO: 80057 - DNA, 600 bp, Chicken  19866894371880_1
ctccaaacaagacgagagagccagtggcgaggggaattcttctgttgctctgagctaatagatattaggaagaaaaatgcaattcttctcttggccggctttgaaaggtacttaacttttcattcacaacatgctgctgacatccacaaagctcagcaaggcagcgaatatcattggcctgcttcggagacgaggggaaaatgggctgcccgaggtctcaccacacgtcacagcaacagccctgcagacacaaaacctgagcgccagccccgcgcccaccccaccccaatgcttcccacytccttccatggtattttgagcattgatcaaaatttgagtcagtggagggtgtgcctcggtcaggttatagtctcacagcttgtcctgctactcagattaattgttctaattagttactctgcgggcaaatatctattgactctttctttgtttcagatttggggccaagaatgattcagagaaataatcaactgggacttcctctcagartttgccacccaccaaaattataaacatcccatctgagccacrattcgtaatgcagagaagtaaaccagcttagtgttgctgggtagcttt

SEQ ID NO: 80058 - DNA, 600 bp, Chicken  19866894371880_2
cgaggtctcaccacacgtcacagcaacagccctgcagacacaaaacctgagcgccagccccgcgcccaccccaccccaatgcttcccacytccttccatggtattttgagcattgatcaaaatttgagtcagtggagggtgtgcctcggtcaggttatagtctcacagcttgtcctgctactcagattaattgttctaattagttactctgcgggcaaatatctattgactctttctttgtttcagatttggggccaagaatgattcagagaaataatcaactgggacttcctctcagartttgccacccaccaaaattataaacatcccatctgagccacrattcgtaatgcagagaagtaaaccagcttagtgttgctgggtagctttcttctctgcttttttaatatcaaaagaaggctatattgataaagcacatacaattccatatactgcagcacacagaactgcattttgagaatgttcagttctcaggatgagaagaaacattgccacctctctgaggagtaaagctgcctcatcttgttggggaaaggaatgccaaaccagcccaaaacaggcctggaaatgttagtggaa

SEQ ID NO: 80059 - DNA, 600 bp, Chicken  19866894371880_3
aaacctgagcgccagccccgcgcccaccccaccccaatgcttcccacytccttccatggtattttgagcattgatcaaaatttgagtcagtggagggtgtgcctcggtcaggttatagtctcacagcttgtcctgctactcagattaattgttctaattagttactctgcgggcaaatatctattgactctttctttgtttcagatttggggccaagaatgattcagagaaataatcaactgggacttcctctcagartttgccacccaccaaaattataaacatcccatctgagccacrattcgtaatgcagagaagtaaaccagcttagtgttgctgggtagctttcttctctgcttttttaatatcaaaagaaggctatattgataaagcacatacaattccatatactgcagcacacagaactgcattttgagaatgttcagttctcaggatgagaagaaacattgccacctctctgaggagtaaagctgcctcatcttgttggggaaaggaatgccaaaccagcccaaaacaggcctggaaatgttagtggaacaaaagatttcaaatataagactcagatctgtgtactgtaag

SEQ ID NO: 80060 - DNA, 600 bp, Chicken  19866894371881_1
tatgtttctctgtctttgttttttaacaactactacatattccctataactgaaagcaaattacagacttcatctatagagggattgccttatctgccactaaaatatttctagttttgtaactgcaagtgggagttgctctcttctcacaaggctgttgttacccagtctgaaactgtagatggtttcaagggagtcaagagtcaactgcgtaatgccacattcagaagataaggaatacaacgatcagatttgtgaagaaaagttcccaggaatatttactgagcagaatttgatagyggatttttttgtgtactatatgaaataaagctctaactgcagaacggtagctctaaaatgattctgactcagagagaagaagatgcctctagtgttgtggatattctctgcagttgtttcttaagtagttttgttaccagagatccttgttcttgagacaggagaactctgggtgtgagatcacagttgtcttcttgctctgttttcagagcaagacctatgatccgggtccagatccctagtgtcgagatctctcatttggtttcgagttaatacactctgaggattgatctgtgaaat

SEQ ID NO: 80061 - DNA, 600 bp, Chicken  19866894371893_1
cttgcacaaagaaagagtgggaacacagccagagctggccaacgtctcagcaccacagcagcatcaggcctcagggagccagcagccccaaacttggaagcaactccagcatccactggatgcaatccccatcctggtcaagctttgcattgggagaaatgaagcaaggcaaaccttggttagatcagcatcagtgcatgcaaaacactgcctctgaggttcccaagcactggtccagccccaaggaaagaagttcagagtttaggacatggatgccattcctacagacagcctttccakmagggcacctgtcttcctttaagcacagctaagaagaacacgtgctttttaaacacaaagcatggcatgttgggtcaaagttttagagatgycgcagtgccaatacgcattttgaatgtgttatcaaataatcaaagctaagcaataacgtcccctcgagtcaaaaacacttccaaacagcagttttgtcatgacagcatctttctgtaacggtgcagcaagaggcagccggggggcacggggctgaatacctcacacacttgagaaagtgcatttacacacatagcgtgcggagagccc

SEQ ID NO: 80062 - DNA, 600 bp, Chicken  19866894371893_2
ttgcacaaagaaagagtgggaacacagccagagctggccaacgtctcagcaccacagcagcatcaggcctcagggagccagcagccccaaacttggaagcaactccagcatccactggatgcaatccccatcctggtcaagctttgcattgggagaaatgaagcaaggcaaaccttggttagatcagcatcagtgcatgcaaaacactgcctctgaggttcccaagcactggtccagccccaaggaaagaagttcagagtttaggacatggatgccattcctacagacagcctttccakmagggcacctgtcttcctttaagcacagctaagaagaacacgtgctttttaaacacaaagcatggcatgttgggtcaaagttttagagatgycgcagtgccaatacgcattttgaatgtgttatcaaataatcaaagctaagcaataacgtcccctcgagtcaaaaacacttccaaacagcagttttgtcatgacagcatctttctgtaacggtgcagcaagaggcagccggggggcacggggctgaatacctcacacacttgagaaagtgcatttacacacatagcgtgcggagagccca

SEQ ID NO: 80063 - DNA, 600 bp, Chicken  19866894371893_3
cttggaagcaactccagcatccactggatgcaatccccatcctggtcaagctttgcattgggagaaatgaagcaaggcaaaccttggttagatcagcatcagtgcatgcaaaacactgcctctgaggttcccaagcactggtccagccccaaggaaagaagttcagagtttaggacatggatgccattcctacagacagcctttccakmagggcacctgtcttcctttaagcacagctaagaagaacacgtgctttttaaacacaaagcatggcatgttgggtcaaagttttagagatgycgcagtgccaatacgcattttgaatgtgttatcaaataatcaaagctaagcaataacgtcccctcgagtcaaaaacacttccaaacagcagttttgtcatgacagcatctttctgtaacggtgcagcaagaggcagccggggggcacggggctgaatacctcacacacttgagaaagtgcatttacacacatagcgtgcggagagcccaggctcctggaaaagcctgctcccgtcagatcagatcaggcttataaacgggctgctttggggaggggagggcagggaggaggctaatggct

SEQ ID NO: 80064 - DNA, 600 bp, Chicken  19866894371895_1
agaatacagctccatgaaagtactttatcttcctttttttctgttaagcaagtagggatatccataaaacaaaaaggcatgccagtagctcagcataaagctgctgcttcaactggaaattcagcatctttgtgctgggggagatgttaattctttgtctggtttcatgttagagctctgttctcaacttaagcttcgccttagtttggcccactcaaaaatacatacacgaggtttaggggtacagatgcccatgtcccatttccagaagagatgcaaaccttcagggacacacaggcwaaggtactgaggcacttaactcctacagggtatgggggataatatatgtatctgtacagcktaatgacgacaracctctttggtgacagtgaagggactcttcagaagagctaagagaggacatttggatttcagactgaagaagtgtaaaacaaagcctcattccaacagcctcaattgcccttaacatcattttgcattacggtgcctacggaaggtcagctgcctgcatacccctgcacctgcaagccacatctgggaaggaaattgggtatctaggatgcaaattagcacttcaga

SEQ ID NO: 80065 - DNA, 600 bp, Chicken  19866894371895_2
ccataaaacaaaaaggcatgccagtagctcagcataaagctgctgcttcaactggaaattcagcatctttgtgctgggggagatgttaattctttgtctggtttcatgttagagctctgttctcaacttaagcttcgccttagtttggcccactcaaaaatacatacacgaggtttaggggtacagatgcccatgtcccatttccagaagagatgcaaaccttcagggacacacaggcwaaggtactgaggcacttaactcctacagggtatgggggataatatatgtatctgtacagcktaatgacgacaracctctttggtgacagtgaagggactcttcagaagagctaagagaggacatttggatttcagactgaagaagtgtaaaacaaagcctcattccaacagcctcaattgcccttaacatcattttgcattacggtgcctacggaaggtcagctgcctgcatacccctgcacctgcaagccacatctgggaaggaaattgggtatctaggatgcaaattagcacttcagacttggaattgctgactagtgcctatctgcttcttttggcatcaaaaaaccttgaaatatct

SEQ ID NO: 80066 - DNA, 600 bp, Chicken  19866894371895_3
aaggcatgccagtagctcagcataaagctgctgcttcaactggaaattcagcatctttgtgctgggggagatgttaattctttgtctggtttcatgttagagctctgttctcaacttaagcttcgccttagtttggcccactcaaaaatacatacacgaggtttaggggtacagatgcccatgtcccatttccagaagagatgcaaaccttcagggacacacaggcwaaggtactgaggcacttaactcctacagggtatgggggataatatatgtatctgtacagcktaatgacgacaracctctttggtgacagtgaagggactcttcagaagagctaagagaggacatttggatttcagactgaagaagtgtaaaacaaagcctcattccaacagcctcaattgcccttaacatcattttgcattacggtgcctacggaaggtcagctgcctgcatacccctgcacctgcaagccacatctgggaaggaaattgggtatctaggatgcaaattagcacttcagacttggaattgctgactagtgcctatctgcttcttttggcatcaaaaaaccttgaaatatctgcagtgtatttg

SEQ ID NO: 80067 - DNA, 600 bp, Chicken  19866894371902_1
tgtagcagcgcaaaatgcctcaatatgtcccatcctgctaattgggaggctgcaaaataggtgaatcacaactggctgcttagtcctatatagtttctgtcatactttatgcaaaagccgtaaactgactattttgttttttccaagttgcctattgtgacttttataaacaggaacctggcagcatgtcaatggtgcaaactgatttccttttctaaatacaattttaaaaagcaaataaacaaagttatgcctgctaatgaaacattatatgccatgctggagctagtttttctgaaryrtattctctagagcagatggaacaccaataaacacaaagcagcaaaccctttcataaagagtatgtttagaagaaaatacgttctccatagaactttgtctaaggaaaaactggcttatatctgtgacattatcttggggatccaactatggtcccattaaattgctgtaaacaagggagcttgccatgaatctcaaatggagaaggactagtaagaaactttgaaagcaagagagagatttgccagtacacttactaggtgcaattcttagaggcctcaactgaaattaaggccttaa

SEQ ID NO: 80068 - DNA, 600 bp, Chicken  19866894371902_2
gtagcagcgcaaaatgcctcaatatgtcccatcctgctaattgggaggctgcaaaataggtgaatcacaactggctgcttagtcctatatagtttctgtcatactttatgcaaaagccgtaaactgactattttgttttttccaagttgcctattgtgacttttataaacaggaacctggcagcatgtcaatggtgcaaactgatttccttttctaaatacaattttaaaaagcaaataaacaaagttatgcctgctaatgaaacattatatgccatgctggagctagtttttctgaaryrtattctctagagcagatggaacaccaataaacacaaagcagcaaaccctttcataaagagtatgtttagaagaaaatacgttctccatagaactttgtctaaggaaaaactggcttatatctgtgacattatcttggggatccaactatggtcccattaaattgctgtaaacaagggagcttgccatgaatctcaaatggagaaggactagtaagaaactttgaaagcaagagagagatttgccagtacacttactaggtgcaattcttagaggcctcaactgaaattaaggccttaat

SEQ ID NO: 80069 - DNA, 600 bp, Chicken  19866894371902_3
tagcagcgcaaaatgcctcaatatgtcccatcctgctaattgggaggctgcaaaataggtgaatcacaactggctgcttagtcctatatagtttctgtcatactttatgcaaaagccgtaaactgactattttgttttttccaagttgcctattgtgacttttataaacaggaacctggcagcatgtcaatggtgcaaactgatttccttttctaaatacaattttaaaaagcaaataaacaaagttatgcctgctaatgaaacattatatgccatgctggagctagtttttctgaaryrtattctctagagcagatggaacaccaataaacacaaagcagcaaaccctttcataaagagtatgtttagaagaaaatacgttctccatagaactttgtctaaggaaaaactggcttatatctgtgacattatcttggggatccaactatggtcccattaaattgctgtaaacaagggagcttgccatgaatctcaaatggagaaggactagtaagaaactttgaaagcaagagagagatttgccagtacacttactaggtgcaattcttagaggcctcaactgaaattaaggccttaatg

SEQ ID NO: 80070 - DNA, 600 bp, Chicken  19866894371908_1
aagaaagagagaaatgacctttccactgaagctagttttatttcccagatccctttcaaactccccactgtgacttcacgtaaatcacctggatgttcagcacctgatttctccattttttaatggaaagaatatgatttcccctctatttgcccatttacatgatgaatttttcaggacaatgaatcatcttgtttgagtagtatctaacaccaaaccttctgatctctgctggccaaagaagaaaaacagatcaaggtaaaacctgaggatgaatgttgtggagatgaagagtttcgyctgtgccttgccatgcattcttggtgttagaaacaaagaagaagtcatccttaggaaaataatgggtttttattcctcttggggcttcctgaaatatcagagacaggatccataaaataccaggtctgggctttctggccggagtgartgtgacrgcagggtgtgatttctggatttctgaatggagacaattgatcagttcctcagatgatacaaatctatgtgcttccttatccagccatccgcttctcacaggcagacctcagtattctcctctttagctctcagactggctttgct

SEQ ID NO: 80071 - DNA, 600 bp, Chicken  19866894371908_2
tttgcccatttacatgatgaatttttcaggacaatgaatcatcttgtttgagtagtatctaacaccaaaccttctgatctctgctggccaaagaagaaaaacagatcaaggtaaaacctgaggatgaatgttgtggagatgaagagtttcgyctgtgccttgccatgcattcttggtgttagaaacaaagaagaagtcatccttaggaaaataatgggtttttattcctcttggggcttcctgaaatatcagagacaggatccataaaataccaggtctgggctttctggccggagtgartgtgacrgcagggtgtgatttctggatttctgaatggagacaattgatcagttcctcagatgatacaaatctatgtgcttccttatccagccatccgcttctcacaggcagacctcagtattctcctctttagctctcagactggctttgctgagaagatttcattgcatcaggctattacacagaggtaaacatmatcttgtggatgcagtaatctgtgcaaatatcctgatagctaagtgcagtggtggagtaaataagcaaacaaccccaacaccccttcccctctaccgcaccaat

SEQ ID NO: 80072 - DNA, 600 bp, Chicken  19866894371908_3
atttacatgatgaatttttcaggacaatgaatcatcttgtttgagtagtatctaacaccaaaccttctgatctctgctggccaaagaagaaaaacagatcaaggtaaaacctgaggatgaatgttgtggagatgaagagtttcgyctgtgccttgccatgcattcttggtgttagaaacaaagaagaagtcatccttaggaaaataatgggtttttattcctcttggggcttcctgaaatatcagagacaggatccataaaataccaggtctgggctttctggccggagtgartgtgacrgcagggtgtgatttctggatttctgaatggagacaattgatcagttcctcagatgatacaaatctatgtgcttccttatccagccatccgcttctcacaggcagacctcagtattctcctctttagctctcagactggctttgctgagaagatttcattgcatcaggctattacacagaggtaaacatmatcttgtggatgcagtaatctgtgcaaatatcctgatagctaagtgcagtggtggagtaaataagcaaacaaccccaacaccccttcccctctaccgcaccaataaatata

SEQ ID NO: 80073 - DNA, 476 bp, Chicken  19866894371908_4
tcatccttaggaaaataatgggtttttattcctcttggggcttcctgaaatatcagagacaggatccataaaataccaggtctgggctttctggccggagtgartgtgacrgcagggtgtgatttctggatttctgaatggagacaattgatcagttcctcagatgatacaaatctatgtgcttccttatccagccatccgcttctcacaggcagacctcagtattctcctctttagctctcagactggctttgctgagaagatttcattgcatcaggctattacacagaggtaaacatmatcttgtggatgcagtaatctgtgcaaatatcctgatagctaagtgcagtggtggagtaaataagcaaacaaccccaacaccccttcccctctaccgcaccaataaatatagtttactgtacacatcactctttgggaccacgtaggggggggtgtgaatccattagcagggcaag

SEQ ID NO: 80074 - DNA, 600 bp, Chicken  19866894371912_1
acctttgtctgctactgctaatttgactgtagacatgtaaaatgatgtggttacaaatgtggcacatggagaaaggaggtttcattccccatttcacaacacagtgccagtgctaccctggggaattctccgtttttttgtactttacttcttttgacatataataattagaaacaacagcagttcctcattttgtggggtgttgtgaaaataaaaattggaaggtgcttggatgcgacgcgaagaacaaccgtactgagacattaggtggatgacatgatactttagtttctgctcagyggtgaggaagagtattcatttctcyractctttcagctttttactaaagtattagtatcgtctcaaaaaatatgcatttgtttccatcaaggctttctaagagaaatgattcagggaggaggggaacaaaaaaacatattttaatatgattatagataattcaatttccatgctagtgatcagcagttaattagtagctgaaaacattaatccagtctgtgaaccacaaaactacagtctattccaatgactctaagatagagcaaacctttggagccagtttagtaatataagtagagt

SEQ ID NO: 80075 - DNA, 600 bp, Chicken  19866894371912_2
actgtagacatgtaaaatgatgtggttacaaatgtggcacatggagaaaggaggtttcattccccatttcacaacacagtgccagtgctaccctggggaattctccgtttttttgtactttacttcttttgacatataataattagaaacaacagcagttcctcattttgtggggtgttgtgaaaataaaaattggaaggtgcttggatgcgacgcgaagaacaaccgtactgagacattaggtggatgacatgatactttagtttctgctcagyggtgaggaagagtattcatttctcyractctttcagctttttactaaagtattagtatcgtctcaaaaaatatgcatttgtttccatcaaggctttctaagagaaatgattcagggaggaggggaacaaaaaaacatattttaatatgattatagataattcaatttccatgctagtgatcagcagttaattagtagctgaaaacattaatccagtctgtgaaccacaaaactacagtctattccaatgactctaagatagagcaaacctttggagccagtttagtaatataagtagagtacaaatctgaccaaagcgatctaat

SEQ ID NO: 80076 - DNA, 600 bp, Chicken  19866894371912_3
ctgtagacatgtaaaatgatgtggttacaaatgtggcacatggagaaaggaggtttcattccccatttcacaacacagtgccagtgctaccctggggaattctccgtttttttgtactttacttcttttgacatataataattagaaacaacagcagttcctcattttgtggggtgttgtgaaaataaaaattggaaggtgcttggatgcgacgcgaagaacaaccgtactgagacattaggtggatgacatgatactttagtttctgctcagyggtgaggaagagtattcatttctcyractctttcagctttttactaaagtattagtatcgtctcaaaaaatatgcatttgtttccatcaaggctttctaagagaaatgattcagggaggaggggaacaaaaaaacatattttaatatgattatagataattcaatttccatgctagtgatcagcagttaattagtagctgaaaacattaatccagtctgtgaaccacaaaactacagtctattccaatgactctaagatagagcaaacctttggagccagtttagtaatataagtagagtacaaatctgaccaaagcgatctaatg

SEQ ID NO: 80077 - DNA, 600 bp, Chicken  19866894371926_1
acgaacgaacaaacaaacaaacaaacaaacaaaaaacaatgcaaagtaaaaaagagttgtaatacaagagttaagtagtttcaataatgtaatgcaacacttttgcaggtctagtttcacccctctacctgaacacattctggacacaccaaaggtgagtggttggtttatttttcttcttgaagaaaccgttattcgagaacaaaaataataacaaaatcagtgtacttgcatgccttcacatatgtgtgtatacacaaccattgtgtacacagtattttcttcttgatcccactttcrcatgtattgattcccttacagaatttgacaggctcctctctctaccttcttctggagcctgctagggtcagaagacatcttaatacatgagatgctgtaaatttacaaaaaaaaaaaaaaaaaaagacattgtgctctaattttttacaaaatgcttcttcttttaaaccacttgtgctcttttttaactatttctgctctccatcaagttgtatcttcagctttgagataactgaaatctagtggttggattatcttgttatacttaccagtgaatctggaggcatcacgtgtctcacc

SEQ ID NO: 80078 - DNA, 541 bp, Chicken  19866894371927_1
tcactatttatgtcattcagtttgtcatctaattaacacagtattatttcctttattgtcaatgaatgaaatttctcagatgtttggggaaaaaaagtcactgttaaaagtgaataatgaatattcagttaatatgaattttgctgcccaagaaaagtaacagtgctttgaggactcactattatttatggagtcagcctcagtgcatttattcatggtacacacgcttatactatttgacttcacccacttgcttgcctatctccaacttttagattagtcacttctccagtttcccckggagttctccctgtgcttattctacttctactaatgagtacttgcgtgattatttgagatttgattacaaaaatctgattgggaatttttataacaatgccatcatctgcagaaaaaaaaatacacttttaatgtattaattcaatcatttccaagatcttaaatgccatctataaacctgtcacagtataaaatgtgataaaggcatctttgacacataaggccagggctgtcaaacaaa

SEQ ID NO: 80079 - DNA, 600 bp, Chicken  19866894371930_1
tcttttaataaactgtaaccgaagaatagagtgtggaattaatcagatggtgtgttgtacctcactggggagcggggtgttagagccaaaactgaaggcagctgttgcaactgctgcctgtaattcagcctcaccaaaatattgactattgttactcatgccccgacacggaaagcatttactttaatatcagtgttagcagtgctgtcaccactgaagttagggctctggagtcggtgctgcaagctcatcccccactgatccacagaggtggggaaggtggttggaaagtgttctctygatagagcagtgtttgaaacaccctgtgatcagtgtccatcatctgttcttcatagaagaaggggaagagttattacaagagaataattaaagcagctgaaaagagcaaagtgttggcaggctgcaacctctccacacagaccacacagcagcttgctgagatcagcaggaagggcccaacagggatgctggcactgccctgttgtaaggctttctctcacccaccctggagagcaaactgcgctggggctgggaagatgcttcccacctctaaggtcrtttttagcaatgcccatgctt

SEQ ID NO: 80080 - DNA, 600 bp, Chicken  19866894371930_2
gtggttggaaagtgttctctygatagagcagtgtttgaaacaccctgtgatcagtgtccatcatctgttcttcatagaagaaggggaagagttattacaagagaataattaaagcagctgaaaagagcaaagtgttggcaggctgcaacctctccacacagaccacacagcagcttgctgagatcagcaggaagggcccaacagggatgctggcactgccctgttgtaaggctttctctcacccaccctggagagcaaactgcgctggggctgggaagatgcttcccacctctaaggtcrtttttagcaatgcccatgcttcctctgggtgcgtgtttccaygaggaaaattctgttttaatattagggaactttcttcatgataagaaagtgttttatagtaagggtagtgaagtactggcataggttccccagagaggtgatgggtgccccatccctgcagacattcaaagtcaggttgaatggggctttgagcacctgatggagctgtgggtgttcccgttcactgcaggggagttgaaccagggggcctttaagagtcccttccagctcaaatgattctatgatcaaacactgaag

SEQ ID NO: 80081 - DNA, 600 bp, Chicken  19866894371930_3
ccctgtgatcagtgtccatcatctgttcttcatagaagaaggggaagagttattacaagagaataattaaagcagctgaaaagagcaaagtgttggcaggctgcaacctctccacacagaccacacagcagcttgctgagatcagcaggaagggcccaacagggatgctggcactgccctgttgtaaggctttctctcacccaccctggagagcaaactgcgctggggctgggaagatgcttcccacctctaaggtcrtttttagcaatgcccatgcttcctctgggtgcgtgtttccaygaggaaaattctgttttaatattagggaactttcttcatgataagaaagtgttttatagtaagggtagtgaagtactggcataggttccccagagaggtgatgggtgccccatccctgcagacattcaaagtcaggttgaatggggctttgagcacctgatggagctgtgggtgttcccgttcactgcaggggagttgaaccagggggcctttaagagtcccttccagctcaaatgattctatgatcaaacactgaagcaaatgctgaggggtgctatgaaacttctgagcttggagata

SEQ ID NO: 80082 - DNA, 600 bp, Chicken  19866894371942_1
cagagaaggcgttagttcagcaaagagccagatggttcctgcatagacagctgcagctctgctgagctgcttgataggaaccagagaggtaagtccttagtgacaaaccaactgagtatgcagtctgatagtatgagcacgtgatttctgtcatcttaggaccttctcttttactatttgtccttccttcattaaggaatacagtccttaaacttgtatttttatatcttagtagcccggttttgctttttccctgatttttgtgtacttaaatatcgtgtgtgggatactaatttgagwtaactgtaggcttgtaaacatgagtcaggcttgctacaaaatgaagttcttttactggttatagcttgattttaaaaagctgcaaacagagggaaggcttctttaacttggtaaagttggaggaaaaaaagaaaagcttacagttctaaaatgtaaccaaagtgatccatcattacatgttattgggacaccagtaagccttagttcagccagattagcgagctgctgtagaactcagatatttgaggtactattaaatcaatttatggctacagtactatttatggcttcaaaagttga

SEQ ID NO: 80083 - DNA, 600 bp, Chicken  19866894371944_1
tccaagtccaccgctaaaccatctcccagagcactacattcacatgtctcctaaatatctccagggttggcaaatcctctacttccccaggcagcctgttccaatgcccaaccagactttccacgaataaattcttcccaatatccaatctaaacctcctctggcacaaccttaggctgtttctgcatgtcccacacaggaaagagactgacactctcctcactactacctccattcagatagttgaagagagaaatgaggcctctcctcagtctccttttctccaggactaaccacccyccatttcctcagctgctcctcgtaagctgtgtttcctagtctcttcaccagctttgttgttctccaaacacgtgccagcaactcacaatctttcttgtagtgaggggcccaaatctgaacacagtacttgaggcaacttttcagccactgttcctcgagcctgtattgctgcatgggtttttatgacaccggtatagtacctgatagttagccttgttgtatgtcatataatgggatgcaattcatcagtctagactaatgaaatccctctgcagaatccctcaagcagatcaacgctcc

SEQ ID NO: 80084 - DNA, 600 bp, Chicken  19866894371947_1
tagatcccccttaagggatttctttcaattaagcttggcttcagggtggtccttatttcagtcaaaactagaaatttgatgcttgatttccaaagcaaaagccacacaaagttgcacaaaaataattcattctaacattttccagagtttcactcatgtgtattcatggtatgttctacattttattaattgtttatgtattttagttctgtatttccaacagtctataaaagctctttaaatgtggctacaagaaatagcacagtttacacgtcctttaatttcttcttcttacacaasatttttcagtgataattatttaagcttacatgatttttataaaaattcagtgaacactataaaatattcaagccattgatgtaaatatgatgaraataaatcagaaaaacttttcttttccagtcaaccaccattagaaaaaaaaccataaggaatcaacctagcaaatttaagagatgagaacacaggaaatataatttaatgtttaaatagaaataaaaagcaaaaaattttctgactcattacaaaattcaatgttacatgtcatgaaaatgttcctgagccaaaattatgggtaat

SEQ ID NO: 80085 - DNA, 600 bp, Chicken  19866894371947_2
tcagggtggtccttatttcagtcaaaactagaaatttgatgcttgatttccaaagcaaaagccacacaaagttgcacaaaaataattcattctaacattttccagagtttcactcatgtgtattcatggtatgttctacattttattaattgtttatgtattttagttctgtatttccaacagtctataaaagctctttaaatgtggctacaagaaatagcacagtttacacgtcctttaatttcttcttcttacacaasatttttcagtgataattatttaagcttacatgatttttasaaaaattcagtgaacactataaaatattcaagccattgatgtaaatatgatgaraataaatcagaaaaacttttcttttccagtcaaccaccattagaaaaaaaaccataaggaatcaacctagcaaatttaagagatgagaacacaggaaatataatttaatgtttaaatagaaataaaaagcaaaaaattttctgactcattacaaaattcaatgttacatgtcatgaaaatgttcctgagccaaaattatgggtaatacctgatgttcctaaaaatcttcatatttgtcatataagc

SEQ ID NO: 80086 - DNA, 600 bp, Chicken  19866894371947_3
gcaaaagccacacaaagttgcacaaaaataattcattctaacattttccagagtttcactcatgtgtattcatggtatgttctacattttattaattgtttatgtattttagttctgtatttccaacagtctataaaagctctttaaatgtggctacaagaaatagcacagtttacacgtcctttaatttcttcttcttacacaasatttttcagtgataattatttaagcttacatgatttttataaaaattcagtgaacactataaaatattcaagccattgatgtaaatatgatgaraataaatcagaaaaacttttcttttccagtcaaccaccattagaaaaaaaaccataaggaatcaacctagcaaatttaagagatgagaacacaggaaatataatttaatgtttaaatagaaataaaaagcaaaaaattttctgactcattacaaaattcaatgttacatgtcatgaaaatgttcctgagccaaaattatgggtaatacctgatgttcctaaaaatcttcatatttgtcatataagcagataccaaaggttaccgttcctgttatcttctggtacaatatttacaaatttg

SEQ ID NO: 80087 - DNA, 600 bp, Chicken  19866894371948_1
ttcccctacgtgcctcttttaaacctaactgttacacaactatagtactgcaacaattaagagttttcgtaaggataaatactgaagtaaacttcctaccaaaagcttggaaaagttttaccattaatctcaatggcagaaaaacagttcactaagagtatgtctgaaaaatgaaattaaacacaaaaagtagatgtctaatatagctgcctgaaatcaaagcaactcactagttctacttacttgcacaaatcatctgttctgagaagtactcaaagaaaattcattgtcacaacctayataaaggcagaaaaccaacacagcctactctacwgttaaaggaattacactcttctagtcctcagggactgccccagaccagcacaacctttcatagatggggtggcctaccagtgccattagccggctccctccgcacccatgcatacaactsagcagagcctgggcactgccatatttcctgttaagtgttcccaaacctgaccctcctccatgcaggtaaatctttcttgctccagactttcccaccagtatcagggaccctgaagttcctgatattattactcaggaaatccttgc

SEQ ID NO: 80088 - DNA, 600 bp, Chicken  19866894371948_2
cacaactatagtactgcaacaattaagagttttcgtaaggataaatactgaagtaaacttcctaccaaaagcttggaaaagttttaccattaatctcaatggcagaaaaacagttcactaagagtatgtctgaaaaatgaaattaaacacaaaaagtagatgtctaatatagctgcctgaaatcaaagcaactcactagttctacttacttgcacaaatcatctgttctgagaagtactcaaagaaaattcattgtcacaacctayataaaggcagaaaaccaacacagcctactctacwgttaaaggaattacactcttctagtcctcagggactgccccagaccagcacaacctttcatagatggggtggcctaccagtgccattagccggctccctccgcacccatgcatacaactsagcagagcctgggcactgccatatttcctgttaagtgttcccaaacctgaccctcctccatgcaggtaaatctttcttgctccagactttcccaccagtatcagggaccctgaagttcctgatattattactcaggaaatccttgctactgtgttcactcattggaattcacttccttcc

SEQ ID NO: 80089 - DNA, 582 bp, Chicken  19866894371948_3
agagtatgtctgaaaaatgaaattaaacacaaaaagtagatgtctaatatagctgcctgaaatcaaagcaactcactagttctacttacttgcacaaatcatctgttctgagaagtactcaaagaaaattcattgtcacaacctayataaaggcagaaaaccaacacagcctactctacwgttaaaggaattacactcttctagtcctcagggactgccccagaccagcacaacctttcatagatggggtggcctaccagtgccattagccggctccctccgcacccatgcatacaactsagcagagcctgggcactgccatatttcctgttaagtgttcccaaacctgaccctcctccatgcaggtaaatctttcttgctccagactttcccaccagtatcagggaccctgaagttcctgatattattactcaggaaatccttgctactgtgttcactcattggaattcacttccttccttcccgctctccagtgaaaggcacacatccaacaattccagtcaagcttcagtaaacatctcaagaacaccctttggggcaagcctaacagacttggcccac

SEQ ID NO: 80090 - DNA, 599 bp, Chicken  19866894371949_1
  misc_feature (1)..(72): n is any nucleotide
nnnnnnnnnnnnnnnnnnnnnnnnnnnnnnnnnnnnnnnnnnnnnnnnnnnnnnnnnnnnnnnnnnnnnnnnatgtgatgtattggcctagtagcactaatgttgcttactgttttgcacaaataatattgttagactctttgaaacaagctgttttagaatagattttggagtaagaatgttgatgatgttgaggttgtggatgccccgtccctggaggtgttcagggccaggttggatggggtcctgggcagcctggtctagtattagatatggaggttggcagctctgcctgcagcwgggggrttggagcttgatgatccttgaggtcccttccaacccaagccattctgtgattctatgatgccaagtggaacctgaaggacgtaatgctttgcttttttgattttttttaaactctgttaaaaaatatatacatccaaagagcttattttttttcaacattaaaataaaaggagttattatggtgctttttcttcaactgttcaaaggttctcatcctcactgaaatctgccagtgtgacagtatgaggtttggtggtgtaatagcgtgtgtagctatatgtgatagcgtagta

SEQ ID NO: 80091 - DNA, 599 bp, Chicken  19866894371949_2
  misc_feature (1)..(66): n is any nucleotide
nnnnnnnnnnnnnnnnnnnnnnnnnnnnnnnnnnnnnnnnnnnnnnnnnnnnnnnnnnnnnnnnnnatgtgatgtattggcctagtagcactaatgttgcttactgttttgcacaaataatattgttagactctttgaaacaagctgttttagaatagattttggagtaagaatgttgatgatgttgaggttgtggatgccccgtccctggaggtgttcagggccaggttggatggggtcctgggcagcctggtctagtattagatatggaggttggcagctctgcctgcagcwgggggrttggagcttgatgatccttgaggtcccttccaacccaagccattctgtgattctatgatgccaagtggaacctgaaggacgtaatgctttgcttttttgattttttttaaactctgttaaaaaatatatacatccaaagagcttattttttttcaacattaaaataaaaggagttattatggtgctttttcttcaactgttcaaaggttctcatcctcactgaaatctgccagtgtgacagtatgaggtttggtggtgtaatagcgtgtgtagctatatgtgatagcgtagtacacatt

SEQ ID NO: 80092 - DNA, 600 bp, Chicken  19866894371954_1
taaaaaagacagacactgatacagatgcttaactccgcagccaagacatattcactgcgtgcaacaaaagagaaattcctgcacaagcgcttcaacttttagactacttctctaacaagcatttcatcttctctaaggaggaagcatcccagtgatctctggctgctcagtctcctagccatgcagaactcctgtgccgtgatgaagcactgcagttgttattcagcccaacagaaacgcatgcaagcacattaagtctcaacaaactgtaacggccacaggctcaccgtcaacgcaagmagcgctggcaaactgcttttcttcctctgaaatcaacccacagwacactgagacccacccttctgtctttcccacagccgcctttctttagggacgcagagaacacatgcaatttctacatagtttcttcagcaaacgcatgttttgaagcttaaattagtaataatcatctacttcggaaagctacaccattgccagaggggggagactattccatgcgagagcaccatctcgcagcagcactgccccaactccctccctgcaaaagcatttctcagctcctccacagctgctttatgr

SEQ ID NO: 80093 - DNA, 600 bp, Chicken  19866894371954_2
gacatattcactgcgtgcaacaaaagagaaattcctgcacaagcgcttcaacttttagactacttctctaacaagcatttcatcttctctaaggaggaagcatcccagtgatctctggctgctcagtctcctagccatgcagaactcctgtgccgtgatgaagcactgcagttgttattcagcccaacagaaacgcatgcaagcacattaagtctcaacaaactgtaacggccacaggctcaccgtcaacgcaagmagcgctggcaaactgcttttcttcctctgaaatcaacccacagwacactgagacccacccttctgtctttcccacagccgcctttctttagggacgcagagaacacatgcaatttctacatagtttcttcagcaaacgcatgttttgaagcttaaattagtaataatcatctacttcggaaagctacaccattgccagaggggggagactattccatgcgagagcaccatctcgcagcagcactgccccaactccctccctgcaaaagcatttctcagctcctccacagctgctttatgrtggcacggcttgcaggctgctcgcagtatttttatcacaccaac

SEQ ID NO: 80094 - DNA, 600 bp, Chicken  19866894371954_3
agcgctggcaaactgcttttcttcctctgaaatcaacccacagwacactgagacccacccttctgtctttcccacagccgcctttctttagggacgcagagaacacatgcaatttctacatagtttcttcagcaaacgcatgttttgaagcttaaattagtaataatcatctacttcggaaagctacaccattgccagaggggggagactattccatgcgagagcaccatctcgcagcagcactgccccaactccctccctgcaaaagcatttctcagctcctccacagctgctttatgrtggcacggcttgcaggctgctcgcagtatttttatcacaccaacctccagaggcttcttcctaacttgttcctctttccttcaagaggagaaggacacggcacatcctataataaaacatccttgccaactcctcattgccgcgttgggaatacaacggcagaacgacggttctcaatgcgcttttgaaggagaagaaaaaaaagcggccccgccgctcccactgccataaaaccacaccgcgcacacgggctcccatgcaataaaagaatacccgcgccgtgatttagttcccaacttc

SEQ ID NO: 80095 - DNA, 600 bp, Chicken  19866894371958_1
caagcgatggcatttgtgttggtcagcacagctacagggccctctttgtatgagaccaacaaaaagactatactggctacactggggcttatgaggcatcctgcaaggtgcacacattcaggagaaggcaaacgggctgcagagatgcagaactggatcaaggatgctagtatcctcctgcttgaacgctgctcaactgtgtgctcagcagccagctcccattaggggaagctatgtattgaaattcccacacacaccacaatgactatttgctccaaatatccgcccggatccattcaragtgtaaaacatgaagaacccgtgcaagttagtcagcaagggctggatagtccagagaaagaaaaataaaatgaaaatgaatcctttaaatacaacacacatagttagttgcaacatcttaaagatacatgatgccccactatgtccactaatagcacagaatgaaaaagtcaattttcaagtttttaagtcatataacacttcaagaaatctcacagaattcaacttgcccagcacaaaaggagagggttctgagcacaccatgctgtgctttaggaaggggcctcagtacctcatact

SEQ ID NO: 80096 - DNA, 600 bp, Chicken  19866894371964_1
aacaggagctacctgcagatgtttacacagaacttgtccttatgactgtatttaatgaaggctgctgcactcctcttcatgaatctcacaatctgaactctagcaacacgagtaattctttatgttattaaaccatagcaaaggaggaagattctgacacgtgtaattattaagtcttgcttcattttggagatcagtgtgccagtttctaaaggaggaagatgccttaacgcaagtgctgctctgaaagtaatgcctcctatttcattatgctggcccatgacatcagaggtggatgtyggtgttacagcagcagaggttgaaccgtcccagcagtatcccattagattttgttgtcatgtgacagagggctgcagaggggcagtctgacaaaatggcatctgacatggaagcgcagatgaaaccaaggtgtatcactgaattcctccaagcagaaaaaaaaaaaggcacctactgacattcgttaatgcttgctgaatgtctttggagaccaaccatttcagcagtgccagcagtgacagtgggtcaactccatgggtgcagctttttaccagcacagcacgaaggctcttgttcatc

SEQ ID NO: 80097 - DNA, 600 bp, Chicken  19866894371967_1
aaagtcgacctcttcagacacacttccatgatggctgtgattcactgcagttgttttcaaagctgtgtgagtgccatcaggcggggcgctcccagcagcctcctctgaccatgcagacccttcttccaacgttccttgctgctccagtaaaaactgggccaacttcttctcaaagataaacctggtagttgaggtgacgggcccacacttcagccctgcccttacaagttcctctctaagctcatcagggctgagttgcttcaagcgggataagatcgcatccatcgttatctcacctaraggagaaacagatgagatgaacttcagtctttttccttctattttaatgctgtattaaagcaaagaaaaaaggtgtctcttaatttttctgactctgatgagattaatgagaaagcaaaatgttttccaactcattaatagcgtttaagccatcggacttatactgtttcctcttcctctcgtgcctacccgaaagagtatttacaacatwcattttgttccttttaagtttcattaggactttcattgtgaaaatttaacccataacatttatgtctgaaaattgatgacagatattat

SEQ ID NO: 80098 - DNA, 600 bp, Chicken  19866894371967_2
agccctgcccttacaagttcctctctaagctcatcagggctgagttgcttcaagcgggataagatcgcatccatcgttatctcacctaraggagaaacagatgagatgaacttcagtctttttccttctattttaatgctgtattaaagcaaagaaaaaaggtgtctcttaatttttctgactctgatgagattaatgagaaagcaaaatgttttccaactcattaatagcgtttaagccatcggacttatactgtttcctcttcctctcgtgcctacccgaaagagtatttacaacatwcattttgttccttttaagtttcattaggactttcattgtgaaaatttaacccataacatttatgtctgaaaattgatgacagatattatttgacctctgtcaagaagccaacaacccgtgcataaaatggggcggaaggccgcatggctgcagtacagcccrggttagacagcccctacagctagagcatggcactgtctctattgcaggaagaatttctcactgaaaaacatacaacacgcgtgtggggcagcagccagggcactctgcctctggcaatggctcaaggctggaactatt

SEQ ID NO: 80099 - DNA, 600 bp, Chicken  19866894371967_3
tgtctcttaatttttctgactctgatgagattaatgagaaagcaaaatgttttccaactcattaatagcgtttaagccatcggacttatactgtttcctcttcctctcgtgcctacccgaaagagtatttacaacatwcattttgttccttttaagtttcattaggactttcattgtgaaaatttaacccataacatttatgtctgaaaattgatgacagatattatttgacctctgtcaagaagccaacaacccgtgcataaaatggggcggaaggccgcatggctgcagtacagcccrggttagacagcccctacagctagagcatggcactgtctctattgcaggaagaatttctcactgaaaaacatacaacacgcgtgtggggcagcagccagggcactctgcctctggcaatggctcaaggctggaactattgacacaactcggtttttcccagctcctgttctgtgatcaaacaatcaggagaggggagctgacctttccaggcctccctccttaacatatagcaggaatgtaaaaatttctcaatttccacagggaaatccttctctccagtgtgacactcagtgctcactt

SEQ ID NO: 80100 - DNA, 600 bp, Chicken  19866894371967_4
aggaagaatttctcactgaaaaacatacaacacgcgtgtggggcagcagccagggcactctgcctctggcaatggctcaaggctggaactattgacacaactcggtttttcccagctcctgttctgtgatcaaacaatcaggagaggggagctgacctttccaggcctccctccttaacatatagcaggaatgtaaaaatttctcaatttccacagggaaatccttctctccagtgtgacactcagtgctcacttccctccatgttagccacactcacagcttctgcacaagcagcaaasagacactgaaaacaccacaatgccaacacaattccctgctgtgagaaacctctgaccctaaaaaaacaactaaaaatagaggattcagagagctcaataacataagcagcttcaatgttattttgttagatactaaatccacacaaccataagagctgtgcctccctcctgctgcactgttagcagtgacagctttaggaccgagatgctcacacagccacagcccttgcagtgccggccttccctcactgccccgccaggccatgcctcatgctggcactcacagtgtgtttaggatca

SEQ ID NO: 80101 - DNA, 600 bp, Chicken  19866894371968_1
ttgataaaacagagaagcactgacattcatatgctttaccctttttttctaaggcattccaaggctgtggtgacagctgtgagaatgggggtagccagagttgttacagacttgctgttttctgttaatgagaaactggtgttcatccacagcccttctacatcgtacacaacctacaactcttgctgcaagcggtcctttataacaaatattgttatttttatgtttcaggtgcaaagatggcttgaaaggatttacatactccgcactgaagtaagtaagaacagttcttcgagtatrtagcttgaagagaagattttgaggaattgtgcacagaagaagctgcattgtatggaatgagttctcctaagaaaaagcatgctgttataaaattttatgattttttttatacagcatattttatacagcatattttttatacagcatagggatatatagcatatttgaatgcacagtatgctggtaagagaggaatcttttcatattttgaatcattgtaggaaggaaatgaagacacatgcttgtgtatgtttttgaaggcacgttaatcttttttctttctaaacctgtgatttgtga

SEQ ID NO: 80102 - DNA, 600 bp, Chicken  19866894371968_2
acagaagaagctgcattgtatggaatgagttctcctaagaaaaagcatgctgttataaaattttatgattttttttatacagcatattttatacagcatattttttatacagcatagggatatatagcatatttgaatgcacagtatgctggtaagagaggaatcttttcatattttgaatcattgtaggaaggaaatgaagacacatgcttgtgtatgtttttgaaggcacgttaatcttttttctttctaaacctgtgatttgtgattcacattattctcctggaaggaaagggctgytgtgttttcacctggaatttattttctgtgtagttctgtgaccagcacccaaataaagcatggacagcccatggcatgatcagtaccagctcacaggtgcagcgaaaaactgaagccaaagtcaaggaaagcagagctgctgttgatagtggaaaatatcttatagaatgtgcaaccatagttaagtagttaaataagttgccatccatggaggtgttcaagaaacatgtagatgtgtcacagaagggcatgggttagtgggcatggtagggatgggttgatggttcaactagatgatct

SEQ ID NO: 80103 - DNA, 600 bp, Chicken  19866894371978_1
agtaggggaaaggttcaccagagaataaagaacttgaatgcatgttcttagcttagtttgacaagatgttaaaactgatcaactgtgtaagtatctgccttgctcttcctttgtaagcacagttgatagcgagtggatttgaagactcccaagtgtaacttccctgtatctaaccaaattctgagtatttgcaaaatttatattgatggagtttactaaggctgttatagtttcaaatagtcctgtcttgttggcctaatttaacaggcatatttgaacgtagaggcaggagaacctctmaggtggtgcagatttcaggaggatcatatttcttaattcttaatgaaaatactttactcagaaaagtgatgttatttatgcaatttttwaaataattaggtagagaagtaaatgtgtattttccactctgccatatatctattttacccagttcaagtaccgtatgcataactcagagttgtctacaacgtgttctgatactttaaggcacgttctgtactgagcaagtagtttgatgtcaagatttacaacgtaaggaaaatgccagcaattttgcaaaaacaagaaaacaaaagccca

SEQ ID NO: 80104 - DNA, 600 bp, Chicken  19866894371978_2
agtatctgccttgctcttcctttgtaagcacagttgatagcgagtggatttgaagactcccaagtgtaacttccctgtatctaaccaaattctgagtatttgcaaaatttatattgatggagtttactaaggctgttatagtttcaaatagtcctgtcttgttggcctaatttaacaggcatatttgaacgtagaggcaggagaacctctmaggtggtgcagatttcaggaggatcatatttcttaattcttaatgaaaatactttactcagaaaagtgatgttatttatgcaatttttwaaataattaggtagagaagtaaatgtgtattttccactctgccatatatctattttacccagttcaagtaccgtatgcataactcagagttgtctacaacgtgttctgatactttaaggcacgttctgtactgagcaagtagtttgatgtcaagatttacaacgtaaggaaaatgccagcaattttgcaaaaacaagaaaacaaaagcccaacccacttctacatagtgttttgttcttgtattttacttcagtaagcaaatgaatccctttattgaagatgttctgaataggatacaag

SEQ ID NO: 80105 - DNA, 599 bp, Chicken  19866894371979_1
  misc_feature (1)..(122): n is any nucleotide
nnnnnnnnnnnnnnnnnnnnnnnnnnnnnnnnnnnnnnnnnnnnnnnnnnnnnnnnnnnnnnnnnnnnnnnnnnnnnnnnnnnnnnnnnnnnnnnnnnnnnnnnnnnnnnnnnnnnnnnnnnctgttgtttctagaatctgagtacgtaccttcaagtagtcacggtcacagttagacccatcttctacatcaaaggctgtgaaactatagctgagtgtattcccctttgtggtctgaatagtccatctgcagtgctcccccagtgggtaattatttggataatttaaactttccaataygccatagcttcggttaacagtgagcacttcatggcaaactaaaaaagaaagaggcgatagattatgtttatgcagggctttttagcccagcatcttaaaacaaaaaaacaactaattgaagttactgatatcactacaatgtgagaaatatcgtctctctaatctgtgaataaaaataacagacaaaaagggagttgttacctattgaaggacatactatatctggtttgaaacaaaaaaagaaactttccaaacttgaatctttcaactctgctactgtttttctttctgaygtttgc

SEQ ID NO: 80106 - DNA, 600 bp, Chicken  19866894371979_2
ccaataygccatagcttcggttaacagtgagcacttcatggcaaactaaaaaagaaagaggcgatagattatgtttatgcagggctttttagcccagcatcttaaaacaaaaaaacaactaattgaagttactgatatcactacaatgtgagaaatatcgtctctctaatctgtgaataaaaataacagacaaaaagggagttgttacctattgaaggacatactatatctggtttgaaacaaaaaaagaaactttccaaacttgaatctttcaactctgctactgtttttctttctgaygtttgcagactcatccaccaatttttgtattgtagtaaagtttttgggggggcctattttcttaagttccaaatgcatagttccaatgcatggtttcctgtattatttttttttaagctaatgataaaaaaaaaaattgcctcatcattttgaaacagttttgaggaatggtgctcaacaaagtttgcctgatgaattaaagtggtttatttcagcaaactagaaaaaaaataagaattgaattgctaaaacaacaaatggaaactataatgcttatactggatttgctagccccaggaa

SEQ ID NO: 80107 - DNA, 600 bp, Chicken  19866894371979_3
acaaaaaaacaactaattgaagttactgatatcactacaatgtgagaaatatcgtctctctaatctgtgaataaaaataacagacaaaaagggagttgttacctattgaaggacatactatatctggtttgaaacaaaaaaagaaactttccaaacttgaatctttcaactctgctactgtttttctttctgaygtttgcagactcatccaccaatttttgtattgtagtaaagtttttgggggggcctattttcttaagttccaaatgcatagttccaatgcatggtttcctgtattayttttttttaagctaatgataaaaaaaaaaattgcctcatcattttgaaacagttttgaggaatggtgctcaacaaagtttgcctgatgaattaaagtggtttatttcagcaaactagaaaaaaaataagaattgaattgctaaaacaacaaatggaaactataatgcttatactggatttgctagccccaggaataggaagtgggtatgaaagtctttcagaaggagctatgattttaatttcaagtcatgcaatagcagcctagcagaagaactgggcatacacctagaataatgagct

SEQ ID NO: 80108 - DNA, 599 bp, Chicken  19866894371992_1
  misc_feature (1)..(34): n is any nucleotide
nnnnnnnnnnnnnnnnnnnnnnnnnnnnnnnnnnaaaaaagggtccgtcagtatccacaatgccaaggaacatgaaagacctgaaaatacagttcttggtcttgcagggagatgctgcatgtggataacttatttcaggagcggaacatgtttttactagaaacctagatttgccaaagaagaaatgaaatttggtccaatggtcctcttttccatcacaataatataagcaaaagcttagaacggaaggggaagatttcacatttctggagaacgttgttttgttgtttttttttccamaacattcatgcagatagctcaggagtttggggcagaattctccactcacaagttttacctattgcaaggcagattctgtgcccagcaagggaaatgggagaatcctactgctgtgaaagacacagacttctgcactcattcctcattactcctttctgctcatattgtctgcaatagtacatcccatagagaacaggaatgtttgacactatcacagcttggcctttagctagggctgatataaaggaaaggcatgaaactagtgcagatgtaggcagaataagagtcaaaaatgtggg

SEQ ID NO: 80109 - DNA, 600 bp, Chicken  19866894371992_2
ttcctaactagaatctgttcatttttacattgaagtagaagagttgctgagcaaagcattgtgttcaaaggcagtcatagatgtattaatccatttgatgagcactttaattattgttcaagagctgttttttgagacagttctatggtaatagtgactctgcaaaggtggctgaagagcaaggaagaatatatcccttgcagattactgaccatatagcttcgggtgttttcaattctctgcaagccattatgactagaagcttcatttgtggatgggaaccccaacaccagacacttygcaaacacaggtataaatatatttcctgcacataacagcttgaagtctggatatgggcttaaagactagcatcctaacagaaaagaaatcagaattgtttgataaccaaagtagttcagaccaacttcagacctttcctaactctcagtgcactctgagttccaactcagtccacacttctggatagttccggaaggaaagggctggggaggacgttggctgtcacagctcctaacccactatactcatgtcccctcctctggtcagccccatccatgcccattcagagagcagattcaa

SEQ ID NO: 80110 - DNA, 600 bp, Chicken  19866894371992_3
cagtgcactctgagttccaactcagtccacacttctggatagttccggaaggaaagggctggggaggacgttggctgtcacagctcctaacccactatactcatgtcccctcctctggtcagccccatccatgcccattcagagagcagattcaaattgtctataggacttcccagtttgctgagagcttttctaggatgctactgacatcggaacatgtagcaagtctttgtaacccaatcagaaatcttcagatggcatagataatttttgccatcagtgatgctgtcaagtatctcyctaaagagatactaagcagactgtaatccctcaggatgttcagggaatggacataactttctcataaaattctcttcttaatttaattaaataaataaaaataaaaataaaaaagcccccaaggatcattttcttatatgtttatgtccttatgagcaatacccaggaaataaaagaatttggactagtgaatcattgactcttcttaacactctttgccactcaccatccgtctttcaccgttgactcctctccactgctcagctcttttgataatgtagctcagctcctgaatggaaa

SEQ ID NO: 80111 - DNA, 600 bp, Chicken  19866894371995_1
gcccattctgtgcttaacttcagaccttctggtgtaacactttgcagtcagctacctattttgttgtttaaagtagcagtggttcactaactcccttctaaatgtacatagttgctgtctccaaaacttcatttcaggaatggcctgaacactagtacgctatagctagaaacaccaccatataacatatgggttttaggttcactcacaggggactggtaataagtgtgtagtaagcccaggttgtacaaaccacccttgaaccactctccctttactattctactctgggaaaaatcrgaattagcatgatgacaggcaaaagaaaagagaatgacaagcacaaaacataattagtyagctttttcaaaaagcaggttaaaatgaatgctggtatccaagataayattctgtaaagactgttgacttagtgcatgttgcaagcgctttacaagggcaaaaggagtggtagcgaaaccagaaacctttaccacaagaagaaatgtgaggcaaaagcagttagctgctaatatacatacctggtcccttcacttgcgtgcagatctttacatttggtttgccactctgcggatcttgccc

SEQ ID NO: 80112 - DNA, 600 bp, Chicken  19866894371995_2
tttgttgtttaaagtagcagtggttcactaactcccttctaaatgtacatagttgctgtctccaaaacttcatttcaggaatggcctgaacactagtacgctatagctagaaacaccaccatataacatatgggttttaggttcactcacaggggactggtaataagtgtgtagtaagcccaggttgtacaaaccacccttgaaccactctccctttactattctactctgggaaaaatcrgaattagcatgatgacaggcaaaagaaaagagaatgacaagcacaaaacataattagtyagctttttcaaaaagcaggttaaaatgaatgctggtatccaagataayattctgtaaagactgttgacttagtgcatgttgcaagcgctttacaagggcaaaaggagtggtagcgaaaccagaaacctttaccacaagaagaaatgtgaggcaaaagcagttagctgctaatatacatacctggtcccttcacttgcgtgcagatctttacatttggtttgccactctgcggatcttgcccctcactgtaaccctcaccaaaaaatgtcatagtgaaggaggttccatccatctgtagta

SEQ ID NO: 80113 - DNA, 600 bp, Chicken  19866894371995_3
atagttgctgtctccaaaacttcatttcaggaatggcctgaacactagtacgctatagctagaaacaccaccatataacatatgggttttaggttcactcacaggggactggtaataagtgtgtagtaagcccaggttgtacaaaccacccttgaaccactctccctttactattctactctgggaaaaatcrgaattagcatgatgacaggcaaaagaaaagagaatgacaagcacaaaacataattagtyagctttttcaaaaagcaggttaaaatgaatgctggtatccaagataayattctgtaaagactgttgacttagtgcatgttgcaagcgctttacaagggcaaaaggagtggtagcgaaaccagaaacctttaccacaagaagaaatgtgaggcaaaagcagttagctgctaatatacatacctggtcccttcacttgcgtgcagatctttacatttggtttgccactctgcggatcttgcccctcactgtaaccctcaccaaaaaatgtcatagtgaaggaggttccatccatctgtagtaagacaagtggcaggtcaccaaaacagtaaggcacttctatcaagcaaa

SEQ ID NO: 80114 - DNA, 600 bp, Chicken  19866894371998_1
taggctgaaaacagatgattgtaaggtcatagagtggaagttaaatgcagatagtattaccatgacatggcaatattggtaacatgggtaatattggtggtacatgggcggttggactagatgatcttagaggtctttttcagccttaatgattctatgatcccatgacagcaaaagttgtgtctcattgccataggcagacttcagtcaagaggaaatatgactgtcccgtgcagacacactgagaggctgacactgggttgagggagagccttcagtcaactgtgccaatacgaggayatgcaactgtcatgaatagatttcgtttgtaaaggagataatacaagaaaacttaattttttagtcagttaccagatgccatcaaggcatcgtggcaaaaaagtatataaatgctatcctgacagtatacatgtagggacagcacacagaatcatagaatggcttgtgtttaaggggatcttaaagatcatctagttgaaaactccagcctgttccagtacctcaccagcccctgaataaaaaatttattcctaaaatttagtactggaaggctgcaattagtctccccaaagctttttc

SEQ ID NO: 80115 - DNA, 600 bp, Chicken  19866894372001_1
ttacacactcagattcttcctcctctcttcttcttttcatcagtatttcaagagcattagctccaagtttgcacacagctgattaaacgaaccatggaaaacaaatgagcgtgaatgattaaattgctctgagctgtcaaactggcacttttcaggacagtaatatagccatttcaaggtctgtatttctcaaaagccagcatttttttctttaattttctttattatttattcactgttcatgaaacagtttgattctgctgcaagctttacctcagtttctgtatttctctctctctytgtgtccagaagctgtcagaccaatagttaaaagagwttttaacctaattcctgtatttgctatgttgggaatacatttttctacatcttttgttgtaatctcacaacatcacagtttgttaacattttagatagggtgaagacacaggagacaagatttatcaggagaattacaaggggtttactgtgggatagcagaaaacaaagtttggatcatttatttctaaactgggatttcactcaaaatgcccccaaggcattttgttataatcataaggctccttctaagggcaccaagta

SEQ ID NO: 80116 - DNA, 600 bp, Chicken  19866894372001_2
catcagtatttcaagagcattagctccaagtttgcacacagctgattaaacgaaccatggaaaacaaatgagcgtgaatgattaaattgctctgagctgtcaaactggcacttttcaggacagtaatatagccatttcaaggtctgtatttctcaaaagccagcatttttttctttaattttctttattatttattcactgttcatgaaacagtttgattctgctgcaagctttacctcagtttctgtatttctctctctctytgtgtccagaagctgtcagaccaatagttaaaagagwttttaacctaattcctgtatttgctatgttgggaatacatttttctacatcttttgttgtaatctcacaacatcacagtttgttaacattttagatagggtgaagacacaggagacaagatttatcaggagaattacaaggggtttactgtgggatagcagaaaacaaagtttggatcatttatttctaaactgggatttcactcaaaatgcccccaaggcattttgttataatcataaggctccttctaagggcaccaagtaatccccagagagactctcattttaatttgctttgaat

SEQ ID NO: 80117 - DNA, 599 bp, Chicken  19866894372003_1
  misc_feature (1)..(91): n is any nucleotide
nnnnnnnnnnnnnnnnnnnnnnnnnnnnnnnnnnnnnnnnnnnnnnnnnnnnnnnnnnnnnnnnnnnnnnnnnnnnnnnnnnnnnnnnnnnactcaacattaaggaaatgactttcccttccgaatggagagcatggacataccttgctaaaccttctctgctcacgtaaaaaaatgagcttggttagagaagtgaacgcactggcaatctcagtctccaaatcccatcagatttccatcccgctgttttttactgttcctccagactcccatttaaggaacctaatggtaggaaatacsgactaacaaaccacaccttatcatcyagtctcatacagcctacataaaactgaaatgaaagctgagcccgagaggtgagtgcaggccgagsaggcggcagccaggagccacagggccgccatgcacacctccaaccagcggagtgctgagcgagctccagccaccagggraggggtagctctgcacctggcttttagctccagccagcaccaggagtctgcaggtaacrcactggaaggagtaaggttttactttttcctttcagaaaccctgcctctctgcttttctctggccgtttc

SEQ ID NO: 80118 - DNA, 599 bp, Chicken  19866894372003_2
  misc_feature (1)..(65): n is any nucleotide
nnnnnnnnnnnnnnnnnnnnnnnnnnnnnnnnnnnnnnnnnnnnnnnnnnnnnnnnnnnnnnnnnactcaacattaaggaaatgactttcccttccgaatggagagcatggacataccttgctaaaccttctctgctcacgtaaaaaaatgagcttggttagagaagtgaacgcactggcaatctcagtctccaaatcccatcagatttccatcccgctgttttttactgttcctccagactcccatttaaggaacctaatggtaggaaatacsgactaacaaaccacaccttatcatcyagtctcatacagcctacataaaactgaaatgaaagctgagcccgagaggtgagtgcaggccgagsaggcggcagccaggagccacagggccgccatgcacacctccaaccagcggagtgctgagcgagctccagccaccagggraggggtagctctgcacctggcttttagctccagccagcaccaggagtctgcaggtaacrcactggaaggagtaaggttttactttttcctttcagaaaccctgcctctctgcttttctctggccgtttcctcccacgcttgctgacccgctcctg

SEQ ID NO: 80119 - DNA, 600 bp, Chicken  19866894372003_3
actcaacattaaggaaatgactttcccttccgaatggagagcatggacataccttgctaaaccttctctgctcacgtaaaaaaatgagcttggttagagaagtgaacgcactggcaatctcagtctccaaatcccatcagatttccatcccgctgttttttactgttcctccagactcccatttaaggaacctaatggtaggaaatacsgactaacaaaccacaccttatcatcyagtctcatacagcctacataaaactgaaatgaaagctgagcccgagaggtgagtgcaggccgagsaggcggcagccaggagccacagggccgccatgcacacctccaaccagcggagtgctgagcgagctccagccaccagggraggggtagctctgcacctggcttttagctccagccagcaccaggagtctgcaggtaacrcactggaaggagtaaggttttactttttcctttcagaaaccctgcctctctgcttttctctggccgtttcctcccacgcttgctgacccgctcctgttcttattacggcttctgtttctcctccaagtagttaaagattttttttcaggtattccaatttgc

SEQ ID NO: 80120 - DNA, 600 bp, Chicken  19866894372003_4
aaaaatgagcttggttagagaagtgaacgcactggcaatctcagtctccaaatcccatcagatttccatcccgctgttttttactgttcctccagactcccatttaaggaacctaatggtaggaaatacsgactaacaaaccacaccttatcatcyagtctcatacagcctacataaaactgaaatgaaagctgagcccgagaggtgagtgcaggccgagsaggcggcagccaggagccacagggccgccatgcacacctccaaccagcggagtgctgagcgagctccagccaccagggraggggtagctctgcacctggcttttagctccagccagcaccaggagtctgcaggtaacrcactggaaggagtaaggttttactttttcctttcagaaaccctgcctctctgcttttctctggccgtttcctcccacgcttgctgacccgctcctgttcttattacggcttctgtttctcctccaagtagttaaagattttttttcaggtattccaatttgcacagatctgcagcacaaatccactttacctaaatcgtcacgttatctaatttgcatttcatttccttcctgcttagcca

SEQ ID NO: 80121 - DNA, 595 bp, Chicken  19866894372003_5
agatttccatcccgctgttttttactgttcctccagactcccatttaaggaacctaatggtaggaaatacsgactaacaaaccacaccttatcatcyagtctcatacagcctacataaaactgaaatgaaagctgagcccgagaggtgagtgcaggccgagsaggcggcagccaggagccacagggccgccatgcacacctccaaccagcggagtgctgagcgagctccagccaccagggraggggtagctctgcacctggcttttagctccagccagcaccaggagtctgcaggtaacrcactggaaggagtaaggttttactttttcctttcagaaaccctgcctctctgcttttctctggccgtttcctcccacgcttgctgacccgctcctgttcttattacggcttctgtttctcctccaagtagttaaagattttttttcaggtattccaatttgcacagatctgcagcacaaatccactttacctaaatcgtcacgttatctaatttgcatttcatttccttcctgcttagccagaaataaacatcaccacaaattatgctgaaaaaactctgagaaaactgcaacca

SEQ ID NO: 80122 - DNA, 600 bp, Chicken  19866894372004_1
ttttgcggaatggaatggaaaggaatggaatagaatacactggaatggtaccaaatttccaattaccaactgttcatccttcctaactatgggtatatattttttcctatgggtttccattcgcatgtttgctgtgattgcagtaaaagctttctgacctgcatttaaaagaaacagcccctgtgggggtagaagaaacagccttggaaaaatgactgccacataggtacccaaataattaatcatgattaattttattaacataaatcccacaggaattaataatgctttgccacttayaaagcactgcccccggcagaatctgcaacactgaatttaaaacaggatacatcactttactccctgggtctcatcccaatcctttccccactgaaamatacaaattatagacaatactccagggatttttggaaaaaaaacaccctccttagagccaaaatcaacagcaggaggattctgcaataaaactgaggaacgaagtgagactatagtagttaagtgagatttcagtggtgtctaactggaacagatttcctacagcaactaaacatctgtactaaaataagcaaatagctgcag

SEQ ID NO: 80123 - DNA, 532 bp, Chicken  19866894372004_2
tattttttcctatgggtttccattcgcatgtttgctgtgattgcagtaaaagctttctgacctgcatttaaaagaaacagcccctgtgggggtagaagaaacagccttggaaaaatgactgccacataggtacccaaataattaatcatgattaattttattaacataaatcccacaggaattaataatgctttgccacttayaaagcactgcccccggcagaatctgcaacactgaatttaaaacaggatacatcactttactccctgggtctcatcccaatcctttccccactgaaamatacaaattatagacaatactccagggatttttggaaaaaaaacaccctccttagagccaaaatcaacagcaggaggattctgcaataaaactgaggaacgaagtgagactatagtagttaagtgagatttcagtggtgtctaactggaacagatttcctacagcaactaaacatctgtactaaaataagcaaatagctgcaggacagatttcccacctcgtcccccataag

SEQ ID NO: 80124 - DNA, 600 bp, Chicken  19866894372012_1
ccagccttccttcggatgattccttccccttagaactgctcttcttttcctgtcacctagaaatgtgttactctttttgctcagctgatgaagagcccggctccttttcctccttccaacaagcttcagcttgaaacctccgaagccagaaagctctgcttgtctcccgtgccagcagtgcaagctgaaaggacaggagttctctcttctaattttagccaccaaaaagtgggtatcaagtgcaagttactcctttaggcgctctgtgactgacacagagagaagagcccctcggaggtrccattgactaccggtgactaattcagactaaacacctataagtaggcaagatgaatcccacccacagagtttgcttcttccttgaggccaattagatgtaaaagctgctgcacagtgatctagtttcgaggctttgaaataaggctttcagtcaaaaatgcaaattcagtgaaaataagacctttttgtgggaaacggctcatttctgattcttgccttagaaagatatttagaaaaaaacaataggtgtggtttttatagtctcaaaaagcagaatttccattttctgtacgaaacgag

SEQ ID NO: 80125 - DNA, 600 bp, Chicken  19866894372014_1
gcaacaccatacaaaccagggataaatccttgcccaagtcggttgagggcacagggactagggcagcgccagctgggtggtgggagcaggcgcggcagccgccctgccctgcccggcagcgcacacgcgagggctgcgggtgatctcatttccagtagttgagtgaagtaagtgcgtaagtatgcaggattggggccctggaaaccatggagaaactgggtttctctttttattacagacaactgcagcgcctgtggactggtgcagcaatgctcattttctccggagaatcatgccctstgattttattttatttttaatacataaatgtctccgtgaggaagttttgattaaaaataaagacttgaaaaagaggttaaaaatattgtctggctaagtaaatatgcagatttaaagcacatggataaaaatgagtgttgccataaacactgagcgtgtttctaaaaagaattttgcagaaaagataaacttttcctaactgtattttgattaaagttttgaagctgtttattagaagtaattgcttttccacaaggaaaaacagatgtatcgatgcaggacttagtttattctcctttg

SEQ ID NO: 80126 - DNA, 600 bp, Chicken  19866894372028_1
gatgccttgcttctaccttagaatcatagaatcgttaaggctggaaaagacctcgaagaccaccaagtccaaccccagtccacccctactatatgcccactggccatgtccctcagtgccgtgtctccacagttcttgagtgcctccagaaatgatgactccaccaccaccaccctgggcagcccacccctatgcccaaccactccttctgaggaaaatctttttcctaatatccaatctggtcctccctgacacaacttaagatcgttacctgctctacttaacttgatggcagctccmtcytctctgactgccttcaggcactcaattctggtccttcgagttagaacagaaacaatcccggatggttctccacacctaaacctcttgttctcagctcttcatataggtgcagatgatggatgatattctcgagtgaggtctgtaggagcctgctgccttcagggcccagttcttcaggtgagggcccttctgcatggccccatgtgcaccattccttcctcctgccttcttccaccccacgcttgggagaaaacactcatcgtgttgccctgcgagctgttggtggaaatctggctg

SEQ ID NO: 80127 - DNA, 600 bp, Chicken  19866894372028_2
gccttgcttctaccttagaatcatagaatcgttaaggctggaaaagacctcgaagaccaccaagtccaaccccagtccacccctactatatgcccactggccatgtccctcagtgccgtgtctccacagttcttgagtgcctccagaaatgatgactccaccaccaccaccctgggcagcccacccctatgcccaaccactccttctgaggaaaatctttttcctaatatccaatctggtcctccctgacacaacttaagatcgttacctgctctacttaacttgatggcagctccmtcytctctgactgccttcaggcactcaattctggtccttcgagttagaacagaaacaatcccggatggttctccacacctaaacctcttgttctcagctcttcatataggtgcagatgatggatgatattctcgagtgaggtctgtaggagcctgctgccttcagggcccagttcttcaggtgagggcccttctgcatggccccatgtgcaccattccttcctcctgccttcttccaccccacgcttgggagaaaacactcatcgtgttgccctgcgagctgttggtggaaatctggctgtgg

SEQ ID NO: 80128 - DNA, 600 bp, Chicken  19866894372028_3
tgagggcccttctgcatggccccatgtgcaccattccttcctcctgccttcttccaccccacgcttgggagaaaacactcatcgtgttgccctgcgagctgttggtggaaatctggctgtggaagaactagtaaattgcttttgtgcccgcagcaagccaagtgctccctgtgcagtaatcaatccaccacaagctccttggctgaaggtgatcacccaggctttatggagtgtggagcgtttccctggaacggccccgatgtactgtggtgcgcccacaaagtcccctccacccagtgrcacagagcagctgcccacggggcacggtgaaatgctttgtggaggagagctccgagcacttcaggttccttggtgtaaaatcagaatggcaggaaaatccttgagaaataaaaggaacctgatgaaattaaccccaggaccgtgtgcaggagatggggaacctttttgctctgtttagtcctcccttgtggctcccacatcactgcaggtaatttttcagcttgctgcagttcaacccagcaaggatccttgttgattaatgctaacgagggaccggctctttgctggtctaaaagtgcc

SEQ ID NO: 80129 - DNA, 600 bp, Chicken  19866894372039_1
ggaaactacatacaacaccctcggaggtactgcttttcaaatagatttgtttgcataagggctggctaattttcttctttaaatgagcaacctgttagaagaaatgttgcatattacattcagcttattgaaaacattaatttttgacatttaaattatattccctaatgtaagcacttaattttattataactcctatcttgatctaactttacagccattaccaaatagaacactgtgaatatttgagaggagaagcgcagtgtttgggtctgttaaagaaaacagatcacactccawgtaaaatcagaggaaaatcctggccttggtgaagctactgaaataagtactgcagacttcacgaagaccactgctgtgctcattataattttcatctacaacgaaggggaaatgaaaaagatttgtagtattctacaaatactgctttctgatgtttagatcctgttcttgaattccttcttcagttctcactctcataagaggcagatctaactcagggctcgccctgaatcctgggagaaaatggacagaaagcagccttcagaatcagactgtgagtaaatagtaatactacaggca

SEQ ID NO: 80130 - DNA, 600 bp, Chicken  19866894372040_1
tcttgccatttccctctgctgaactttgtgagcttcctgtaggccatgaggtatcttcagcccgctgaggaccttctgcacagcagcacaaccacctggtgcctctgacattcctctttgttttgcactctctgcagccctgcaccatcgtctatatcgctaacacagctactgcacaatatggtacctgcccctacactactccaccagtgactggcctccagatgcactttgtgcagtggattacaaccttttcagcacagcatttcagccaccattctctatttgaccaccaacccrgtctcatctccttacacaaggctaccagcatggttaacttcccctttgtaaacccacactgagtgctcccaagcaccttactgcacactttgtgtctggcaacagctctcacagttggttccttcaccatcttctcccagggattgaggtgagactgaccactccccagaatgtccttcacagaatgactgaggctggaggggacctctgaggccatcttcttgctcatcttgaggacactgatgacatttctttccttccagtcctaaggagcctcccctgatcatcatgatctttcac

SEQ ID NO: 80131 - DNA, 599 bp, Chicken  19866894372042_1
  misc_feature (1)..(190): n is any nucleotide
nnnnnnnnnnnnnnnnnnnnnnnnnnnnnnnnnnnnnnnnnnnnnnnnnnnnnnnnnnnnnnnnnnnnnnnnnnnnnnnnnnnnnnnnnnnnnnnnnnnnnnnnnnnnnnnnnnnnnnnnnnnnnnnnnnnnnnnnnnnnnnnnnnnnnnnnnnnnnnnnnnnnnnnnnnnnnnnnnnnnnnnnnnnnnncaacaactggaccctcccaataagcagaacaccaaggttttctttcctccccctcaaacacacaaggcttgcagtcagcggccatgccttaccttatctccttgtcccarcctctctgatttggcttcgtacaaagttttccagttggtattcacccccgatgctgacccacctctcacatcagagatggaggcacaytccagaagctgtccctcagagtcaaacctggaaccacaaagatgcattgctatttttggatggcagtccaccttatcataagcttacatttagtttcacgtacttaatacatgaaggatttttttctttcttaaaaatcaatgattgcaaaggaaacaattacagtaatttgtgtatactgcaaacaaaaatagcatttcagaataagtta

SEQ ID NO: 80132 - DNA, 599 bp, Chicken  19866894372042_2
  misc_feature (1)..(102): n is any nucleotide
nnnnnnnnnnnnnnnnnnnnnnnnnnnnnnnnnnnnnnnnnnnnnnnnnnnnnnnnnnnnnnnnnnnnnnnnnnnnnnnnnnnnnnnnnnnnnnnnnnnnnncaacaactggaccctcccaataagcagaacaccaaggttttctttcctccccctcaaacacacaaggcttgcagtcagcggccatgccttaccttatctccttgtcccarcctctctgatttggcttcgtacaaagttttccagttggtattcacccccgatgctgacccacctctcacatcagagatggaggcacaytccagaagctgtccctcagagtcaaacctggaaccacaaagatgcattgctatttttggatggcagtccaccttatcataagcttacatttagtttcacgtacttaatacatgaaggatttttttctttcttaaaaatcaatgattgcaaaggaaacaattacagtaatttgtgtatactgcaaacaaaaatagcatttcagaataagttaatactctgacttaattagcatagtattttataaacccacaaaaggagggcagctttgttctatataactgcaatttgtttgccagcta

SEQ ID NO: 80133 - DNA, 600 bp, Chicken  19866894372051_1
atttgctctgacttgacatttgagtgttcagtgagaaataaatttccatctctaaatggatgccaggatgagatctagtctcaaatgtaagaaaatatgtgtgtgtgcagattgtgctgggacaaagctgactgactggcagatggggctacatctggagctggcaccagaaagtggccaaggcttgggttgactgggagataactgggatgagtttggagccagagccaccagccactgaagagagttgtatatgggttgggaggagagaaggtaggggtgtttgccggcaagatttgrgtcttggtctccagaacttcatttggcatgagactcaagtcagattagcagaaatctgtgggttgtggagagtttttctcagtaaaagccatggggagccataaaagcttccctccaaccactgtcaggaattatctagggcactttgcccttgggggagtcatcctgcccgacattcaggaatctcaatcagaatcacaataaaaagggtggtggggacccagctgtgctggtggacacctggttctggggataccctggtttaatcattgggaaatggtgccatggcttcacagcatg

SEQ ID NO: 80134 - DNA, 600 bp, Chicken  19866894372056_1
tagtggtaggattttgattgaaatgtgacctacactattagccacagagggatgagctcatttctttcttggaaaaatatgacttaaaatgtttcttctaaaacagtgaaggacttggctttgaaactaatgctgtattattaccttgaaacagaagacttcagggctttgactgaatgcaggtgcataaatatcttaagagaataacatcacaaagaagtacagtgaaacttattaaccaaaaacctatcgatgctaacttgcttcaagctaactgaagtaaatgtcactgaggggggwggtgtagtggaagtcttgctttctcagaccccaaaagcatctaggagatcagagaggggtttggacaggaaaaaggctccactctttctgcagatctgagaacaaccatactaaatcacagtcaagtctacccagagaagagtaggaacttagataaagtatatagtgagatttctcttctgctctccgtttcctaaagaatgtggctgagagatttcacagagcaaagatgagatctttgaattcaaattaggatatggtatttccttcatgtagttagcttatctcctttttacccta

SEQ ID NO: 80135 - DNA, 600 bp, Chicken  19866894372071_1
aatcttgacttgcactcagtaacctcttgtagtttcctgtcaaaaagttgcttattatcgttgatcttttgtcagttgattaagacaagcatcaaggctgtaaacagaagcaaaacatatattctgttgaactagattacttttaaattggatgtatcttgagatcaagaaatcatctttcaagaaaaagatactttttcctagagaggtggcaaggttttagttaaaacaccaacacagtttctctgcactttccttgtgctaaaaagtatttttgcaaagtgaacctggtctacctastgagaacacatttagcaaatctactttaatcacttttaagtcaactctgtttcttcttcaaagcaaacaccatcctgattatggaaactgtcatttatttggttagttaggtagtttctgcctctctgagaaatcagagctgaaaacaaaaagcttctcactgttggtgtgcttgctttggaaagtggtaggattagaaaaaataaaattaaaaaaaatggaactacaaatgtatcataaaaaaaatatatgaattaaataaacgaaatcaaacagcattaggaaggcatttttcaagct

SEQ ID NO: 80136 - DNA, 588 bp, Chicken  19866894372071_2
atcattttttaaccaggaaactttctattttaaaattaaaatttcattatcattattccatcaggtaaagaatagaaacataattatataaatgtttgggcttcagccagagtatttttacattgtggtacttttgataatgtttttaacagttgcttgtagaactctggacaagtcagtgaataaaaagtaaatcagagagtggaaaatttaaattcatttcatctcaggaaacctacgaatcaaaacagacttttttagatagaggaagcagattaaataacctcagattttttgtakaacatcagaatgtcacactcaagaaaacaatgcccagaaaattactctcattcatctccagaaacatttatgtgcaaggcacatattaaaaaatatatatatacagggagaccattcctatagatgaaaagctagccgctgcagtgggatctggcacagacagaagttgtgagagatactgatgaggcaaatcctagcatcactaatcaatactttagtttcccaaaataacatcatttttattggggtattattgaatagtcagctctgtttaacaggtcaagttag

SEQ ID NO: 80137 - DNA, 599 bp, Chicken  19866894372075_1
  misc_feature (1)..(182): n is any nucleotide
nnnnnnnnnnnnnnnnnnnnnnnnnnnnnnnnnnnnnnnnnnnnnnnnnnnnnnnnnnnnnnnnnnnnnnnnnnnnnnnnnnnnnnnnnnnnnnnnnnnnnnnnnnnnnnnnnnnnnnnnnnnnnnnnnnnnnnnnnnnnnnnnnnnnnnnnnnnnnnnnnnnnnnnnnnnnnnnnnnnnnntttaattggaaattaacatttttattaattgatagtgactgcttcatttcttttgctcggcctgtgtaaagtagtaccaaatttccaatgtccactggaaatctgctggagcaattayttgaacttcttgagtcttccaaatagggcacaactaaaaaaatgtcactgttattactgccaatacttgggggtaaacccttcaaagctttttgtttttatgtgtcagaaatttaccacctcctctttcttatttgtctcagtatgtggctttgtgctttttgctacccagtacccatgattgaactcaaaaggggatactgctgtaggagatagatgtgcctagtttagcagtcgtcttgtcccaggaaatctttgcttatggaggggaaattcccctgttatcagctccattcagaa

SEQ ID NO: 80138 - DNA, 512 bp, Chicken  19866894372081_1
gctgtgctgttctcactgttttctgttttctcactgttttcactgggggaaaatccattatttctgattaagggcagtggtccatactatgtattagatacaaaacaaaaatagaaactatagcatttagctttttaacttgcaagtgaatctagaaaatagattttctaagtgaaatgaactgtgaagagttagcatattaaaagggtgatgtcatattttgtatgcagatctctcaaccagatctttatttaattacttagaaaaaaatgttttaaatacttgaattgaaatgtctaygaatattttggttatctactaaagctggagtttaaaatcctatattgaaaatgataactttgtgacttgtcaggaaaatgcttcattttaattagcacctttacagaagttaattccgtaacacagtaaagcagatctgtcctttataaggctaaaaataaatgtagttacaaaaattgatcctatattacctgttattctgtggggtgcta

SEQ ID NO: 80139 - DNA, 600 bp, Chicken  19866894372082_1
ttgatctacttttatcatttctttacaaagtgagaattttcccattattctctctggaaaatagatttacaagaataagtttcatggacccagcaagattccgaagtgtccagcactagcaataaatctcaccgaagcatagactcaccccatggaatatctgattaaacactacagtgttcattcttcacagcagtggctgcctgtcacctccttttttctgaatacctctgtagatagggatgagttgtgccagatgcatgaagatagaaaacagccagctgaatgacacaagacacrtttggatgtcaactatcagcaccacaagaaacttttaggagtctgttacatctttgatgtaacccagagttttattcttcacaagagtagccacaaaatagtcagtgataatatatctctaagctatgatgccaaaataggacaccgtggtaatcttagctgacatgcattcatagatggagtgcaagaacttctacattttaaattggagtttaggaaatggcaagtccatatagtccagttaaagccgctaagttgatagaaactcagtgagcaacagctgtcatattagcagtgatg

SEQ ID NO: 80140 - DNA, 600 bp, Chicken  19866894372091_1
aggaggcgcagctcggcctttccccacgcaagccgccccacggggcagtgatttgggcaggtatcacggaggcactgaggggctgggcaccctgctttccccttggcaggagcctcatcacgtcctcaacacgcccaggctgtgggagaggaatccgggcccgacctgctccctgcacagcctcccaggctgccagatgcaatttatcaggcagacatctgtctgcagcgctcagctgggctgtgcagctccgtgcagctccatgcaggctccatgcagccagcacagcactgcaggtgyggcttttcccactcacagctgtgctgcttcggtgggaagcttccattgcgtgatgtgaggctcccccaggggctcctctgggggatgaggtggtaaataggtggcagagaggtggcaggrgcctctgtgagtcccagtagagtagggtcatcygctgtgtgtgagggtgctgacaccaagcagtggtgctgctgcatggagcaggtgatttttagggacacgcaaatgatctgagggatggaacccctctcctacgggacaggctgagagctggggctgtgcagcacagagaggagaagg

SEQ ID NO: 80141 - DNA, 600 bp, Chicken  19866894372091_2
cgtcctcaacacgcccaggctgtgggagaggaatccgggcccgacctgctccctgcacagcctcccaggctgccagatgcaatttatcaggcagacatctgtctgcagcgctcagctgggctgtgcagctccgtgcagctccatgcaggctccatgcagccagcacagcactgcaggtgyggcttttcccactcacagctgtgctgcttcggtgggaagcttccattgcgtgatgtgaggctcccccaggggctcctctgggggatgaggtggtaaataggtggcagagaggtggcaggrgcctctgtgagtcccagtagagtagggtcatcygctgtgtgtgagggtgctgacaccaagcagtggtgctgctgcatggagcaggtgatttttagggacacgcaaatgatctgagggatggaacccctctcctacgggacaggctgagagctggggctgtgcagcacagagaggagaaggctgcagggagagctgagagaggccctttggtatctaaaggtgggggggggggctctaggaaagagggggacagagtctttagcagggattgctgtgacaggacaaggggaaatggtttca

SEQ ID NO: 80142 - DNA, 600 bp, Chicken  19866894372091_3
tccgggcccgacctgctccctgcacagcctcccaggctgccagatgcaatttatcaggcagacatctgtctgcagcgctcagctgggctgtgcagctccgtgcagctccatgcaggctccatgcagccagcacagcactgcaggtgyggcttttcccactcacagctgtgctgcttcggtgggaagcttccattgcgtgatgtgaggctcccccaggggctcctctgggggatgaggtggtaaataggtggcagagaggtggcaggrgcctctgtgagtcccagtagagtagggtcatcygctgtgtgtgagggtgctgacaccaagcagtggtgctgctgcatggagcaggtgatttttagggacacgcaaatgatctgagggatggaacccctctcctacgggacaggctgagagctggggctgtgcagcacagagaggagaaggctgcagggagagctgagagaggccctttggtatctaaaggtgggggggggggctctaggaaagagggggacagagtctttagcagggattgctgtgacaggacaaggggaaatggtttcaaactaaaagaggggagtttagattagaagttca

SEQ ID NO: 80143 - DNA, 600 bp, Chicken  19866894372092_1
ctacggtcctaaaatcccatggtagttggctcggatcgagtggccatcaggcattgcaaagcaaaagttaggagcgcagtgattaaagggaacagctggttggaggggaggcagccagccagccctggctccggcagatgcagcgaatgcagagcgcttcattcccggcggcgttgcccctcgtgctgtgccggctgggagcaggcagcatcccacggagagctgtcagcccacagcgcgagcccttctggggcttccatggggatcccaggcagggggagaattaaaaaacaaaaaacrtggggaaagggggagaagaggaaaggcagcagctggtcctgcagaggtacgcacagagctgcacgcagagccagctgcagaagttggctggtggctgagcctccaagttgcagcagcagaggaggctgcggctgcagcgctgcatgacacacttccctctcccccaccccctcttggcaagtgcttgcagagcctccagcacctttcaaggcaatgtcaagctgctgtcaaagcattacgctgcctcccgaacacatgccgggtgctcgtaagggagcatgaagctgcagtcttatggcc

SEQ ID NO: 80144 - DNA, 600 bp, Chicken  19866894372093_1
tgcttaacttttaatgattacttcttccaatttagcattcaactattgtattcttcacaattctactgaaacactaaccgttagccataggattctgcttaatatactctcttcgtatactgatgtttttaagcaagcactgtctggcatgtgctcttctctctttcacaggatctttggcacacaaagcaaagattgccatatattccaaagggagcagtaatttcacaagtgctttatgcagtttctgggcaaatatctgcctcacttggtagcactcatcctataacaaaataaaaygtgaaaatgcaaccataataatcttgtttaaaacaaaacaaaaatgaaaaacatccaactggaatgatggggagacatgttttaaaaatatcaacaagtgtcatacaataaatatttgaagcttcaagaactcttgcaatgagcaatattaaataatcaattcagcagcaacaaaagctcggatgtaaggacttgaaactctgagaatcacttcaatataaaagtagttacttacattaatgacgagcgcacagagttggaactgttctggggtaattatttcatggtaacatggttcct

SEQ ID NO: 80145 - DNA, 600 bp, Chicken  19866894372107_1
gagaagctggagctctgagttcttagtctgatttctgaggtactgctctccttgagatgcttcctatctgaggacaaccttatctctattttgtggggagaagaaaaacccagaaagcaccaatgggattacctttctgaaaaaggcagatgtaggctaaaattacctaagtataaatggggacatctgcctacaccaacagccctgtgtgaccacctggactcagacttgcatcagtgctgtttgaacatatgtttatttcaactacaagaagagaactcagtgcagggtcatgttgtrgaggccttaggtttgcttaatggagcaggagcagtctttttcccagaaagtcattatctcgatgctcagagagaacagctggagaggtcagtgatctaagtagccaatgtgaaaatcactcagctctgtaggaaacataaggtcaccttcgagatgggtcagttccaagcctttcttcttccaagaccggtatgctctgccctctgcagcttttacatggggtcttcagcaggcagaggctcttttggtgcgatgtgtcctctagatccccaagagcctgtttctttataaatatcatgc

SEQ ID NO: 80146 - DNA, 600 bp, Chicken  19866894372107_2
tctgtaggaaacataaggtcaccttcgagatgggtcagttccaagcctttcttcttccaagaccggtatgctctgccctctgcagcttttacatggggtcttcagcaggcagaggctcttttggtgcgatgtgtcctctagatccccaagagcctgtttctttataaatatcatgctgttttctttagatttttcttttgaagtcttggctactgctgctctccttcaccttgaaggtttgaatgtctggctgtgactgtgctgtttgtgcaatgggaatgccattggatcctctataawgttctccttctgcagagcacaggagcccatggttttggctgggttggatgaactgggctgatttccttgctctttctctgtcaagaaagaaaatgattcttaatggactctgatccaagagttagacgtgacgatccagcactggcacgcttgccaggtctgatagaactgtgatctgatgtgtcaaatgcattttaaggtctcggctatgtgacagcttgctaatgactctgagctccaggaagctttgactgatccctctgggagctggcagaaaatacgtaggaaaatggggttttt

SEQ ID NO: 80147 - DNA, 599 bp, Chicken  19866894372109_1
  misc_feature (1)..(191): n is any nucleotide
nnnnnnnnnnnnnnnnnnnnnnnnnnnnnnnnnnnnnnnnnnnnnnnnnnnnnnnnnnnnnnnnnnnnnnnnnnnnnnnnnnnnnnnnnnnnnnnnnnnnnnnnnnnnnnnnnnnnnnnnnnnnnnnnnnnnnnnnnnnnnnnnnnnnnnnnnnnnnnnnnnnnnnnnnnnnnnnnnnnnnnnnnnnnnnnttttttggtaggtctcttggtattggaaggaaggaatgccattcagagggaccttgatagacttgaaaggtgggcccgggtgaacctaatgaggttcaacacagcaaastgcaagatttagcacttgggccggaggaaccccaggcatctatatagactggaaggagcagtccttgagagcagctctgcagagaaggacctgggggtcctgatggatgacaaacttaacatgagctcttgcatgtgctaatagaaatagtgtacatgtaacacaatctcaagataataaaaatgtaagagaaatgtaagtgtattaatgagtgcaagagaaatctgtgtcaatgattactaaactttgaggtctggatacttctgaacctcaagacatcaatttttgtagctcatggg

SEQ ID NO: 80148 - DNA, 599 bp, Chicken  19866894372110_1
  misc_feature (1)..(49): n is any nucleotide
nnnnnnnnnnnnnnnnnnnnnnnnnnnnnnnnnnnnnnnnnnnnnnnnncccccccttgtcctatcactaatcttctacgtacagagatagaagttaatttacctttcctgacttgactatccttcttttattattattatatattttaaaggaaattaaactattccttatgtatgctttaaaatctaaaccctctgttcgtggctatcgaaatgtcctggactggagatgcacagcaagcttcttaccaattttggtgctacttgtgaatgattctgctgctgaatcagaaagcgtgygtacgtacctgtgttggcttgtctcaggaaaaaagtgaaaggtctgtctgctttgaaaataggtgttcgggatcttttcagtagtaccattgctgtaatgcaatttagtaggcattggtaaaatgcatcaattttcattctatcttctgtgctgtgccctcaaaactcacagtaccaaaccccagagcctgagctgctactttgagaataaaccagtgattttatcctgtagacaatgaacaagctgtgctgtgggactgtaagcagatggaacacgtgtgcttattgctgaggtgagt

SEQ ID NO: 80149 - DNA, 600 bp, Chicken  19866894372121_1
tcacaaaacccacagaaatacttctccccctgatctcctcagatatgtgctgaacatttgacagcccccaggaccaaccccacgtcccctgcaggtgggtcatttctcagggaatgatctgcatcaaacttcctgtgtccatttcagggcagggcaacttccccacacttggctcaaagcccagaacgagaggtgacttcattgggttcagcccacagggtggagaatcccagggcccagacaaagcccaggggctcctgcagagggaggcaaagctgtgaggacactctggtgtgcacrtgtgaagcacagtagcatcacaactgatgggttgaagtggggagcagagagatttggtttaacaagcagaagaaacctcactttggatcccactggaaattttccttcctccttttcatctagggggaaggaaaagcatattcatttcacctctatttccttgctttcaatgtaaaaacctgtgtaagttttaccagggtctgaatgaggacaaaatatggtgctagtccagtattcattcctctacagaacatgcaaaacataaatcagtattttacctttcaatctgcatgcagtaac

SEQ ID NO: 80150 - DNA, 599 bp, Chicken  19866894372129_1
  misc_feature (1)..(48): n is any nucleotide
nnnnnnnnnnnnnnnnnnnnnnnnnnnnnnnnnnnnnnnnnnnnnnnntgttttttactttcctcagtgactgtgggaatgcctttgcacccacactaccctcttccccagaagacccactgctggggcatcagggccccttcagagttttcttttcaattgactgccctttaaatgagtctgagctgaggcttggtggccgcttcacaatggcgttgtctttctgtgccttatcagatggcaatgtgaactcagtgatgccacgctgctgcacgaggtggtgaaccagccaggggagcrgagcagggcaggggattcgttttgcctgaaggacctgatgcagctccacatcttgaggactggggctgtgtgggctgggcagcagcaagaggagagcttgccatagcctttgtgtaaatgaggaggaggggatctgaataagaagctctttgtgtatgcttatctgtgtgctgtcttgtttagcttgaggttttcccacatctgctcccatgtacgaaacatcaaactgacacgcgtttctccactgaaatgtttggtgtttaaaaagttattttatgttgtctttgccttcccagtaa

SEQ ID NO: 80151 - DNA, 600 bp, Chicken  19866894372129_2
tggggctgtgtgggctgggcagcagcaagaggagagcttgccatagcctttgtgtaaatgaggaggaggggatctgaataagaagctctttgtgtatgcttatctgtgtgctgtcttgtttagcttgaggttttcccacatctgctcccatgtacgaaacatcaaactgacacgcgtttctccactgaaatgtttggtgtttaaaaagttattttatgttgtctttgccttcccagtaagcctgtagccctttcatggtgttttgtacttctgctgtaaagtatgggtgattcatctgcrtttctaaacagttcagcaaggcaaaattaattcctcgggtggtgttggagactctgtacccagctgggcacagctcagcttcaagtctgtaaatagaagttctaatttctgtcgtggtgtctggtgggacaggacrtacgatagtctgaagtagcatgggtctcatacgtggccttttcaagaagcatttccttgtgtgcttgttttagctaactcgcagttagcgttgtggctttctgcagcagtgctgctctctctgtggcactacaatcacagttggtaaacatctcrtccataaaa

SEQ ID NO: 80152 - DNA, 600 bp, Chicken  19866894372129_3
cacatctgctcccatgtacgaaacatcaaactgacacgcgtttctccactgaaatgtttggtgtttaaaaagttattttatgttgtctttgccttcccagtaagcctgtagccctttcatggtgttttgtacttctgctgtaaagtatgggtgattcatctgcrtttctaaacagttcagcaaggcaaaattaattcctcgggtggtgttggagactctgtacccagctgggcacagctcagcttcaagtctgtaaatagaagttctaatttctgtcgtggtgtctggtgggacaggacrtacgatagtctgaagtagcatgggtctcatacgtggccttttcaagaagcatttccttgtgtgcttgttttagctaactcgcagttagcgttgtggctttctgcagcagtgctgctctctctgtggcactacaatcacagttggtaaacatctcrtccataaaatctgttccttgtgctttcttctgcccgtctcagrgctgcagtgaggctgcgtgagatctgggcctgaagaggcgttgtggctttcaccaagcamggctgttatttctacactgggatgtagaacagtaggcaatgc

SEQ ID NO: 80153 - DNA, 600 bp, Chicken  19866894372129_4
tcatctgcrtttctaaacagttcagcaaggcaaaattaattcctcgggtggtgttggagactctgtacccagctgggcacagctcagcttcaagtctgtaaatagaagttctaatttctgtcgtggtgtctggtgggacaggacrtacgatagtctgaagtagcatgggtctcatacgtggccttttcaagaagcatttccttgtgtgcttgttttagctaactcgcagttagcgttgtggctttctgcagcagtgctgctctctctgtggcactacaatcacagttggtaaacatctcrtccataaaatctgttccttgtgctttcttctgcccgtctcagrgctgcagtgaggctgcgtgagatctgggcctgaagaggcgttgtggctttcaccaagcamggctgttatttctacactgggatgtagaacagtaggcaatgcagtgggttacagctgtgcatcactgccatgagttaggctcagatgtgctatggtggaacacccacagayttctccctgcctggtaagggctgtcccactgcttggcacggggctgacgtgggcccaggaacctgaaggccccacagagttacctc

SEQ ID NO: 80154 - DNA, 600 bp, Chicken  19866894372129_5
tcgggtggtgttggagactctgtacccagctgggcacagctcagcttcaagtctgtaaatagaagttctaatttctgtcgtggtgtctggtgggacaggacrtacgatagtctgaagtagcatgggtctcatacgtggccttttcaagaagcatttccttgtgtgcttgttttagctaactcgcagttagcgttgtggctttctgcagcagtgctgctctctctgtggcactacaatcacagttggtaaacatctcrtccataaaatctgttccttgtgctttcttctgcccgtctcagrgctgcagtgaggctgcgtgagatctgggcctgaagaggcgttgtggctttcaccaagcamggctgttatttctacactgggatgtagaacagtaggcaatgcagtgggttacagctgtgcatcactgccatgagttaggctcagatgtgctatggtggaacacccacagayttctccctgcctggtaagggctgtcccactgcttggcacggggctgacgtgggcccaggaacctgaaggccccacagagttacctctgggacactgcttgtcccaaaagctgctgcaggcttatgttgg

SEQ ID NO: 80155 - DNA, 600 bp, Chicken  19866894372129_6
agaagttctaatttctgtcgtggtgtctggtgggacaggacrtacgatagtctgaagtagcatgggtctcatacgtggccttttcaagaagcatttccttgtgtgcttgttttagctaactcgcagttagcgttgtggctttctgcagcagtgctgctctctctgtggcactacaatcacagttggtaaacatctcrtccataaaatctgttccttgtgctttcttctgcccgtctcagrgctgcagtgaggctgcgtgagatctgggcctgaagaggcgttgtggctttcaccaagcamggctgttatttctacactgggatgtagaacagtaggcaatgcagtgggttacagctgtgcatcactgccatgagttaggctcagatgtgctatggtggaacacccacagayttctccctgcctggtaagggctgtcccactgcttggcacggggctgacgtgggcccaggaacctgaaggccccacagagttacctctgggacactgcttgtcccaaaagctgctgcaggcttatgttggtttgttcgctggtggtatatttaggtatggaagagtaattatatagctttgaataagtct

SEQ ID NO: 80156 - DNA, 600 bp, Chicken  19866894372129_7
ttagctaactcgcagttagcgttgtggctttctgcagcagtgctgctctctctgtggcactacaatcacagttggtaaacatctcrtccataaaatctgttccttgtgctttcttctgcccgtctcagrgctgcagtgaggctgcgtgagatctgggcctgaagaggcgttgtggctttcaccaagcamggctgttatttctacactgggatgtagaacagtaggcaatgcagtgggttacagctgtgcatcactgccatgagttaggctcagatgtgctatggtggaacacccacagayttctccctgcctggtaagggctgtcccactgcttggcacggggctgacgtgggcccaggaacctgaaggccccacagagttacctctgggacactgcttgtcccaaaagctgctgcaggcttatgttggtttgttcgctggtggtatatttaggtatggaagagtaattatatagctttgaataagtcttaaggcagaaaagggcraagctaagcctggaggggatttggcctcctgagggcattgctgcaaagtagaacagrcagtttttgttgggtttttttattgtttaaataaaac

SEQ ID NO: 80157 - DNA, 600 bp, Chicken  19866894372129_8
tgggatgtagaacagtaggcaatgcagtgggttacagctgtgcatcactgccatgagttaggctcagatgtgctatggtggaacacccacagayttctccctgcctggtaagggctgtcccactgcttggcacggggctgacgtgggcccaggaacctgaaggccccacagagttacctctgggacactgcttgtcccaaaagctgctgcaggcttatgttggtttgttcgctggtggtatatttaggtatggaagagtaattatatagctttgaataagtcttaaggcagaaaagggcraagctaagcctggaggggatttggcctcctgagggcattgctgcaaagtagaacagrcagtttttgttgggtttttttattgtttaaataaaacttctgaaggcccactgaatggacacccagaacccagcactggtttggtctatttctgatgcttcaaatacagagtacacttttaaattgagcccttttggttttcagctgttagtttcagggtttgcttttaggtgctgtgtgattatgctggaaggaaacacctctgcgggtgctttgggcgttgctttggtttctgtctgatgg

SEQ ID NO: 80158 - DNA, 600 bp, Chicken  19866894372129_9
ttaggctcagatgtgctatggtggaacacccacagayttctccctgcctggtaagggctgtcccactgcttggcacggggctgacgtgggcccaggaacctgaaggccccacagagttacctctgggacactgcttgtcccaaaagctgctgcaggcttatgttggtttgttcgctggtggtatatttaggtatggaagagtaattatatagctttgaataagtcttaaggcagaaaagggcraagctaagcctggaggggatttggcctcctgagggcattgctgcaaagtagaacagrcagtttttgttgggtttttttattgtttaaataaaacttctgaaggcccactgaatggacacccagaacccagcactggtttggtctatttctgatgcttcaaatacagagtacacttttaaattgagcccttttggttttcagctgttagtttcagggtttgcttttaggtgctgtgtgattatgctggaaggaaacacctctgcgggtgctttgggcgttgctttggtttctgtctgatggttcctaattgtacatcagagaatattctgaagctaagtgctcctcatctgagtccac

SEQ ID NO: 80159 - DNA, 600 bp, Chicken  19866894372135_1
cctcctgaagcagaggggtctcctgctggctgcttctgtggggagcacgaccgggccttccgtgataatttctgatgttcattatttatagagaagccaaattgaattattaatacagaaaatttagataacattagcaattctcggtttataacagtttcccattaataaggaaaattggaaatttatcactgcatctgttcattaaaactcactattttttttttccttttggtgtcttaaatgaaagcatagaaataaacgaagaggaaaagccatttactcctcacttctctggaygaagccagcccataatttttaataaagtctttgctgttatacgtggagaggaaaccagcccatcatgaaagcagcttttcaaccatgcctattgcattgctcagycagaggacagatactcagaaacctatcccgtttcttccctttgtgggaatgcttcagctgtcagatttgtaatttccctccattccagcagctctccttgcttttagcacgcgttcttcccagctccatgtgacttaatacatcccctgcttgtttcagagatggcggattcctatgcctgtaaaggtggaagga

SEQ ID NO: 80160 - DNA, 600 bp, Chicken  19866894372135_2
attattaatacagaaaatttagataacattagcaattctcggtttataacagtttcccattaataaggaaaattggaaatttatcactgcatctgttcattaaaactcactattttttttttccttttggtgtcttaaatgaaagcatagaaataaacgaagaggaaaagccatttactcctcacttctctggaygaagccagcccataatttttaataaagtctttgctgttatacgtggagaggaaaccagcccatcatgaaagcagcttttcaaccatgcctattgcattgctcagycagaggacagatactcagaaacctatcccgtttcttccctttgtgggaatgcttcagctgtcagatttgtaatttccctccattccagcagctctccttgcttttagcacgcgttcttcccagctccatgtgacttaatacatcccctgcttgtttcagagatggcggattcctatgcctgtaaaggtggaaggaagactgcaggttccaccaagcccagcaaagacagcagggcagaggcgaggctgaacccgccagcagagctccccaggctgggtaaggaactgcatttctgtctct

SEQ ID NO: 80161 - DNA, 600 bp, Chicken  19866894372136_1
agtacttcaattctgcaggaaaccctaatgtcactccctgactcttttgtacttcagtataagatacagatgcgagcctgacgataaattaagggcttcacagattgttttctttccatttacaagagagatggcagtgcaggagcacgtgatgtcaactgggcaatcgtgagaccacttcagctcctccaggcgctctgaagaaggtgaactgagtgccggtgtttgaccagggactgtgtaagtgaggctgcatctcaagcaatgtcagctctaggacacggtaagcattgctcaagygcctgtcactggaacaccccagccaagatagcttttctactctctactgttctgataaaacaaatatttccattgactgagtgctgtttccccactgcagccctttctccctcctcttgctattgtctgggcatctcccatgccccccagaacaatagcctaagcccatttcagtgtggcaggaaggcagcagcacttcatagcactttatgygagcataaggaatgcaggctagctggtgaggggcagccatgttacctggttcttcctcttccagcttccacaaatggtgtccttttt

SEQ ID NO: 80162 - DNA, 600 bp, Chicken  19866894372136_2
gagtgccggtgtttgaccagggactgtgtaagtgaggctgcatctcaagcaatgtcagctctaggacacggtaagcattgctcaagygcctgtcactggaacaccccagccaagatagcttttctactctctactgttctgataaaacaaatatttccattgactgagtgctgtttccccactgcagccctttctccctcctcttgctattgtctgggcatctcccatgccccccagaacaatagcctaagcccatttcagtgtggcaggaaggcagcagcacttcatagcactttatgygagcataaggaatgcaggctagctggtgaggggcagccatgttacctggttcttcctcttccagcttccacaaatggtgtcctttttcctcagyagctaaataaattcaacacaattccaagatctttacccatcacataaaagggacgatgtttacagggggtgataaacaaccaacccgatgcctccatcaggtgggactgatcagaaggataagaaaccacagaaccacagacttgttgagattgtcaaggacctcyggaagcactctgaaatgcctaaatattacaactacagctg

SEQ ID NO: 80163 - DNA, 600 bp, Chicken  19866894372136_3
actggaacaccccagccaagatagcttttctactctctactgttctgataaaacaaatatttccattgactgagtgctgtttccccactgcagccctttctccctcctcttgctattgtctgggcatctcccatgccccccagaacaatagcctaagcccatttcagtgtggcaggaaggcagcagcacttcatagcactttatgygagcataaggaatgcaggctagctggtgaggggcagccatgttacctggttcttcctcttccagcttccacaaatggtgtcctttttcctcagyagctaaataaattcaacacaattccaagatctttacccatcacataaaagggacgatgtttacagggggtgataaacaaccaacccgatgcctccatcaggtgggactgatcagaaggataagaaaccacagaaccacagacttgttgagattgtcaaggacctcyggaagcactctgaaatgcctaaatattacaactacagctgaacacagtacaaatacccagctaaagcaggcttgagaccactgcttagaaatacatgacagcacaaacagtactgcttgctgtttgttttggta

SEQ ID NO: 80164 - DNA, 600 bp, Chicken  19866894372136_4
gtgtggcaggaaggcagcagcacttcatagcactttatgygagcataaggaatgcaggctagctggtgaggggcagccatgttacctggttcttcctcttccagcttccacaaatggtgtcctttttcctcagyagctaaataaattcaacacaattccaagatctttacccatcacataaaagggacgatgtttacagggggtgataaacaaccaacccgatgcctccatcaggtgggactgatcagaaggataagaaaccacagaaccacagacttgttgagattgtcaaggacctcyggaagcactctgaaatgcctaaatattacaactacagctgaacacagtacaaatacccagctaaagcaggcttgagaccactgcttagaaatacatgacagcacaaacagtactgcttgctgtttgttttggtaggaggactggtgtcaatgtggctgttgcacagggagtgagaaatcatacaggagcaggtgcagacacactcctacagccccaaaatttgggctgagttaggaatatggtttaagagccattgtggtttaggagctggtagctcagggctcctccggcagtacacta

SEQ ID NO: 80165 - DNA, 599 bp, Chicken  19866894372151_1
  misc_feature (1)..(115): n is any nucleotide
nnnnnnnnnnnnnnnnnnnnnnnnnnnnnnnnnnnnnnnnnnnnnnnnnnnnnnnnnnnnnnnnnnnnnnnnnnnnnnnnnnnnnnnnnnnnnnnnnnnnnnnnnnnnnnnnnnntttcttccgggtgggaggcaaggagctggggagtgctgccctgcctgcagcccacatctccacaggggcagaggcggggagctggggaggcctggcagctggtgatggtggagtggagacgctggcattgtggcattgggaatgtggcaggatcagggctccaaggcaatggggcttggcctggrggctgggttttcagttggcacattctgaaaagcctcaccttggtgcagggatgggggctagggctcacatggagtgtccctgtatcacatccctgcccgttctcaggtacagggtgctggaaatcagcacctcctcttgcagcacttctggtccacagtcagtgtccttagcttcatgccagctgtgcccctcatccaccctccctgtgtgcttcgccctctaaagatgccctgagggcaggcacagggtaaagccccccaaacccattgtggaaaaggctctgttcagtgggtaccag

SEQ ID NO: 80166 - DNA, 599 bp, Chicken  19866894372152_1
  misc_feature (1)..(81): n is any nucleotide
nnnnnnnnnnnnnnnnnnnnnnnnnnnnnnnnnnnnnnnnnnnnnnnnnnnnnnnnnnnnnnnnnnnnnnnnnnnnnnnnnactagttttgttagtttgtcgaatgtgttaaaatggagtgaatgtatatagggagcccaagactcatcatttgatagcaagtgaatttcttgatagtctatgttcactgtgatggtaagcagttttacaaatgcgttttagtacttctgatgacctgtactctgcattaacataaataatcagaaaccttttatttacatttaaacagagtgtacttgygatgtagtgtgtgatatcttcgtcctggttgagtcccagtagcaatgtgacgtaccaaagagcctaaaaaagcacctttctaccgagttccattttgtattatgcaacatagacacattttagttgttctagcttgttaaatattcaatagccttttgcattattttgaaagctggaattaattaaaataattaagctgctttttggttttggttccaatttcctcttccctctgtatgttacaaaggtaatctatcaacaaacggagcatgctaatgaacagcaataaataytatgca

SEQ ID NO: 80167 - DNA, 600 bp, Chicken  19866894372152_2
tacttgygatgtagtgtgtgatatcttcgtcctggttgagtcccagtagcaatgtgacgtaccaaagagcctaaaaaagcacctttctaccgagttccattttgtattatgcaacatagacacattttagttgttctagcttgttaaatattcaatagccttttgcattattttgaaagctggaattaattaaaataattaagctgctttttggttttggttccaatttcctcttccctctgtatgttacaaaggtaatctatcaacaaacggagcatgctaatgaacagcaataaataytatgcaactattcctacatccagagaagattttttttgtgtattttttataatgggtaatgaagagaagttatatgagkartattgattcaaattagttgtatgttttgatgtttttcagacactgtcacaaacttctgtatgttgttttcaaaattaattccaattgcattggttgcaatgaaaagtttctgcttatgacagaagagagaaatactaaggaattccatatttattgattcactttattcatcagtcctcagattttgaatcttatcaccagttccacaagtcttggatt

SEQ ID NO: 80168 - DNA, 600 bp, Chicken  19866894372152_3
cacctttctaccgagttccattttgtattatgcaacatagacacattttagttgttctagcttgttaaatattcaatagccttttgcattattttgaaagctggaattaattaaaataattaagctgctttttggttttggttccaatttcctcttccctctgtatgttacaaaggtaatctatcaacaaacggagcatgctaatgaacagcaataaataytatgcaactattcctacatccagagaagattttttttgtgtattttttataatgggtaatgaagagaagttatatgagkartattgattcaaattagttgtatgttttgatgtttttcagacactgtcacaaacttctgtatgttgttttcaaaattaattccaattgcattggttgcaatgaaaagtttctgcttatgacagaagagagaaatactaaggaattccatatttattgattcactttattcatcagtcctcagattttgaatcttatcaccagttccacaagtcttggattgaagtaaagttctttcagagtttgccaccattgtttatactgatgctgacacatggtatcaggagacacaaggctttgc

SEQ ID NO: 80169 - DNA, 600 bp, Chicken  19866894372152_4
cctttctaccgagttccattttgtattatgcaacatagacacattttagttgttctagcttgttaaatattcaatagccttttgcattattttgaaagctggaattaattaaaataattaagctgctttttggttttggttccaatttcctcttccctctgtatgttacaaaggtaatctatcaacaaacggagcatgctaatgaacagcaataaataytatgcaactattcctacatccagagaagattttttttgtgtattttttataatgggtaatgaagagaagttatatgagkartattgattcaaattagttgtatgttttgatgtttttcagacactgtcacaaacttctgtatgttgttttcaaaattaattccaattgcattggttgcaatgaaaagtttctgcttatgacagaagagagaaatactaaggaattccatatttattgattcactttattcatcagtcctcagattttgaatcttatcaccagttccacaagtcttggattgaagtaaagttctttcagagtttgccaccattgtttatactgatgctgacacatggtatcaggagacacaaggctttgctc

SEQ ID NO: 80170 - DNA, 600 bp, Chicken  19866894372163_1
gcgcggtgccttgatggagcccgtgaggtgtggggctctgcatcccattagcccccccggaggaagccgggtgggtttttattaaatcaagctcacagccgattcatacagaagggctttttgaactgggagctgaaccttatgtctggttccctgccaagcacgggactgtgcggggaggaaaggagatgtatttttggagctcatgtctgcaagcaggctgctcgctcccattaaagcggctgttggtggagaatcctctggtggcagaacagatgtgggggcccggcgctgtgacargatgtatttctggtgctcgcgtggacgagcattctcgtggaggacttttctcatgctgtaatgattttgttgttgtttaattttaaccaaagctggcaggccgccctgctgccttgtgataaacgtgtttgtttactcacctcgtggtaaccggagagccgggtgggctctgctccycgttgctgcttgcgtcgtaccgccgtgcccggggcactctgggacgcagtgcccagcactgacactgccagcacagggctgtgccttggctccggctgccacagagtgaacagaacagaccag

SEQ ID NO: 80171 - DNA, 600 bp, Chicken  19866894372163_2
gaggaaaggagatgtatttttggagctcatgtctgcaagcaggctgctcgctcccattaaagcggctgttggtggagaatcctctggtggcagaacagatgtgggggcccggcgctgtgacargatgtatttctggtgctcgcgtggacgagcattctcgtggaggacttttctcatgctgtaatgattttgttgttgtttaattttaaccaaagctggcaggccgccctgctgccttgtgataaacgtgtttgtttactcacctcgtggtaaccggagagccgggtgggctctgctccycgttgctgcttgcgtcgtaccgccgtgcccggggcactctgggacgcagtgcccagcactgacactgccagcacagggctgtgccttggctccggctgccacagagtgaacagaacagaccagggcttctctgtgccgggagctggagtttgttctgagctaatgttgctcttaacagggctatctttattgcccatactttgggttgtgcttaatgctatataaacacatggtgtgtgctacatggatactcctgcagttctaagctcccatttagtgaggcactggcacaggttgtcc

SEQ ID NO: 80172 - DNA, 600 bp, Chicken  19866894372164_1
cttttaaattttgaaagtcaatttacccaaaaaataccttatgttcacatcattgataagccaagcattcatcgcttttcttactcagagcagtttatgggtgagagttcaaagcagaaagcccaaagtaacatatcccgcgtagtgcagtgaattttatgtcttccttcctccatcacatgcctgtttattattctattgtatttccacacttgtcaatgggcagacagacacttattagaagtactgcttccagcctgactggctttggtactcgagtactttacatgaactttctgytcttgaaaacactaaacaaggaaggaaagaagcaagcctgggtgaactacttgtcacgatgaggccccaagagaaaatgctattttattgcctgtgttgaatcagtaaccttttagtaagtttcaaattctaagagctactctgagcattgctgacatcaccactttcatatgtacttacaccttcatggacaaagagagaaaccgccaggtatctttgcataaggaaaatataagtgatgttgctcttggttctgcctcgtttagcaagtcttcaagcaatgctagtaaacagtcttgt

SEQ ID NO: 80173 - DNA, 600 bp, Chicken  19866894372170_1
tttgctgtgaggacacagtgaagtcatttaagccagatgggcatactgggagaatcttatactgcttgtactgtgattttgcaagtatttaaggacagcaatggaagaaaagctacagaaagggcacagcccatcataataatgaagcactaagtacaggataaccactaactacatctcagaggctctcacagaacccaaatggcccctcagcatgcttactgtgggcagaaataagtaggagggtcagcatggtttggaccacggttagtatacagataataacacctgtgctgctgytgttctactacagtggagcatctcataaatgatccttactgtgtgtgggcttctttgagtgaatgagatgctcaktttttttttgtttcatggattctggaacataccttggccatattagaaagatctgtctttctcctgagtctttttataaacacagtaacttctgttaaagaagaagaggcaggtgtttcatatagttagtattttacatccttaaagacattaatgaagacagatctctttaaattgtaaagcagatccctgtgggagcaacaggcttactcagagcacagggat

SEQ ID NO: 80174 - DNA, 600 bp, Chicken  19866894372170_2
attttgcaagtatttaaggacagcaatggaagaaaagctacagaaagggcacagcccatcataataatgaagcactaagtacaggataaccactaactacatctcagaggctctcacagaacccaaatggcccctcagcatgcttactgtgggcagaaataagtaggagggtcagcatggtttggaccacggttagtatacagataataacacctgtgctgctgytgttctactacagtggagcatctcataaatgatccttactgtgtgtgggcttctttgagtgaatgagatgctcaktttttttttgtttcatggattctggaacataccttggccatattagaaagatctgtctttctcctgagtctttttataaacacagtaacttctgttaaagaagaagaggcaggtgtttcatatagttagtattttacatccttaaagacattaatgaagacagatctctttaaattgtaaagcagatccctgtgggagcaacaggcttactcagagcacagggatacagctgagctgctctctgtgctggggtccccgcaagtttaaagcttgcaagcagcccagattactgctcttcct

SEQ ID NO: 80175 - DNA, 599 bp, Chicken  19866894372180_1
  misc_feature (1)..(25): n is any nucleotide
nnnnnnnnnnnnnnnnnnnnnnnnntgagttttcagcagtttcagctacataaatctgcggcatgggatcttgagcagatacagctttcttcttagttcatgtcagaaattggaactaatggatagcaacaacagaaacaaatgtcagttccatgctttaaacagcagacaaaacactgtgtctcattaaatctccttttttctggttacttacggaataattttgcgagttctccaatctcttttccaggataaatgcagaacagacaaagagacaaacatctttttatgtcttctgcrttcatggcaaagaatgacataagccttacaaacatccaaggtgacctagattgccagctgagaaacatcgtgcttcaggaccagaacttcggccagcacatgggacaattctggccattcagaactgcaaacagccctgcaacgctgtcagagcctttgatacttcttgtaatgttataactggatgtgcacaacgaggcagtgtgtgccttagcagaacggtacggcaggaatccactgacttggaagattggattacaygcggaggggaaaaaacctgttcgggtaaacagtttcat

SEQ ID NO: 80176 - DNA, 502 bp, Chicken  19866894372180_2
aacagacaaagagacaaacatctttttatgtcttctgcrttcatggcaaagaatgacataagccttacaaacatccaaggtgacctagattgccagctgagaaacatcgtgcttcaggaccagaacttcggccagcacatgggacaattctggccattcagaactgcaaacagccctgcaacgctgtcagagcctttgatacttcttgtaatgttataactggatgtgcacaacgaggcagtgtgtgccttagcagaacggtacggcaggaatccactgacttggaagattggattacaygcggaggggaaaaaacctgttcgggtaaacagtttcatttgtatctcgcagcaaattggattccttcaaaatctcctcaagggagtgtggcatcacgaagcctttcatcaggggcccggcctgggctctgcttcaaacttcttcagaagaacagaacaaacattctccttcccctgcgccggatgttttccgaaggggaaca

SEQ ID NO: 80177 - DNA, 599 bp, Chicken  19866894372183_1
  misc_feature (1)..(79): n is any nucleotide
nnnnnnnnnnnnnnnnnnnnnnnnnnnnnnnnnnnnnnnnnnnnnnnnnnnnnnnnnnnnnnnnnnnnnnnnnnnnnnnccttggtgagagctaaactatgatttcagttaaattctaaaattaattcataagcaggaaaaatcaccggctgctttcttaattttaaaagccaactactctaaatcttttttttttaaatgatatacattctcttgatgtgtgaactgtgaacaaacagctaacattacaagatgaaatacacaattcctgaagctttttttctcatttatttctgcttyagttttctctacaagttccttttctgtctgttgttagttcccatctaaccttcagaacactatctgtacataattctatcytcatcattttagaccccgtctccttgccagtggacacttcaaggtgttaaaaatgttcacaaacattggaaaatagcttcttcattagctttaatcattagtatttattttcgctgttacgttggtacaaacatatttagttgatttttttcctttcctaagtaaacttgattctgggatttcaggaaaggtacaatagttcatttctatatccctgg

SEQ ID NO: 80178 - DNA, 600 bp, Chicken  19866894372183_2
ttggtgagagctaaactatgatttcagttaaattctaaaattaattcataagcaggaaaaatcaccggctgctttcttaattttaaaagccaactactctaaatcttttttttttaaatgatatacattctcttgatgtgtgaactgtgaacaaacagctaacattacaagatgaaatacacaattcctgaagctttttttctcatttatttctgcttyagttttctctacaagttccttttctgtctgttgttagttcccatctaaccttcagaacactatctgtacataattctatcytcatcattttagaccccgtctccttgccagtggacacttcaaggtgttaaaaatgttcacaaacattggaaaatagcttcttcattagctttaatcattagtatttattttcgctgttacgttggtacaaacatatttagttgatttttttcctttcctaagtaaacttgattctgggatttcaggaaaggtacaatagttcatttctatatccctgggcatagtgctgtgtttgaaatctcatattattttacatttaaatgcatatatatttactatatacctataatataaatgcat

SEQ ID NO: 80179 - DNA, 600 bp, Chicken  19866894372187_1
gtgaaagggatttagttgttaaaagcagggccctaccagattaaaaaaaattttaatataaaaaaataaatagaaaaccttaccctgagtgaataaagcatcaattttcctacttttaaaatgagatctaaaaaagagctcagtaatagttttggttgccatggcgtttaaaggtgcagctccacagacatttcaaataacaggcgatgcttttatctgcctgtgtggctgagttaattttcatctgctggaattgttcatttagtttgctttaattattctatattggcagtatcataraaggcccaattctgccatcttaatatggacagagctcttttttcctccagagaaaaaaaaagataagatgaaggctgaactggtcaggagatgcaaataggaatgcctgcagttctgggcttgcagaggcrtacataggaactctgctgatggcacaggggtctgctgaagtgtgacccagggcagaaccaagcagaaaaatgtgtggaaaattctcagtgcagccattgacactgtcccatgtatcttcttgagggactgttatagccagaatatttggtcttgtatcctcacaggcta

SEQ ID NO: 80180 - DNA, 600 bp, Chicken  19866894372187_2
aaaagagctcagtaatagttttggttgccatggcgtttaaaggtgcagctccacagacatttcaaataacaggcgatgcttttatctgcctgtgtggctgagttaattttcatctgctggaattgttcatttagtttgctttaattattctatattggcagtatcataraaggcccaattctgccatcttaatatggacagagctcttttttcctccagagaaaaaaaaagataagatgaaggctgaactggtcaggagatgcaaataggaatgcctgcagttctgggcttgcagaggcrtacataggaactctgctgatggcacaggggtctgctgaagtgtgacccagggcagaaccaagcagaaaaatgtgtggaaaattctcagtgcagccattgacactgtcccatgtatcttcttgagggactgttatagccagaatatttggtcttgtatcctcacaggctatgcccttctttcatttggaaaaataagaatcctagctagggaatggttacagaccaaatgaaaagattactgagtagatgagacctgcatttagattcccaaatccataccatacaccttagccctgactt

SEQ ID NO: 80181 - DNA, 600 bp, Chicken  19866894372198_1
agataataagaagcatacacttagcttttttttttttctattttttttacctccagagctaaatatacacattcaccattgaccaaagagaatgatagttgttggtggccaattaatcttcttgacaaattccaccactttgcatgttggttttaatggcagaacttcctcatctcttaagaaaaaaatcaccagagtctctcccagagtaattaaaattttcatattttaaaatgcagagactgaggcagcacttgagaacaaaactgccttactggctatgaattgaagttgccgcarctcacaaacacatgaagaggcctacatgccacatacgttcagcttaagtctttaaaatagagtgttgggaytgtgtgaactcttgccaygcaaagcataarttacaccctacagatgaccaatgtggggacaggaacagcaaggctgagcagcraaaacataaagtgcctgttggccttttgactgagtcatggaaagtaggaggcaaagtgtgtttggacttccaaatgcatgtcctactcatatcacggaaaacaccaaactcctgggaaaaggctgaaatctggaactattgagcac

SEQ ID NO: 80182 - DNA, 600 bp, Chicken  19866894372198_2
ttcaccattgaccaaagagaatgatagttgttggtggccaattaatcttcttgacaaattccaccactttgcatgttggttttaatggcagaacttcctcatctcttaagaaaaaaatcaccagagtctctcccagagtaattaaaattttcatattttaaaatgcagagactgaggcagcacttgagaacaaaactgccttactggctatgaattgaagttgccgcarctcacaaacacatgaagaggcctacatgccacatacgttcagcttaagtctttaaaatagagtgttgggaytgtgtgaactcttgccaygcaaagcataarttacaccctacagatgaccaatgtggggacaggaacagcaaggctgagcagcraaaacataaagtgcctgttggccttttgactgagtcatggaaagtaggaggcaaagtgtgtttggacttccaaatgcatgtcctactcatatcacggaaaacaccaaactcctgggaaaaggctgaaatctggaactattgagcacagaayatcaggaacatcactgatatcgaagagactactttgcatttaacagttttagagctgggaatattt

SEQ ID NO: 80183 - DNA, 600 bp, Chicken  19866894372198_3
gaatgatagttgttggtggccaattaatcttcttgacaaattccaccactttgcatgttggttttaatggcagaacttcctcatctcttaagaaaaaaatcaccagagtctctcccagagtaattaaaattttcatattttaaaatgcagagactgaggcagcacttgagaacaaaactgccttactggctatgaattgaagttgccgcarctcacaaacacatgaagaggcctacatgccacatacgttcagcttaagtctttaaaatagagtgttgggaytgtgtgaactcttgccaygcaaagcataarttacaccctacagatgaccaatgtggggacaggaacagcaaggctgagcagcraaaacataaagtgcctgttggccttttgactgagtcatggaaagtaggaggcaaagtgtgtttggacttccaaatgcatgtcctactcatatcacggaaaacaccaaactcctgggaaaaggctgaaatctggaactattgagcacagaayatcaggaacatcactgatatcgaagagactactttgcatttaacagttttagagctgggaatatttttctacttcctttgatgt

SEQ ID NO: 80184 - DNA, 600 bp, Chicken  19866894372198_4
ttggtggccaattaatcttcttgacaaattccaccactttgcatgttggttttaatggcagaacttcctcatctcttaagaaaaaaatcaccagagtctctcccagagtaattaaaattttcatattttaaaatgcagagactgaggcagcacttgagaacaaaactgccttactggctatgaattgaagttgccgcarctcacaaacacatgaagaggcctacatgccacatacgttcagcttaagtctttaaaatagagtgttgggaytgtgtgaactcttgccaygcaaagcataarttacaccctacagatgaccaatgtggggacaggaacagcaaggctgagcagcraaaacataaagtgcctgttggccttttgactgagtcatggaaagtaggaggcaaagtgtgtttggacttccaaatgcatgtcctactcatatcacggaaaacaccaaactcctgggaaaaggctgaaatctggaactattgagcacagaayatcaggaacatcactgatatcgaagagactactttgcatttaacagttttagagctgggaatatttttctacttcctttgatgttgcatgtggtgc

SEQ ID NO: 80185 - DNA, 600 bp, Chicken  19866894372198_5
aatggcagaacttcctcatctcttaagaaaaaaatcaccagagtctctcccagagtaattaaaattttcatattttaaaatgcagagactgaggcagcacttgagaacaaaactgccttactggctatgaattgaagttgccgcarctcacaaacacatgaagaggcctacatgccacatacgttcagcttaagtctttaaaatagagtgttgggaytgtgtgaactcttgccaygcaaagcataarttacaccctacagatgaccaatgtggggacaggaacagcaaggctgagcagcraaaacataaagtgcctgttggccttttgactgagtcatggaaagtaggaggcaaagtgtgtttggacttccaaatgcatgtcctactcatatcacggaaaacaccaaactcctgggaaaaggctgaaatctggaactattgagcacagaayatcaggaacatcactgatatcgaagagactactttgcatttaacagttttagagctgggaatatttttctacttcctttgatgttgcatgtggtgcttttatacagtcctctggcccatgctaacctgacagtgtgtgcttatgactat

SEQ ID NO: 80186 - DNA, 566 bp, Chicken  19866894372198_6
aaacacatgaagaggcctacatgccacatacgttcagcttaagtctttaaaatagagtgttgggaytgtgtgaactcttgccaygcaaagcataarttacaccctacagatgaccaatgtggggacaggaacagcaaggctgagcagcraaaacataaagtgcctgttggccttttgactgagtcatggaaagtaggaggcaaagtgtgtttggacttccaaatgcatgtcctactcatatcacggaaaacaccaaactcctgggaaaaggctgaaatctggaactattgagcacagaayatcaggaacatcactgatatcgaagagactactttgcatttaacagttttagagctgggaatatttttctacttcctttgatgttgcatgtggtgcttttatacagtcctctggcccatgctaacctgacagtgtgtgcttatgactatgctcagcctgtactaaatatgcattctagacattcacagagagaaacatctctcatagtctgtcttaaatgacatttacggtcacttatattcgctactttcctaaaagatcatctt

SEQ ID NO: 80187 - DNA, 600 bp, Chicken  19866894372206_1
acaaatacatagttctgatctctattccaagtatatcttagaactatctcttctttacaagtgataaacgataaagtcttggaaagaattcatatgctttttgcacatgagaaagcacttacattcattgctcctcaacagtggaattctagtaggtttccaggttgccttgtccaggttgtcagcctgccagtactggcttgctctatctctgaaaagtagaaagcagaggagtaaaaattaaagcagcattttcagggctagtaaagcagaccaagactggtttccactctcacaacrtttktgcttctgcagtgtgaagtagatcagttcggatcctgtgttcttgtagaaaagaaatacagagatggatatgtgctctcacatgctattcacaaaactgattgatgcagtgaggtgtcaggctttctgggcaaacagctgagaaactcagaggaactttatcctgacattgttaataatgacagcctagatcagaaaagaatatcctttcttgtatgaaaaaggttttcataagaaaagctttgtgctgcagaaatatggcacaaaaggttggggagcttcagttggrccaggcca

SEQ ID NO: 80188 - DNA, 600 bp, Chicken  19866894372206_2
atacatagttctgatctctattccaagtatatcttagaactatctcttctttacaagtgataaacgataaagtcttggaaagaattcatatgctttttgcacatgagaaagcacttacattcattgctcctcaacagtggaattctagtaggtttccaggttgccttgtccaggttgtcagcctgccagtactggcttgctctatctctgaaaagtagaaagcagaggagtaaaaattaaagcagcattttcagggctagtaaagcagaccaagactggtttccactctcacaacrtttktgcttctgcagtgtgaagtagatcagttcggatcctgtgttcttgtagaaaagaaatacagagatggatatgtgctctcacatgctattcacaaaactgattgatgcagtgaggtgtcaggctttctgggcaaacagctgagaaactcagaggaactttatcctgacattgttaataatgacagcctagatcagaaaagaatatcctttcttgtatgaaaaaggttttcataagaaaagctttgtgctgcagaaatatggcacaaaaggttggggagcttcagttggrccaggccagctg

SEQ ID NO: 80189 - DNA, 600 bp, Chicken  19866894372206_3
tcacaacrtttktgcttctgcagtgtgaagtagatcagttcggatcctgtgttcttgtagaaaagaaatacagagatggatatgtgctctcacatgctattcacaaaactgattgatgcagtgaggtgtcaggctttctgggcaaacagctgagaaactcagaggaactttatcctgacattgttaataatgacagcctagatcagaaaagaatatcctttcttgtatgaaaaaggttttcataagaaaagctttgtgctgcagaaatatggcacaaaaggttggggagcttcagttggrccaggccagctgggaatggcaggagcacctgtaggtagctcaccctgcttgtgcttttgctcaagttccagtagcagagtgacacatgacgttgcagagacatacaggccggaaagcacaagatgccttcagccctgcgtttagcctggctctgcagaggagctggaaagctcttctgagacgcagggcttgttggatgaggtgcagtgtgaggtgacaactggagcttcacactgctccctgcaggcacctctgctaaggctggctggaggcagtcactgggctgcggccacacagtgc

SEQ ID NO: 80190 - DNA, 599 bp, Chicken  19866894372208_1
  misc_feature (1)..(43): n is any nucleotide
nnnnnnnnnnnnnnnnnnnnnnnnnnnnnnnnnnnnnnnnnnntattggaatgtatgtaggtagtgtgatttctgaggagactttatgccctgagtgttactggacactaatcaggaagataaagcaatcattaaaataattagtaattctctccaaaaaaatgacctgacaatcagtgtggtaaactgatcctttgagagcacacaagcccagtcactttactgatgagatattcatgggccttagtcacaccctgtaaagaaatacacagaactgtacagcaagtagagcaaatgtgrttttccagtactggcagtttacaaggaaatgctgggaaggacaacatagtctgttcaccctaagctcttgcactgcagtgtctaccttaccatcaaactctactgagcaggtagacagacgcttactaaaagcagagccagacctccctaggcatctacttaatagacagtagatgcctgccaaattctgtcatggcactaaagaaataaaagaaaaaatacagctgctttagctgtatcttcatccttgctgcaaaggagatgattctgcatcctactccttttggggctgcttactc

SEQ ID NO: 80191 - DNA, 600 bp, Chicken  19866894372209_1
gaggagttttttgtaaagttttgtgaatttcaaatagagaatggaatgagcagtgattgagtgtatggtcagtccacatgggactccaaagaaatgctctgtttgttgccatcttttttgcagttttcttctaatttgtatgggaggtagatctctctagaaatacacagttgtgcaattcttcacttatctatgagcttttagaaaggtactgaggcaggttctgttagcattattttgtcatcctacagtttgggtgccactgttcaataggatggatgttatggtcctgctttccartggtgtggctaacactgagaagttgccaggtatctgatgcctcagctttgcttacgttgcagtgtaagtggagtcagaatcagctgcttaaaacagaattagtgaaatgcttactgaaaaggtcctggctgtaaaagctgtattgtgactttaagatagaaaacgcatgaagccatttcttaggccatgtgactgcttgaggattagggtgcttcaagtrccagaagatttagcagcttatatatgttcctgaaagacagcttgctgtctgtatttggctttacaaawaaagattagaag

SEQ ID NO: 80192 - DNA, 600 bp, Chicken  19866894372209_2
gttctgttagcattattttgtcatcctacagtttgggtgccactgttcaataggatggatgttatggtcctgctttccartggtgtggctaacactgagaagttgccaggtatctgatgcctcagctttgcttacgttgcagtgtaagtggagtcagaatcagctgcttaaaacagaattagtgaaatgcttactgaaaaggtcctggctgtaaaagctgtattgtgactttaagatagaaaacgcatgaagccatttcttaggccatgtgactgcttgaggattagggtgcttcaagtrccagaagatttagcagcttatatatgttcctgaaagacagcttgctgtctgtatttggctttacaaawaaagattagaagtcaccccatccaaatcatttggagactcaactagtattttgcttgctcctcataagtggaattataaccaccaggaaaggcccatttcttagggttttggaaggtcaggaatcttctcacaagtgcagagctatctagtattcaggaattgagtmtttggagtctcagggatttaacctgtgatatgcttatcactcagcatgacactgttggtttcata

SEQ ID NO: 80193 - DNA, 600 bp, Chicken  19866894372209_3
cctgctttccartggtgtggctaacactgagaagttgccaggtatctgatgcctcagctttgcttacgttgcagtgtaagtggagtcagaatcagctgcttaaaacagaattagtgaaatgcttactgaaaaggtcctggctgtaaaagctgtattgtgactttaagatagaaaacgcatgaagccatttcttaggccatgtgactgcttgaggattagggtgcttcaagtrccagaagatttagcagcttatatatgttcctgaaagacagcttgctgtctgtatttggctttacaaawaaagattagaagtcaccccatccaaatcatttggagactcaactagtattttgcttgctcctcataagtggaattataaccaccaggaaaggcccatttcttagggttttggaaggtcaggaatcttctcacaagtgcagagctatctagtattcaggaattgagtmtttggagtctcagggatttaacctgtgatatgcttatcactcagcatgacactgttggtttcataagggaaaggctggagcatcacacaggttaaayggtggcatgatgtaggcagttaggggtagtttaaaa

SEQ ID NO: 80194 - DNA, 600 bp, Chicken  19866894372209_4
atagaaaacgcatgaagccatttcttaggccatgtgactgcttgaggattagggtgcttcaagtrccagaagatttagcagcttatatatgttcctgaaagacagcttgctgtctgtatttggctttacaaawaaagattagaagtcaccccatccaaatcatttggagactcaactagtattttgcttgctcctcataagtggaattataaccaccaggaaaggcccatttcttagggttttggaaggtcaggaatcttctcacaagtgcagagctatctagtattcaggaattgagtmtttggagtctcagggatttaacctgtgatatgcttatcactcagcatgacactgttggtttcataagggaaaggctggagcatcacacaggttaaayggtggcatgatgtaggcagttaggggtagtttaaaactgaagaaaacttaacagtcaaaagagatttcaaatcactgtaaggtaaatgcagagtgcgagtcctgggtttcatttggccagcaacatttgctaagcagccttcrctcctgattccaggagaggtggagaggggctgcttcccagggagaattgccagcatggtg

SEQ ID NO: 80195 - DNA, 600 bp, Chicken  19866894372209_5
aaagacagcttgctgtctgtatttggctttacaaawaaagattagaagtcaccccatccaaatcatttggagactcaactagtattttgcttgctcctcataagtggaattataaccaccaggaaaggcccatttcttagggttttggaaggtcaggaatcttctcacaagtgcagagctatctagtattcaggaattgagtmtttggagtctcagggatttaacctgtgatatgcttatcactcagcatgacactgttggtttcataagggaaaggctggagcatcacacaggttaaayggtggcatgatgtaggcagttaggggtagtttaaaactgaagaaaacttaacagtcaaaagagatttcaaatcactgtaaggtaaatgcagagtgcgagtcctgggtttcatttggccagcaacatttgctaagcagccttcrctcctgattccaggagaggtggagaggggctgcttcccagggagaattgccagcatggtggttctgagcaggcagacctgtgctagctaagaagacctacttaaacatgtggctggggagtctctggaagcaggactcccatgcaaagaaggctgtg

SEQ ID NO: 80196 - DNA, 600 bp, Chicken  19866894372209_6
tttggaaggtcaggaatcttctcacaagtgcagagctatctagtattcaggaattgagtmtttggagtctcagggatttaacctgtgatatgcttatcactcagcatgacactgttggtttcataagggaaaggctggagcatcacacaggttaaayggtggcatgatgtaggcagttaggggtagtttaaaactgaagaaaacttaacagtcaaaagagatttcaaatcactgtaaggtaaatgcagagtgcgagtcctgggtttcatttggccagcaacatttgctaagcagccttcrctcctgattccaggagaggtggagaggggctgcttcccagggagaattgccagcatggtggttctgagcaggcagacctgtgctagctaagaagacctacttaaacatgtggctggggagtctctggaagcaggactcccatgcaaagaaggctgtggaaaaacatctgctattcgagacaagcaaagttgaaagctggttgcaaaatagcaggggaatttcaaagagaaagttgacttggagctgtatggtgttgcttcttgtctgacatgctgtcttctggtagttgtacttgattcc

SEQ ID NO: 80197 - DNA, 493 bp, Chicken  19866894372211_1
ggtgagctgcttgctgcatgctgccaggaaagggaggagatctggctgcgcctcgccctggctgagaacaggcgcgctcatgccatgtgtgccagcagctgccctgccctatccgtgcagcgcggcggtgctggggcccatccctgggacgcgctgtccctgccctgcggcgctgcgggaccggtgactctgcacgcttccgcctgcggttggttgggcacacggggcgatggtggagcagctgtgcagaggagcacgagcccatccctgctgcaaaggaacagccgaggagggaggccrtatacagtkccacgctggggacagccaagggggcygggacagcaaggakagagggtagggtgctttgggccccacygcacacccgggtcccgtgcagggagcgcagccagagcgtgccacaccagcacagccccaaggcacggtgacaccgggcccagcgccagcagccgcgataaggcggtgggggggggga

SEQ ID NO: 80198 - DNA, 484 bp, Chicken  19866894372211_2
cttgctgcatgctgccaggaaagggaggagatctggctgcgcctcgccctggctgagaacaggcgcgctcatgccatgtgtgccagcagctgccctgccctatccgtgcagcgcggcggtgctggggcccatccctgggacgcgctgtccctgccctgcggcgctgcgggaccggtgactctgcacgcttccgcctgcggttggttgggcacacggggcgatggtggagcagctgtgcagaggagcacgagcccatccctgctgcaaaggaacagccgaggagggaggccrtatacagtkccacgctggggacagccaagggggcygggacagcaaggakagagggtagggtgctttgggccccacygcacacccgggtcccgtgcagggagcgcagccagagcgtgccacaccagcacagccccaaggcacggtgacaccgggcccagcgccagcagccgcgataaggcggtgggggggggga

SEQ ID NO: 80199 - DNA, 458 bp, Chicken  19866894372211_3
ggagatctggctgcgcctcgccctggctgagaacaggcgcgctcatgccatgtgtgccagcagctgccctgccctatccgtgcagcgcggcggtgctggggcccatccctgggacgcgctgtccctgccctgcggcgctgcgggaccggtgactctgcacgcttccgcctgcggttggttgggcacacggggcgatggtggagcagctgtgcagaggagcacgagcccatccctgctgcaaaggaacagccgaggagggaggccrtatacagtkccacgctggggacagccaagggggcygggacagcaaggakagagggtagggtgctttgggccccacygcacacccgggtcccgtgcagggagcgcagccagagcgtgccacaccagcacagccccaaggcacggtgacaccgggcccagcgccagcagccgcgataaggcggtgggggggggga

SEQ ID NO: 80200 - DNA, 444 bp, Chicken  19866894372211_4
gcctcgccctggctgagaacaggcgcgctcatgccatgtgtgccagcagctgccctgccctatccgtgcagcgcggcggtgctggggcccatccctgggacgcgctgtccctgccctgcggcgctgcgggaccggtgactctgcacgcttccgcctgcggttggttgggcacacggggcgatggtggagcagctgtgcagaggagcacgagcccatccctgctgcaaaggaacagccgaggagggaggccrtatacagtkccacgctggggacagccaagggggcygggacagcaaggakagagggtagggtgctttgggccccacygcacacccgggtcccgtgcagggagcgcagccagagcgtgccacaccagcacagccccaaggcacggtgacaccgggcccagcgccagcagccgcgataaggcggtgggggggggga

SEQ ID NO: 80201 - DNA, 417 bp, Chicken  19866894372211_5
ctcatgccatgtgtgccagcagctgccctgccctatccgtgcagcgcggcggtgctggggcccatccctgggacgcgctgtccctgccctgcggcgctgcgggaccggtgactctgcacgcttccgcctgcggttggttgggcacacggggcgatggtggagcagctgtgcagaggagcacgagcccatccctgctgcaaaggaacagccgaggagggaggccrtatacagtkccacgctggggacagccaagggggcygggacagcaaggakagagggtagggtgctttgggccccacygcacacccgggtcccgtgcagggagcgcagccagagcgtgccacaccagcacagccccaaggcacggtgacaccgggcccagcgccagcagccgcgataaggcggtgggggggggga

SEQ ID NO: 80202 - DNA, 600 bp, Chicken  19866894372213_1
gctattttcctgatctgatgctgatgtcagattttagaatttttagtaccagcgtgtgaacggaagagtccacagagatgcacttctcaacattttatggaaagaaactcctctacagctgaaattctttcaaacataaggatatctctgtgtctagcagctgttccttgaccaaagtcccccatcatactgcccttctcctgctagagattacaggtgggtctccattcactgtgtgaaaatacagtagaggcaaacctcctcttggcttctcctttcacttccaggaacagaaaaaawaataataataataataataaaagacctctagatgaaagaatcaacgcaggtctttactgtaagtgacaccattcaagctttctgcagggagccaaactggtataatgattacatcgaagagcaccttagagaaagaggatggaatgatctaagagaaatgaagattgaggatagtagctgacacttattcttgcattatagcccatgggacagaagggaaaaatacagtaaattacttgtaagatgtctcttcttcccagaacagatgacttctcagacactggcaatacagtgaaatga

SEQ ID NO: 80203 - DNA, 600 bp, Chicken  19866894372218_1
ttggtctgggtctcagctcaaatcaagggttaaataggcctgttctaagcctcttaaagataggatttatatagtaattacagtaatggaaactgatcttgataatttttatacggcctagaattctgctgtgtcatatgcatctgcagagcccaagaagtgcgcttctcggagagcactgcagtcttgaaagcagccgttcaaatgtataatggagaattatcagagcatgggtatggtcgagatataatgaaccacaaggaatcagaaatcctgggaaaagcgaggctcacatacttsaggaaagttgtatttttaaaacagctcgttttcttggaagtttctggaactwgatcttcatcaccacgctgcaaacagcactgagaatgccctttcatttttgtatttcctctcttttcctttgctacagccttaggtctagagagagcaaaatgcttcttggccagctgcaatcctcacatcctctttccagttttctctgttgtgcaaggaaaaatacaggagtgctgtctttgctgcacggtaaagaaaaccttcagcagatttggagatctgatagggggtttggctccaccttca

SEQ ID NO: 80204 - DNA, 600 bp, Chicken  19866894372218_2
cttaaagataggatttatatagtaattacagtaatggaaactgatcttgataatttttatacggcctagaattctgctgtgtcatatgcatctgcagagcccaagaagtgcgcttctcggagagcactgcagtcttgaaagcagccgttcaaatgtataatggagaattatcagagcatgggtatggtcgagatataatgaaccacaaggaatcagaaatcctgggaaaagcgaggctcacatacttsaggaaagttgtatttttaaaacagctcgttttcttggaagtttctggaactwgatcttcatcaccacgctgcaaacagcactgagaatgccctttcatttttgtatttcctctcttttcctttgctacagccttaggtctagagagagcaaaatgcttcttggccagctgcaatcctcacatcctctttccagttttctctgttgtgcaaggaaaaatacaggagtgctgtctttgctgcacggtaaagaaaaccttcagcagatttggagatctgatagggggtttggctccaccttcaggaagcagaaggcaaagagacaacacgattttaaatttcagacatactttct

SEQ ID NO: 80205 - DNA, 546 bp, Chicken  19866894372218_3
atgggtatggtcgagatataatgaaccacaaggaatcagaaatcctgggaaaagcgaggctcacatacttsaggaaagttgtatttttaaaacagctcgttttcttggaagtttctggaactwgatcttcatcaccacgctgcaaacagcactgagaatgccctttcatttttgtatttcctctcttttcctttgctacagccttaggtctagagagagcaaaatgcttcttggccagctgcaatcctcacatcctctttccagttttctctgttgtgcaaggaaaaatacaggagtgcwgtctttgctgcacggtaaagaaaaccttcagcagatttggagatctgatagggggtttggctccaccttcaggaagcagaaggcaaagagacaacacgattttaaatttcagacatactttctgccaaaactaagcctacaacacccttgtacagacattgattcctctccagtgtgtctttgcttcatacatataaaagattccctaacctgatgctgtgctatttctatgtttttgattcagct

SEQ ID NO: 80206 - DNA, 600 bp, Chicken  19866894372221_1
ccaacagattttggcccttactgctaagtcttttaagcagagctcttcataattttacttcatatgttgtaatagcagcctcactattgctatccaattacattctgtcactctgacaatattacataaaaaatttaacagcaccctttggatgtgctgaaaccatacttttatctaaaattggtcttttaagtaccagacatcttcagaaatctggcttaatcaccaagtgagatgagtgccttttattaattttattaattcccaacattgcaactgtgtttctactttttaacatgkttctgtccatttcaatatgatatcttaatggccttttccatctattttgaatctcagctttctaaactttgttttagaatttcttactcacagtgagaccccaagacaagaacatctgaacagtttcctctcctgtaaacagatctatcaagatgagaagcactagtgtgtagtggaattctaagattttcaggatccacttgatgcagtgatttttcttctcagcaccataacttgacagtccttttaggctgcgactaacacttattaggtgatgtcatagccctatatagttgttct

SEQ ID NO: 80207 - DNA, 599 bp, Chicken  19866894372225_1
  misc_feature (1)..(22): n is any nucleotide
nnnnnnnnnnnnnnnnnnnnnntgacacttagaaataaattaatttccacagacatctttcccttgagagaagatgattttctactctggaacccgttcagctttgtcactgtggcctggcagaccctgagagaaaagaacgtgggagttttgaccaaagcattcattttggtttctgggaaatggtcctgaagcttttttatacagtgagattccacataagaaaataaaataatagcaatttaaaaaatgtagattcagagggaattccctctgtaggagaaattagaatctgaaagsctgtatttgctcagcctaaacaagagggttgggcaatgtgtgccttctcagaaataaactcaattccgggacattcagtggagatttccatgtcttaaagtttccctctgctctgtggtgatctcaatgaccatcttccttccagtgataaaaccagacacgataaggagatataaatattccacactgcaatttcacacatcctagtaacgtcagcagtgccagactctgctgcttctcaggttgctctttaaacttcagctttctgcagaatttgatagcagacgtttctgatgaaa

SEQ ID NO: 80208 - DNA, 600 bp, Chicken  19866894372225_2
cagcctaaacaagagggttgggcaatgtgtgccttctcagaaataaactcaattccgggacattcagtggagatttccatgtcttaaagtttccctctgctctgtggtgatctcaatgaccatcttccttccagtgataaaaccagacacgataaggagatataaatattccacactgcaatttcacacatcctagtaacgtcagcagtgccagactctgctgcttctcaggttgctctttaaacttcagctttctgcagaatttgatagcagacgtttctgatgaaatgactcaatccygtgtgactcactttcagtatttttccgtttccagctggaaaaaacaagcagaacacaaagaaagaagaattgacatctaaggaagctggtgtatcataaggtcttttccttccactgggacattcacacagttaaatactgggttattagtgcagcaastccagcttgagttgcatgtttgttttactcgctgtgataactgtgtttggtaacagcggccaggagagcaaaaggaaatgtatgtaacaacctctgtaatgagcactgtgccccragctggatattctttactaatggatt

SEQ ID NO: 80209 - DNA, 600 bp, Chicken  19866894372225_3
atataaatattccacactgcaatttcacacatcctagtaacgtcagcagtgccagactctgctgcttctcaggttgctctttaaacttcagctttctgcagaatttgatagcagacgtttctgatgaaatgactcaatccygtgtgactcactttcagtatttttccgtttccagctggaaaaaacaagcagaacacaaagaaagaagaattgacatctaaggaagctggtgtatcataaggtcttttccttccactgggacattcacacagttaaatactgggttattagtgcagcaastccagcttgagttgcatgtttgttttactcgctgtgataactgtgtttggtaacagcggccaggagagcaaaaggaaatgtatgtaacaacctctgtaatgagcactgtgccccragctggatattctttactaatggatttagagatctgttagcatgcacaaatcagggaagagctggttgtcctgtgactcagacttcacctttgcagacagggatttccaggtttgcacagagtctaaatggtactcggcagtttccatcagattcctttgacaaggaaggtacctcggtgctgga

SEQ ID NO: 80210 - DNA, 600 bp, Chicken  19866894372225_4
cgtttctgatgaaatgactcaatccygtgtgactcactttcagtatttttccgtttccagctggaaaaaacaagcagaacacaaagaaagaagaattgacatctaaggaagctggtgtatcataaggtcttttccttccactgggacattcacacagttaaatactgggttattagtgcagcaastccagcttgagttgcatgtttgttttactcgctgtgataactgtgtttggtaacagcggccaggagagcaaaaggaaatgtatgtaacaacctctgtaatgagcactgtgccccragctggatattctttactaatggatttagagatctgttagcatgcacaaatcagggaagagctggttgtcctgtgactcagacttcacctttgcagacagggatttccaggtttgcacagagtctaaatggtactcggcagtttccatcagattcctttgacaaggaaggtacctcggtgctggagctggagcagagtgtggggagttaaagcaaggtttgtgagcagcaagacttcggctgccaaattaagagtgagaagagaatttctgagcagcttatgaaaattgacctctggtcc

SEQ ID NO: 80211 - DNA, 599 bp, Chicken  19866894372232_1
  misc_feature (1)..(28): n is any nucleotide
nnnnnnnnnnnnnnnnnnnnnnnnnnnntggaggagaggaggctcaggggagaccttattgctctctataactacctgaagggaggttgtagtgagctgggagtcgacctcttctctcatgtaactagtgatagaactagagggaatggcttcaagctgcgccagggaaggttcaggctggatgttaggaaatactacttctttgaaagagtggtcaggctctggaatgggctgcccggagaggtgatggagtcgccaaccctggaggtgttcaaggaatgtttggatgttatgctgagrgacatggtttagtgagaactgttggtgatgggtggacggttggactggatgatcctgggggtcttttccaaccttggtgattctatgattctgtgataaagttacccacttactggacaaagagaagatagtggatgagggatttttatagattttaacaaagactttgatactgcctctcacagtatccttttgsacaaaatgttcagcatatagctggacacatacacaatatcattggggaacaactgactgaatggtaggactcaaagcattgtagtaaatggggtagcatcagg

SEQ ID NO: 80212 - DNA, 600 bp, Chicken  19866894372232_2
acttctttgaaagagtggtcaggctctggaatgggctgcccggagaggtgatggagtcgccaaccctggaggtgttcaaggaatgtttggatgttatgctgagrgacatggtttagtgagaactgttggtgatgggtggacggttggactggatgatcctgggggtcttttccaaccttggtgattctatgattctgtgataaagttacccacttactggacaaagagaagatagtggatgagggatttttatagattttaacaaagactttgatactgcctctcacagtatccttttgsacaaaatgttcagcatatagctggacacatacacaatatcattggggaacaactgactgaatggtaggactcaaagcattgtagtaaatggggtagcatcaggctggtggcattgctccccaaggctcaaatttaggagcatttctctcaaaatgttttatcggtgacccagacaaagaagctgagtgcacactaagtctgcatatggcactaaattagatgattcccttgagagtaaagagatcttgatagaacactagacagtaaccaatcatataaaatgtaataagaaataatagt

SEQ ID NO: 80213 - DNA, 599 bp, Chicken  19866894372237_1
  misc_feature (1)..(175): n is any nucleotide
nnnnnnnnnnnnnnnnnnnnnnnnnnnnnnnnnnnnnnnnnnnnnnnnnnnnnnnnnnnnnnnnnnnnnnnnnnnnnnnnnnnnnnnnnnnnnnnnnnnnnnnnnnnnnnnnnnnnnnnnnnnnnnnnnnnnnnnnnnnnnnnnnnnnnnnnnnnnnnnnnnnnnnnnnnnnnnnctgttttctctctatccttgctacacatttccctgcttaactctaagttttcatattcttccctcatcattcagtgttaaaactctcctcatcagctttgccagcctgttgggagatgttctttkctgtgtttggtcagatgtggccttcaaagtgtcccagctggattctattgcctttgacccttgcatccacaaccaaatagtcactcttgatacatgcttaatatatcactgctgcatgcatagctcagctgtaaggaggcttaatccaaggcttggaccagtatcagcattgtctccacagcactcctgatccaggaccctggcaagcagcatcgcatttccaggcagcaagtcagattggcaggtggggacctacattccccacagttaagagtgttgcaaaacttccattcactgct

SEQ ID NO: 80214 - DNA, 600 bp, Chicken  19866894372238_1
ctttggtgatgaggagcgtggatgctgctctggtaatattggggttttgttgctgaagcctcgtggccagctgacatgtggtctccaaagtgattctggaaggatcccatcatctaaatatgatggctaagggattttcccttttcttgccccctcttgtgggtctgggaatttaatgggttaacatcccagctcactgaagggctctggaactgctgcttgctgtgtgtgcttgttgcagacaggctgtgtggttccatggcatctctccctagggcactgtggtggcactgctgccayggtgtttgcatgctaggcagtcatctgttggcccaggtggtgcagatttttgggtagctttagctgcaacagtttacattctgttgtatcacttataatccagtactgcatctccaacagacccataagcagaaatacatataattgcatttgaaaggtatctgacagcagcctgaaatgtggatcccagcattaaggtcctgatgctccgttttgaatgtagaaatgaggaaaccaaagcagaagctgctggtgccctcgcaaacctcagcatttcatttccatagtagcacggggcca

SEQ ID NO: 80215 - DNA, 600 bp, Chicken  19866894372238_2
atacatataattgcatttgaaaggtatctgacagcagcctgaaatgtggatcccagcattaaggtcctgatgctccgttttgaatgtagaaatgaggaaaccaaagcagaagctgctggtgccctcgcaaacctcagcatttcatttccatagtagcacggggccactctgcctctgaaacctccctctggtgagtcaacgctgtgttacagctgggtttgagggggaggttctgcactgggaggactaaagagacatttctgtagcataatgatttagaaagaaaaggccaggctgctyggragtgttgggaatacacagggagaactaccaggcttaatgagtcaaggagaggggtccctgataaagcgtgtagatggaagagatggttactgtctgggtgctgctgtgatgtcatgtagccttgcttggccttccttttttccctcttgcattcttctctgagaatcttcatggttttgcaaagatccgctcaactgaaaactgtttttatccaaaatatctcgcagacaaaagtaagaagatgtggctaaaatacaataaagagtggcagggwttagaagaagtaaaggtttggga

SEQ ID NO: 80216 - DNA, 600 bp, Chicken  19866894372238_3
catataattgcatttgaaaggtatctgacagcagcctgaaatgtggatcccagcattaaggtcctgatgctccgttttgaatgtagaaatgaggaaaccaaagcagaagctgctggtgccctcgcaaacctcagcatttcatttccatagtagcacggggccactctgcctctgaaacctccctctggtgagtcaacgctgtgttacagctgggtttgagggggaggttctgcactgggaggactaaagagacatttctgtagcataatgatttagaaagaaaaggccaggctgctyggragtgttgggaatacacagggagaactaccaggcttaatgagtcaaggagaggggtccctgataaagcgtgtagatggaagagatggttactgtctgggtgctgctgtgatgtcatgtagccttgcttggccttccttttttccctcttgcattcttctctgagaatcttcatggttttgcaaagatccgctcaactgaaaactgtttttatccaaaatatctcgcagacaaaagtaagaagatgtggctaaaatacaataaagagtggcagggwttagaagaagtaaaggtttgggaaat

SEQ ID NO: 80217 - DNA, 522 bp, Chicken  19866894372238_4
agaaagaaaaggccaggctgctyggragtgttgggaatacacagggagaactaccaggcttaatgagtcaaggagaggggtccctgataaagcgtgtagatggaagagatggttactgtctgggtgctgctgtgatgtcatgtagccttgcttggccttccttttttccctcttgcattcttctctgagaatcttcatggttttgcaaagatccgctcaactgaaaactgtttttatccaaaatatctcgcagacaaaagtaagaagatgtggctaaaatacaataaagagtggcagggwttagaagaagtaaaggtttgggaaatattcaggatggggtctatgaacaaaatgggggactgaggaatttaaagtcactgagctgccaagtcctgtgtcctgagcaaagcacccatttctgtgtgtccaatgattactgcagcctcgaaaatggctgtatcagaaggcagtacgagcgagctcgacaaagtgagcaggcagtcagcagggtgttaaggaaat

SEQ ID NO: 80218 - DNA, 599 bp, Chicken  19866894372247_1
  misc_feature (1)..(61): n is any nucleotide
nnnnnnnnnnnnnnnnnnnnnnnnnnnnnnnnnnnnnnnnnnnnnnnnnnnnnnnnnnnnnctttcaagtcacctgtgttctgttcgtgggtagaatgcacatctgctttgcaggatttactccttgtttattaacgtgagcatcgtgagacctaagagaggtgcaacccaaaaagttgatgtcttaaggagaattaatgtgcttgtaagacttcagaaagcagaaactgtcaaatttggctacagcacaatgagatgggacacaaatattttccaataggcaatatgcttcaagacccmggaaggtcagaaaatacacagagcattacaaaacagccatactaacttcaaagagatcacatttggaaagagaggactacgaggcaaaatatctgccacttcagcactcttggactcaagcctgcaaggccatccaaatgagatcacaggcacagtcctaacagcagtaagcaatagctaaaatgcctgggtaggatgagccttgctgttgaccactcatacctggagcttgttggaaatacttctgataaactgtggtgcagcacacactgactcaccccaaccgtatcaccagcagt

SEQ ID NO: 80219 - DNA, 600 bp, Chicken  19866894372248_1
actcacattcaaacaaatgaactatcttggtcattcccacactgtcttttcctaatcctccaacagcagtttcccagggccatacctgcaggaggacaggctctgccgccctaggcgccatgcccagcttttacaactgatgaattggtctcctgaggactggtatcagttctggcactggccaatctgtattcagggatagtttattgtccgtaacctgtcccctggcacaaataggaaaaatctgcagtcttactcttatgggatcctgtgggctcgtcaaggtatgctaattctacrgctgtgttgcaaggcacctcaaaaagctgtggttgtgatgtgacatttcttttcccttgatagccattgtaatacacaaagaatcgtgctccctacagaggcagccacaagaaaatacacccaagagtctggtgacagcattacagacaaaaggtataatgaaattcacagcaggtgctcacttaaaaaaatgaattgaataaccattatagtttacagaccaaactcctgggtgtgtctgtaacacgatgaaaaacacgacagcagagcagcaagatcccaggccacagcaagtgagga

SEQ ID NO: 80220 - DNA, 600 bp, Chicken  19866894372252_1
cattgtgctgctgcagctgaaaaagatggagtgctaagtactgaagatgggaggtttaaatttcaattgcatcttttagtaccagacagtgtctatacatgaatgttgagggtcagtttaattatttaactaatactggatttacataaattggctttcatgaaaaggctaataagatgcagttgtggtgggcagctgaaagtaatttgggtttgagtccggtaatgatagtactaaacagagctgaaattgtagcatcaattttgtaaaatgttaaattagtgttaagctgtgaaagaygactgcaggatccaagacatattttggctgtttaatacttttggtgccattattttcatatgttaacaacataatggttttatgagactgttccagctgtgctttacttaatatcaaagaataagatcaccacactgatagaatatgccctaaatttaacacacaagggagaaactccaggcatcgggttacgttttcctcttcatatctaagaatttattatctcattcctattagtgtaaaatgagtgttatagactgaattttgccctttattcagccataaagaaaatcccactgt

SEQ ID NO: 80221 - DNA, 599 bp, Chicken  19866894372260_1
  misc_feature (1)..(43): n is any nucleotide
nnnnnnnnnnnnnnnnnnnnnnnnnnnnnnnnnnnnnnnnnnnttccagagcacgtgggggtggggaaaccaaccttagtacaggcagctgcaataggagacttttcccccttgcttttttttttttttgtctgttctctgtattctctagctctattcctagtagcacatctatttttggactatacttacaaattactattgttttgtatccagagtacacttctaagttctagcactctataactaaggtgggttttttaaatctttttattttgatttctttgtgttagtgaagayggtgaggttccggaggtacttgcaagktgccagacctgtagcagcccatgagagaaccagcattaacaatgtgtaaatcccttactrctcagggttacagtgtaaagccttcttaaatgaaggcatacagctgctgagagcaaagctgcttttggaggctgtgggacttctgctgtttagggatgaactcagaattggaatcttcttgggatcttcacccacttgagcccacagagaactttaaggataggtatgccacggtcttatggtttttgtgttgtttagagtgatttagtatg

SEQ ID NO: 80222 - DNA, 599 bp, Chicken  19866894372260_2
  misc_feature (1)..(16): n is any nucleotide
nnnnnnnnnnnnnnnnttccagagcacgtgggggtggggaaaccaaccttagtacaggcagctgcaataggagacttttcccccttgcttttttttttttttgtctgttctctgtattctctagctctattcctagtagcacatctatttttggactatacttacaaattactattgttttgtatccagagtacacttctaagttctagcactctataactaaggtgggttttttaaatctttttattttgatttctttgtgttagtgaagayggtgaggttccggaggtacttgcaagktgccagacctgtagcagcccatgagagaaccagcattaacaatgtgtaaatcccttactrctcagggttacagtgtaaagccttcttaaatgaaggcatacagctgctgagagcaaagctgcttttggaggctgtgggacttctgctgtttagggatgaactcagaattggaatcttcttgggatcttcacccacttgagcccacagagaactttaaggataggtatgccacggtcttatggtttttgtgttgtttagagtgatttagtatgctgttttatcagtgttattttcatctc

SEQ ID NO: 80223 - DNA, 600 bp, Chicken  19866894372260_3
gctgcaataggagacttttcccccttgcttttttttttttttgtctgttctctgtattctctagctctattcctagtagcacatctatttttggactatacttacaaattactattgttttgtatccagagtacacttctaagttctagcactctataactaaggtgggttttttaaatctttttattttgatttctttgtgttagtgaagayggtgaggttccggaggtacttgcaagktgccagacctgtagcagcccatgagagaaccagcattaacaatgtgtaaatcccttactrctcagggttacagtgtaaagccttcttaaatgaaggcatacagctgctgagagcaaagctgcttttggaggctgtgggacttctgctgtttagggatgaactcagaattggaatcttcttgggatcttcacccacttgagcccacagagaactttaaggataggtatgccacggtcttatggtttttgtgttgtttagagtgatttagtatgctgttttatcagtgttattttcatctcagactgygattgaaactactgaatcttatgtgtgttttggagctaacgtggctgcagatca

SEQ ID NO: 80224 - DNA, 600 bp, Chicken  19866894372260_4
acctgtagcagcccatgagagaaccagcattaacaatgtgtaaatcccttactrctcagggttacagtgtaaagccttcttaaatgaaggcatacagctgctgagagcaaagctgcttttggaggctgtgggacttctgctgtttagggatgaactcagaattggaatcttcttgggatcttcacccacttgagcccacagagaactttaaggataggtatgccacggtcttatggtttttgtgttgtttagagtgatttagtatgctgttttatcagtgttattttcatctcagactgygattgaaactactgaatcttatgtgtgttttggagctaacgtggctgcagatcagaaaagtatttgtacagtcctcctgctaactaaaatattctggcaactgaatgttttggtttggaatttttcattgatgtattaaataacaaagaatttcttgtctttttttttttttttcattttctggcagaatttaaatattagctggtcagtgaggtttcttttctggggcacatattaacatttaatgcattttttttctaactgcgtcatgacagactttttttgtttgtttctaaacta

SEQ ID NO: 80225 - DNA, 600 bp, Chicken  19866894372261_1
agtaaccacattgttcattgaaatggcatgttctgccattacagttcagacaaaaaggatatgggagaaatttgggagtgtaatagaatctttcatacatcaaaaataattgtttcatatttgacatccagtatcattcctcttaaattcaagattcaggaccagattcctaaccaataagattcaccataatactattcaaatcaacatagtcaagacagtctgtctatactgtgaattcaaagacagatcattctaaaacaacactgtcctagctgctgctataaataatcctctcawtaagatgcatatgtgcatacctagtaaatgacaacatttttagttgacaaatacttagcaaaaccctactctaggagataaggaaacattatacagttgcctaaaacagaatagcatccttgcaagcagcaatacctaatactgtcatagtcacacggttatgaagtccccactgtcatgttcactctcagagaaaacgagacttcatggttagcaggctggtccaatacaactttcctactttaagtgctcaaaagtctatctacttttgctacaagagtattccatgcaattacagaa

SEQ ID NO: 80226 - DNA, 600 bp, Chicken  19866894372262_1
ataattgccatatttccttcagtttttctgaccccactgaaggtatttatttgccatttggttactcagctcttctctttggatgaaacaaataaatgggttttagcaccagatattcaatactcttttctgcagttcacttcaagcaatttttgacacctataatttatttgacatttttctcctggctcacttcaccagtgttttttccccctcaatactttcaaaatggtagtagacttgcaggcaaagcctcatgattattgtcccagggaactgtaaccttttagaagaaaaaayattttacttgtagttaaaatcctacccagcaagattaatcccrtggagctttatgagctgctgaatgcaccatgagctcaaccttcttgaatgagagacattacagggtgctgccataagatccttttcttgctcaygtagtaccagactggcccatggtaggctgtgagatgatgattctcatggtttaccattttaataaccctttcaatttataggtagagtctctgtttcattttgatgcttcacagtagcctgaataatgtccccttaatcctgtgtttgtttgctctgttcagt

SEQ ID NO: 80227 - DNA, 600 bp, Chicken  19866894372262_2
tatttatttgccatttggttactcagctcttctctttggatgaaacaaataaatgggttttagcaccagatattcaatactcttttctgcagttcacttcaagcaatttttgacacctataatttatttgacatttttctcctggctcacttcaccagtgttttttccccctcaatactttcaaaatggtagtagacttgcaggcaaagcctcatgattattgtcccagggaactgtaaccttttagaagaaaaaayattttacttgtagttaaaatcctacccagcaagattaatcccrtggagctttatgagctgctgaatgcaccatgagctcaaccttcttgaatgagagacattacagggtgctgccataagatccttttcttgctcaygtagtaccagactggcccatggtaggctgtgagatgatgattctcatggtttaccattttaataaccctttcaatttataggtagagtctctgtttcattttgatgcttcacagtagcctgaataatgtccccttaatcctgtgtttgtttgctctgttcagttgtagctgtatttttgcaacataagtagtttataacccgagat

SEQ ID NO: 80228 - DNA, 600 bp, Chicken  19866894372262_3
cacttcaagcaatttttgacacctataatttatttgacatttttctcctggctcacttcaccagtgttttttccccctcaatactttcaaaatggtagtagacttgcaggcaaagcctcatgattattgtcccagggaactgtaaccttttagaagaaaaaayattttacttgtagttaaaatcctacccagcaagattaatcccrtggagctttatgagctgctgaatgcaccatgagctcaaccttcttgaatgagagacattacagggtgctgccataagatccttttcttgctcaygtagtaccagactggcccatggtaggctgtgagatgatgattctcatggtttaccattttaataaccctttcaatttataggtagagtctctgtttcattttgatgcttcacagtagcctgaataatgtccccttaatcctgtgtttgtttgctctgttcagttgtagctgtatttttgcaacataagtagtttataacccgagatatagctctgctttaagtaaatggaaaagaagaataaaacagtgatgagaatggtgcatttatgagatatttctgagagataatattttaattct

SEQ ID NO: 80229 - DNA, 600 bp, Chicken  19866894372264_1
gtattgtgagcttctggtccccctagacctgtatattaaggagggagtgatttcactctagagtgtgatgaagggtattacagaaacaagtaactagacagcactagagagaaatggcagtgtggatcaccagactgtggctgtaattcacatgtaattctcccacaagatctggagaattggagacagagactgagaaagattattagttgtctgcagtcttttgtctaaaatgttttcattgactaagattaaagattaaaatcagtctgttattcttcctctgtagacattttcctrgggttttgttaaatcttctagattggcttgaataaaaaggatagaaattattacttttttttttttttaattaagaaaaaaaaaaaaaaaagcctgattcagagttagaaagtatgaaactatgtagcattaaaaatagatacagagttctgtattggtctagtttcaggtccaaagctgtacttacactcttgcatctttcagaagaaacatttagtttagcacagttgggatgtaatatattgacatcagtggcatgagcttaactgagatgaatttgattccgttcctcaagccact

SEQ ID NO: 80230 - DNA, 600 bp, Chicken  19866894372267_1
cagaatttgcagaaatactggcacattgtgctttacttgtaaaatgctagtcacgcttcagaaaaatgcagtaagttatggctgatccagcaaaaagagagaaaaaatgaagatagcaagcaaagactgtcttccctccaagctgctggccaggcacatgttttgcttatttgtatcaggaccatggagcaaaataaatggggatttttgtttgtttgtttgcttacttcttcctttctacatgtaaagaatgtcttagcagcagggtttgatgtgaagagagaaaagtaagtcaatacratttggatgattaattctatgcaagcaacctttgcttaaactagctggcttaaaaattctgagggtattgcttatcrtttataattatctaacactgtaatgccttcttccctactgcacttgctatctgaattaaactggaatctgaaacttcagcactgagccattttaaggggagagggaagagtttcatgtgatttttttatttgtggtccagcccaaacctgcaaagactctattctgacatttccttttaaaaggaactgacatcctgcaaaagcaaggcatgttaatttaata

SEQ ID NO: 80231 - DNA, 600 bp, Chicken  19866894372267_2
atggctgatccagcaaaaagagagaaaaaatgaagatagcaagcaaagactgtcttccctccaagctgctggccaggcacatgttttgcttatttgtatcaggaccatggagcaaaataaatggggatttttgtttgtttgtttgcttacttcttcctttctacatgtaaagaatgtcttagcagcagggtttgatgtgaagagagaaaagtaagtcaatacratttggatgattaattctatgcaagcaacctttgcttaaactagctggcttaaaaattctgagggtattgcttatcrtttataattatctaacactgtaatgccttcttccctactgcacttgctatctgaattaaactggaatctgaaacttcagcactgagccattttaaggggagagggaagagtttcatgtgatttttttatttgtggtccagcccaaacctgcaaagactctattctgacatttccttttaaaaggaactgacatcctgcaaaagcaaggcatgttaatttaatatttttaaatccgaacctgaaccacagcctccatttgaccttgactctaaacctttaaagcttctttccctcagccca

SEQ ID NO: 80232 - DNA, 600 bp, Chicken  19866894372268_1
aactctggtacattttggatggctcatattaactgcctcatataaaacatgaaagaggatcactgctgtgaacaaaacctgtgtgaaacaaacaaccaatgcatattaatggggctaaagtaatcaaaagtacagtggaacatactgtgaaaatgataaggtttacatactttcctgagtactttcgaagtttaaccacaatgcatctctgattacattataatacttcactaacaatgctgtatatcgttgctggttttttttgttgttgttgtttgtttgattttgtattttttttcyttcagcaaagaacactttaaaatctgtccttaattgttaattactctaaaatgtagtgctttcagcagctggacctaaaagtctttagaggaggaagacatctactgacatagtatacaaagaaaactcaaagtctgtatcaacctgcatatgggatggcaatatttacatacttacatacatacatacatacttacactgcctctttccaccacccagcagcactcctgcttagctggagaggtcccagaggattggaggcttaccaatgtgacttccatgtacaaattcttgtacatg

SEQ ID NO: 80233 - DNA, 600 bp, Chicken  19866894372285_1
agtgtagctaacacaatcaagttacattttctttatatgtttttgacctcacaaattattcggtgtgatgaagtggaaccgagtgcagtgtagatagaaaagatcatacattctgttttgtctaggaagaaagagactgctgtgtgttcaaagtattacatagatacttttaatcaattcacctttgatgtaggatacttatttaattaatattttgtctaaacagtaaataataatttgataatgcaacaaagcttcagaagattactgtttataactgccattttagggaaaatgaaygcagtcttggagctatgtccatctaaagaatttttcacattaatcacctttcatctctctgtggcttgatcaaagtgcagttaatagatgttcttgatatttaatcttctgagtagaatctattccttgaaaagaaattccaaaagtttwtataaaatcttataaaatcttataaaattggaatgaactggtgacaggccttaatatcttcatgctaaggcttattgtaggtcgtagtatcagggtttgtgttagaatcttgcgtttttttgcttggttctgacagtaagtgcacctggc

SEQ ID NO: 80234 - DNA, 599 bp, Chicken  19866894372285_2
aagtattacatagatacttttaatcaattcacctttgatgtaggatacttatttaattaatattttgtctaaacagtaaataataatttgataatgcaacaaagcttcagaagattactgtttataactgccattttagggaaaatgaaygcagtcttggagctatgtccatctaaagaatttttcacattaatcacctttcatctctctgtggcttgatcaaagtgcagttaatagatgttcttgatatttaatcttctgagtagaatctattccttgaaaagaaattccaaaagtttwtataaaatcttataaaatcttataaaattggaatgaactggtgacaggccttaatatcttcatgctaaggcttattgtaggtcgtagtatcagggtttgtgttagaatcttgcgtttttttgcttggttctgacagtaagtgcacctggccaggcatagagatagataaatgagatctgtgctaaccaaaatatataatattaatccagaaaatataaaacagcacacaacaggtagacaggctgttttctaaagtgcagaagagttgaatatcagagatcagattctcgctgctcaga

SEQ ID NO: 80235 - DNA, 600 bp, Chicken  19866894372295_1
tccagctgtcaccgtagcagcagcagcacagtagagctgaggtgagctggagctgctgccatccccggctggggtatgcttggggggcctgcagagcactccagatctcattatcacacactgccagcactgtctgtgtgcgtttaaatgcagctgctctgcaaagctattaaattcattttagaggttccagatgtgctttaatgactcccttttagctaaggagtgatggcagacatttcttctcacatggaaagcagctcttttggggtgatgggtgagggtcagccaacattcccyggagcgagctgttggtattgtattgaaggagaagccctggaagtgcttcccctcatgctgcctcatcagcaccccacagcagcacctaccagggctgggtcccacctgcaattgcccccagtacctcccacttacctggcacccacggccagtgcccacaccttgcagcaggaggctggcccttgccacaggctactgccctcccccagcctgtatattttcctgtttgcctcttaccttttgcactgatcccaggaatagggacagtgacagccttgctgctgtccctgcaggagccag

SEQ ID NO: 80236 - DNA, 600 bp, Chicken  19866894372305_1
ctttgctgcaagtctgttaaggagctcaataatgcgtaggctggaggtggttaagagtaggcaagtagctttcattctgatatcttctgagcatgcaacttataaattctcttaatattatcaacagtatatccaagaccaaaatgcttagagggtgaattcccctgaaagagccttgactggaaacagcagtgctcctggcatagttctctggccttgaaggacaggcagtaatagcaatgaaggccattatcctttgtaatgctttcaggatgtttaagagtaacattttggacagcraagtgctgccaagatttgggattcctgagcccttctccagattctagagatttttgcccagcctcatcccagccttcttctacccatccatgtcttctccacctcctctttcttttgtcaaatcccagtttttcacccaatgtctctctgctcctgactcatgagttgtcattccttcaatctcatcctcactcctgtcctattctgttcagtcccgactcctgctttccctgctgaactcctgtactctctcctttcctggtgctgttcactcaggttcaaagcacaaacagtggtgct

SEQ ID NO: 80237 - DNA, 600 bp, Chicken  19866894372308_1
acagcagtgaggagggaaaagggatggaattacagctccctgcaacgtggctttggaattctaacacgatgatgttccaggagaagagcttaaaggatcagatcaaataaattttgccatcagaataagagatctgtcctcaggtggggaaaaagattttaatttgacagagggcttcaagggactttgacagaattcattttgctggcagatatgatctaggcattagacaaaaacacattctgtcataagaacactgttagctatttgacataatgcattttggacaccgtttggttytggaggaagtgacagtcrctttcttgtcaatgaagcagtggattattttttctgcatagaaggcccccagtctccttctcaaacatgggaaacggtaacagcacagtcttttyaaatagsaatgaatgtctcaagccaccaacaattgtgacagccctttgtgtgcaccacctctgtcatcttgaaggaaggtctggatgctgctctcagatgtaagatttggcttttgggtggcggtgcatggagccaggagctggacctggtcaccccctgtgggtcgctccatattcaggatattct

SEQ ID NO: 80238 - DNA, 600 bp, Chicken  19866894372308_2
aagggatggaattacagctccctgcaacgtggctttggaattctaacacgatgatgttccaggagaagagcttaaaggatcagatcaaataaattttgccatcagaataagagatctgtcctcaggtggggaaaaagattttaatttgacagagggcttcaagggactttgacagaattcattttgctggcagatatgatctaggcattagacaaaaacacattctgtcataagaacactgttagctatttgacataatgcattttggacaccgtttggttytggaggaagtgacagtcrctttcttgtcaatgaagcagtggattattttttctgcatagaaggcccccagtctccttctcaaacatgggaaacggtaacagcacagtcttttyaaatagsaatgaatgtctcaagccaccaacaattgtgacagccctttgtgtgcaccacctctgtcatcttgaaggaaggtctggatgctgctctcagatgtaagatttggcttttgggtggcggtgcatggagccaggagctggacctggtcaccccctgtgggtcgctccatattcaggatattctgtgattctatgattaaaa

SEQ ID NO: 80239 - DNA, 600 bp, Chicken  19866894372308_3
ttgccatcagaataagagatctgtcctcaggtggggaaaaagattttaatttgacagagggcttcaagggactttgacagaattcattttgctggcagatatgatctaggcattagacaaaaacacattctgtcataagaacactgttagctatttgacataatgcattttggacaccgtttggttytggaggaagtgacagtcrctttcttgtcaatgaagcagtggattattttttctgcatagaaggcccccagtctccttctcaaacatgggaaacggtaacagcacagtcttttyaaatagsaatgaatgtctcaagccaccaacaattgtgacagccctttgtgtgcaccacctctgtcatcttgaaggaaggtctggatgctgctctcagatgtaagatttggcttttgggtggcggtgcatggagccaggagctggacctggtcaccccctgtgggtcgctccatattcaggatattctgtgattctatgattaaaatgaagagtactcttaagcagtactactgtgcctgactgcagatgtcactccatactaagacagccctggaggacagagaagacagaagattcccc

SEQ ID NO: 80240 - DNA, 600 bp, Chicken  19866894372308_4
cagaataagagatctgtcctcaggtggggaaaaagattttaatttgacagagggcttcaagggactttgacagaattcattttgctggcagatatgatctaggcattagacaaaaacacattctgtcataagaacactgttagctatttgacataatgcattttggacaccgtttggttytggaggaagtgacagtcrctttcttgtcaatgaagcagtggattattttttctgcatagaaggcccccagtctccttctcaaacatgggaaacggtaacagcacagtcttttyaaatagsaatgaatgtctcaagccaccaacaattgtgacagccctttgtgtgcaccacctctgtcatcttgaaggaaggtctggatgctgctctcagatgtaagatttggcttttgggtggcggtgcatggagccaggagctggacctggtcaccccctgtgggtcgctccatattcaggatattctgtgattctatgattaaaatgaagagtactcttaagcagtactactgtgcctgactgcagatgtcactccatactaagacagccctggaggacagagaagacagaagattcccccacctga

SEQ ID NO: 80241 - DNA, 593 bp, Chicken  19866894372314_1
atgaccttaaaatttgataggataaatttctaccacttcctttgcattttcagaattcatgctatgagacaataccatatgatgcttatacattacagccatgttaattgccaggaatcaacttttgactgcatagatgctatatacaacaacccctaccctagacatcttccagtttaggcaagactgtagagcctagtgcccatatatgatggatttctgaactacttattttattcctgtgtaaatctgtttaaatgctctaacatggagggaaagaagtacacataggaatgcaartgaaaagtctgggtaagagcttctacttgaattgcagataatgagagtaccacgatgtatgactgttatgataatcctaaacaacaaggacaaggaatagctgttggttttgatttaaaatcaactgtagctttatacttagaaatcatttaaaaagtaatattaaaatataagtaaaaagcagtaatgactcccatccactctggcccaagcccaatatcttgcttgagagaagtgttgttgccaataacagattgtacagtgcaatgcaagttcctagcactggaacattg

SEQ ID NO: 80242 - DNA, 600 bp, Chicken  19866894372319_1
gtggtgctcctgtctttgtcagcagggtcaggacaaagaacatgaagatgacaaaaactgcaaggccaacccaaaatccaatcacaatggaatctgtcaaaaaagagaaaacaatatgatcagtacttcacctgcactcgcagaaagtctgcagcctgactgcaaattcaaaaagattttgcatcttattcctggctggaaaaagggtgaaggatgctgaagccctcctttgtagcccggatcttacttctgtctagacaaaccaaaaacaagctgaaagagggaaggggctggattctyttggttcaactaagagccgctccctttgttatgtctggcccatgtccaagcattgctttggaaaccattacagtactagcacacagatgagaggattatttgattttcagcaaaaacctctgtccctgtagcactgagctactgttattctgaatgatttctcttctgagaccacaaggcttctagyttttgatggatcacttaggcctaggaagattttgcttcctttcagtagtgaaacagaggcttctagaataaatggaaacacagatttgctatttgttaccttaacaaatatca

SEQ ID NO: 80243 - DNA, 600 bp, Chicken  19866894372319_2
attcctggctggaaaaagggtgaaggatgctgaagccctcctttgtagcccggatcttacttctgtctagacaaaccaaaaacaagctgaaagagggaaggggctggattctyttggttcaactaagagccgctccctttgttatgtctggcccatgtccaagcattgctttggaaaccattacagtactagcacacagatgagaggattatttgattttcagcaaaaacctctgtccctgtagcactgagctactgttattctgaatgatttctcttctgagaccacaaggcttctagyttttgatggatcacttaggcctaggaagattttgcttcctttcagtagtgaaacagaggcttctagaataaatggaaacacagatttgctatttgttaccttaacaaatatcaacaatgaacatctaatttttgagtttctgactttcatacagaaaactgtaacacagtgtcaaaggagtcaaatgaatttggacaaaaagtgaaaaaaatcaattaaaaggaatacaccaatgcaatagcctcatacagacrcaattgcagtctgactgttatccagaaaggaagcctcttagaagta

SEQ ID NO: 80244 - DNA, 600 bp, Chicken  19866894372319_3
ctgttattctgaatgatttctcttctgagaccacaaggcttctagyttttgatggatcacttaggcctaggaagattttgcttcctttcagtagtgaaacagaggcttctagaataaatggaaacacagatttgctatttgttaccttaacaaatatcaacaatgaacatctaatttttgagtttctgactttcatacagaaaactgtaacacagtgtcaaaggagtcaaatgaatttggacaaaaagtgaaaaaaatcaattaaaaggaatacaccaatgcaatagcctcatacagacrcaattgcagtctgactgttatccagaaaggaagcctcttagaagtaacctagtacatcccttcctgcttcatggcaagataaaacrcagctcatctattctagagaaatagctgtcyagcccattaaaaaaccttcacgaggaaggttccagaccagcaatgtagcccaaatgctactactactgttttcctatgtccaattaggcctcccctgctctaataaaagcccactgcatcttatcccacacacagatcaactagtttgctatagcttccacctgagctttcctaaaatgtggg

SEQ ID NO: 80245 - DNA, 600 bp, Chicken  19866894372319_4
ttcagtagtgaaacagaggcttctagaataaatggaaacacagatttgctatttgttaccttaacaaatatcaacaatgaacatctaatttttgagtttctgactttcatacagaaaactgtaacacagtgtcaaaggagtcaaatgaatttggacaaaaagtgaaaaaaatcaattaaaaggaatacaccaatgcaatagcctcatacagacrcaattgcagtctgactgttatccagaaaggaagcctcttagaagtaacctagtacatcccttcctgcttcatggcaagataaaacrcagctcatctattctagagaaatagctgtcyagcccattaaaaaaccttcacgaggaaggttccagaccagcaatgtagcccaaatgctactactactgttttcctatgtccaattaggcctcccctgctctaataaaagcccactgcatcttatcccacacacagatcaactagtttgctatagcttccacctgagctttcctaaaatgtgggggtttggtccatatgcagaaaatgtacttactgttctcatttacagcaaatggacctgtacataagccaccagcactacataaaac

SEQ ID NO: 80246 - DNA, 600 bp, Chicken  19866894372319_5
atggaaacacagatttgctatttgttaccttaacaaatatcaacaatgaacatctaatttttgagtttctgactttcatacagaaaactgtaacacagtgtcaaaggagtcaaatgaatttggacaaaaagtgaaaaaaatcaattaaaaggaatacaccaatgcaatagcctcatacagacrcaattgcagtctgactgttatccagaaaggaagcctcttagaagtaacctagtacatcccttcctgcttcatggcaagataaaacrcagctcatctattctagagaaatagctgtcyagcccattaaaaaaccttcacgaggaaggttccagaccagcaatgtagcccaaatgctactactactgttttcctatgtccaattaggcctcccctgctctaataaaagcccactgcatcttatcccacacacagatcaactagtttgctatagcttccacctgagctttcctaaaatgtgggggtttggtccatatgcagaaaatgtacttactgttctcatttacagcaaatggacctgtacataagccaccagcactacataaaacatatctaggcccacttagacttccaagtaga

SEQ ID NO: 80247 - DNA, 600 bp, Chicken  19866894372355_1
tttccataagcaacaacagagtgctttgtatttaattagaacatgaaaaatatccacagatttaagttggtgataatctatgttttgtggggtttttaagcaggcaacttagggtatttctttagaaaaaagatgttgactcccatgaatgtgtgtccttggccaagtgcttaaaggtattgctgatctgagctcctaatcagtgattgtcttttactgacctgagaattagtaccttaccagggctggttgggaatgtctgcccttaaattgtttctgaaaattcttttaaaaatgatrtatgtgtgcatatctgattgcagttgtcagcagcagaggcacatctatctctgcagcaggtatgcatgtrtgtagtaggaaattactttcttagcaatgtactaatcctacagtttaaatcccagccaaggtaggtttaactctgtttttttgttcagtttccaatatatgaggtacttgtactttacttatgaaaactttcctatttcagcgacagctgaggagctatggaaaggagctttggcagagactggtgtgggggtaaggaaaggaagaggaaagagaaggaagaaaaagctg

SEQ ID NO: 80248 - DNA, 600 bp, Chicken  19866894372355_2
tgataatctatgttttgtggggtttttaagcaggcaacttagggtatttctttagaaaaaagatgttgactcccatgaatgtgtgtccttggccaagtgcttaaaggtattgctgatctgagctcctaatcagtgattgtcttttactgacctgagaattagtaccttaccagggctggttgggaatgtctgcccttaaattgtttctgaaaattcttttaaaaatgatrtatgtgtgcatatctgattgcagttgtcagcagcagaggcacatctatctctgcagcaggtatgcatgtrtgtagtaggaaattactttcttagcaatgtactaatcctacagtttaaatcccagccaaggtaggtttaactctgtttttttgttcagtttccaatatatgaggtacttgtactttacttatgaaaactttcctatttcagcgacagctgaggagctatggaaaggagctttggcagagactggtgtgggggtaaggaaaggaagaggaaagagaaggaagaaaaagctgaaaaagaatctcaacagaggccaggagattggggaaggtaggtttgtaaataaagggttgaagaatgtct

SEQ ID NO: 80249 - DNA, 570 bp, Chicken  19866894372358_1
  misc_feature (1)..(22): n is any nucleotide
nnnnnnnnnnnnnnnnnnnnnntgcagcgcttgaaactcctgtggtccctgaaggcagagagcagcccatcagtgccatgcatcccttcgatgtgtcctggctccatggggatgctcacctgcccagtgacaggctgccgcaggctgggcagggcttggcacggcgcagtaggtgccgggctccagcagggcaccagctctgccgggaggtcgcagggtgcagagatggagcaggtgaatgtctgccccacatcatgcagcaccagctgggtctgcagccacagccgctcccacgccgcyrcatctgcatggggagaggggtctgtgtggggactcccgggggtcctggtgcaycacagcgtctgcacgtggcccagcatccctatggatgttccaccccagtgtgggtaccatgggagaaggggcacagggtggcccgcagcgggtcctggatctctggccagacctgcgggtggagaagagagaacagagaaatgactcagggtgcccacgttgttcacacccagctggccccactgagatggtacaccttcccacctcccgctgcgt

SEQ ID NO: 80250 - DNA, 569 bp, Chicken  19866894372358_2
  misc_feature (1)..(21): n is any nucleotide
nnnnnnnnnnnnnnnnnnnnntgcagcgcttgaaactcctgtggtccctgaaggcagagagcagcccatcagtgccatgcatcccttcgatgtgtcctggctccatggggatgctcacctgcccagtgacaggctgccgcaggctgggcagggcttggcacggcgcagtaggtgccgggctccagcagggcaccagctctgccgggaggtcgcagggtgcagagatggagcaggtgaatgtctgccccacatcatgcagcaccagctgggtctgcagccacagccgctcccacgccgcyrcatctgcatggggagaggggtctgtgtggggactcccgggggtcctggtgcaycacagcgtctgcacgtggcccagcatccctatggatgttccaccccagtgtgggtaccatgggagaaggggcacagggtggcccgcagcgggtcctggatctctggccagacctgcgggtggagaagagagaacagagaaatgactcagggtgcccacgttgttcacacccagctggccccactgagatggtacaccttcccacctcccgctgcgt

SEQ ID NO: 80251 - DNA, 516 bp, Chicken  19866894372358_3
tgcagcgcttgaaactcctgtggtccctgaaggcagagagcagcccatcagtgccatgcatcccttcgatgtgtcctggctccatggggatgctcacctgcccagtgacaggctgccgcaggctgggcagggcttggcacggcgcagtaggtgccgggctccagcagggcaccagctctgccgggaggtcgcagggtgcagagatggagcaggtgaatgtctgccccacatcatgcagcaccagctgggtctgcagccacagccgctcccacgccgcyrcatctgcatggggagaggggycacagcgtctgcacgtggcccagcatccctatggatgttccaccccagtgtgggtaccatgggagaaggggcacagggtggcccgcagcgggtcctggatctctggccagacctgcgggtggagaagagagaacagagaaatgactcagggtgcccacgttgttcacacccagctggccccactgagatggtacaccttcccacctcccgctgcgt

SEQ ID NO: 80252 - DNA, 600 bp, Chicken  19866894372360_1
gtaaacaaaggactgtgctgatgcaacaggggaggaatataaatgaagaaagttgttggttctgttcccccctccgaggtattagaaagtgatctctcaaagcagcagcttaagcaaattgtttattccttaaacatgtttgcagcttgtatgagacattctgtctcacttcatagtcaaaagaaaagactgtgacattgcttgcaagaatctgtcataaagtatttctaatgcagatggttccctggctgcgttttccccttcaaaaaagccacagctccttccctttattcccttccwtggactwaatgttacgagcactgattcctgtgtacctcaggctctggaaatggaattcttagagctagtgctgcggtgagggactattcaaatcagtatttctaaaaacagtagtttgccagtcagcccacagatgacagcactcagacatgcttgctgagtgatgaattctttccatttgctgggaggtacccaacagcagctttgtctgtgttcttycttaatgtatagggatgtacgcacacgagtggatggaccaaggaatacattattaatggagacktttatacctgaatggaa

SEQ ID NO: 80253 - DNA, 600 bp, Chicken  19866894372360_2
aaggactgtgctgatgcaacaggggaggaatataaatgaagaaagttgttggttctgttcccccctccgaggtattagaaagtgatctctcaaagcagcagcttaagcaaattgtttattccttaaacatgtttgcagcttgtatgagacattctgtctcacttcatagtcaaaagaaaagactgtgacattgcttgcaagaatctgtcataaagtatttctaatgcagatggttccctggctgcgttttccccttcaaaaaagccacagctccttccctttattcccttccwtggactwaatgttacgagcactgattcctgtgtacctcaggctctggaaatggaattcttagagctagtgctgcggtgagggactattcaaatcagtatttctaaaaacagtagtttgccagtcagcccacagatgacagcactcagacatgcttgctgagtgatgaattctttccatttgctgggaggtacccaacagcagctttgtctgtgttcttycttaatgtatagggatgtacgcacacgagtggatggaccaaggaatacattattaatggagacktttatacctgaatggaatttctta

SEQ ID NO: 80254 - DNA, 600 bp, Chicken  19866894372360_3
aagtatttctaatgcagatggttccctggctgcgttttccccttcaaaaaagccacagctccttccctttattcccttccwtggactwaatgttacgagcactgattcctgtgtacctcaggctctggaaatggaattcttagagctagtgctgcggtgagggactattcaaatcagtatttctaaaaacagtagtttgccagtcagcccacagatgacagcactcagacatgcttgctgagtgatgaattctttccatttgctgggaggtacccaacagcagctttgtctgtgttcttycttaatgtatagggatgtacgcacacgagtggatggaccaaggaatacattattaatggagacktttatacctgaatggaatttcttattttcaggcaagctgttacctgtaatctcgtagaaggcaggcagcaatgctgcatggtaccagcaaagggagatgctatgcactgtactggggaactgtaattacaacgtcattctggctcgttaaggataactgcagtctttaaaaccgttaaaccagagggaggttaccagtgtgggaagagctgttctgcagagagcgtgctggatcgt

SEQ ID NO: 80255 - DNA, 600 bp, Chicken  19866894372360_4
ccctttattcccttccwtggactwaatgttacgagcactgattcctgtgtacctcaggctctggaaatggaattcttagagctagtgctgcggtgagggactattcaaatcagtatttctaaaaacagtagtttgccagtcagcccacagatgacagcactcagacatgcttgctgagtgatgaattctttccatttgctgggaggtacccaacagcagctttgtctgtgttcttycttaatgtatagggatgtacgcacacgagtggatggaccaaggaatacattattaatggagacktttatacctgaatggaatttcttattttcaggcaagctgttacctgtaatctcgtagaaggcaggcagcaatgctgcatggtaccagcaaagggagatgctatgcactgtactggggaactgtaattacaacgtcattctggctcgttaaggataactgcagtctttaaaaccgttaaaccagagggaggttaccagtgtgggaagagctgttctgcagagagcgtgctggatcgtaaggccaggaggagtgctgaggttgctgacgcagttcagtgaaccattcccttgcacttaatga

SEQ ID NO: 80256 - DNA, 600 bp, Chicken  19866894372361_1
attggtctgttttcacacagatgcacaattaagaatttactcagaattgatacataatgcaataaattatcaagtacaggaaccattcgtgcactaacaaccgctaccattgctcttcacgggtaaagctgaagcatgtccaaatggcacttggttgaaaggaaagtaatactgggacttgaccgttttttatattcgttacctacaacattcaaagtaaccgaccatctactacttcacattgcaagaggcttgttttccaaagatgagttccaatgaccagaaatacaaatgagatcrgtttgaatccatgatgaagattgttaaacggtgtatttctgaagaaagcggtcaaatgcatcataaatcgcttgcctaaagcagggacaaagaagttaattgtagatcacttgtatattttagtaaaggacagactctttccatttatttcaaaattaaacgtatcatcacaacttgaaaatagcattcagtaaaaatatggtattctttttccttcatttacatcacacttcratctagtaatatgtttcrggacttaaccagactacttaccacctttcacaggaatgcaaattttaa

SEQ ID NO: 80257 - DNA, 600 bp, Chicken  19866894372361_2
cttcacattgcaagaggcttgttttccaaagatgagttccaatgaccagaaatacaaatgagatcrgtttgaatccatgatgaagattgttaaacggtgtatttctgaagaaagcggtcaaatgcatcataaatcgcttgcctaaagcagggacaaagaagttaattgtagatcacttgtatattttagtaaaggacagactctttccatttatttcaaaattaaacgtatcatcacaacttgaaaatagcattcagtaaaaatatggtattctttttccttcatttacatcacacttcratctagtaatatgtttcrggacttaaccagactacttaccacctttcacaggaatgcaaattttaattgaggattcttgtactaaatgtgtcaagaagtatgtcagacatgcaacactaattatttttgagggtgatgtttcaaaatagcagtaagctgggagttcacatatgttgacctggtacattgctattccttcccaatgttgcttagacttcctaaatgggatgtacactcagttgctaatttcttatattttaaaattaacaccacaagtatttaccttttaaaaactaagga

SEQ ID NO: 80258 - DNA, 600 bp, Chicken  19866894372361_3
ttgttttccaaagatgagttccaatgaccagaaatacaaatgagatcrgtttgaatccatgatgaagattgttaaacggtgtatttctgaagaaagcggtcaaatgcatcataaatcgcttgcctaaagcagggacaaagaagttaattgtagatcacttgtatattttagtaaaggacagactctttccatttatttcaaaattaaacgtatcatcacaacttgaaaatagcattcagtaaaaatatggtattctttttccttcatttacatcacacttcratctagtaatatgtttcrggacttaaccagactacttaccacctttcacaggaatgcaaattttaattgaggattcttgtactaaatgtgtcaagaagtatgtcagacatgcaacactaattatttttgagggtgatgtttcaaaatagcagtaagctgggagttcacatatgttgacctggtacattgctattccttcccaatgttgcttagacttcctaaatgggatgtacactcagttgctaatttcttatattttaaaattaacaccacaagtatttaccttttaaaaactaaggaacggcatgtatataaatg

SEQ ID NO: 80259 - DNA, 600 bp, Chicken  19866894372367_1
ttatagttgttgtgaacattttcatcaccgcctttggagttcagaagtcaggtgccaagtcagagtaaaggcagtgagtacaaggtgagtatgggctctgtgccataagacagcgggatgtagcacacaagaatgcactgcccaccgtggcataacttgaaaaagagcagtgtgtttccttgcatcattccaaactttacagataaatgagttgtcttcaaactgctgcaaaagcagaagctgcactgtaataacagtaggagttcccagcatttgtaaatgcagagttcaaaagttgayggcagtgcctaactttgccagggaccccatgtgtgcgtctcagataggaagtgacaagggcttccttctggcttaaccactcctttatctcattgctgactaagccaattaggaaaataataatatattgcttcctctaaatgtcttttttttttttgtaaggaaagttctgtaatatatggcacccagtctgttaggagtactgaattcttagtctttagccagtaaactgctagggctgataagtcctacatacaacagcagacctcatgggagcccttcagttcctacacagataat

SEQ ID NO: 80260 - DNA, 600 bp, Chicken  19866894372379_1
caagatgtattctttaattagaataagacattatgaaaaaggtggattattattttctcattacctcctgctaaaataccttggcctcccatcaccatatcaatcagaataaagagcattatctgcttagcggactacgacccggacttaccacacaacagtggcacagctcaagttcacactggactgcagaatcgttgctgatacaatacatcaggaacagttcatagcaggactgcccgaaaactcagagtgataatcggttaaaacaagtaccagcaagaaatttccttaccttaratgaagagatcgcttaacccagtctgcgcattctgcctgcaggctctgagtttgggaggtcacttttccttcaaacagcatttcatcaatatcccaaaatagctgatgcactctctgtgtgttggctttatcaaattcctacatatcataaaattaatagttgttggtaaacatttatatctaaaacaacatatttaagaatgggacaactgatactggactgagcatctcagaatgatctccagactacctactttggacaaaactcatatgctgcagtgcaaaaagagaagcagctgg

SEQ ID NO: 80261 - DNA, 600 bp, Chicken  19866894372379_2
gcattctgcctgcaggctctgagtttgggaggtcacttttccttcaaacagcatttcatcaatatcccaaaatagctgatgcactctctgtgtgttggctttatcaaattcctacatatcataaaattaatagttgttggtaaacatttatatctaaaacaacatatttaagaatgggacaactgatactggactgagcatctcagaatgatctccagactacctactttggacaaaactcatatgctgcagtgcaaaaagagaagcagctggcttgatcaaggtgctgcagcagcgagytagaaacctacattattctgaagtcartgggtaacagagctgcctacgagcaaccaacagaaaayctcaattacaaggtttcacagctccgactccctttttaatacagcatrcacctctgggacacaaggcaccaaagcatcctgcttcttcaagtggaacatttcctttctgggtagaacagcaaagaggagacataacctacggttgggaaacagctctgaktgtgaaaaacagcctcttcactgarctcaacacaaccagaattggatgagttcagaagcacacaaaaacagaaaa

SEQ ID NO: 80262 - DNA, 600 bp, Chicken  19866894372379_3
ggaggtcacttttccttcaaacagcatttcatcaatatcccaaaatagctgatgcactctctgtgtgttggctttatcaaattcctacatatcataaaattaatagttgttggtaaacatttatatctaaaacaacatatttaagaatgggacaactgatactggactgagcatctcagaatgatctccagactacctactttggacaaaactcatatgctgcagtgcaaaaagagaagcagctggcttgatcaaggtgctgcagcagcgagytagaaacctacattattctgaagtcartgggtaacagagctgcctacgagcaaccaacagaaaayctcaattacaaggtttcacagctccgactccctttttaatacagcatrcacctctgggacacaaggcaccaaagcatcctgcttcttcaagtggaacatttcctttctgggtagaacagcaaagaggagacataacctacggttgggaaacagctctgaktgtgaaaaacagcctcttcactgarctcaacacaaccagaattggatgagttcagaagcacacaaaaacagaaaaggccagcgaggtgggcacaagcacatt

SEQ ID NO: 80263 - DNA, 600 bp, Chicken  19866894372379_4
cccaaaatagctgatgcactctctgtgtgttggctttatcaaattcctacatatcataaaattaatagttgttggtaaacatttatatctaaaacaacatatttaagaatgggacaactgatactggactgagcatctcagaatgatctccagactacctactttggacaaaactcatatgctgcagtgcaaaaagagaagcagctggcttgatcaaggtgctgcagcagcgagytagaaacctacattattctgaagtcartgggtaacagagctgcctacgagcaaccaacagaaaayctcaattacaaggtttcacagctccgactccctttttaatacagcatrcacctctgggacacaaggcaccaaagcatcctgcttcttcaagtggaacatttcctttctgggtagaacagcaaagaggagacataacctacggttgggaaacagctctgaktgtgaaaaacagcctcttcactgarctcaacacaaccagaattggatgagttcagaagcacacaaaaacagaaaaggccagcgaggtgggcacaagcacattgctgagggatcctggcaccctattgatgctagtatgtg

SEQ ID NO: 80264 - DNA, 600 bp, Chicken  19866894372379_5
acatatcataaaattaatagttgttggtaaacatttatatctaaaacaacatatttaagaatgggacaactgatactggactgagcatctcagaatgatctccagactacctactttggacaaaactcatatgctgcagtgcaaaaagagaagcagctggcttgatcaaggtgctgcagcagcgagytagaaacctacattattctgaagtcartgggtaacagagctgcctacgagcaaccaacagaaaayctcaattacaaggtttcacagctccgactccctttttaatacagcatrcacctctgggacacaaggcaccaaagcatcctgcttcttcaagtggaacatttcctttctgggtagaacagcaaagaggagacataacctacggttgggaaacagctctgaktgtgaaaaacagcctcttcactgarctcaacacaaccagaattggatgagttcagaagcacacaaaaacagaaaaggccagcgaggtgggcacaagcacattgctgagggatcctggcaccctattgatgctagtatgtgctacgttcattgtatactttgatatactgaaatggaaataatcagggt

SEQ ID NO: 80265 - DNA, 600 bp, Chicken  19866894372379_6
actttggacaaaactcatatgctgcagtgcaaaaagagaagcagctggcttgatcaaggtgctgcagcagcgagytagaaacctacattattctgaagtcartgggtaacagagctgcctacgagcaaccaacagaaaayctcaattacaaggtttcacagctccgactccctttttaatacagcatrcacctctgggacacaaggcaccaaagcatcctgcttcttcaagtggaacatttcctttctgggtagaacagcaaagaggagacataacctacggttgggaaacagctctgaktgtgaaaaacagcctcttcactgarctcaacacaaccagaattggatgagttcagaagcacacaaaaacagaaaaggccagcgaggtgggcacaagcacattgctgagggatcctggcaccctattgatgctagtatgtgctacgttcattgtatactttgatatactgaaatggaaataatcagggtccaaagcacatctgttcacttccacctgagttccccagacacttcagggatcacactgaaaagagatgggaaaacaactcttggccaggtaatgtcatgtcaggcttcctct

SEQ ID NO: 80266 - DNA, 600 bp, Chicken  19866894372379_7
agtgcaaaaagagaagcagctggcttgatcaaggtgctgcagcagcgagytagaaacctacattattctgaagtcartgggtaacagagctgcctacgagcaaccaacagaaaayctcaattacaaggtttcacagctccgactccctttttaatacagcatrcacctctgggacacaaggcaccaaagcatcctgcttcttcaagtggaacatttcctttctgggtagaacagcaaagaggagacataacctacggttgggaaacagctctgaktgtgaaaaacagcctcttcactgarctcaacacaaccagaattggatgagttcagaagcacacaaaaacagaaaaggccagcgaggtgggcacaagcacattgctgagggatcctggcaccctattgatgctagtatgtgctacgttcattgtatactttgatatactgaaatggaaataatcagggtccaaagcacatctgttcacttccacctgagttccccagacacttcagggatcacactgaaaagagatgggaaaacaactcttggccaggtaatgtcatgtcaggcttcctctagtagggctggaagtggcagatagg

SEQ ID NO: 80267 - DNA, 600 bp, Chicken  19866894372381_1
tccccctgaccttgctgcctgtgggtaccctgtaaaatgatgcatgggattgacaaatcccctcagcaccaaatgggtgctgaactccacgatgcttggtattttcctgaaagctgttgcagtactgtgactatgagaaattgcagatagtacagacttttcaaatgaaaaatgtcatcgggtacaaggtgaaccctggcagaatagagagaagggaaaatagaggcagggcagggcagtcagttacctagttataacccattaggagctttgcagtcttattcacggggcttttccttrcagcattcatcctgttgtgtagaaatcagtgtggtaccagaaatgttrggtggttatttaatctctgtcttgtattttaagttaatacgttgctagtttggcrcagatctgttgttaaatattttacaaacaccattgcacttctgtctcygtgtggtcctcccttaagagtctgtttattttgacctggtaaatgctctttcactctccatagctgctcctctgtgtctggatctcatctcaagaacagcacagttcttccccttcccacctaaaacatcacctggagtgcagccttgg

SEQ ID NO: 80268 - DNA, 600 bp, Chicken  19866894372381_2
attgacaaatcccctcagcaccaaatgggtgctgaactccacgatgcttggtattttcctgaaagctgttgcagtactgtgactatgagaaattgcagatagtacagacttttcaaatgaaaaatgtcatcgggtacaaggtgaaccctggcagaatagagagaagggaaaatagaggcagggcagggcagtcagttacctagttataacccattaggagctttgcagtcttattcacggggcttttccttrcagcattcatcctgttgtgtagaaatcagtgtggtaccagaaatgttrggtggttatttaatctctgtcttgtattttaagttaatacgttgctagtttggcrcagatctgttgttaaatattttacaaacaccattgcacttctgtctcygtgtggtcctcccttaagagtctgtttattttgacctggtaaatgctctttcactctccatagctgctcctctgtgtctggatctcatctcaagaacagcacagttcttccccttcccacctaaaacatcacctggagtgcagccttggatgtgggaagtctctgagaactcctcctgccattcccattgtccgggc

SEQ ID NO: 80269 - DNA, 600 bp, Chicken  19866894372381_3
ttcctgaaagctgttgcagtactgtgactatgagaaattgcagatagtacagacttttcaaatgaaaaatgtcatcgggtacaaggtgaaccctggcagaatagagagaagggaaaatagaggcagggcagggcagtcagttacctagttataacccattaggagctttgcagtcttattcacggggcttttccttrcagcattcatcctgttgtgtagaaatcagtgtggtaccagaaatgttrggtggttatttaatctctgtcttgtattttaagttaatacgttgctagtttggcrcagatctgttgttaaatattttacaaacaccattgcacttctgtctcygtgtggtcctcccttaagagtctgtttattttgacctggtaaatgctctttcactctccatagctgctcctctgtgtctggatctcatctcaagaacagcacagttcttccccttcccacctaaaacatcacctggagtgcagccttggatgtgggaagtctctgagaactcctcctgccattcccattgtccgggctgtattgcctgttcactgtagatacttgatgccactctgaaaatgttcactctaa

SEQ ID NO: 80270 - DNA, 600 bp, Chicken  19866894372381_4
acagacttttcaaatgaaaaatgtcatcgggtacaaggtgaaccctggcagaatagagagaagggaaaatagaggcagggcagggcagtcagttacctagttataacccattaggagctttgcagtcttattcacggggcttttccttrcagcattcatcctgttgtgtagaaatcagtgtggtaccagaaatgttrggtggttatttaatctctgtcttgtattttaagttaatacgttgctagtttggcrcagatctgttgttaaatattttacaaacaccattgcacttctgtctcygtgtggtcctcccttaagagtctgtttattttgacctggtaaatgctctttcactctccatagctgctcctctgtgtctggatctcatctcaagaacagcacagttcttccccttcccacctaaaacatcacctggagtgcagccttggatgtgggaagtctctgagaactcctcctgccattcccattgtccgggctgtattgcctgttcactgtagatacttgatgccactctgaaaatgttcactctaaatttgcactcatcttctgccccttcccactgtgttttcttgtggttgt

SEQ ID NO: 80271 - DNA, 600 bp, Chicken  19866894372388_1
cctggcctggccctgcctggctgtgtcttgcccggccttgcctggccttacggaacctggtctggcctggccttgccttgcctggcatttccttgctgtgcctggccttctcttttttggcctggcctggccaggcctggcctggacttgccttgccttgtctttccttgtcttccctggcattgccttgccttgcctggcctagttggtccttgccttgccttgccttggcttgcctggtctggccttgccttttttgtcctggcctggcctttccttgccttgcctgctttggcctawcctggcctggcctatccttgcyttgcctggcctggacttcattgagctgstctggctgtaccttgacttgccttgcattttctggcttgtactggccttccctggccttgccttgcctggcctggcctggcgtgctctggcctggcctggcctcatgccgactgtccttgcctgtccttgcctgtcctgtttttgcccttcatggcctggccttgcctttccttgcctggcctcaccaggccaggccttgcttggccttgcttggcctgccataaccttgcctggccttgccaggcctgg

SEQ ID NO: 80272 - DNA, 600 bp, Chicken  19866894372388_2
gtgtcttgcccggccttgcctggccttacggaacctggtctggcctggccttgccttgcctggcatttccttgctgtgcctggccttctcttttttggcctggcctggccaggcctggcctggacttgccttgccttgtctttccttgtcttccctggcattgccttgccttgcctggcctagttggtccttgccttgccttgccttggcttgcctggtctggccttgccttttttgtcctggcctggcctttccttgccttgcctgctttggcctawcctggcctggcctatccttgcyttgcctggcctggacttcattgagctgstctggctgtaccttgacttgccttgcattttctggcttgtactggccttccctggccttgccttgcctggcctggcctggcgtgctctggcctggcctggcctcatgccgactgtccttgcctgtccttgcctgtcctgtttttgcccttcatggcctggccttgcctttccttgcctggcctcaccaggccaggccttgcttggccttgcttggcctgccataaccttgcctggccttgccaggcctggatgagcctggactgcccaagac

SEQ ID NO: 80273 - DNA, 600 bp, Chicken  19866894372388_3
cggaacctggtctggcctggccttgccttgcctggcatttccttgctgtgcctggccttctcttttttggcctggcctggccaggcctggcctggacttgccttgccttgtctttccttgtcttccctggcattgccttgccttgcctggcctagttggtccttgccttgccttgccttggcttgcctggtctggccttgccttttttgtcctggcctggcctttccttgccttgcctgctttggcctawcctggcctggcctatccttgcyttgcctggcctggacttcattgagctgstctggctgtaccttgacttgccttgcattttctggcttgtactggccttccctggccttgccttgcctggcctggcctggcgtgctctggcctggcctggcctcatgccgactgtccttgcctgtccttgcctgtcctgtttttgcccttcatggcctggccttgcctttccttgcctggcctcaccaggccaggccttgcttggccttgcttggcctgccataaccttgcctggccttgccaggcctggatgagcctggactgcccaagactgtcctgacctggcctggcctggccatg

SEQ ID NO: 80274 - DNA, 599 bp, Chicken  19866894372391_1
  misc_feature (1)..(169): n is any nucleotide
nnnnnnnnnnnnnnnnnnnnnnnnnnnnnnnnnnnnnnnnnnnnnnnnnnnnnnnnnnnnnnnnnnnnnnnnnnnnnnnnnnnnnnnnnnnnnnnnnnnnnnnnnnnnnnnnnnnnnnnnnnnnnnnnnnnnnnnnnnnnnnnnnnnnnnnnnnnnnnnnnnnnnnnnnattctaaaatcatagagtcataggatggcctgggttgaaaagaacctcaatgatcatctagtttcaaccccctgctatgtgcagggtcgccaaccaccagaccaggctgcccagagccacatccagcctgrccttgaatgcctccaggaatggggcatccacaacctccttgggcaacctgttccagtgcgtcaccaccctctgagtgaaaaacttcctccctaatatctaacctaaacttcccctgtcttagtttaaaaccattcccccttgtcctctcactgttacgtaaacagtcattccccttcctgtttatatgctcccttcaaatattggaaggccacaataatgtctccccggagccttctcttctccaagctaaacaagcccagttccctcaacttttcttcataggagagctgccccagcc

SEQ ID NO: 80275 - DNA, 600 bp, Chicken  19866894372395_1
taactagtgttagagtggaaggcaataacaacaaaccacatatatgtgatttagtatctaaaattagtataattagtggttatagtgtttgcttcaagagtggatgctaaatatgaaagtactgggaggctatatatacggaataagaagttagacatcacaaatttgctacagaattagatcattaaagtcttaggagtcttggataagtctgttttgtttagattctgagccatattgttgatacagtgtctggaaagtcagagcatgatagaatttttgacactgagatattttccwgggatgttgcacctccagggagaagctacrtgggcaagttcctccctctcagtctcatgataatgaaacattgtcaatrgagtgaacttctttccrtatcacatacaaagtttgaagacagtattctttcttggtgcgatgatttacctacagagtctcccagatcatcccagtgggtgtggacatgtctaagaatgctcacatgtggacatgtctaagaaagctaccctcacacgctgcagaaataagttgtttttggcagcagaacacaggctggcaagctgcaaagctgctttttac

SEQ ID NO: 80276 - DNA, 600 bp, Chicken  19866894372395_2
acaaaccacatatatgtgatttagtatctaaaattagtataattagtggttatagtgtttgcttcaagagtggatgctaaatatgaaagtactgggaggctatatatacggaataagaagttagacatcacaaatttgctacagaattagatcattaaagtcttaggagtcttggataagtctgttttgtttagattctgagccatattgttgatacagtgtctggaaagtcagagcatgatagaatttttgacactgagatattttccwgggatgttgcacctccagggagaagctacrtgggcaagttcctccctctcagtctcatgataatgaaacattgtcaatrgagtgaacttctttccrtatcacatacaaagtttgaagacagtattctttcttggtgcgatgatttacctacagagtctcccagatcatcccagtgggtgtggacatgtctaagaatgctcacatgtggacatgtctaagaaagctaccctcacacgctgcagaaataagttgtttttggcagcagaacacaggctggcaagctgcaaagctgctttttacaatgcaatgcagaaacagagccaccagaac

SEQ ID NO: 80277 - DNA, 600 bp, Chicken  19866894372395_3
ttatagtgtttgcttcaagagtggatgctaaatatgaaagtactgggaggctatatatacggaataagaagttagacatcacaaatttgctacagaattagatcattaaagtcttaggagtcttggataagtctgttttgtttagattctgagccatattgttgatacagtgtctggaaagtcagagcatgatagaatttttgacactgagatattttccwgggatgttgcacctccagggagaagctacrtgggcaagttcctccctctcagtctcatgataatgaaacattgtcaatrgagtgaacttctttccrtatcacatacaaagtttgaagacagtattctttcttggtgcgatgatttacctacagagtctcccagatcatcccagtgggtgtggacatgtctaagaatgctcacatgtggacatgtctaagaaagctaccctcacacgctgcagaaataagttgtttttggcagcagaacacaggctggcaagctgcaaagctgctttttacaatgcaatgcagaaacagagccaccagaacaagtccttttctgtttacatagcatcatgcagcttctttacctgacagc

SEQ ID NO: 80278 - DNA, 600 bp, Chicken  19866894372395_4
agagtggatgctaaatatgaaagtactgggaggctatatatacggaataagaagttagacatcacaaatttgctacagaattagatcattaaagtcttaggagtcttggataagtctgttttgtttagattctgagccatattgttgatacagtgtctggaaagtcagagcatgatagaatttttgacactgagatattttccwgggatgttgcacctccagggagaagctacrtgggcaagttcctccctctcagtctcatgataatgaaacattgtcaatrgagtgaacttctttccrtatcacatacaaagtttgaagacagtattctttcttggtgcgatgatttacctacagagtctcccagatcatcccagtgggtgtggacatgtctaagaatgctcacatgtggacatgtctaagaaagctaccctcacacgctgcagaaataagttgtttttggcagcagaacacaggctggcaagctgcaaagctgctttttacaatgcaatgcagaaacagagccaccagaacaagtccttttctgtttacatagcatcatgcagcttctttacctgacagcttattttgtccagaatg

SEQ ID NO: 80279 - DNA, 600 bp, Chicken  19866894372400_1
actctttttgaatactggccaccaagagatgtgactgcacccacttgaatgagacctgaaccctaaagcgtttgagttcttatctgtccctggtgctgagtggttgctttttcataagtcttgcatctcttgtgttattattcttcccactgatgtgggaagaaaaaaaacccactgttttatggtttttttttgtttgtttatttgtttgtttttttaatttatgttatttattaattccctgcttcttccagggaattgtgtatttattacttctgtcctattgttgtctgagagtgwagcacttgtcctcaagcagaatccagctgatccctagaaaatcctgcgtgtctcaggggggaatccacaacaccagcaatgcagcctgtgtgagcaaaaaagtatgagattctgagcacagagacaaaccttacatttattttgcatttttggaaagatatctatatcctcttgggattctgacttaggtgtatgaatagcctgagacaytatttgaggattaagtaaaggaaagagaatgtctcctgtctcacatgwttaaacatctcagcttttgttggggcttgcacraatatgcac

SEQ ID NO: 80280 - DNA, 600 bp, Chicken  19866894372400_2
gtttttttaatttatgttatttattaattccctgcttcttccagggaattgtgtatttattacttctgtcctattgttgtctgagagtgwagcacttgtcctcaagcagaatccagctgatccctagaaaatcctgcgtgtctcaggggggaatccacaacaccagcaatgcagcctgtgtgagcaaaaaagtatgagattctgagcacagagacaaaccttacatttattttgcatttttggaaagatatctatatcctcttgggattctgacttaggtgtatgaatagcctgagacaytatttgaggattaagtaaaggaaagagaatgtctcctgtctcacatgwttaaacatctcagcttttgttggggcttgcacraatatgcacaggaccccaagtagcagagttatagatactcgctaagtgtactagtggtgcagacttcagagatgtaggcatttaaatactttgaggactaacagcagcttaatgatcttcagttttgaccctagactttaggccttcctgtggcatttgccttacaggagtagtcacragtaagttgtgaccctttgtatttgagaagctataatgctg

SEQ ID NO: 80281 - DNA, 600 bp, Chicken  19866894372400_3
ttgtgtatttattacttctgtcctattgttgtctgagagtgwagcacttgtcctcaagcagaatccagctgatccctagaaaatcctgcgtgtctcaggggggaatccacaacaccagcaatgcagcctgtgtgagcaaaaaagtatgagattctgagcacagagacaaaccttacatttattttgcatttttggaaagatatctatatcctcttgggattctgacttaggtgtatgaatagcctgagacaytatttgaggattaagtaaaggaaagagaatgtctcctgtctcacatgwttaaacatctcagcttttgttggggcttgcacraatatgcacaggaccccaagtagcagagttatagatactcgctaagtgtactagtggtgcagacttcagagatgtaggcatttaaatactttgaggactaacagcagcttaatgatcttcagttttgaccctagactttaggccttcctgtggcatttgccttacaggagtagtcacragtaagttgtgaccctttgtatttgagaagctataatgctgctacaaaaacagtatagctgcaagtctgaatccagtggaactggtggt

SEQ ID NO: 80282 - DNA, 600 bp, Chicken  19866894372400_4
tgagagtgwagcacttgtcctcaagcagaatccagctgatccctagaaaatcctgcgtgtctcaggggggaatccacaacaccagcaatgcagcctgtgtgagcaaaaaagtatgagattctgagcacagagacaaaccttacatttattttgcatttttggaaagatatctatatcctcttgggattctgacttaggtgtatgaatagcctgagacaytatttgaggattaagtaaaggaaagagaatgtctcctgtctcacatgwttaaacatctcagcttttgttggggcttgcacraatatgcacaggaccccaagtagcagagttatagatactcgctaagtgtactagtggtgcagacttcagagatgtaggcatttaaatactttgaggactaacagcagcttaatgatcttcagttttgaccctagactttaggccttcctgtggcatttgccttacaggagtagtcacragtaagttgtgaccctttgtatttgagaagctataatgctgctacaaaaacagtatagctgcaagtctgaatccagtggaactggtggtatattgctgcttttgaaactgtacaactgtaac

SEQ ID NO: 80283 - DNA, 600 bp, Chicken  19866894372400_5
tcttgggattctgacttaggtgtatgaatagcctgagacaytatttgaggattaagtaaaggaaagagaatgtctcctgtctcacatgwttaaacatctcagcttttgttggggcttgcacraatatgcacaggaccccaagtagcagagttatagatactcgctaagtgtactagtggtgcagacttcagagatgtaggcatttaaatactttgaggactaacagcagcttaatgatcttcagttttgaccctagactttaggccttcctgtggcatttgccttacaggagtagtcacragtaagttgtgaccctttgtatttgagaagctataatgctgctacaaaaacagtatagctgcaagtctgaatccagtggaactggtggtatattgctgcttttgaaactgtacaactgtaactctaaatccagagattggtggccactggcaaaacacagcaagagaggggtctcggaggattcaccataattaaaacaatgccttctacaccttgttctatacttttaatacagggactacttgcacgtgtgcgtgttggagtatattacctttgcactctgttttattctgcttttat

SEQ ID NO: 80284 - DNA, 599 bp, Chicken  19866894372410_1
  misc_feature (1)..(243): n is any nucleotide
nnnnnnnnnnnnnnnnnnnnnnnnnnnnnnnnnnnnnnnnnnnnnnnnnnnnnnnnnnnnnnnnnnnnnnnnnnnnnnnnnnnnnnnnnnnnnnnnnnnnnnnnnnnnnnnnnnnnnnnnnnnnnnnnnnnnnnnnnnnnnnnnnnnnnnnnnnnnnnnnnnnnnnnnnnnnnnnnnnnnnnnnnnnnnnnnnnnnnnnnnnnnnnnnnnnnnnnnnnnnnnnnnnnnnnnnnnnnnnnnnnnggaaaggctgcaccttgcagctcccatctccatggcaatacaccagctcacacacakgaggagccgatggcagtgcaaatctcagcacaaaggcaaagactgggggatagcagagccctctccagtgccagcccatgagaaaggtgggctgaaggagccaagtgtgtgagatgctygcttttgtgagaagcagagcatgccagcctataagtaagagaaaagaaaacctcatgagggcgcatccrgatccttccttttacaggaagatgacaaaagatacacagctgctgctcatgccggggatcagcaaccaacagttgaattcccagtggtcctgccgagttatcagcatgctg

SEQ ID NO: 80285 - DNA, 599 bp, Chicken  19866894372410_2
  misc_feature (1)..(124): n is any nucleotide
nnnnnnnnnnnnnnnnnnnnnnnnnnnnnnnnnnnnnnnnnnnnnnnnnnnnnnnnnnnnnnnnnnnnnnnnnnnnnnnnnnnnnnnnnnnnnnnnnnnnnnnnnnnnnnnnnnnnnnnnnnnnggaaaggctgcaccttgcagctcccatctccatggcaatacaccagctcacacacakgaggagccgatggcagtgcaaatctcagcacaaaggcaaagactgggggatagcagagccctctccagtgccagcccatgagaaaggtgggctgaaggagccaagtgtgtgagatgctygcttttgtgagaagcagagcatgccagcctataagtaagagaaaagaaaacctcatgagggcgcatccrgatccttccttttacaggaagatgacaaaagatacacagctgctgctcatgccggggatcagcaaccaacagttgaattcccagtggtcctgccgagttatcagcatgctgaatatcttattgagaggcaaaaagttcagcctgccatatgaccactgaaagctgtcaacttctagcctatcctgggcttcctctgtgggatccttccccatgaatcatggactgctctc

SEQ ID NO: 80286 - DNA, 599 bp, Chicken  19866894372410_3
  misc_feature (1)..(55): n is any nucleotide
nnnnnnnnnnnnnnnnnnnnnnnnnnnnnnnnnnnnnnnnnnnnnnnnnnnnnnnggaaaggctgcaccttgcagctcccatctccatggcaatacaccagctcacacacakgaggagccgatggcagtgcaaatctcagcacaaaggcaaagactgggggatagcagagccctctccagtgccagcccatgagaaaggtgggctgaaggagccaagtgtgtgagatgctygcttttgtgagaagcagagcatgccagcctataagtaagagaaaagaaaacctcatgagggcgcatccrgatccttccttttacaggaagatgacaaaagatacacagctgctgctcatgccggggatcagcaaccaacagttgaattcccagtggtcctgccgagttatcagcatgctgaatatcttattgagaggcaaaaagttcagcctgccatatgaccactgaaagctgtcaacttctagcctatcctgggcttcctctgtgggatccttccccatgaatcatggactgctctccaacatcactctgcaaaattaaaacgagcagctgtggcaagaagcaattcattatgcattgagctcctg

SEQ ID NO: 80287 - DNA, 600 bp, Chicken  19866894372410_4
caacagttgaattcccagtggtcctgccgagttatcagcatgctgaatatcttattgagaggcaaaaagttcagcctgccatatgaccactgaaagctgtcaacttctagcctatcctgggcttcctctgtgggatccttccccatgaatcatggactgctctccaacatcactctgcaaaattaaaacgagcagctgtggcaagaagcaattcattatgcattgagctcctgagacacacagcacgaggcaaggttgggcaaaaaccacctaagtgtatgaagagacagcccaggatcyttcctaaaggaaacatacaacgggggaggtgaatcaggagttgcacagaagaactggcacacagagcatccctcctgcacaggggacagtctccactatggcccacacaggcccaagctgccagaggcaaagcagcaccaaacctaccagcaacacagctgtcccctacctgcaaccgtgtcccctcccttcccacatcagcagagagtgagcacttatgcccaatcacctgcactcttccccacccccctttcctaacagcagtcagcatgaaagctgcatggcagcaccaagacaagc

SEQ ID NO: 80288 - DNA, 600 bp, Chicken  19866894372420_1
cacatattcattttctcaatgatttgaagatcagttatgctttttttaaatataaaaggtgtgtgcttttgatgtttcttttgtggttgttgttattgttttaatattaatctgctaatctactgcaatttgtaatctaaagatattccttcctcatcaccgatattgctcgtgaacactcttggttaaactgagcccttatttttgatccatgagtccatttacttttagcttgggcttccaggaccatctgtatgaatcatgctgaggagtatgttgagaaggctggaatctctgctwtttactttgctttaaatactgtgtgtattcagcaacatcctgctttgcacacaaccatcatatctgtatgaggaatttgcatcagtgtgactaaattgcttttgctgcatcattgcatgtttgctttatgtaaataaggcccttacttttggctgtgctgaactaacaagaagaaaaaggcaatgaaaactttctctaaggttgtttgaagatagggttctgaatatacacacagggaaagtaagaatggttggatggtttatacgtgctgttacttacagagttgattttcaatgaagc

SEQ ID NO: 80289 - DNA, 533 bp, Chicken  19866894372420_2
catcatatctgtatgaggaatttgcatcagtgtgactaaattgcttttgctgcatcattgcatgtttgctttatgtaaataaggcccttacttttggctgtgctgaactaacaagaagaaaaaggcaatgaaaactttctctaaggttgtttgaagatagggttctgaatatacacacagggaaagtaagaatggttggatggtttatacgtgctgttacttacagagttgattttcaatgaagccaagctcattagaaaattcagaatcagttaatttaagcctaagaagaatgttgcraatttcctagcagatattgcaaaccttatctcatttactgaaaattttatttgtagtagcaattagcgactaaatgaaatttacttcttaaaaagtctttgagctatttagtttccctctcgttgtgtctcaggtctcattcgcacaactaacgtaacctgcactggaaaggcatcaggaccagctggagccaagccagctcattggttttattacgcaacttctctgagcag

SEQ ID NO: 80290 - DNA, 599 bp, Chicken  19866894372423_1
  misc_feature (1)..(25): n is any nucleotide
nnnnnnnnnnnnnnnnnnnnnnnnngtgggggcgtggaaaaaaagaagaaagaaatttggccgggtgagatatggtaacgcgttgatttattcccggcgtaatgaagtttgcaaacgaataagcggccgcggtgattcactgtatcctacaggagtgtcaagtgttgcggccagattactaatttatgaaatacgtttaacgtagcggggtggtggcacacgtaaaaatagaaggggaggcagaggcggctgctctgctttgttgttgtttctctctttctgactttctttctttctttyttttttctttcttttctggaaatccatattttccgtgatcgctcggtttcacttccactgtttatttctgagggtggtggttcctttgcaagcgtccctttagatacagctctgtgcatacacgtgcgtacctacagggccgtgtgagccttcggcgatgccaaatttgccagcggaggtggtttcctggccaccagcttccaggagcgctgcatgaagcagcagagcggagggctcagtgctgagccgggtgccctggcaccgctctccccgtgytctcagtggcgatgcctggatgg

SEQ ID NO: 80291 - DNA, 599 bp, Chicken  19866894372423_2
  misc_feature (1)..(18): n is any nucleotide
nnnnnnnnnnnnnnnnnngtgggggcgtggaaaaaaagaagaaagaaatttggccgggtgagatatggtaacgcgttgatttattcccggcgtaatgaagtttgcaaacgaataagcggccgcggtgattcactgtatcctacaggagtgtcaagtgttgcggccagattactaatttatgaaatacgtttaacgtagcggggtggtggcacacgtaaaaatagaaggggaggcagaggcggctgctctgctttgttgttgtttctctctttctgactttctttctttctttyttttttytttcttttctggaaatccatattttccgtgatcgctcggtttcacttccactgtttatttctgagggtggtggttcctttgcaagcgtccctttagatacagctctgtgcatacacgtgcgtacctacagggccgtgtgagccttcggcgatgccaaatttgccagcggaggtggtttcctggccaccagcttccaggagcgctgcatgaagcagcagagcggagggctcagtgctgagccgggtgccctggcaccgctctccccgtgytctcagtggcgatgcctggatgggaaactt

SEQ ID NO: 80292 - DNA, 600 bp, Chicken  19866894372423_3
tttctgactttctttctttctttyttttttctttcttttctggaaatccatattttccgtgatcgctcggtttcacttccactgtttatttctgagggtggtggttcctttgcaagcgtccctttagatacagctctgtgcatacacgtgcgtacctacagggccgtgtgagccttcggcgatgccaaatttgccagcggaggtggtttcctggccaccagcttccaggagcgctgcatgaagcagcagagcggagggctcagtgctgagccgggtgccctggcaccgctctccccgtgytctcagtggcgatgcctggatgggaaacttatttaagatctggaagagagcagttttgctcatgcgagatccgtaatccggtcattcagcactgatgtccccgatgaaggagtgccaaggagagatgatgcccactcatcttcgctgggtgcaggatgggggagaaggagcagcaccgccgtgctgcgctgaaggcacggctgggctccatgcgctgcgttaacccaggctccctcattcacacagcacaaaaggcactccattagggagacactctttcagtaagttttatttgagatg

SEQ ID NO: 80293 - DNA, 600 bp, Chicken  19866894372425_1
tgtgctagttatgagctgcaaaaataaaatcttgcaatcctgcagctttctggatagcctgttatgttagttaattctgaaaattgatcaaaacaggaaatctcatcccaaggagacagaaggaaaaagccccagatccactgtaccaagcaattaggtattcatgtattttcaaggacacattctgtaagaaggtagttattacttgtttgtttttaacgaaagagtagacatgttactcccaggtctgcttaaaaaatagcttttcattataaatgctatccttgtgtacatgtgtgratgaacacccccatgttttcatccccttgtgatctttactttttacaaaagtggtaataaggtagtgactgcttctgttctcaatcactatctgtgcagccctcctgatgatagggtctagtccttgacttgggctcctctgtgcttctccaatactggtaatttccagtgtgaaattgaagcagcaattgccacttcagtgcagcagcttcaggtctgtgttgctttttcaaacccactgactgcagttttacacttactttcccagcagctgatttcttgccaagtcttgctacagct

SEQ ID NO: 80294 - DNA, 600 bp, Chicken  19866894372431_1
tttggtaacataagtggcctgtatcttctttcaagacagagtatcagtttatttcaaatttagagatattggccttgattcaaattcatggcagttatagaaaccaatgttccatggcttgattcaggtggcaagcattaaatctttttcctgctgtcatgcaacaacaactttaatacaaattagcactgccaaactcagtttcctgagctcagaagtccttgatactactccctgaattttactcatactttcacacggactgtgctctgctgaaattgttgtagctgacaagaaacraaaaaaacgacaatttaatgacactggattcagtattataattcatgacatcatagaaaatttaacatgcagttcttcattattttttttttaagtgrggtaaagctcaatcaaatgcacgcaggaaaaagaaaaaatggaaatttcatttctgcgagtcagatcttcccttcagaccaatccaattgtttgtgctgaaaccaatcctgccagtcaataacaactcacatttttcaagctactgattcagcttttgcaagagctttcttgcagtccaagaaaaaaaaatccaagcctcag

SEQ ID NO: 80295 - DNA, 561 bp, Chicken  19866894372431_2
ttcatggcagttatagaaaccaatgttccatggcttgattcaggtggcaagcattaaatctttttcctgctgtcatgcaacaacaactttaatacaaattagcactgccaaactcagtttcctgagctcagaagtccttgatactactccctgaattttactcatactttcacacggactgtgctctgctgaaattgttgtagctgacaagaaacaaaaaaaacgacaatttaatgacactggattcagtattataattcatgacatcatagaaaatttaacatgcagttcttcattatrttttttttaagtgrggtaaagctcaatcaaatgcacgcaggaaaaagaaaaaatggaaatttcatttctgcgagtcagatcttcccttcagaccaatccaattgtttgtgctgaaaccaatcctgccagtcaataacaactcacatttttcaagctactgattcagcttttgcaagagctttcttgcagtccaagaaaaaaaaatccaagcctcagaaaatacaaaaaagcaaaccaaaaggaagagtttttccagttttt

SEQ ID NO: 80296 - DNA, 561 bp, Chicken  19866894372431_3; identical to SEQ ID NO: 80295

SEQ ID NO: 80297 - DNA, 547 bp, Chicken  19866894372431_4
agaaaccaatgttccatggcttgattcaggtggcaagcattaaatctttttcctgctgtcatgcaacaacaactttaatacaaattagcactgccaaactcagtttcctgagctcagaagtccttgatactactccctgaattttactcatactttcacacggactgtgctctgctgaaattgttgtagctgacaagaaacaaaaaaaacgacaatttaatgacactggattcagtattataattcatgacatcatagaaaatttaacatgcagttcttcattattttttttttaagtgrggtaaagctcaatcaaatgcacgcaggaaaaagaaaaaatggaaatttcatttctgcgagtcagatcttcccttcagaccaatccaattgtttgtgctgaaaccaatcctgccagtcaataacaactcacatttttcaagctactgattcagcttttgcaagagctttcttgcagtccaagaaaaaaaaatccaagcctcagaaaatacaaaaaagcaaaccaaaaggaagagtttttccagttttt

SEQ ID NO: 80298 - DNA, 600 bp, Chicken  19866894372432_1
ttctaacatgtccttctctaaccagggcattggactttatgagctccataagacccttctaacacaaatcattctataattctatgattctaatagtaaatcagaaaatcagataacagtcacagcttccttatgcaaagaaggacagactaactttcttactgagacatatttttttcagtctgctcagagctaagttgagtctttataattcacaaaaattgaggttactcctcaggtgaaatcttagtatactgaaattaaaatatgcttaaattttatatagaatacttagtaatytgcaatgatgattacacactagatcaagcaagcaatgaccaaaaatgaaaaccctaaataagagatgtagaggaaggatgaatttaatctcaaagcagaacacattcaacagtctctctaaaactgtttaccagtctcacagggccatggtaatacgccacagtgctctgtggccaaggtgaaaggagaatttggactttgagcctacttagttctgtgtcttgctggtgagcttttcagggatgacttctatctttccataaggaattagatcaacttgatccagatctttcttcatga

SEQ ID NO: 80299 - DNA, 599 bp, Chicken  19866894372435_1
  misc_feature (1)..(149): n is any nucleotide
nnnnnnnnnnnnnnnnnnnnnnnnnnnnnnnnnnnnnnnnnnnnnnnnnnnnnnnnnnnnnnnnnnnnnnnnnnnnnnnnnnnnnnnnnnnnnnnnnnnnnnnnnnnnnnnnnnnnnnnnnnnnnnnnnnnnnnnnnnnnnnnnnnnnnatttacagacaacatgcaaggctctctggcaagatctcaagcacttgtcaattgtttcacaactttcacagagctgctggggctttacaggaggagttactttgtcttccaatagttttccaaaaaggaacagtcaactacaccagaagarggagcaagatggttccccatcccttatcctttctactctgaacccataggctctaactatattttttgctaaacactgagttataccagggtgaggtgagaggttcctcttctccaggtacagaagccctggaaagctctaacatcaggaagctcacctcccccgcagagtgcagcactccactgcaacatttgacaacagtcaatatccaaactgtgcacttacagatacatcagaacagtgccacccataaccaggaggaatctgctgacactggagtagaaatagacgatgttgac

SEQ ID NO: 80300 - DNA, 599 bp, Chicken  19866894372438_1
  misc_feature (1)..(53): n is any nucleotide
nnnnnnnnnnnnnnnnnnnnnnnnnnnnnnnnnnnnnnnnnnnnnnnnnnnnntcagaacccaaggtcagcttttaggggttgcctggtttacatcccaagccatagacaagtggggtgaactttccaaaggtcctgtcctagcacatcctgtgggactcaaggaagcattaacatgcactattgccatcccagacattaatctgagtatatactgcagacatcctcctgagcagtgtgtttatgtatgtcctattagctttatggctgtcctgctgattcgtccctgataacaagaccygtgtgcgctggactgttggtgagcctgtattgcagtgccttatgtctccactgtcaaaccattctacggaatgcatagactcctgttagcctcaagctgcatatataaattgcatattaactcgtattttctgtaacatcaataaggacaggctgatctaggaacaagcattagaggtgcaatgggctctgcaggctctgagccaccaggcacttcccactgcacctgcactgcatctccagcagcagcagctgggagaaagcttcttcctcttcgttattcatccttcacagtttcac

SEQ ID NO: 80301 - DNA, 600 bp, Chicken  19866894372446_1
cacagtaaactgcagcacttggcagactccagatattccccggctgtgtgtagagcagagtgaggactgtatcctatgtctgtggaagttctgaaagtctaccactgaatttactctgtctcatatcagagcttacctgcattgtttatctcattggccagagatacagcatctatgtcttttcagatgaaacaaataatattagtaatatattcacatatatattaaaattaataataataatccatgcctgacctcttccagtgtttcctcttgctaggtagttgcaaacttctgctmcagagctgacagacattatcgtgatgcaatgtttttctttggatttttataaaaggtcttggcttagatcagtagtagcagttttggtagtggtgaaccattccactgtggctttactttcagagaaactccccacatacttgtgtctccaccatgatttatgctgctgaactttccaagcccacagtggcaggtgagaaaggttatcccagctaccagaaacaaatccaccctgcaacagatgtgaggtgtttgcatagcaatcacacagacattcagatcaaatccatgctctgaatg

SEQ ID NO: 80302 - DNA, 600 bp, Chicken  19866894372446_2
atcccagctaccagaaacaaatccaccctgcaacagatgtgaggtgtttgcatagcaatcacacagacattcagatcaaatccatgctctgaatgggagcaaggatgccagcttttaatctctggattcaatttcataagtacatttccgcgagctgattgccaaggtcgtctctgaacaaagaaagaatttgactgagaagccaaaaccaaaattttttcaaaaagaaaaagagcatccatttctgtcttttactatcagtgtgttggagctatctaaatgtgttttccaacttgcatyggtggggattcagagcagtccactcctattcacagctcatcttagcatataaggattcatctgaaatgacccaacttggtaacaacagatggtacttttttgtgtagcagagcaaagcatcctgtgacgtgaggcagatacatgataaatctgtatgcctctctgtgtaaaatcctgcatagctttgcagcagtgaaaggctgcaagaggcaagaccctcagctgaaagcatggactgtattcgacattcattggtgccaaggcaatgctgtcatatgagccatgcagtgtatgcagagc

SEQ ID NO: 80303 - DNA, 600 bp, Chicken  19866894372447_1
ctgcagagtccataaggatgacatgagctgtgctttattagcagttaggttaatgtttggaaataaaaagactgatagttttatctgtttgatgatttggtgctgccaagagcgaccataagcacagctcaatggtgcatgaagagagtacaggctgacattcatttcccaccactagaatccaaacattagcacacaagtggtgcagcaggctggcgggggcaggcagccagcgtcgcagctattggtgtgactcaatgataatcattttccttcatggagatcttaaactccctgcartggaaggaaatagggatgggtgaggtggggtaacgttgaagcctggcagctcatctgtgtttgcccagctttcctgcgccctcagctgaaccacgccatagggctgaggactaaaaggcttttctctttttttttttyccctattattatttcacctgtgtgggcgtccttttttattttatttttatttttaattttcaatcccctcctcccaggtacattcttcagaaagcaataactgcaatgcagactcaccccaggcagagatactgacctgccatatgcagccagcagcaaata

SEQ ID NO: 80304 - DNA, 540 bp, Chicken  19866894372447_2
atgaagagagtacaggctgacattcatttcccaccactagaatccaaacattagcacacaagtggtgcagcaggctggcgggggcaggcagccagcgtcgcagctattggtgtgactcaatgataatcattttccttcatggagatcttaaactccctgcartggaaggaaatagggatgggtgaggtggggtaacgttgaagcctggcagctcatctgtgtttgcccagctttcctgcgccctcagctgaaccacgccatagggctgaggactaaaaggcttttctctttttttttttyccctattattatttcacctgtgtgggcgtccttttttattttatttttatttttaattttcaatcccctcctcccaggtacattcttcagaaagcaataactgcaatgcagactcaccccaggcagagatactgacctgccatatgcagccagcagcaaatacagcaattcatcaccacaaagcagtcggctggatggatcctgtggtcagctggcactgagacaacgtggggtttggca

SEQ ID NO: 80305 - DNA, 600 bp, Chicken  19866894372449_1
agtgctgatggcaggagagctgggttatgtatagccagctggtggggagtggcaggggctgttttacatacacagaggaaagcactgggggtgtttctggtttcaggaatttgaaggaatgtgaaaaggaactgatcagttgggcattaatgattaaggatgggccaatttgttgttctgaggcagctgatgtgccttagcagccagaggcagcggttatgtgttctcagacacagaactaagctggagggcccaaagtcagccctgctctcagctcgtgcctccagcctcacccctctytttcagcagtgcaggccctgcttgcttcctccagcgagggaaacgcacgagcaaaggcactgaggcctcctgaatgctgctctgcacagatgtgcgctttaacaggaagaagagaacgcccacaggaactgaactgctgggaacccacagcagatgggtggctgtgatggcagcagcccacgtctgaggcaacacgcctgctcccaggccgctgggagggccgtgacctgcgcattttgtccatgctctctattcttgcacccgtgtaacaaggaggaaatgtaagtttggtcccccagc

SEQ ID NO: 80306 - DNA, 600 bp, Chicken  19866894372463_1
gcttcctacagcactgcctccgtgctgtgcccctctgctcctgcctccccggctgagggtgctggcacgtggaccccgctgcccattgagttttgggatggacacacagagttcttgcccgtgctgagctcccattctccagatcagggaagaagacaatggaagacctgaccttcagccttctccgtgcaggggagctccgtgccatgccttagaagaagcactgaggctgcaggctcgcggtccacagccgtgtttggcaataagaagcacagatgtggtgtgagaaaggcagtgggrtcagttgtcagggcaggggggggtattggggaagggctgtgagtggccttattctgccttgtatggctggatacgatcccatccccacgctcttgggctcaccgccygcacatccagtgctaatggcagggggttggggttggaggccggcagccagcccgcgtgcctgccacatcctttttcctttccagccttttaccctctgcgttctgattccccacccctctgagctttgggatctgtgctgggacggggctgggatccaggacctgctgcgggcattggaagtgttttgggtgc

SEQ ID NO: 80307 - DNA, 600 bp, Chicken  19866894372463_2
agagttcttgcccgtgctgagctcccattctccagatcagggaagaagacaatggaagacctgaccttcagccttctccgtgcaggggagctccgtgccatgccttagaagaagcactgaggctgcaggctcgcggtccacagccgtgtttggcaataagaagcacagatgtggtgtgagaaaggcagtgggrtcagttgtcagggcaggggggggtattggggaagggctgtgagtggccttattctgccttgtatggctggatacgatcccatccccacgctcttgggctcaccgccygcacatccagtgctaatggcagggggttggggttggaggccggcagccagcccgcgtgcctgccacatcctttttcctttccagccttttaccctctgcgttctgattccccacccctctgagctttgggatctgtgctgggacggggctgggatccaggacctgctgcgggcattggaagtgttttgggtgccagccccgttgcggtgcatcatccatacgtctgtctctatatatatccctctccgcccgctcacagatccccatacatgttttgcagctgggaacgtgctgctattt

SEQ ID NO: 80308 - DNA, 600 bp, Chicken  19866894372467_1
gaaactagttagcggtgagctctgactgatcccaatctgcagctcagggcagaaaacataattgttgaactgtgagaacctccaaagaccatttcaactgccaggtttcagtgtatcatctctgactatttaaccttaattacacaacagttctacaaggtctgaaatccagtatgagaaatacagcgtgagcagacgttcagcggtgcagattaacaaatggaacgctttatgacagaaacttcagttagtttttatgacagcacgagaaaataacttgcattgggattcagatccctrtcacagggcacctctattcagtgcgtaaatacacactgttatttttcttaatactagtaacaattaatcttgcctcgtttttcaattaacaggcgaaggagaagaggaatgtcagctcactatgcagagcacagtactgcttaaatcttgtgctttttgagcattattaaaactcaacgtcaataaatactggaaaactttcatttttctcagaaaaaaaaccctttggtttgtccagtaccacctggtgaacatcaaattacttcagcctgctcccagcggggctgtactaaacctaat

SEQ ID NO: 80309 - DNA, 600 bp, Chicken  19866894372468_1
accgaagtgctcctatgctgtgttctggcaaagccccgttggctgtgggtacgcactcagctccagccacatctgagccccagtgatgagcttcgttctgcttctgctgaaatcgtggggccttctggagttctttccagagcaaacaggtctcagaatggtcagcaagagcagccaaaccccgagcagtgatgtcccagaaagaatgaatgtaattctggccaacctgacaggtgtctcttattgcttccctatgggaaggaggagcccgagattttggagcgcactgctcaggatgtktgtgagcacctttaaaggtgaaaatcccagcgtgcaaaatccctggagttcagatgagtgtttaataggagatacccctgaatctctcaaatacttctgatcayattcagcccggattcagcaaagcatgcrctgtctttagggggtgcttaaaatcccctccatgcagtgtgcagcagctcatctctcccaggcagggggggttctgctgctcctcactgtacccacatccatctccccaaagtgggcagcactttggcccatgtttacgtgctttgctgaattgaccacgtgtaaaat

SEQ ID NO: 80310 - DNA, 600 bp, Chicken  19866894372468_2
tgctgaaatcgtggggccttctggagttctttccagagcaaacaggtctcagaatggtcagcaagagcagccaaaccccgagcagtgatgtcccagaaagaatgaatgtaattctggccaacctgacaggtgtctcttattgcttccctatgggaaggaggagcccgagattttggagcgcactgctcaggatgtktgtgagcacctttaaaggtgaaaatcccagcgtgcaaaatccctggagttcagatgagtgtttaataggagatacccctgaatctctcaaatacttctgatcayattcagcccggattcagcaaagcatgcrctgtctttagggggtgcttaaaatcccctccatgcagtgtgcagcagctcatctctcccaggcagggggggttctgctgctcctcactgtacccacatccatctccccaaagtgggcagcactttggcccatgtttacgtgctttgctgaattgaccacgtgtaaaatcagggctagattttaagtgtgataawataacagccacgatccatccagcagctgccaaaataagacagcacagccagccttaaaggtactgcaggcctggggga

SEQ ID NO: 80311 - DNA, 600 bp, Chicken  19866894372468_3
ctttccagagcaaacaggtctcagaatggtcagcaagagcagccaaaccccgagcagtgatgtcccagaaagaatgaatgtaattctggccaacctgacaggtgtctcttattgcttccctatgggaaggaggagcccgagattttggagcgcactgctcaggatgtktgtgagcacctttaaaggtgaaaatcccagcgtgcaaaatccctggagttcagatgagtgtttaataggagatacccctgaatctctcaaatacttctgatcayattcagcccggattcagcaaagcatgcrctgtctttagggggtgcttaaaatcccctccatgcagtgtgcagcagctcatctctcccaggcagggggggttctgctgctcctcactgtacccacatccatctccccaaagtgggcagcactttggcccatgtttacgtgctttgctgaattgaccacgtgtaaaatcagggctagattttaagtgtgataawataacagccacgatccatccagcagctgccaaaataagacagcacagccagccttaaaggtactgcaggcctgggggagtgctgcgcggyccagaactctgcagcc

SEQ ID NO: 80312 - DNA, 600 bp, Chicken  19866894372468_4
ccagcgtgcaaaatccctggagttcagatgagtgtttaataggagatacccctgaatctctcaaatacttctgatcayattcagcccggattcagcaaagcatgcrctgtctttagggggtgcttaaaatcccctccatgcagtgtgcagcagctcatctctcccaggcagggggggttctgctgctcctcactgtacccacatccatctccccaaagtgggcagcactttggcccatgtttacgtgctttgctgaattgaccacgtgtaaaatcagggctagattttaagtgtgataawataacagccacgatccatccagcagctgccaaaataagacagcacagccagccttaaaggtactgcaggcctgggggagtgctgcgcggyccagaactctgcagcccatccctgtcgggacagtgctctttccaccgatgcacggagccggattgcagctgctcctatcggcacggggaagccgttctccatctgcagggctcatctgccgttttgcaacgggtgcgactgccaacgccggtaggagcgggaggtgtcccgggtgtggggacgggcggagccgacgcatccctgagccgc

SEQ ID NO: 80313 - DNA, 600 bp, Chicken  19866894372468_5
ttcagcaaagcatgcrctgtctttagggggtgcttaaaatcccctccatgcagtgtgcagcagctcatctctcccaggcagggggggttctgctgctcctcactgtacccacatccatctccccaaagtgggcagcactttggcccatgtttacgtgctttgctgaattgaccacgtgtaaaatcagggctagattttaagtgtgataawataacagccacgatccatccagcagctgccaaaataagacagcacagccagccttaaaggtactgcaggcctgggggagtgctgcgcggyccagaactctgcagcccatccctgtcgggacagtgctctttccaccgatgcacggagccggattgcagctgctcctatcggcacggggaagccgttctccatctgcagggctcatctgccgttttgcaacgggtgcgactgccaacgccggtaggagcgggaggtgtcccgggtgtggggacgggcggagccgacgcatccctgagccgcagcggtgctgcgcgctccgccacccgtagcgccgcgctcaccccgcgggaccgggactggaggtgcccgatgcggccgccaggtggcgct

SEQ ID NO: 80314 - DNA, 599 bp, Chicken  19866894372498_1
  misc_feature (1)..(140): n is any nucleotide
nnnnnnnnnnnnnnnnnnnnnnnnnnnnnnnnnnnnnnnnnnnnnnnnnnnnnnnnnnnnnnnnnnnnnnnnnnnnnnnnnnnnnnnnnnnnnnnnnnnnnnnnnnnnnnnnnnnnnnnnnnnnnnnnnnnnnnnnnnnntctgagaggaaagcgaaagaaagaagaaaaagaaaataggcaaaagtggtaggagacctgcatggatgagcaaggagctcactgaaaacctcaaatggaagaagaaagtctacatggaagagggatttggccacttgggaggaatacaggaatgctgtcrgggcttgcagggatacaacaaagaaggctaatgcccacttggagttaaatatagcaaaggaagtcaaggacaacaggaaaggcttctttaagcacgtcaatagcaaaagaaagactagggaaaatgcagatccgctgctgaatgaggtgggtgccctggtaacagaggacaccaagaaggcggatactgaatgctttctttgcttcagtctttacttgtaagtctgccactcaggaatcccagatcctggagacaagggaaagagtttggggaaaggaaggcttccctttggttgagga

SEQ ID NO: 80315 - DNA, 600 bp, Chicken  19866894372504_1
ttccccttttcttcttgacccttattcttgggagctggagagccccagaggctaggttggcagaagagagcccctctgaactatatagactgcactgattaatttgttgtcactacagcctatttttctcctctccctgtcctttttccaatattcttttctaagaggcacagaaagcagccagggtgagtccatttcccaaggcaggactcccagagtggctttcaaagtcagcctgatgtatcaacccatacagaatgtggacgaatgcacacatatgtagcaacaggcagagcttcracactgcttactgctaagttgtctggcttttctgctctagagcccttcattcacttgtttataactttgacagctttgactgttcagrctgaaattttacatacasggtatctgcctcaaactgaattattaactgaaatttgagacaaaatgacagtgtttctgagaagcagcttagaaaaatacattgtttgtcctgatgcttttcttttatacaaccttttatttggaaaaccctagaacccctgttctttggaagtgcaattggatatttggcagaagaggtggcttttgtgttgg

SEQ ID NO: 80316 - DNA, 600 bp, Chicken  19866894372504_2
actgcactgattaatttgttgtcactacagcctatttttctcctctccctgtcctttttccaatattcttttctaagaggcacagaaagcagccagggtgagtccatttcccaaggcaggactcccagagtggctttcaaagtcagcctgatgtatcaacccatacagaatgtggacgaatgcacacatatgtagcaacaggcagagcttcracactgcttactgctaagttgtctggcttttctgctctagagcccttcattcacttgtttataactttgacagctttgactgttcagrctgaaattttacatacasggtatctgcctcaaactgaattattaactgaaatttgagacaaaatgacagtgtttctgagaagcagcttagaaaaatacattgtttgtcctgatgcttttcttttatacaaccttttatttggaaaaccctagaacccctgttctttggaagtgcaattggatatttggcagaagaggtggcttttgtgttggggatgtgccttgtctgtccctgtgaaaaactacccacatttggccaagttacaaggctgagaaagatcatgtgggaaggatctgttac

SEQ ID NO: 80317 - DNA, 600 bp, Chicken  19866894372504_3
ttgtcactacagcctatttttctcctctccctgtcctttttccaatattcttttctaagaggcacagaaagcagccagggtgagtccatttcccaaggcaggactcccagagtggctttcaaagtcagcctgatgtatcaacccatacagaatgtggacgaatgcacacatatgtagcaacaggcagagcttcracactgcttactgctaagttgtctggcttttctgctctagagcccttcattcacttgtttataactttgacagctttgactgttcagrctgaaattttacatacasggtatctgcctcaaactgaattattaactgaaatttgagacaaaatgacagtgtttctgagaagcagcttagaaaaatacattgtttgtcctgatgcttttcttttatacaaccttttatttggaaaaccctagaacccctgttctttggaagtgcaattggatatttggcagaagaggtggcttttgtgttggggatgtgccttgtctgtccctgtgaaaaactacccacatttggccaagttacaaggctgagaaagatcatgtgggaaggatctgttacttctgtcagcttaactcc

SEQ ID NO: 80318 - DNA, 599 bp, Chicken  19866894372516_1
  misc_feature (1)..(23): n is any nucleotide
nnnnnnnnnnnnnnnnnnnnnnnatcaatgcttttgcttagtaaacacaatgactttgaaaggccctcttcagcttaatagttcacttatattgattatgctgagattttctttttggcctctctaattcaaacaataagcataacattttggctgttctactttactgacttgaattattcaggaaagggcagacaaactgtgtatatttgttcatgctataagtaacgaagcatattctcttgtctcttccccttgccctttcattcttccaatcaaattttcattttgtttcttttwaaatgtttatagtctgatttcaatattttgtctacttacttacttttattaaagtatttattttaacrtttattaacgtatttattttaagtcccatagataaataactcaagatgggtgaccaaagggacaaagaaacccaggacacatcaagaggtcttggaatttctaaactagctctggttacaagctttaattaaaacaagagctggatcttaataggttgtatcttactgctatgaaagctgcagttttgtaacacaattaaatagacaaaaaagaaaaaaatcttcagttat

SEQ ID NO: 80319 - DNA, 600 bp, Chicken  19866894372516_2
ttcagcttaatagttcacttatattgattatgctgagattttctttttggcctctctaattcaaacaataagcataacattttggctgttctactttactgacttgaattattcaggaaagggcagacaaactgtgtatatttgttcatgctataagtaacgaagcatattctcttgtctcttccccttgccctttcattcttccaatcaaattttcattttgtttcttttwaaatgtttatagtctgatttcaatattttgtctacttacttacttttattaaagtatttattttaacrtttattaacgtatttattttaagtcccatagataaataactcaagatgggtgaccaaagggacaaagaaacccaggacacatcaagaggtcttggaatttctaaactagctctggttacaagctttaattaaaacaagagctggatcttaataggttgtatcttactgctatgaaagctgcagttttgtaacacaattaaatagacaaaaaagaaaaaaatcttcagttattgcaactgtgcagagaggaataaggttgtaatttttttacttaacattgaaaattattttcaaaatttt

SEQ ID NO: 80320 - DNA, 599 bp, Chicken  19866894372520_1
  misc_feature (1)..(110): n is any nucleotide
nnnnnnnnnnnnnnnnnnnnnnnnnnnnnnnnnnnnnnnnnnnnnnnnnnnnnnnnnnnnnnnnnnnnnnnnnnnnnnnnnnnnnnnnnnnnnnnnnnnnnnnnnnnnnntgattctatgattctgtgatatgtcttcgacacagccctgactgccagcaaatgctgctgctgtaaaactgtgtcatatatgcaaaatctgagttatgggtgcaacagactctccaaaccagaaccaggcccacacggaaaacttcagaaccaagcactgagatcactcagatcacttgttctcacaccracaccagctgtgttatacatccacctcatgcagtgccagcgtttcatccaccacaggtatttgctcgagccactgcaagctgtcacatcacaggcactgaggtccctatcctttctgccccacatccagatgaaatcagctgtcaccaacaaagagaaagcatctgctaaatcaaaatacattctctcatctaggatctgaagggaagacatgtgattcacgctgttcaccaagcatgggggagaaggccgggtcaaagcagggctcagtgcatgtggatgacacgtgtgcctcccaca

SEQ ID NO: 80321 - DNA, 532 bp, Chicken  19866894372527_1
tgttgatgcctctaagcaatgccaagataaagaattaatttaataggagattaatagataaggcacttgcattttaaaggacaactgcaattaaaaggtctcaatattcattagcagtatttgaaaaatatctgttttgggccacttaaaaagtgcatgtggaagagtctggaaagaacactgcaaaaatttctctcccaagttcaccaatttaatatcccagagtctctcaacttcccatcaggaaaaaatttggtcattcagctgtacaattccttacgtatttacactttgaaacayacgtcaacataccacgaatgcatattcactattgtatacctatgcttttcaatatacactcagagcactagactagagatatttyacatacagaatgtgcaaacaaagtcatttcacctggcttctgctacccaaaagaagccatttaggtttccactatagttaaagaggaaggaaactaaaagcaagcatatatcagagaacttattctaaaacatgcttccaatttatg

SEQ ID NO: 80322 - DNA, 447 bp, Chicken  19866894372527_2
tgcaattaaaaggtctcaatattcattagcagtatttgaaaaatatctgttttgggccacttaaaaagtgcatgtggaagagtctggaaagaacactgcaaaaatttctctcccaagttcaccaatttaatatcccagagtctctcaacttcccatcaggaaaaaatttggtcattcagctgtacaattccttacgtatttacactttgaaacayacgtcaacataccacgaatgcatattcactattgtatacctatgcttttcaatatacactcagagcactagactagagatatttyacatacagaatgtgcaaacaaagtcatttcacctggcttctgctacccaaaagaagccatttaggtttccactatagttaaagaggaaggaaactaaaagcaagcatatatcagagaacttattctaaaacatgcttccaatttatg

SEQ ID NO: 80323 - DNA, 600 bp, Chicken  19866894372531_1
aggttcctaagaaaccaggttttaccagtcatgctgctgacatttgggcttttcaagttctcttctgcctgtttcctttcacatcctcctttaatcattggcttccagatgaaaagaagaaacagcagataatggagaggaaaagaagtttgtacctgaaaaccaacttccagagcacacaacaaatgagtaaaataagtttttacaagtatgaaagaaaaatagaaaatctaattgtagaaatctagctatttgagtaatgggaggacctctaaactcaaactgcaattgttctccacrctacacaacctcttctttgaatcraccagcatcttgcacaacgtttgctaagtaacgarctgtacatggaaacagaacggcctcaggaatgaggaggggggttgtttccctgtgaaatacgagcaggtgtacaaagcagttccctgcttgtggctgccagcaagaatgaataaacgcttaactgcagtgggaattctgttggcctgttctggccaggtagagtctaacacttcatccataagagggcagtgccgtacaccagcatgcatacccactgtttttcacacagattgcatttgt

SEQ ID NO: 80324 - DNA, 600 bp, Chicken  19866894372531_2
ccagtcatgctgctgacatttgggcttttcaagttctcttctgcctgtttcctttcacatcctcctttaatcattggcttccagatgaaaagaagaaacagcagataatggagaggaaaagaagtttgtacctgaaaaccaacttccagagcacacaacaaatgagtaaaataagtttttacaagtatgaaagaaaaatagaaaatctaattgtagaaatctagctatttgagtaatgggaggacctctaaactcaaactgcaattgttctccacrctacacaacctcttctttgaatcraccagcatcttgcacaacgtttgctaagtaacgarctgtacatggaaacagaacggcctcaggaatgaggaggggggttgtttccctgtgaaatacgagcaggtgtacaaagcagttccctgcttgtggctgccagcaagaatgaataaacgcttaactgcagtgggaattctgttggcctgttctggccaggtagagtctaacacttcatccataagagggcagtgccgtacaccagcatgcatacccactgtttttcacacagattgcatttgtttgaaaattaactactgctgctgc

SEQ ID NO: 80325 - DNA, 600 bp, Chicken  19866894372531_3
ctcttctgcctgtttcctttcacatcctcctttaatcattggcttccagatgaaaagaagaaacagcagataatggagaggaaaagaagtttgtacctgaaaaccaacttccagagcacacaacaaatgagtaaaataagtttttacaagtatgaaagaaaaatagaaaatctaattgtagaaatctagctatttgagtaatgggaggacctctaaactcaaactgcaattgttctccacrctacacaacctcttctttgaatcraccagcatcttgcacaacgtttgctaagtaacgarctgtacatggaaacagaacggcctcaggaatgaggaggggggttgtttccctgtgaaatacgagcaggtgtacaaagcagttccctgcttgtggctgccagcaagaatgaataaacgcttaactgcagtgggaattctgttggcctgttctggccaggtagagtctaacacttcatccataagagggcagtgccgtacaccagcatgcatacccactgtttttcacacagattgcatttgtttgaaaattaactactgctgctgctcaggaagtaacatgttcatctgacgctcttcaga

SEQ ID NO: 80326 - DNA, 600 bp, Chicken  19866894372532_1
gtgtatttattttcagtcattattttttgtatgatttcaatgacatcatttgaaaacattaaagtgaatgactggaataactctttgaatggaaaggtctttaagctgttggtagagcaacctccaaatccaattctaaatatcaccctcagccaaccagagaacaaactccaccttccctgatcaatgtgtctgatcaaatggggaagcactcccctctaagcagcacacctgaagttaaatactacatactgctaaggagagaataaaggacttctgggcagtttgtaagtaaagctrcattcattggctagcttattcagtatgattactttagttttcttaaaaatatgtatattcacagctctatgttcatccaagcaacctcattctgccctcccaacataaattatattttgtatgcatgcctttgtgtatatatatacatatacaaatggaaattgatttattgatcagggtaccagttcaccactaattgccaggcagcatgttggtggagtttaatacattgcttacttagttcatgcacagtcgcacacatccaaatcgataaactgcatctgttaatattacatatrt

SEQ ID NO: 80327 - DNA, 600 bp, Chicken  19866894372532_2
rcattcattggctagcttattcagtatgattactttagttttcttaaaaatatgtatattcacagctctatgttcatccaagcaacctcattctgccctcccaacataaattatattttgtatgcatgcctttgtgtatatatatacatatacaaatggaaattgatttattgatcagggtaccagttcaccactaattgccaggcagcatgttggtggagtttaatacattgcttacttagttcatgcacagtcgcacacatccaaatcgataaactgcatctgttaatattacatatrtaaacttcaatgtgtgtaaaggtatgtactcacacttacatacacatccataaaataaaatgtgcaaacacaggcagtatatgaataagcataagcatttcaaacacacattacacttttttttatccatgtatgaacaatacagctctacactatctgaaaacagtttgaagaccggtgcaaaaagcacctgtggggaaaaataaaaatctgtttttcctcattgtaaatgtttgttaaatgttaatgatattctactccttgggaagatcatttctctgcatgtgggaatttcgatga

SEQ ID NO: 80328 - DNA, 600 bp, Chicken  19866894372548_1
tggatttgttatttacccctgaggtacactgctagttgctgcttctaactggactttgtgccactgttcatcacttactgggcccagtcattcatccagttttctacccaccttactgtctgctctgcaaacccatacttcatcacttgctttatgagaatcttatggaaggcaaatatttcatgtgtaccctacaatgggaagactgtactgtacaaaatgcagtcattatgttgtcactccttttatattgcataagaaagaaaatagataattaaggctgatatcatccatcaactrtaaaattaaaccaaattaaaacttttcttttcctctgctgaaggagtctttatgaactagaatgagaactttcaccttgtctttcatttccaaatgcacctgttctctcactagttacttctttaaacttcttagtaattttagtcaaaatgatctgatttacatgtcttttaggaaagcatttaaaaaatcaaaattacttttcaatgtagagaaattacaaaaaataatcaacaactaaattatcaaaagtgttatttatagcttatttgtctgaaatcactaacctagttaatggca

SEQ ID NO: 80329 - DNA, 600 bp, Chicken  19866894372550_1
ttttcttctgttttagtatccactttggaagatagtctacacatagttttgtattggtagaatgaataaccataaatttttttactatttgagctgttcttgtttcagatacatggaatataaaccaggggttgtggttgaattatgaatcaaattaatattttactgtctagtcgatgtgatgaaatgctcagatatcccactgagttatggaactgttggactgacgcactgatccctttaaactgattatgtgtaactagtaaataaggtagagtgagggaaagtgccacagaattkctcrtgtccatatgcacagcccttcctgcagccagcagcgtgccctcacccrtactgctatatgggagcagtcccctgtctggccttgactgtgggracagcagctgagcccacgctccctctgccttctggtgtcctgaggtcggtgtcgtcttctgttctgcttgaggggtggagactggagaagggtctgtctaaaaagctaatttgttttcctcttattttaggcagaacggtattggacactctcatccttggaatttattgatgtaaaatttaatctttcttgacaaagcaaat

SEQ ID NO: 80330 - DNA, 600 bp, Chicken  19866894372550_2
cttctgttttagtatccactttggaagatagtctacacatagttttgtattggtagaatgaataaccataaatttttttactatttgagctgttcttgtttcagatacatggaatataaaccaggggttgtggttgaattatgaatcaaattaatattttactgtctagtcgatgtgatgaaatgctcagatatcccactgagttatggaactgttggactgacgcactgatccctttaaactgattatgtgtaactagtaaataaggtagagtgagggaaagtgccacagaattkctcrtgtccatatgcacagcccttcctgcagccagcagcgtgccctcacccrtactgctatatgggagcagtcccctgtctggccttgactgtgggracagcagctgagcccacgctccctctgccttctggtgtcctgaggtcggtgtcgtcttctgttctgcttgaggggtggagactggagaagggtctgtctaaaaagctaatttgttttcctcttattttaggcagaacggtattggacactctcatccttggaatttattgatgtaaaatttaatctttcttgacaaagcaaatgcat

SEQ ID NO: 80331 - DNA, 600 bp, Chicken  19866894372550_3
attggtagaatgaataaccataaatttttttactatttgagctgttcttgtttcagatacatggaatataaaccaggggttgtggttgaattatgaatcaaattaatattttactgtctagtcgatgtgatgaaatgctcagatatcccactgagttatggaactgttggactgacgcactgatccctttaaactgattatgtgtaactagtaaataaggtagagtgagggaaagtgccacagaattkctcrtgtccatatgcacagcccttcctgcagccagcagcgtgccctcacccrtactgctatatgggagcagtcccctgtctggccttgactgtgggracagcagctgagcccacgctccctctgccttctggtgtcctgaggtcggtgtcgtcttctgttctgcttgaggggtggagactggagaagggtctgtctaaaaagctaatttgttttcctcttattttaggcagaacggtattggacactctcatccttggaatttattgatgtaaaatttaatctttcttgacaaagcaaatgcattatggacaaagaggatatcttcttgttatgtaactaagttgtggagaa

SEQ ID NO: 80332 - DNA, 600 bp, Chicken  19866894372550_4
tcttgtttcagatacatggaatataaaccaggggttgtggttgaattatgaatcaaattaatattttactgtctagtcgatgtgatgaaatgctcagatatcccactgagttatggaactgttggactgacgcactgatccctttaaactgattatgtgtaactagtaaataaggtagagtgagggaaagtgccacagaattkctcrtgtccatatgcacagcccttcctgcagccagcagcgtgccctcacccrtactgctatatgggagcagtcccctgtctggccttgactgtgggracagcagctgagcccacgctccctctgccttctggtgtcctgaggtcggtgtcgtcttctgttctgcttgaggggtggagactggagaagggtctgtctaaaaagctaatttgttttcctcttattttaggcagaacggtattggacactctcatccttggaatttattgatgtaaaatttaatctttcttgacaaagcaaatgcattatggacaaagaggatatcttcttgttatgtaactaagttgtggagaataaattccagagaagacaggttttccagacaaaacagactttata

SEQ ID NO: 80333 - DNA, 408 bp, Chicken  19866894372557_1
gagtaaatctttgcagaatacctgacaacagatacgtgtgaatgactatgctgcagttacacagattcttgtgagttcagctagcactgtggctccactcaggttgccaggtttccattttacgaaacaatcagtatgaattgtataagttaatacctatgtcaactcaatatgtctgaatctgttgccaccttacttcagcatcttattgtgaatctcgagaactgctttttctgccagattgtgaataagtctttggctgttgtgtattttgggagagttttcatgatgttcaacagkgctgtctccttatttctgtgctgcttttagggaattatctgttctttataaaatagggcagctgaagcatgaacttgctgcagagatgcacacatttcttttaaatga

SEQ ID NO: 80334 - DNA, 599 bp, Chicken  19866894372560_1
  misc_feature (1)..(48): n is any nucleotide
nnnnnnnnnnnnnnnnnnnnnnnnnnnnnnnnnnnnnnnnnnnnnnnngaaggaacatagacagtggagattctttcggcaggatttgccatcctggggagcagtctgaagaaagtgctacaaatccttagtaacttatgattgttatggccccgctgcctcaagccatcactagcaaaggaaacatggtgccatcagtagcacaggggtgagtaagaatatctactcaaaatgttgcagcttttgtttcccggctttctataaacacacctgaattcatcacttcctccaaacacatayttttttttgagaaaaaacaatataagagtatacggatggcacatttccactgccttttgctttttgctgcagcattttctgtggaatggtattctcaacagacactacatacagcgcaattatagcatacctgtataggtcatatttttcctatactcctaatttctgatcttttctccagctctactgcattctttatcatctgctctccctgtctgtaggttaaaatatgcatgtgtgtttttaaagtctttcttactaccaggtgaaacaaaaccatgtacatttaaggaataaat

SEQ ID NO: 80335 - DNA, 600 bp, Chicken  19866894372560_2
tcctaatttctgatcttttctccagctctactgcattctttatcatctgctctccctgtctgtaggttaaaatatgcatgtgtgtttttaaagtctttcttactaccaggtgaaacaaaaccatgtacatttaaggaataaattacattgtttctgactagaacttatgtggttaaactcttggtgttcataaacctgtcctgtactgcttatgaattcttaatacaaatggatgtaatcagggctagtcattgcttgtattgataattttagcacttcaacttcaaaaagaaaaaaaawacacaacaacaacaacaaaaatgaatataatgatcagtctcttggaatttgttttgtattttcctctccttttgtttttacaagctgtatgcccttaataagataaaaggaatctgtaccacaaaaatgctttatgctttcttcctctttcaggaattaaaactccttcactgtattgcagataattgaaaaataaaattatgggctcattctaactcaaaaaaaaaaaaagaaaactcttgcagcacaattcaatctgggaagcctgaaagataagaagagctgttatgcagcattcag

SEQ ID NO: 80336 - DNA, 600 bp, Chicken  19866894372560_3
ataagataaaaggaatctgtaccacaaaaatgctttatgctttcttcctctttcaggaattaaaactccttcactgtattgcagataattgaaaaataaaattatgggctcattctaactcaaaaaaaaaaaaagaaaactcttgcagcacaattcaatctgggaagcctgaaagataagaagagctgttatgcagcattcagataaggtcctttgcagtgctctgcaatcaggcaaaatttttattcattcaaatagaaatttgcagaaggcaagagtgctttgatattaaaaacttayacatatggaaagcacgggcataggaaaggaagctgttaaacaagtatctacctaatagtctgacaggaaacagtgaggtacagggagtaatctaccgccatctctactaacctggttgccctggatatggaaaatggtgtaagaccataacttatacagaaagtcaaattaatagacagccaataagtttatagagatcagcacagtgaaatgtgtcatgaaattccaagatcactattggaatgaattgaatgaatgcttgtttctttatacacctacatcatgaatgctttctagcca

SEQ ID NO: 80337 - DNA, 600 bp, Chicken  19866894372561_1
cttttatcaagcatggccaattatgcaaattcctcctaaatttatttttaaagaaaaggaagattgattgcagagatttaccatttgcacagagaatgatttaggagggtatttcaattgctaatgctcctaacaaagatacaggctttgtttgtaaacttcaggcctaccaaatggaatgtcaacaccagacaattatcatgtcctattcaaaatgctaaatttaattgaaatactttgtagtaaatcagaaattggcattagtcttaatgaaagttgattatgatgctgactgtgtayagaaggtaagtctcagccacacaaattacagatacctcaaggaaaagcagcgcacagtttctcacaactgtttggtatgagaaacacaacagcagagctgygtttgattgacttcacagaagctgaagcttagggcacagggatcatttggatgagggccatactccatgcttagttacggcctatgggctagagcatcagttcaaggcaccacacccccctcagctcccttcaatttccccaatctcatcattcagcagttcagatatttataagctatgcactgagatagacctgcca

SEQ ID NO: 80338 - DNA, 600 bp, Chicken  19866894372561_2
taggagggtatttcaattgctaatgctcctaacaaagatacaggctttgtttgtaaacttcaggcctaccaaatggaatgtcaacaccagacaattatcatgtcctattcaaaatgctaaatttaattgaaatactttgtagtaaatcagaaattggcattagtcttaatgaaagttgattatgatgctgactgtgtayagaaggtaagtctcagccacacaaattacagatacctcaaggaaaagcagcgcacagtttctcacaactgtttggtatgagaaacacaacagcagagctgygtttgattgacttcacagaagctgaagcttagggcacagggatcatttggatgagggccatactccatgcttagttacggcctatgggctagagcatcagttcaaggcaccacacccccctcagctcccttcaatttccccaatctcatcattcagcagttcagatatttataagctatgcactgagatagacctgccattgcattaagcacatgctgcagtgctgtaagcccacctgtcaccctgaatctattctcagaccaccccaactggaaataatacagatctaataggcttact

SEQ ID NO: 80339 - DNA, 600 bp, Chicken  19866894372565_1
gccttattttcacatgaagtgatgtcctgaggttacctcagctcctcctttgccagctctatcactgcttgtccacctttcatcctttctacttccagtgtcttccagagtcctctcactgagctgcttgcatcttcaataatcacactaataaccaccactacagcatgaggcagaggatctattttctgaaagcaggagaaactcactactcagacaggcaaaggtgcctgtaatgcctgtttgtagctttgcaaggactgataaattccgcttaataaatctgtaccccaattaggkatcaggctgttacagctgaggaattacagtgtaacttgtcttccctatagcagcaaaagaggtgtgtttagtcctttgtcgttttctttgccctgtggtggactctccagcaccctctgacagagcacagtaaaacaggtctgtggctctgaaatctttctggttaatggtaggactcttctgcttacctgatgaagagaagcatagagattccaattgaagccaattcttgagctgcctcaacaaacaaatattatagagggtagaataaataaaacatacagatacatatttaatctg

SEQ ID NO: 80340 - DNA, 600 bp, Chicken  19866894372572_1
actcagctctttggggttcccgttgtggttgctctaaatgtcttcaagtaagtctactctttcattactcttgtaagtaaatccacagatcaattttcacagtttttttttttttttttcttgatttgtgaatgaagcagcattggcacaaagaaaagtaactgttgaagaattattaatttccatcatgaaaatcctttcaacccttagattgttcctaaggcttaaaatgacaaagagtagataatgttatgtaggtatcaacattcatgttaatcagttacaacaattttagtaggygttcttgaaatgtaaattcatatgctrtatgtaaacgtactgtgcatatgcaaacttatttaaaaagttgctgtacagctgctgatacagtgtaaggttaagtgcataagattataaaatagaagtaattaaacaaaacagaactgtttggttgacagaactgacttctcctgctgaggttgatcttgtgtgtgagattgcaaagcagtctggagcatttgatgctgtaccctgcagtcactggtcagatggtggtagaggagcagtaaaattagctcaagctgtggaaaaggcagccaa

SEQ ID NO: 80341 - DNA, 600 bp, Chicken  19866894372572_2
gttgctctaaatgtcttcaagtaagtctactctttcattactcttgtaagtaaatccacagatcaattttcacagtttttttttttttttttcttgatttgtgaatgaagcagcattggcacaaagaaaagtaactgttgaagaattattaatttccatcatgaaaatcctttcaacccttagattgttcctaaggcttaaaatgacaaagagtagataatgttatgtaggtatcaacattcatgttaatcagttacaacaattttagtaggygttcttgaaatgtaaattcatatgctrtatgtaaacgtactgtgcatatgcaaacttatttaaaaagttgctgtacagctgctgatacagtgtaaggttaagtgcataagattataaaatagaagtaattaaacaaaacagaactgtttggttgacagaactgacttctcctgctgaggttgatcttgtgtgtgagattgcaaagcagtctggagcatttgatgctgtaccctgcagtcactggtcagatggtggtagaggagcagtaaaattagctcaagctgtggaaaaggcagccaatcagaaaagcagtttcaaatatctcta

SEQ ID NO: 80342 - DNA, 600 bp, Chicken  19866894372578_1
gcatctcagggtccatagaaggcttggcatgttttttaaagttatgtggaaaatgcggagagagatgttcaatgcatgttatgcgtctctactttgtgccctttgtggagaggaagcattaagtctcagctaagggacttaattttgaacttttcctttccaggcatccagatgaagagcgcatatcagctgttctgtgtaatgttctctacatatatacaggtttacatcgaaagaccttgtctcttcactttgaaagtgccgcaggtttaacccaaatttctgttaacagaaatgacrcrtatcttaatttctcaccttggaaagctctctgaaatctctgccggaaattcaagctatctcccacttcagcaaagtttcagcatgggaacctaaaaggaaagcaagagtctggtgttttactggcactctgctgaaaaagcaaattaccaaagaattcatgatgtactattcaaacttgtggccactgggaacacgtctatcactttcagtttgcatccacagtgatgtctctgtattttgtaagcagttttagtagttagagctctctgaatgtttcacacatgcatggaaattacc

SEQ ID NO: 80343 - DNA, 600 bp, Chicken  19866894372578_2
atctcagggtccatagaaggcttggcatgttttttaaagttatgtggaaaatgcggagagagatgttcaatgcatgttatgcgtctctactttgtgccctttgtggagaggaagcattaagtctcagctaagggacttaattttgaacttttcctttccaggcatccagatgaagagcgcatatcagctgttctgtgtaatgttctctacatatatacaggtttacatcgaaagaccttgtctcttcactttgaaagtgccgcaggtttaacccaaatttctgttaacagaaatgacrcrtatcttaatttctcaccttggaaagctctctgaaatctctgccggaaattcaagctatctcccacttcagcaaagtttcagcatgggaacctaaaaggaaagcaagagtctggtgttttactggcactctgctgaaaaagcaaattaccaaagaattcatgatgtactattcaaacttgtggccactgggaacacgtctatcactttcagtttgcatccacagtgatgtctctgtattttgtaagcagttttagtagttagagctctctgaatgtttcacacatgcatggaaattaccaa

SEQ ID NO: 80344 - DNA, 600 bp, Chicken  19866894372580_1
aagatcaagtattttctgattttgcagtgacaatactgaaatctctgtatctttgtgtagtttagaagttagagaaattatgagaagaacacaaaattaaaccacatttatctgaaattatcaatatcaccttgttagttcactgtcagtaagccatcaagaaactttctaccaggaatagggaagatacagtttgctgagttctcttttatgacctgcaaaaagactttattttctagtagttgataaaaacaagcagatattctgctaacaactatgttacctctagtaattttatgycttaaactgaaggatctacaacgagggacttgaagacaattatgtcctcttttattagaaaaggatacaactcaagtggaaatcatgcttgccattttggaagagactatagtagaagagataccgctctcccctaagtctaaaacttagtccaagtctaaaccttaatagagcacagaaacataactgactttatggatacaaacacgagcaaaagtgaacagtatgctctgtgaaaagacaaatgagcctcaaaacgatatcttacaaggtcagtaggagctgactggggagggcatg

SEQ ID NO: 80345 - DNA, 600 bp, Chicken  19866894372580_2
gtccaagtctaaaccttaatagagcacagaaacataactgactttatggatacaaacacgagcaaaagtgaacagtatgctctgtgaaaagacaaatgagcctcaaaacgatatcttacaaggtcagtaggagctgactggggagggcatgttttcatttctccacacagtgcccatgaggcactgtatctagtgcaggggctctcatttcaagaggaatattgagaacgtcaacaaagccaagccagacaaggggtagaatacaagccctagatgaaaagtctggaagaatccgagttygttagttaggcaatgaggacaytatgaaacaatctagtagcagcctaaactgaaatgcagttacaaaaatgacagtcaaactcattgcagtagcagtagcagaaatgtcaggtttggttaggaaggctgggcaggaaggaagaattctttaggaggcaatcagagagcattagtcttatttcgtgcaggaaatgaacactagacgtctccgtgtaaggaatatttttatgattctaaccatttcaagtacaatttctcacatacccttccctctttttgtcatatctaaaatattgtaac

SEQ ID NO: 80346 - DNA, 594 bp, Chicken  19866894372580_3
agcacagaaacataactgactttatggatacaaacacgagcaaaagtgaacagtatgctctgtgaaaagacaaatgagcctcaaaacgatatcttacaaggtcagtaggagctgactggggagggcatgttttcatttctccacacagtgcccatgaggcactgtatctagtgcaggggctctcatttcaagaggaatattgagaacgtcaacaaagccaagccagacaaggggtagaatacaagccctagatgaaaagtctggaagaatccgagttygttagttaggcaatgaggacaytatgaaacaatctagtagcagcctaaactgaaatgcagttacaaaaatgacagtcaaactcattgcagtagcagtagcagaaatgtcaggtttggttaggaaggctgggcaggaaggaagaattctttaggaggcaatcagagagcattagtcttatttcgtgcaggaaatgaacactagacgtctccgtgtaaggaatatttttatgattctaaccatttcaagtacaatttctcacatacccttccctctttttgtcatatctaaaatattgtaacttcctaaatcagtttt

SEQ ID NO: 80347 - DNA, 600 bp, Chicken  19866894372582_1
gaagggattggactggtatgacctcgcaccagagacatcccttgagcaccaatccccattttctcactcctagtagaaacagctgaaaagcaatctacaagaaaacctgttttttttatttttttttttattttttttaatttacatcttcaggagaacaccagacaattgaaaagcaagcaaactctttcatacaagataaacttgggcgaacagcccagcagctcctggtctgcatcaaaaccagagttgatgagagctgtgagacacccacgcagagcagggccagagccatggcarggggagatgaatcaccagatgacggatgctttcaccagcttcttcaggtagctggagcctcaggcctcacagagaaactcagcataggctctctaccatatttcacatgaaataatgctcatctttccattttctcttctgtaaacagccaagagatacttctctgacactaatgcaagctgagcaggaactgaagtttacagcctctgaaaagaaaataatcagtgagagtgcagttagcagtagggcttggggaaggcaaggcaaatcagagcaaaaggaggcagaggggaagtgtcc

SEQ ID NO: 80348 - DNA, 600 bp, Chicken  19866894372593_1
ccctggcctggtttggtgtctgtgtgcaggtggttcccctctgcagtaattgttctcagagaggctctgtgaatggaaaaaggcagcagagatctacagtatccatacagaggcaaagacctttcatagggttggctgtggcttctagcagcctggtggcttttaaagcagacagaactgcatcccatcacaccatgtcttgatctgacactcacagagtgtgtttagaagagtgactgaagtcttttaactacaaagcaagtccactcatctttgataaaagacactgctggggacttstgtccctaaagaggtcaccacagrctgcaaaatggagaatgaacaggtcttctgcacaaggcacatttaacatgttgccatagaaaccagttacctaattcagccatacacaattcttccagccccccagtgaattccagtaatgggtttattatatcacacttcgttggtgtcatctgtcacacagacattcacataaatggatcagcctttgatttaaaactaccctccactagccagacccaatagtagaagagtcttcttttggattttctggttataagsaggtcagtgtcagtg

SEQ ID NO: 80349 - DNA, 600 bp, Chicken  19866894372593_2
tgcaggtggttcccctctgcagtaattgttctcagagaggctctgtgaatggaaaaaggcagcagagatctacagtatccatacagaggcaaagacctttcatagggttggctgtggcttctagcagcctggtggcttttaaagcagacagaactgcatcccatcacaccatgtcttgatctgacactcacagagtgtgtttagaagagtgactgaagtcttttaactacaaagcaagtccactcatctttgataaaagacactgctggggacttstgtccctaaagaggtcaccacagrctgcaaaatggagaatgaacaggtcttctgcacaaggcacatttaacatgttgccatagaaaccagttacctaattcagccatacacaattcttccagccccccagtgaattccagtaatgggtttattatatcacacttcgttggtgtcatctgtcacacagacattcacataaatggatcagcctttgatttaaaactaccctccactagccagacccaatagtagaagagtcttcttttggattttctggttataagsaggtcagtgtcagtgttatacccagctttgcatgctaat

SEQ ID NO: 80350 - DNA, 538 bp, Chicken  19866894372593_3
actgctggggacttstgtccctaaagaggtcaccacagrctgcaaaatggagaatgaacaggtcttctgcacaaggcacatttaacatgttgccatagaaaccagttacctaattcagccatacacaattcttccagccccccagtgaattccagtaatgggtttattatatcacacttcgttggtgtcatctgtcacacagacattcacataaatggatcagcctttgatttaaaactaccctccactagccagacccaatagtagaagagtcttcttttggattttctggttataagsaggtcagtgtcagtgttatacccagctttgcatgctaatgtcttcctttcatgcatacatcattgccaatggaagagaacatttgttttcatttcctgatattttagtttattaaaaacgtgctcttaatttctcagatccttgactgcacatgctgtcaggatgcaggttgaaacattttggtccctatttcccccagctgctgtttgagctgtaagtcacactaacaattcataca

SEQ ID NO: 80351 - DNA, 599 bp, Chicken  19866894372594_1
  misc_feature (1)..(29): n is any nucleotide
nnnnnnnnnnnnnnnnnnnnnnnnnnnnnggtgaaactgcagaggtggttactggtgttagcatggggtggaggtggtacctcccatctgatctggggtcaaggcctcgcccagatggagaacaaaggtgaagccatggaatcattgaggttggaaaaggctgtaggatcacctggaggtccaaccccccaccccatccgcactgttccggttgaccgcatccctcagcgccgcccatggactgcatggggtcagagtatctctgccataacacaatggcaaagggatggctggcaggcrgttcgttccagtgaatatttcattagaaatttgcatttaaatgtgagtcccgtgggtcttcttgcttctctggtcattaatgcacgcattgagtccttggtggtcctccccacgtgcacccattccccattgcctcyatccmctggtgctgctgtacagccacgttaacagcttggaagaacagaggagagcctttgtttgccacaaggtctttattagcaaaaaataatatctttctttccatgcaaactggtggagcatctcacacagtgacagcagctggggctgtgcccacctcc

SEQ ID NO: 80352 - DNA, 600 bp, Chicken  19866894372594_2
ggaatcattgaggttggaaaaggctgtaggatcacctggaggtccaaccccccaccccatccgcactgttccggttgaccgcatccctcagcgccgcccatggactgcatggggtcagagtatctctgccataacacaatggcaaagggatggctggcaggcrgttcgttccagtgaatatttcattagaaatttgcatttaaatgtgagtcccgtgggtcttcttgcttctctggtcattaatgcacgcattgagtccttggtggtcctccccacgtgcacccattccccattgcctcyatccmctggtgctgctgtacagccacgttaacagcttggaagaacagaggagagcctttgtttgccacaaggtctttattagcaaaaaataatatctttctttccatgcaaactggtggagcatctcacacagtgacagcagctggggctgtgcccacctccagtgaggttctgtgcacgtggctccagcagtgccctgaaccaatggcactgcgctgggaatgcttcccatggggatgcccttccacctccatatacacaaaaacagaataaatcacatataaatagtcacttttcagc

SEQ ID NO: 80353 - DNA, 600 bp, Chicken  19866894372594_3
cattgaggttggaaaaggctgtaggatcacctggaggtccaaccccccaccccatccgcactgttccggttgaccgcatccctcagcgccgcccatggactgcatggggtcagagtatctctgccataacacaatggcaaagggatggctggcaggcrgttcgttccagtgaatatttcattagaaatttgcatttaaatgtgagtcccgtgggtcttcttgcttctctggtcattaatgcacgcattgagtccttggtggtcctccccacgtgcacccattccccattgcctcyatccmctggtgctgctgtacagccacgttaacagcttggaagaacagaggagagcctttgtttgccacaaggtctttattagcaaaaaataatatctttctttccatgcaaactggtggagcatctcacacagtgacagcagctggggctgtgcccacctccagtgaggttctgtgcacgtggctccagcagtgccctgaaccaatggcactgcgctgggaatgcttcccatggggatgcccttccacctccatatacacaaaaacagaataaatcacatataaatagtcacttttcagcagtaa

SEQ ID NO: 80354 - DNA, 600 bp, Chicken  19866894372598_1
tgaaaatatttgaatatttttaattttgtatatctacagaacttagtaatatatggaaatatggtgctgaacacaagcatccagcagaaatatatatatatatgtataaataaaaacccacccaccaaaccacactgtaaagaatttacatcttttagtatttgtctcgagcaaatatgttcttagttacaggtgtaatctgtatttactttgcatgtcagttcatctctgctaatgtctgagagcacacacaagaggggtcaattccaaatgcctcgaccaggaggtgaaaagcttcartggcagtttctgctttgttagatatcagaggatctccatggaagcctttcctatgagagatgaatttttagtatctactaaatcatgcttgtttcaagataccttaccttctttggattagaaacaaaaaatacgtacaggaatcctggtatgcaagaaattacttgagcaggtgattataaacggtccaatttattaagcttaataagttactgttatcctgaaagttaagctgaaggatctaccttgcttttatagcagggaaggagcttattcatgtgctaccacatcagctagtga

SEQ ID NO: 80355 - DNA, 516 bp, Chicken  19866894372598_2
tgtttcaagataccttaccttctttggattagaaacaaaaaatacgtacaggaatcctggtatgcaagaaattacttgagcaggtgattataaacggtccaatttattaagcttaataagttactgttatcctgaaagttaagctgaaggatctaccttgcttttatagcagggaaggagcttattcatgtgctaccacatcagctagtgaggagtagtaccttgctgcaagcaagttcactgttcatgtttctctgtccaaagcctgctttctcattgcagagctctgaccttccctgraagtggatagaaaagcctaaatttgaagctcttccaaatctgtrtgatagaggtttttgtttagaaataaaaacatggaggaggaagaatgagaaataagtgaaattagtcatactgtagatgtgaacatagagatgtaaagatatgtcttacattgtagtaactggagctcggatagtaaattggaacttgtatgggtttatctatctcaggtaa

SEQ ID NO: 80356 - DNA, 472 bp, Chicken  19866894372598_3
cgtacaggaatcctggtatgcaagaaattacttgagcaggtgattataaacggtccaatttattaagcttaataagttactgttatcctgaaagttaagctgaaggatctaccttgcttttatagcagggaaggagcttattcatgtgctaccacatcagctagtgaggagtagtaccttgctgcaagcaagttcactgttcatgtttctctgtccaaagcctgctttctcattgcagagctctgaccttccctgraagtggatagaaaagcctaaatttgaagctcttccaaatctgtrtgatagaggtttttgtttagaaataaaaacatggaggaggaagaatgagaaataagtgaaattagtcatactgtagatgtgaacatagagatgtaaagatatgtcttacattgtagtaactggagctcggatagtaaattggaacttgtatgggtttatctatctcaggtaa

SEQ ID NO: 80357 - DNA, 600 bp, Chicken  19866894372613_1
ttagaaaagaggatcttgaagactgtgggaagtcaaacttctgtgagaagaaggggagggaagtgcttttatagagtggcttaggtttgaggggaccttaaggaccgtatagttccaacccctgtgccatgggttgggtgtaactctgcagatcaaactgcccagcaccccatccaacctggccttgtgtgcctccagggatggggtgtccacaattcactgggcagcctgcaccaacacctcaccaccctctcagtaaaaaatttcattctaacgtctaatctaaatctctcctctttyactttaaagccattccccttgtcttatcactatcagactgtgtaataagtcagtctctcctgtctgtaagcttgcctcaagtactggaatgccacaaggacatctccaagccttcccttctccaagctaaacgagcccaactctctcaacctttcttcataggagaggtgctccagtcctctgactgtcttcatggccttcctctggacctgcttcaacagctgtgtatcctttccatacttggggctccaggcctggacatctttccctctgctcaacagttgtgggggctttggctca

SEQ ID NO: 80358 - DNA, 600 bp, Chicken  19866894372613_2
tcaacacttactctggtaacttctgcagtcatgttttctacttgaggtttctaattttagtattcaaacagttagtaaaataaactgaaagagctgattttagccattcctgaaagctaggttccacttcagtagcagccttaggtgtgtgcgtgtggtgattttgccctagggcatgtttggggcgctggaggagtgcagtgcagaggctgctccgggaacagacaggcctggctctggcagctgctccagtcgttttggatatgggtatccagcactaacgcagttggacagctgctyttccgagtgttagatttgtacatttgcactttcttatatttagggaagagtggaatttgatagaaaagcaatccatgccatttgaggtggtcaaagaaacggaatcttttgcatccgtgtttgagcattagggcataaacaacagaccagtgaggctcaggtcaaccatgatgtaactggttaagcacctggattaatgccataagggctgggttcagtttctcagttttgtactatctctttgttttaatgctgattttggtggattgcatcacaaataatagtacttaacatcaagct

SEQ ID NO: 80359 - DNA, 599 bp, Chicken  19866894372616_1
  misc_feature (1)..(138): n is any nucleotide
nnnnnnnnnnnnnnnnnnnnnnnnnnnnnnnnnnnnnnnnnnnnnnnnnnnnnnnnnnnnnnnnnnnnnnnnnnnnnnnnnnnnnnnnnnnnnnnnnnnnnnnnnnnnnnnnnnnnnnnnnnnnnnnnnnnnnnnnnnaaatttgtgtgtggccagtgctggaggaacggacagctggtggagccagataaagacctcaagtactgtagtgccaaagcccgccactggtgagcaatgcaacctcctctttcccccacccctcctgaagggcaagaatttctcctcttacattctccaagkctccatttggcactgttggaagaggttgtaaggtttcctagcagcctctttgtcctcagggtgttttatagtgagtgttgcaggtagctcttttccagtttccagctctcttcattactgyttgtacctgctgccagcaccrtgcgtggtgcatcacagccagactcttaatcttagtgctwgcagtccagctcctgcaattccctttcctccagctatcattcctccttagcacggtcactaaaacagttctgctctgagctcatttatactctgtgctgtttgaagacgtctgtcat

SEQ ID NO: 80360 - DNA, 599 bp, Chicken  19866894372616_2
  misc_feature (1)..(17): n is any nucleotide
nnnnnnnnnnnnnnnnnaaatttgtgtgtggccagtgctggaggaacggacagctggtggagccagataaagacctcaagtactgtagtgccaaagcccgccactggtgagcaatgcaacctcctctttcccccacccctcctgaagggcaagaatttctcctcttacattctccaagkctccatttggcactgttggaagaggttgtaaggtttcctagcagcctctttgtcctcagggtgttttatagtgagtgttgcaggtagctcttttccagtttccagctctcttcattactgyttgtacctgctgccagcaccrtgcgtggtgcatcacagccagactcttaatcttagtgctwgcagtccagctcctgcaattccctttcctccagctatcattcctccttagcacggtcactaaaacagttctgctctgagctcatttatactctgtgctgtttgaagacgtctgtcatgtcactattagcaattattcaaggtgttgtacttctttttcaattagtttccatggccctttcattgcttttgttgctcttctctgacacaagtcttgtctctttgtacctcctaattacg

SEQ ID NO: 80361 - DNA, 600 bp, Chicken  19866894372616_3
ttgtgtgtggccagtgctggaggaacggacagctggtggagccagataaagacctcaagtactgtagtgccaaagcccgccactggtgagcaatgcaacctcctctttcccccacccctcctgaagggcaagaatttctcctcttacattctccaagkctccatttggcactgttggaagaggttgtaaggtttcctagcagcctctttgtcctcagggtgttttatagtgagtgttgcaggtagctcttttccagtttccagctctcttcattactgyttgtacctgctgccagcaccrtgcgtggtgcatcacagccagactcttaatcttagtgctwgcagtccagctcctgcaattccctttcctccagctatcattcctccttagcacggtcactaaaacagttctgctctgagctcatttatactctgtgctgtttgaagacgtctgtcatgtcactattagcaattattcaaggtgttgtacttctttttcaattagtttccatggccctttcattgcttttgttgctcttctctgacacaagtcttgtctctttgtacctcctaattacgtgggacccattgggtttgatag

SEQ ID NO: 80362 - DNA, 600 bp, Chicken  19866894372616_4
gccagataaagacctcaagtactgtagtgccaaagcccgccactggtgagcaatgcaacctcctctttcccccacccctcctgaagggcaagaatttctcctcttacattctccaagkctccatttggcactgttggaagaggttgtaaggtttcctagcagcctctttgtcctcagggtgttttatagtgagtgttgcaggtagctcttttccagtttccagctctcttcattactgyttgtacctgctgccagcaccrtgcgtggtgcatcacagccagactcttaatcttagtgctwgcagtccagctcctgcaattccctttcctccagctatcattcctccttagcacggtcactaaaacagttctgctctgagctcatttatactctgtgctgtttgaagacgtctgtcatgtcactattagcaattattcaaggtgttgtacttctttttcaattagtttccatggccctttcattgcttttgttgctcttctctgacacaagtcttgtctctttgtacctcctaattacgtgggacccattgggtttgatagaaagggaatattggctggtaacaggccattggtccatgga

SEQ ID NO: 80363 - DNA, 600 bp, Chicken  19866894372620_1
agagatgatattcatgtgttatctgtaaaaaaatgttcttccaacataagtgctacaagaagacactaagtggaacctatcaagttctgtgtttaagaacttgtaaaagtatcaaacactctcatgcttcacttatttattattgagcttaaacatttctacactgttgaagagtttaatccagagaacctatgatcctgaatcacagccaccaggtgcccaacaggactacctcaaaagctatcttgttggagaagagttgaaacgcaacaagcttgactgcatatcacacaggctttytgtaatataactgaaacaccatctagacagctcacatgcaagccagtcataagtgtttttctttggaaagtgtaaaaaattactacaatcccttctaaggtgggcaaagattaccagcagttttgattctagcatttcttattttaatataggactgcactgtaacaatgagtgaaaatttctagtcttgctaaatgtcatcacaaattgttactaacttcagttaggatgtgtgtgcaccatttgccagcatctgcaactgcctgagcaataaaactaggaatctgtaacttcattacc

SEQ ID NO: 80364 - DNA, 600 bp, Chicken  19866894372622_1
tgacatcagtcctatttgtgactgggtgacctgtatgacaataccaatatagctacttaaaaccactcagttgtaccatttgggttttctttttctgtcgtgtgtgagatttttttctttccccctctcaatactggctaataatattttctttgaatctacatagtgaacatattagaaaaatgttattgagaaatgacttaagtggaaattatttaattgtacctgttgtctctgtaggtgatagcctaagtgtgcatcattttcagaaacagttcattgctgcagtgttgaacaagytaaagaactgctgtatgtggacttgctgtaattctttaataagacaaagtgatacctgaagctactagttttctatctgagaattaatatgtaatttattaaaacaaagctgtcttgtatctttccgatataattagctttccacatttatcaaaacacttcrgggcttgagaaagaaatgtcttttcttgaaacttctagcatgtttcagtgcttgtaagctcaggaaatggcaggtataatttgtaaagttaactgaagactttcaaagactgagacttcaatctgagaagacttcaa

SEQ ID NO: 80365 - DNA, 600 bp, Chicken  19866894372622_2
tagtgaacatattagaaaaatgttattgagaaatgacttaagtggaaattatttaattgtacctgttgtctctgtaggtgatagcctaagtgtgcatcattttcagaaacagttcattgctgcagtgttgaacaagytaaagaactgctgtatgtggacttgctgtaattctttaataagacaaagtgatacctgaagctactagttttctatctgagaattaatatgtaatttattaaaacaaagctgtcttgtatctttccgatataattagctttccacatttatcaaaacacttcrgggcttgagaaagaaatgtcttttcttgaaacttctagcatgtttcagtgcttgtaagctcaggaaatggcaggtataatttgtaaagttaactgaagactttcaaagactgagacttcaatctgagaagacttcaagtgttagggaagggcaaggtcacagttgccagtgttatgatcctattagtcagagcagttaagctaatctgagttgtgttcagagtaagttaactcctacactcaggaatgggtgttgaaaattcaacaggcagcacttaagtgttgatgcgaccttagagct

SEQ ID NO: 80366 - DNA, 599 bp, Chicken  19866894372629_1
  misc_feature (1)..(16): n is any nucleotide
nnnnnnnnnnnnnnnntgaaatcattgtttcacccagtttctgacatactgaactttctgtgtagtctttctatttgttttaatcgttttgtctttcattgctgctttcaaactggccttgctccctaaattcacagattataaagccaaaaggtctgcagagcagcatggtgtgtccttggtggtcccagggaaggtgtgctcgtgccaaaagcaaggactaatcccttttcatgctgctacatggagccatggaaaacataccagcacatggacagataggtcatgattgccagaaayaaaacaaatccttagattttgtgttaagaggcttccacattctctgttagttttatgacttcatgaaaggcagaggtgatggcagtagtaccactataatgatcacgtgtcataacattactccatgacaagaacaatgttctgctggattttttattatacaaagcagttgcaccatatctctataagttatagtcagtgctggcatggrctgctgatatttttccatccattctgacatctacacggctgcacacatactatcatccacaaatgcatatacacacattctcaactaa

SEQ ID NO: 80367 - DNA, 600 bp, Chicken  19866894372629_2
aagcaaggactaatcccttttcatgctgctacatggagccatggaaaacataccagcacatggacagataggtcatgattgccagaaayaaaacaaatccttagattttgtgttaagaggcttccacattctctgttagttttatgacttcatgaaaggcagaggtgatggcagtagtaccactataatgatcacgtgtcataacattactccatgacaagaacaatgttctgctggattttttattatacaaagcagttgcaccatatctctataagttatagtcagtgctggcatggrctgctgatatttttccatccattctgacatctacacggctgcacacatactatcatccacaaatgcatatacacacattctcaactaataacagttcataattttttactgataggtcaaaactctcttattttaaatttagacattgacctagagcctatttaaacaaagcaacacaatttttcccattttgtatttgcatatgtttctgtgtgattatttcttcccgaaacagaaatagctaaaatagaaagcaagaataagggagtcatgaataaaagtaggtgacagtggaaaaga

SEQ ID NO: 80368 - DNA, 600 bp, Chicken  19866894372631_1
cctcgctagcaaaatgcaatgcatcatttgtctcatttggggcagcagctcctctggtttgctccgagcattaaatcagaagctttgattgtgagtgacagaggcacggaattgtatggctcaccggagtgcctggaagccagcagtggtaccactcaggatcccatcccatccctggcagtgctgcagacggctgagcaaaggctgtcggctcagcgaccgaaccaacagcacaaagaaaaatgcagatttgtttctaaaagggcttttttcctttgccctgaagtttccttcctctcrttgcgcccattccagatgctgctccgctgactcattcattacaggcaaatcaaataaacamatgaaaaattaaagccattgttccccagctatgccatcggggtgctgttgcagttctctgcatatttataactcttcttcaggctgcgtgtccaattggaacagatggtggataggttgcactgccttacctactccagcaaaccgggcaggagtccatatcttcagcagatgaaataacagcagatttaggaggagacattgtagtcattgaaagctattttcaattgcttatcgtgt

SEQ ID NO: 80369 - DNA, 600 bp, Chicken  19866894372631_2
ctccgagcattaaatcagaagctttgattgtgagtgacagaggcacggaattgtatggctcaccggagtgcctggaagccagcagtggtaccactcaggatcccatcccatccctggcagtgctgcagacggctgagcaaaggctgtcggctcagcgaccgaaccaacagcacaaagaaaaatgcagatttgtttctaaaagggcttttttcctttgccctgaagtttccttcctctcrttgcgcccattccagatgctgctccgctgactcattcattacaggcaaatcaaataaacamatgaaaaattaaagccattgttccccagctatgccatcggggtgctgttgcagttctctgcatatttataactcttcttcaggctgcgtgtccaattggaacagatggtggataggttgcactgccttacctactccagcaaaccgggcaggagtccatatcttcagcagatgaaataacagcagatttaggaggagacattgtagtcattgaaagctattttcaattgcttatcgtgtttttcttggtctcttttccagcactgttcattattccttccggaatttagatggcacattt

SEQ ID NO: 80370 - DNA, 568 bp, Chicken  19866894372647_1
agagctcattttagagaatgcccagcagtatgtatagctacagaaaaacaatattcaaaaatctgacctagatagcagtgtttcctagtgactagaattcattaaaaacagcagattataaatgtatcacacaggactctttgaagctttagagttagattcagtttaaataatgacccaacctagccaaaaataaaagcaacattttttcttacaacaacaacaacaataataataataaataaaaataataaaaaaataacctgaacaaaaaaatagaacaaccaatcaaacaaagayccaaccccaaacctcccaaaaagctcagagttattattagcctcttcttaacagcatcagtcagtatgaaacagagctttggttttacatgagtgaatgcattctttgggcatgagagaagccaatgagctcacagacctgagtgttgggttcaaagagattccaaaagcaaaagcaaaactcagcagaaagtttcaaagtttccattccagctaaagcattttcatgtaattctggtggaaaactacgatcattaaattatgccatg

SEQ ID NO: 80371 - DNA, 600 bp, Chicken  19866894372650_1
actggaaagttgttttctcagctggaataagaatgtgccaagagtaaacccccaaaatatattacttattatgtgcattttttatttcctttatttcacttcatttatttatagcagttcatttgaaattgctgcaagaaaaactgaagaaaagccattatatattttctaccccatcataaaatactttacaagaaatgaaatatggattctgtcatttagtttatacattcttggttttatagctttctgggttttgcaacttttaggtactctgaatagtcttttattatatagctsttatgatttcagtggtgttcctcaaaataataaaatgttctccatcaaatatcagaatcaatgagtaaaaagtcttttttttttcttgaagtataaaggaaaactgaggaacttaatatatgaccaaattcttatgacacaaagcagaaaaaaaaacaaaacaaaaaacaaacaaacaaacaaacaaaaaaaacacttgcttacactctcagctggcagttactagtatattctgaaaaagaaaaagattttttttttaatgtaagcaagctcttaacataataatgttgtatccgaatt

SEQ ID NO: 80372 - DNA, 600 bp, Chicken  19866894372657_1
tgacagagattcaaagcgctgaacgagtctctgtaggtttgcaaagtcactgccatttgccttttaggcttgggaagaacgcaattcagagaagtgccagcatttgtctatgtgattcacagtgggactgggatgagagacaggaacggtgtctgcctctgtgaaaacagcaacagaaaaagtcattggtattgttcccaggctcttgtgatgttcacgttggaacaacaagtgatacttagcccatttctagatagaattatgaatcatggtcctctgggaacgttggctcatacaccyctgaaatttggatttgtgcaggtctgaacataaggaaagtattacaagcaagcttgttttctttttttcctgcagtctaaagagaaggtcttgcccgcatgtgaaatttcagtgctataaataatttcttccttcctttttgagagtgactttaaaaaatggaaatgtttgctttcatcttactttgttttctgttgacttaatttgattgctgcccagataaaaatattagctcatatatttcaacgtatttacttagaatgcgtgtgacatcagctggctgttaccatctcaggaaaa

SEQ ID NO: 80373 - DNA, 491 bp, Chicken  19866894372663_1
tccatataggctctttcacccaaaagctctccattctcaaatatctaaaagaaatatgacaagaaaaaccttgtctcatagaataagtgtcccaggtgggagggctgcagtaaggccacctgccagagaccagaaaaaacaaaggcactgccagctggctttgctcaccatctccttacatggcctgaaagaaatactggaaagcctgatgccaagtacaatccttgccacagatgctattgataggatagcagtgggatggctgagctgacaagcagtcctaattcagctctgacctcygaaacctctaaaayagttcctaacatacaacaacactgaaaaaagacatggagcatcgtttgaagacaaaaaatgcaatgggattgaaagttactgtgggctagggagagccagtgaaggatacctgcattgaaggatagcccatactggtatgagccaattcattcacaccgtacatgacgtaatgaagt

SEQ ID NO: 80374 - DNA, 477 bp, Chicken  19866894372663_2
ttcacccaaaagctctccattctcaaatatctaaaagaaatatgacaagaaaaaccttgtctcatagaataagtgtcccaggtgggagggctgcagtaaggccacctgccagagaccagaaaaaacaaaggcactgccagctggctttgctcaccatctccttacatggcctgaaagaaatactggaaagcctgatgccaagtacaatccttgccacagatgctattgataggatagcagtgggatggctgagctgacaagcagtcctaattcagctctgacctcygaaacctctaaaayagttcctaacatacaacaacactgaaaaaagacatggagcatcgtttgaagacaaaaaatgcaatgggattgaaagttactgtgggctagggagagccagtgaaggatacctgcattgaaggatagcccatactggtatgagccaattcattcacaccgtacatgacgtaatgaagt

SEQ ID NO: 80375 - DNA, 599 bp, Chicken  19866894372682_1
  misc_feature (1)..(113): n is any nucleotide
nnnnnnnnnnnnnnnnnnnnnnnnnnnnnnnnnnnnnnnnnnnnnnnnnnnnnnnnnnnnnnnnnnnnnnnnnnnnnnnnnnnnnnnnnnnnnnnnnnnnnnnnnnnnnnnnnaggaggcaggaggcagcacgccccgttacttttcctcccacgagggattgtggggctaggctgctccgagcgttatgagatccccgtgccctctactggctgctctggtcacgctgggatttgcagacgtccagcttcatgcttttcccatgtttgttttctttcgttccagctaatgccagtatcrccataccattcagtctccttgacaggacctggactcctctctattcctcttttcatctcaaactcattgaccatctcctcccatctgtctcgcttggagaaataaacagcatcccsttctagcagatggacctgggggagatcaggaaggtccgacacatcagcagcgcrctgctggagatcagggtcagwctctgcaaccaygctgtacgtgtggctgcagagtcctcgtctgaggcatcgctcctgaagtagacagtcrtagtcctctgtgtcagtgctatyggagactgctgcaag

SEQ ID NO: 80376 - DNA, 600 bp, Chicken  19866894372682_2
aggcaggaggcagcacgccccgttacttttcctcccacgagggattgtggggctaggctgctccgagcgttatgagatccccgtgccctctactggctgctctggtcacgctgggatttgcagacgtccagcttcatgcttttcccatgtttgttttctttcgttccagctaatgccagtatcrccataccattcagtctccttgacaggacctggactcctctctattcctcttttcatctcaaactcattgaccatctcctcccatctgtctcgcttggagaaataaacagcatcccsttctagcagatggacctgggggagatcaggaaggtccgacacatcagcagcgcrctgctggagatcagggtcagwctctgcaaccaygctgtacgtgtggctgcagagtcctcgtctgaggcatcgctcctgaagtagacagtcrtagtcctctgtgtcagtgctatyggagactgctgcaagcgtgatggcctctgatctccttgggagaaaggagagaaaaagtgatacccgcatcctgccgctggggtgacctggctggccctgcgccttcagaaaggaacatctcttctggacatg

SEQ ID NO: 80377 - DNA, 600 bp, Chicken  19866894372682_3
aggctgctccgagcgttatgagatccccgtgccctctactggctgctctggtcacgctgggatttgcagacgtccagcttcatgcttttcccatgtttgttttctttcgttccagctaatgccagtatcrccataccattcagtctccttgacaggacctggactcctctctattcctcttttcatctcaaactcattgaccatctcctcccatctgtctcgcttggagaaataaacagcatcccsttctagcagatggacctgggggagatcaggaaggtccgacacatcagcagcgcrctgctggagatcagggtcagwctctgcaaccaygctgtacgtgtggctgcagagtcctcgtctgaggcatcgctcctgaagtagacagtcrtagtcctctgtgtcagtgctatyggagactgctgcaagcgtgatggcctctgatctccttgggagaaaggagagaaaaagtgatacccgcatcctgccgctggggtgacctggctggccctgcgccttcagaaaggaacatctcttctggacatgttcacgtactggctaagttgggtttgtccagcraaaagtagtatcttcccactc

SEQ ID NO: 80378 - DNA, 600 bp, Chicken  19866894372682_4
gatccccgtgccctctactggctgctctggtcacgctgggatttgcagacgtccagcttcatgcttttcccatgtttgttttctttcgttccagctaatgccagtatcrccataccattcagtctccttgacaggacctggactcctctctattcctcttttcatctcaaactcattgaccatctcctcccatctgtctcgcttggagaaataaacagcatcccsttctagcagatggacctgggggagatcaggaaggtccgacacatcagcagcgcrctgctggagatcagggtcagwctctgcaaccaygctgtacgtgtggctgcagagtcctcgtctgaggcatcgctcctgaagtagacagtcrtagtcctctgtgtcagtgctatyggagactgctgcaagcgtgatggcctctgatctccttgggagaaaggagagaaaaagtgatacccgcatcctgccgctggggtgacctggctggccctgcgccttcagaaaggaacatctcttctggacatgttcacgtactggctaagttgggtttgtccagcraaaagtagtatcttcccactctgcagaaactggtgagtctgc

SEQ ID NO: 80379 - DNA, 600 bp, Chicken  19866894372682_5
ctctactggctgctctggtcacgctgggatttgcagacgtccagcttcatgcttttcccatgtttgttttctttcgttccagctaatgccagtatcrccataccattcagtctccttgacaggacctggactcctctctattcctcttttcatctcaaactcattgaccatctcctcccatctgtctcgcttggagaaataaacagcatcccsttctagcagatggacctgggggagatcaggaaggtccgacacatcagcagcgcrctgctggagatcagggtcagwctctgcaaccaygctgtacgtgtggctgcagagtcctcgtctgaggcatcgctcctgaagtagacagtcrtagtcctctgtgtcagtgctatyggagactgctgcaagcgtgatggcctctgatctccttgggagaaaggagagaaaaagtgatacccgcatcctgccgctggggtgacctggctggccctgcgccttcagaaaggaacatctcttctggacatgttcacgtactggctaagttgggtttgtccagcraaaagtagtatcttcccactctgcagaaactggtgagtctgcaggtgaaggagg

SEQ ID NO: 80380 - DNA, 600 bp, Chicken  19866894372682_6
catgtttgttttctttcgttccagctaatgccagtatcrccataccattcagtctccttgacaggacctggactcctctctattcctcttttcatctcaaactcattgaccatctcctcccatctgtctcgcttggagaaataaacagcatcccsttctagcagatggacctgggggagatcaggaaggtccgacacatcagcagcgcrctgctggagatcagggtcagwctctgcaaccaygctgtacgtgtggctgcagagtcctcgtctgaggcatcgctcctgaagtagacagtcrtagtcctctgtgtcagtgctatyggagactgctgcaagcgtgatggcctctgatctccttgggagaaaggagagaaaaagtgatacccgcatcctgccgctggggtgacctggctggccctgcgccttcagaaaggaacatctcttctggacatgttcacgtactggctaagttgggtttgtccagcraaaagtagtatcttcccactctgcagaaactggtgagtctgcaggtgaaggaggcaggcgcctgtttttctacttctgcacattatttgtacatagactgaaaagaaacaat

SEQ ID NO: 80381 - DNA, 600 bp, Chicken  19866894372682_7
gctaatgccagtatcrccataccattcagtctccttgacaggacctggactcctctctattcctcttttcatctcaaactcattgaccatctcctcccatctgtctcgcttggagaaataaacagcatcccsttctagcagatggacctgggggagatcaggaaggtccgacacatcagcagcgcrctgctggagatcagggtcagwctctgcaaccaygctgtacgtgtggctgcagagtcctcgtctgaggcatcgctcctgaagtagacagtcrtagtcctctgtgtcagtgctatyggagactgctgcaagcgtgatggcctctgatctccttgggagaaaggagagaaaaagtgatacccgcatcctgccgctggggtgacctggctggccctgcgccttcagaaaggaacatctcttctggacatgttcacgtactggctaagttgggtttgtccagcraaaagtagtatcttcccactctgcagaaactggtgagtctgcaggtgaaggaggcaggcgcctgtttttctacttctgcacattatttgtacatagactgaaaagaaacaatataaacttattaggaagcagagg

SEQ ID NO: 80382 - DNA, 460 bp, Chicken  19866894372682_8
gtccgacacatcagcagcgcrctgctggagatcagggtcagwctctgcaaccaygctgtacgtgtggctgcagagtcctcgtctgaggcatcgctcctgaagtagacagtcrtagtcctctgtgtcagtgctatyggagactgctgcaagcgtgatggcctctgatctccttgggagaaaggagagaaaaagtgatacccgcatcctgccgctggggtgacctggctggccctgcgccttcagaaaggaacatctcttctggacatgttcacgtactggctaagttgggtttgtccagcraaaagtagtatcttcccactctgcagaaactggtgagtctgcaggtgaaggaggcaggcgcctgtttttctacttctgcacattatttgtacatagactgaaaagaaacaatataaacttattaggaagcagagggcatatctccatgcctgggggaatt

SEQ ID NO: 80383 - DNA, 559 bp, Chicken  19866894372699_1
tttttttttttcattcaacattcatcctcaaaatgcttctgctctggaaagcttcgacactgcaatctactcaggctactcagcagtttcaggctgcttatctaaaagctgtgataacttcagtacgccagcacaaccgccttcagataccagactgggaagcctgtagaaaattccagcagtggggaagctgtatagttgcaatatatgtgtaatgatgggcttcttcatagtctgttgggtgtgaagatctaaagccacatccatcagcttgacctggatctcaggctgaaggacctyatttcttctgctgtaattggagggttctgtggtgctggcatgaccttgataaaacccagcagtaaaacatgaacagaacgagcagaacaaatctaacttctgcctgatataatagactgtgaagtacctttgagtggatttaggcagaatgcttttcccagggcagtaggatagaagagcaaatttgtgctaaaataattgtgtaattctctcacatacctacatagctgaaagaagtttgttttcttggcttctttca

SEQ ID NO: 80384 - DNA, 600 bp, Chicken  19866894372702_1
agcttttatgtataaggatagcagtgctgtgttgtagggttattttgttattttgtttgctttgctgacattgacttggtaggaaacagcggggctggagccagtatgctggactagccagttactgcacactgccttcctggctgaaatggtatgctgcagctgttccccaagagactgggaggatgatttaaaagcaacaacaaaactcccataggaatgcagggaatatcatgtgtctgggatttcggaaagagctggagcaaatgtggccgtgtttgctgtgagcttgttggcccygctttgggcctggaccatttgaccttcagaggtcccttccaaatgaaattattctgtgattctctgtttgtgcctgagcccgggcctgctggacactgctgtcatggcactggaaggattaatgtggaagtaaaaaggctaacacaagtggcaactgcttggtacggaaagcaaatgaagaagatagttgagagaattaagcctcttccgtgaactggagaggccatctctagctcacraggctttcagctttgcccagggttctggttagagctatgcttacttctagatgacaaaaaa

SEQ ID NO: 80385 - DNA, 499 bp, Chicken  19866894372702_2
ctgggatttcggaaagagctggagcaaatgtggccgtgtttgctgtgagcttgttggcccygctttgggcctggaccatttgaccttcagaggtcccttccaaatgaaattattctgtgattctctgtttgtgcctgagcccgggcctgctggacactgctgtcatggcactggaaggattaatgtggaagtaaaaaggctaacacaagtggcaactgcttggtacggaaagcaaatgaagaagatagttgagagaattaagcctcttccgtgaactggagaggccatctctagctcacraggctttcagctttgcccagggttctggttagagctatgcttacttctagatgacaaaaaataagcaggcgttactgttgatcttgtctttgttgatggagattgcagtctttcagctttggctttgcaactgtgttttgctctgtctgtggtcatctgtcaccagtgttttgtgttctgcctgcttcgttttgatttt

SEQ ID NO: 80386 - DNA, 600 bp, Chicken  19866894372708_1
aaataactttacaaaaggctcaaagccagcaatatttgactactatacagtaaatcagccaaacagcttagctccccatggaaaatcctcaactgagattcggcatgataacagaatacttaggttttcatccaaaacctttatgccacattttcttactcattcttacacgttttgaacagctgagaatttattgggcttttgcctgttgaaaaagatcttgtggatatttcaattgagtgtttattgttaacagagttcagactccagggacaaggaatgttttctatcttagatcartaracaatgggaaatggccagtgtcacaaccaagtcccatcaaatagatcacaacatgtcattcatatttgttgaggaaaaaattgtctaaggaagtcctgmtttaaaaataataataataataatgataataaattaacttcattacatctagtgaaaaataaaaagaacatygtcctccaaaaaagtactgtgtgtgagatccattgaaagacttggctttgatttgtgggtgcggaacrtgtaaactatttggtatttgctggtgggagacagagtgctgttccactgagataccaa

SEQ ID NO: 80387 - DNA, 600 bp, Chicken  19866894372708_2
taactttacaaaaggctcaaagccagcaatatttgactactatacagtaaatcagccaaacagcttagctccccatggaaaatcctcaactgagattcggcatgataacagaatacttaggttttcatccaaaacctttatgccacattttcttactcattcttacacgttttgaacagctgagaatttattgggcttttgcctgttgaaaaagatcttgtggatatttcaattgagtgtttattgttaacagagttcagactccagggacaaggaatgttttctatcttagatcartaracaatgggaaatggccagtgtcacaaccaagtcccatcaaatagatcacaacatgtcattcatatttgttgaggaaaaaattgtctaaggaagtcctgmtttaaaaataataataataataatgataataaattaacttcattacatctagtgaaaaataaaaagaacatygtcctccaaaaaagtactgtgtgtgagatccattgaaagacttggctttgatttgtgggtgcggaacrtgtaaactatttggtatttgctggtgggagacagagtgctgttccactgagataccaaaca

SEQ ID NO: 80388 - DNA, 600 bp, Chicken  19866894372708_3
gcatgataacagaatacttaggttttcatccaaaacctttatgccacattttcttactcattcttacacgttttgaacagctgagaatttattgggcttttgcctgttgaaaaagatcttgtggatatttcaattgagtgtttattgttaacagagttcagactccagggacaaggaatgttttctatcttagatcartaracaatgggaaatggccagtgtcacaaccaagtcccatcaaatagatcacaacatgtcattcatatttgttgaggaaaaaattgtctaaggaagtcctgmtttaaaaataataataataataatgataataaattaacttcattacatctagtgaaaaataaaaagaacatygtcctccaaaaaagtactgtgtgtgagatccattgaaagacttggctttgatttgtgggtgcggaacrtgtaaactatttggtatttgctggtgggagacagagtgctgttccactgagataccaaacaaactgttctaggttaatcctgaagatgattcctgtctgccagagttgaagggcagaattcagaagagccaatagcctgaagtttacttgcttcaagtcc

SEQ ID NO: 80389 - DNA, 600 bp, Chicken  19866894372708_4
ttgaacagctgagaatttattgggcttttgcctgttgaaaaagatcttgtggatatttcaattgagtgtttattgttaacagagttcagactccagggacaaggaatgttttctatcttagatcartaracaatgggaaatggccagtgtcacaaccaagtcccatcaaatagatcacaacatgtcattcatatttgttgaggaaaaaattgtctaaggaagtcctgmtttaaaaataataataataataatgataataaattaacttcattacatctagtgaaaaataaaaagaacatygtcctccaaaaaagtactgtgtgtgagatccattgaaagacttggctttgatttgtgggtgcggaacrtgtaaactatttggtatttgctggtgggagacagagtgctgttccactgagataccaaacaaactgttctaggttaatcctgaagatgattcctgtctgccagagttgaagggcagaattcagaagagccaatagcctgaagtttacttgcttcaagtcccacccatctttctcttctccttcaattattatccccacttaggtaataatgataacgtaccctactgcagaa

SEQ ID NO: 80390 - DNA, 600 bp, Chicken  19866894372708_5
tttattgttaacagagttcagactccagggacaaggaatgttttctatcttagatcartaracaatgggaaatggccagtgtcacaaccaagtcccatcaaatagatcacaacatgtcattcatatttgttgaggaaaaaattgtctaaggaagtcctgmtttaaaaataataataataataatgataataaattaacttcattacatctagtgaaaaataaaaagaacatygtcctccaaaaaagtactgtgtgtgagatccattgaaagacttggctttgatttgtgggtgcggaacrtgtaaactatttggtatttgctggtgggagacagagtgctgttccactgagataccaaacaaactgttctaggttaatcctgaagatgattcctgtctgccagagttgaagggcagaattcagaagagccaatagcctgaagtttacttgcttcaagtcccacccatctttctcttctccttcaattattatccccacttaggtaataatgataacgtaccctactgcagaagactgagttggatcttaaatgatttcatctgttagaatctcatgcctcaaaagtcatgggcaatgcag

SEQ ID NO: 80391 - DNA, 600 bp, Chicken  19866894372708_6
tgccagagttgaagggcagaattcagaagagccaatagcctgaagtttacttgcttcaagtcccacccatctttctcttctccttcaattattatccccacttaggtaataatgataacgtaccctactgcagaagactgagttggatcttaaatgatttcatctgttagaatctcatgcctcaaaagtcatgggcaatgcagtactctggattgctttagctcagagctaaacatactgaaggactgtggagaagcctgcattgccattccaaaaaaacatgcttctttgaaaaaaaawtctgatatcatcaaacacatcttcttacctttaaatgcacttaaacaaattgccagaagttccaaggtgtttctctggagtcttcatgcatttaagacctatgatagtaacagggttccagtgtattggccctagcagaaagatagtccagagttatggtaggatctccccagttctgaacaagacagaagcatacagaaacaaacagaaaaccttcagtcatcattcacctcagtactgtgattccttgaggatacttcagcattcagcaactaataacatgttttcccaggctgaggt

SEQ ID NO: 80392 - DNA, 582 bp, Chicken  19866894372708_7
agaagttccaaggtgtttctctggagtcttcatgcatttaagacctatgatagtaacagggttccagtgtattggccctagcagaaagatagtccagagttatggtaggatctccccagttctgaacaagacagaagcatacagaaacaaacagaaaaccttcagtcatcattcacctcagtactgtgattccttgaggatacttcagcattcagcaactaataacatgttttcccaggctgaggtagtccctgtgtacccaggcatttcttcagtgcaaggaaaaatggcagcaggagsaagtattgctagaaaatttaygtgtaataaagatatacaacacagttaagtctctggtgaggtcttaatactagtctcactgtcagtgagggctacctccacaatagcaaagccaggaattcaataacaccccctccagattaatttcctgtaaagcaagcagacaaacctttagttaatattcatctcagatgaagtaaaggattgtgattattgctccagctcaatctgtgccgtcttgatgtaagccacaaaaggcagaggctgggacacaggttatag

SEQ ID NO: 80393 - DNA, 561 bp, Chicken  19866894372708_8
tggagtcttcatgcatttaagacctatgatagtaacagggttccagtgtattggccctagcagaaagatagtccagagttatggtaggatctccccagttctgaacaagacagaagcatacagaaacaaacagaaaaccttcagtcatcattcacctcagtactgtgattccttgaggatacttcagcattcagcaactaataacatgttttcccaggctgaggtagtccctgtgtacccaggcatttcttcagtgcaaggaaaaatggcagcaggagsaagtattgctagaaaatttaygtgtaataaagatatacaacacagttaagtctctggtgaggtcttaatactagtctcactgtcagtgagggctacctccacaatagcaaagccaggaattcaataacaccccctccagattaatttcctgtaaagcaagcagacaaacctttagttaatattcatctcagatgaagtaaaggattgtgattattgctccagctcaatctgtgccgtcttgatgtaagccacaaaaggcagaggctgggacacaggttatag

SEQ ID NO: 80394 - DNA, 599 bp, Chicken  19866894372712_1
  misc_feature (1)..(24): n is any nucleotide
nnnnnnnnnnnnnnnnnnnnnnnnaacaaaacatcccttaatatcatctggggaaaagggaaaaaaaaataaataggaggagttccatttcttgaagtaaggctgcagaatcgcaaacaaagatgtaattgtgctgagcttgaagtttcccattttcccacacagatatgaggatgaacgcagccggcggagcagcactgagaaggagttgattgccctgaagaaggtgagttaaggccatttgaaccctcctgctgtgtccaggtctttggggtgcatgcaggcagtgatttctctccmcaaagcatcgcacagaacaagtaccagcaggagctggtgctcaggtgtgcttgaactcagaccagcagcagttgtgcaagcgggagctggcgtgcagccacastacctgcacccaaagtcccccaccccaagggcagccccgagtcggctctcactaatcagcttcctctaatcaacttcctccttctctccccactgccactycaggacgtggaatgctttttcttaaacaaagcagagctgggggccaaggtgggaaggatggaaggagagtttggcttcctcagggtgctctacga

SEQ ID NO: 80395 - DNA, 600 bp, Chicken  19866894372712_2
tgcagaatcgcaaacaaagatgtaattgtgctgagcttgaagtttcccattttcccacacagatatgaggatgaacgcagccggcggagcagcactgagaaggagttgattgccctgaagaaggtgagttaaggccatttgaaccctcctgctgtgtccaggtctttggggtgcatgcaggcagtgatttctctccmcaaagcatcgcacagaacaagtaccagcaggagctggtgctcaggtgtgcttgaactcagaccagcagcagttgtgcaagcgggagctggcgtgcagccacastacctgcacccaaagtcccccaccccaagggcagccccgagtcggctctcactaatcagcttcctctaatcaacttcctccttctctccccactgccactycaggacgtggaatgctttttcttaaacaaagcagagctgggggccaaggtgggaaggatggaaggagagtttggcttcctcagggtgctctacgaggaggtaagcagctccctgttgcttcagctctgcatttctcaggcagatctggaaggcctatcctgaaggagaggggaaggatgggtaatgtggggcaatggtc

SEQ ID NO: 80396 - DNA, 600 bp, Chicken  19866894372712_3
ggagttgattgccctgaagaaggtgagttaaggccatttgaaccctcctgctgtgtccaggtctttggggtgcatgcaggcagtgatttctctccmcaaagcatcgcacagaacaagtaccagcaggagctggtgctcaggtgtgcttgaactcagaccagcagcagttgtgcaagcgggagctggcgtgcagccacastacctgcacccaaagtcccccaccccaagggcagccccgagtcggctctcactaatcagcttcctctaatcaacttcctccttctctccccactgccactycaggacgtggaatgctttttcttaaacaaagcagagctgggggccaaggtgggaaggatggaaggagagtttggcttcctcagggtgctctacgaggaggtaagcagctccctgttgcttcagctctgcatttctcaggcagatctggaaggcctatcctgaaggagaggggaaggatgggtaatgtggggcaatggtcagcccttatggtgaacgggggaccaacaatccacccccatgctgtcactgcaaaggggggaccaagtgtgcgagtggggttggatgggatcacagtgccag

SEQ ID NO: 80397 - DNA, 600 bp, Chicken  19866894372716_1
tggggacacagccagagctgcccttcctcccagtgccccaaacccttccccatggggaagcagcccaccctgcagcccactgccacccctttagcaccctgcaggtacctgatggagcacagctgagcaggcagcagccaccagccccgccagctggggaagcataatggatccagcatatgggcgattaaaaatgcaaggacagcgttcagggggagtcgtcgtttcccagcttaatttaagcagccctttctcccatttcccggccgtcgcagcccagaggacagcgaggtcaccctyccccgtgctcctgggctttgggtgtgcagagatgaaacggagcacttggggaacgtgggaagatgctatgttcmaaggatrgcgttgccttaagggtcactccaaatctgtgctgccggcagccctatctaagcatctcctgggctctggccgtgggaggagstctctcccaargccagcattgtggtgggtttgggggggtcagggcttgaggcacatctcctcctcctcctcctccctcyrttggtgtcacaatgtgaaaatttcagctcaggcaaaccagaggctgcacaaaagcag

SEQ ID NO: 80398 - DNA, 600 bp, Chicken  19866894372716_2
gcccactgccacccctttagcaccctgcaggtacctgatggagcacagctgagcaggcagcagccaccagccccgccagctggggaagcataatggatccagcatatgggcgattaaaaatgcaaggacagcgttcagggggagtcgtcgtttcccagcttaatttaagcagccctttctcccatttcccggccgtcgcagcccagaggacagcgaggtcaccctyccccgtgctcctgggctttgggtgtgcagagatgaaacggagcacttggggaacgtgggaagatgctatgttcmaaggatrgcgttgccttaagggtcactccaaatctgtgctgccggcagccctatctaagcatctcctgggctctggccgtgggaggagstctctcccaargccagcattgtggtgggtttgggggggtcagggcttgaggcacatctcctcctcctcctcctccctcyrttggtgtcacaatgtgaaaatttcagctcaggcaaaccagaggctgcacaaaagcagtcctgctgtttgggcaggccgtgctgcgggaagagcgcccgtccacgacaggggcaccttttatagggagataa

SEQ ID NO: 80399 - DNA, 600 bp, Chicken  19866894372716_3
gccacccctttagcaccctgcaggtacctgatggagcacagctgagcaggcagcagccaccagccccgccagctggggaagcataatggatccagcatatgggcgattaaaaatgcaaggacagcgttcagggggagtcgtcgtttcccagcttaatttaagcagccctttctcccatttcccggccgtcgcagcccagaggacagcgaggtcaccctyccccgtgctcctgggctttgggtgtgcagagatgaaacggagcacttggggaacgtgggaagatgctatgttcmaaggatrgcgttgccttaagggtcactccaaatctgtgctgccggcagccctatctaagcatctcctgggctctggccgtgggaggagstctctcccaargccagcattgtggtgggtttgggggggtcagggcttgaggcacatctcctcctcctcctcctccctcyrttggtgtcacaatgtgaaaatttcagctcaggcaaaccagaggctgcacaaaagcagtcctgctgtttgggcaggccgtgctgcgggaagagcgcccgtccacgacaggggcaccttttatagggagataactgctcg

SEQ ID NO: 80400 - DNA, 600 bp, Chicken  19866894372716_4
ataatggatccagcatatgggcgattaaaaatgcaaggacagcgttcagggggagtcgtcgtttcccagcttaatttaagcagccctttctcccatttcccggccgtcgcagcccagaggacagcgaggtcaccctyccccgtgctcctgggctttgggtgtgcagagatgaaacggagcacttggggaacgtgggaagatgctatgttcmaaggatrgcgttgccttaagggtcactccaaatctgtgctgccggcagccctatctaagcatctcctgggctctggccgtgggaggagstctctcccaargccagcattgtggtgggtttgggggggtcagggcttgaggcacatctcctcctcctcctcctccctcyrttggtgtcacaatgtgaaaatttcagctcaggcaaaccagaggctgcacaaaagcagtcctgctgtttgggcaggccgtgctgcgggaagagcgcccgtccacgacaggggcaccttttatagggagataactgctcggtgtataataatatataattagcaaggattatcctgtaatctagtctaattgacaggggaccgtagatgttgctcagcggac

SEQ ID NO: 80401 - DNA, 600 bp, Chicken  19866894372716_5
agcatatgggcgattaaaaatgcaaggacagcgttcagggggagtcgtcgtttcccagcttaatttaagcagccctttctcccatttcccggccgtcgcagcccagaggacagcgaggtcaccctyccccgtgctcctgggctttgggtgtgcagagatgaaacggagcacttggggaacgtgggaagatgctatgttcmaaggatrgcgttgccttaagggtcactccaaatctgtgctgccggcagccctatctaagcatctcctgggctctggccgtgggaggagstctctcccaargccagcattgtggtgggtttgggggggtcagggcttgaggcacatctcctcctcctcctcctccctcyrttggtgtcacaatgtgaaaatttcagctcaggcaaaccagaggctgcacaaaagcagtcctgctgtttgggcaggccgtgctgcgggaagagcgcccgtccacgacaggggcaccttttatagggagataactgctcggtgtataataatatataattagcaaggattatcctgtaatctagtctaattgacaggggaccgtagatgttgctcagcggactgccagcagaa

SEQ ID NO: 80402 - DNA, 600 bp, Chicken  19866894372716_6
gcagccctttctcccatttcccggccgtcgcagcccagaggacagcgaggtcaccctyccccgtgctcctgggctttgggtgtgcagagatgaaacggagcacttggggaacgtgggaagatgctatgttcmaaggatrgcgttgccttaagggtcactccaaatctgtgctgccggcagccctatctaagcatctcctgggctctggccgtgggaggagstctctcccaargccagcattgtggtgggtttgggggggtcagggcttgaggcacatctcctcctcctcctcctccctcyrttggtgtcacaatgtgaaaatttcagctcaggcaaaccagaggctgcacaaaagcagtcctgctgtttgggcaggccgtgctgcgggaagagcgcccgtccacgacaggggcaccttttatagggagataactgctcggtgtataataatatataattagcaaggattatcctgtaatctagtctaattgacaggggaccgtagatgttgctcagcggactgccagcagaagaattcagagcagtgctaattgcagtgtagccctggcacgctcttccccggttacatccctcaggatg

SEQ ID NO: 80403 - DNA, 600 bp, Chicken  19866894372716_7
cagccctttctcccatttcccggccgtcgcagcccagaggacagcgaggtcaccctyccccgtgctcctgggctttgggtgtgcagagatgaaacggagcacttggggaacgtgggaagatgctatgttcmaaggatrgcgttgccttaagggtcactccaaatctgtgctgccggcagccctatctaagcatctcctgggctctggccgtgggaggagstctctcccaargccagcattgtggtgggtttgggggggtcagggcttgaggcacatctcctcctcctcctcctccctcyrttggtgtcacaatgtgaaaatttcagctcaggcaaaccagaggctgcacaaaagcagtcctgctgtttgggcaggccgtgctgcgggaagagcgcccgtccacgacaggggcaccttttatagggagataactgctcggtgtataataatatataattagcaaggattatcctgtaatctagtctaattgacaggggaccgtagatgttgctcagcggactgccagcagaagaattcagagcagtgctaattgcagtgtagccctggcacgctcttccccggttacatccctcaggatgc

SEQ ID NO: 80404 - DNA, 600 bp, Chicken  19866894372724_1
agtgggctgggatggagagcacctcctggtgaaggtgaattcagccggaggtgagtggtggtcccggggcacctctagggtccctgagctctgcagcagcccggcacccatcctcccatcccctgcagataaagtggggctgcagctggacgccgtgggggtgttcacctcgctgggcctcaacgagcggctctttgctgtcagcgtggaggagctgggaggtttggtgagctgggagagggtctgcatggggtgggaggtgccgggggggaatcctcgccttgtggttctggagctggrctgggcttcrttttgccccgtggagcacagctgctggygctgctcctggtccttcagctccaggggggtctgtgaggagatggggggcatctgtgagctgagatagaggggatgggtgggagttcaatgggctgagcaggagggaatagagggagacccatgagccagaagggagagggtttgatgagtgagggaaggggatcagagagccacgatggagaggatgaaggggatttcggcaagctgggcagtaggaggggcatgaatcccgctggaggtgatttcaatgtgctgagcaat

SEQ ID NO: 80405 - DNA, 600 bp, Chicken  19866894372724_2
gatggagagcacctcctggtgaaggtgaattcagccggaggtgagtggtggtcccggggcacctctagggtccctgagctctgcagcagcccggcacccatcctcccatcccctgcagataaagtggggctgcagctggacgccgtgggggtgttcacctcgctgggcctcaacgagcggctctttgctgtcagcgtggaggagctgggaggtttggtgagctgggagagggtctgcatggggtgggaggtgccgggggggaatcctcgccttgtggttctggagctggrctgggcttcrttttgccccgtggagcacagctgctggygctgctcctggtccttcagctccaggggggtctgtgaggagatggggggcatctgtgagctgagatagaggggatgggtgggagttcaatgggctgagcaggagggaatagagggagacccatgagccagaagggagagggtttgatgagtgagggaaggggatcagagagccacgatggagaggatgaaggggatttcggcaagctgggcagtaggaggggcatgaatcccgctggaggtgatttcaatgtgctgagcaataaggggagcc

SEQ ID NO: 80406 - DNA, 600 bp, Chicken  19866894372724_3
attcagccggaggtgagtggtggtcccggggcacctctagggtccctgagctctgcagcagcccggcacccatcctcccatcccctgcagataaagtggggctgcagctggacgccgtgggggtgttcacctcgctgggcctcaacgagcggctctttgctgtcagcgtggaggagctgggaggtttggtgagctgggagagggtctgcatggggtgggaggtgccgggggggaatcctcgccttgtggttctggagctggrctgggcttcrttttgccccgtggagcacagctgctggygctgctcctggtccttcagctccaggggggtctgtgaggagatggggggcatctgtgagctgagatagaggggatgggtgggagttcaatgggctgagcaggagggaatagagggagacccatgagccagaagggagagggtttgatgagtgagggaaggggatcagagagccacgatggagaggatgaaggggatttcggcaagctgggcagtaggaggggcatgaatcccgctggaggtgatttcaatgtgctgagcaataaggggagccgtgaaacaccatggagaggatggagggg

SEQ ID NO: 80407 - DNA, 599 bp, Chicken  19866894372726_1
  misc_feature (1)..(46): n is any nucleotide
nnnnnnnnnnnnnnnnnnnnnnnnnnnnnnnnnnnnnnnnnnnnnnttttttaaagtctgtttgtaagaagaaaactatagaacgtatcctacaagtttcagcaaacggtatttcttaaacacgtcagtcatctccaagaaaacagactttttcagtaattactagctaggcttctacagtccttttccactaattgtagcctgcattgaggagtggtacaggcattacagtatgtgctgcagcacccagggtactggctgtaggttaatttctaggctatttgtacacctctagaaaamacatgccaacactgaacaatgctgaaatcagctttcatgtgtatatcctgggtagttattctcatagctcttgttggagcaaagagcttcawaacatggagcacattagctgtctatatttgaaagtattggactttgtaatgatgactactgcatgccctctgttgactccttccctgagccatccccagcaagttactgccatgaggaattcaagtcctgaaatgaaacaaatgaatgagcagagctctgttctttgcagaaggctygagcatgctcttgctcttgttttcatgtca

SEQ ID NO: 80408 - DNA, 600 bp, Chicken  19866894372726_2
caagtttcagcaaacggtatttcttaaacacgtcagtcatctccaagaaaacagactttttcagtaattactagctaggcttctacagtccttttccactaattgtagcctgcattgaggagtggtacaggcattacagtatgtgctgcagcacccagggtactggctgtaggttaatttctaggctatttgtacacctctagaaaamacatgccaacactgaacaatgctgaaatcagctttcatgtgtatatcctgggtagttattctcatagctcttgttggagcaaagagcttcawaacatggagcacattagctgtctatatttgaaagtattggactttgtaatgatgactactgcatgccctctgttgactccttccctgagccatccccagcaagttactgccatgaggaattcaagtcctgaaatgaaacaaatgaatgagcagagctctgttctttgcagaaggctygagcatgctcttgctcttgttttcatgtcatcttgaatcaactgcaaatgaaagaaatctatggtgtttgctaatgggtgatatcacagtagtgaatatttcattgccattaaggcaaacttt

SEQ ID NO: 80409 - DNA, 600 bp, Chicken  19866894372726_3
tttctaggctatttgtacacctctagaaaamacatgccaacactgaacaatgctgaaatcagctttcatgtgtatatcctgggtagttattctcatagctcttgttggagcaaagagcttcawaacatggagcacattagctgtctatatttgaaagtattggactttgtaatgatgactactgcatgccctctgttgactccttccctgagccatccccagcaagttactgccatgaggaattcaagtcctgaaatgaaacaaatgaatgagcagagctctgttctttgcagaaggctygagcatgctcttgctcttgttttcatgtcatcttgaatcaactgcaaatgaaagaaatctatggtgtttgctaatgggtgatatcacagtagtgaatatttcattgccattaaggcaaacttttgctcaggaatcttttctactccttcagtgagcggcgatttaagcaagaaacatttatagcactgatgctacagagaaagggagagagagcacagcgagctaggactgcaagtgatgggtcccaagggagctaaaacacagatgtcaaaaagccatttcagaaattgtacacaaaga

SEQ ID NO: 80410 - DNA, 600 bp, Chicken  19866894372730_1
ggggggctgttgagatgtgtccagcagtaagtgcttggttgttctgctgctgggacaaaatgtgcatctttaagcagcacccaactctcttctgttgctttccccaggtgaacatagacttccagacacgggagctgaccagaaggaacatgcaagagccttccctctcctgctttgaccaagcccaggggaaagtgcacagcctgatggaaaaggactcctaccccaggttcctgagatccaaaatctacacagacctgctgtctcaaacccagcggaggctcagctagaacagcaacrgggcctgtgtgcttcccacaacagcaacaacccatctccaaatgtgaaacttctgtagggttaaagtgggaataagaggggagggaggaggggggagaggagacttccaaagcgaccctgacgtggtgtcaagactttctgagtttctgtgcttttttttggttagcagtagcaccctgcagctgttgcacacaatggtatcctctctggtcatgaggcgtgaggctgtggggagggagagagaaggcaaaggcacatgagttgtgctgcttcccagggtggaaaccatcagcaaactca

SEQ ID NO: 80411 - DNA, 599 bp, Chicken  19866894372761_1
  misc_feature (1)..(19): n is any nucleotide
nnnnnnnnnnnnnnnnnnntctgatgctgatttctttctgtttttaagttttggggggccttaaggggatttgttctctcctagtggggacagggatatgtcaaagatatggaaatacagaaatactgtttcccaaggtaggggaagcccagtgtgctacagtgttaaaagtctctgtgtatctctgcctcatgcccattttggggcagagcagcaaatgcctgcaaaggggatgcatgcagtgccctgcctgcagctgttggagctcagaaagcacagaatccatgcatatgaaagacmaatggagcccatgggactccgtgatgtaaaagattatttggggatcaggataaatggaaaatggtagaattggagaatcaccaaggttggaaaacacctccaagatcatccagtccaaccatccacctaccaccaatatttccccactaaactacgttccttagtaccacatctaaatgcttcttgaacaccttcagggacaatgactccacctgggcagcccattccagtgcatgaccacacttttggagaagaaatttctcctaatatccaacccgaatccctcctggaacaatttg

SEQ ID NO: 80412 - DNA, 600 bp, Chicken  19866894372764_1
atctcttctgatttttacagctagctttcaaagctttctattatattgccctgcactggcactaccatctccactgaatacttgtgcattcaaaaatccacaagcaaaatattttcagcccatccctgagatatatttttcttcttggaagtgggagagaaaacataaatatatgctaatatctttggtaaagctgtaattcttatgaagggttaaaaaatactgctgaacattgctatctcagaattgattttattgttgctaatacctcagtcccacctcagtttgatggcttcgggmagcattgagcatatttaggaaaggacaaagggaaatggtttcaaactaaaagrgaggagatttagactggacaaaatgaaaagggttttttacaataagagtggtgaggtactagaacaggctgctcagagagctggtggatgacctgacatggcatggagacattcaagatcaggctggaaggggctttgagaaatctgatctagctgtagatgtccctgttcattgcaggggagttggactaggtggcctttaaaggtcctttccaactcaaacaattctaagggtctgtgactgtat

SEQ ID NO: 80413 - DNA, 600 bp, Chicken  19866894372764_2
cactggcactaccatctccactgaatacttgtgcattcaaaaatccacaagcaaaatattttcagcccatccctgagatatatttttcttcttggaagtgggagagaaaacataaatatatgctaatatctttggtaaagctgtaattcttatgaagggttaaaaaatactgctgaacattgctatctcagaattgattttattgttgctaatacctcagtcccacctcagtttgatggcttcgggmagcattgagcatatttaggaaaggacaaagggaaatggtttcaaactaaaagrgaggagatttagactggacaaaatgaaaagggttttttacaataagagtggtgaggtactagaacaggctgctcagagagctggtggatgacctgacatggcatggagacattcaagatcaggctggaaggggctttgagaaatctgatctagctgtagatgtccctgttcattgcaggggagttggactaggtggcctttaaaggtcctttccaactcaaacaattctaagggtctgtgactgtatgaaagaaacttgtaggcaattattattaagacttctattgtcatctgagatat

SEQ ID NO: 80414 - DNA, 600 bp, Chicken  19866894372769_1
gagcagatttaaatcaatatacatatattccttttaagggattttggcagacacaaccagacctttgtggtgttgttaagaagggtctgggaaacctttccgttcaaggaaaaatgcaacataacagatctagagcaaaatcaaacaattccattagcaagtaatgaaaatagaaaagttaaataagatacatacaaaatgtaagattttttttttcattataaaaaaaaagccaggccgctgactgggctttcttgtagttcacttttgttgtacatctatgatcttataacacagtgktgtcccaaaatgacttcaagttgkgaaggaccmgtggaggtctcctggccaagtctctgctcaaaacactaactttgaatggtttgctcayggccttgtgctgtactgcttatgtcttccattagawagtgctgacattttctttctgacacaccagagagggtgaaaaaggctacaggaattctgtgaagcctgaaaaacttctgcctcacgatgcatttataggtaggtctacattgcacctcaagtactgcatggcaccaaagctcataagctcaatatcgctgtcgtgtccataag

SEQ ID NO: 80415 - DNA, 600 bp, Chicken  19866894372769_2
atattccttttaagggattttggcagacacaaccagacctttgtggtgttgttaagaagggtctgggaaacctttccgttcaaggaaaaatgcaacataacagatctagagcaaaatcaaacaattccattagcaagtaatgaaaatagaaaagttaaataagatacatacaaaatgtaagattttttttttcattataaaaaaaaagccaggccgctgactgggctttcttgtagttcacttttgttgtacatctatgatcttataacacagtgktgtcccaaaatgacttcaagttgkgaaggaccmgtggaggtctcctggccaagtctctgctcaaaacactaactttgaatggtttgctcayggccttgtgctgtactgcttatgtcttccattagawagtgctgacattttctttctgacacaccagagagggtgaaaaaggctacaggaattctgtgaagcctgaaaaacttctgcctcacgatgcatttataggtaggtctacattgcacctcaagtactgcatggcaccaaagctcataagctcaatatcgctgtcgtgtccataagggtctcttcctacccagagtattt

SEQ ID NO: 80416 - DNA, 600 bp, Chicken  19866894372769_3
ttaagggattttggcagacacaaccagacctttgtggtgttgttaagaagggtctgggaaacctttccgttcaaggaaaaatgcaacataacagatctagagcaaaatcaaacaattccattagcaagtaatgaaaatagaaaagttaaataagatacatacaaaatgtaagattttttttttcattataaaaaaaaagccaggccgctgactgggctttcttgtagttcacttttgttgtacatctatgatcttataacacagtgktgtcccaaaatgacttcaagttgkgaaggaccmgtggaggtctcctggccaagtctctgctcaaaacactaactttgaatggtttgctcayggccttgtgctgtactgcttatgtcttccattagawagtgctgacattttctttctgacacaccagagagggtgaaaaaggctacaggaattctgtgaagcctgaaaaacttctgcctcacgatgcatttataggtaggtctacattgcacctcaagtactgcatggcaccaaagctcataagctcaatatcgctgtcgtgtccataagggtctcttcctacccagagtattttagccattg

SEQ ID NO: 80417 - DNA, 600 bp, Chicken  19866894372769_4
aaacctttccgttcaaggaaaaatgcaacataacagatctagagcaaaatcaaacaattccattagcaagtaatgaaaatagaaaagttaaataagatacatacaaaatgtaagattttttttttcattataaaaaaaaagccaggccgctgactgggctttcttgtagttcacttttgttgtacatctatgatcttataacacagtgktgtcccaaaatgacttcaagttgkgaaggaccmgtggaggtctcctggccaagtctctgctcaaaacactaactttgaatggtttgctcayggccttgtgctgtactgcttatgtcttccattagawagtgctgacattttctttctgacacaccagagagggtgaaaaaggctacaggaattctgtgaagcctgaaaaacttctgcctcacgatgcatttataggtaggtctacattgcacctcaagtactgcatggcaccaaagctcataagctcaatatcgctgtcgtgtccataagggtctcttcctacccagagtattttagccattgatcgactgacctcttaatgctctttttgatgaaagtagataatatcttcacagcctga

SEQ ID NO: 80418 - DNA, 600 bp, Chicken  19866894372769_5
atctagagcaaaatcaaacaattccattagcaagtaatgaaaatagaaaagttaaataagatacatacaaaatgtaagattttttttttcattataaaaaaaaagccaggccgctgactgggctttcttgtagttcacttttgttgtacatctatgatcttataacacagtgktgtcccaaaatgacttcaagttgkgaaggaccmgtggaggtctcctggccaagtctctgctcaaaacactaactttgaatggtttgctcayggccttgtgctgtactgcttatgtcttccattagawagtgctgacattttctttctgacacaccagagagggtgaaaaaggctacaggaattctgtgaagcctgaaaaacttctgcctcacgatgcatttataggtaggtctacattgcacctcaagtactgcatggcaccaaagctcataagctcaatatcgctgtcgtgtccataagggtctcttcctacccagagtattttagccattgatcgactgacctcttaatgctctttttgatgaaagtagataatatcttcacagcctgacatcagggcttaacccttcccccacgtggaaactga

SEQ ID NO: 80419 - DNA, 600 bp, Chicken  19866894372778_1
cttatgatactcttctgaaaataatcatggctctttctcagtttaaattgtttcaagactggcaggttaaggacaagatttccagagtttgctccctctcaagtattttcaggcttctctaacccagtgatggcagagctttcactgtggtagtaatgacagaaatctctgttaaaacaatcacgtcaaccaccgtattcacatctgactttatctctgggaccaaagagtcctctacaaggctttactttggaacaaccacaagtcaggctgtcactgacgtttttcttccatcccttyctgcacagtgtttccaggtgacaggctcaatctttctcacgagaattctccccccactgcctgtccatgactggttttaatgttgttttgtttatgcagcagaagatggcccttaacaaactgaaggatcttgaacgcacatttaaaaatttcctggaagtgaagggctcttatgcccaaatatttgtgggttttggtatctygcttgtttgctttccaaattgattgctagttctgttaagagatttgatctctctacaaaccttttttgcatcagagaaagcacrccatgtaaaaaac

SEQ ID NO: 80420 - DNA, 600 bp, Chicken  19866894372778_2
tctgactttatctctgggaccaaagagtcctctacaaggctttactttggaacaaccacaagtcaggctgtcactgacgtttttcttccatcccttyctgcacagtgtttccaggtgacaggctcaatctttctcacgagaattctccccccactgcctgtccatgactggttttaatgttgttttgtttatgcagcagaagatggcccttaacaaactgaaggatcttgaacgcacatttaaaaatttcctggaagtgaagggctcttatgcccaaatatttgtgggttttggtatctygcttgtttgctttccaaattgattgctagttctgttaagagatttgatctctctacaaaccttttttgcatcagagaaagcacrccatgtaaaaaacaggcatttttgaagcacttcaaaataagacttgcatggtatcgtaagacctacgtataaagtaacaaagcaacaagcctgactgccccacattaaccaacatcatagtttgcatttcaagatccttgaagaaggagtgaaactagtatgggcagctctatttgtattcagctcactgtgttttgttcccctacatttcaataa

SEQ ID NO: 80421 - DNA, 563 bp, Chicken  19866894372778_3
cttccatcccttyctgcacagtgtttccaggtgacaggctcaatctttctcacgagaattctccccccactgcctgtccatgactggttttaatgttgttttgtttatgcagcagaagatggcccttaacaaactgaaggatcttgaacgcacatttaaaaatttcctggaagtgaagggctcttatgcccaaatatttgtgggttttggtatctygcttgtttgctttccaaattgattgctagttctgttaagagatttgatctctctacaaaccttttttgcatcagagaaagcacrccatgtaaaaaacaggcatttttgaagcacttcaaaataagacttgcatggtatcgtaagacctacgtataaagtaacaaagcaacaagcctgactgccccacattaaccaacatcatagtttgcatttcaagatccttgaagaaggagtgaaactagtatgggcagctctatttgtattcagctcactgtgttttgttcccctacatttcaataatcctactccctagttggcaattcagtgacagattttttaaaacctta

SEQ ID NO: 80422 - DNA, 600 bp, Chicken  19866894372783_1
tcccaggcaatcagcgtcagcagccaggagcgggcaagccctgcccaggtgctttgcatccttctctggatatccacaccaggctgctgtcagtgagcacggtgaaggaaattaaatgaaaacccagcgctcagccaacaaagctgacagtggcctaatttggagaggcaatatgcctcaggccgtgccggtggggctgggagagcaaacgtttttaaacgttctaaaacccctttgcgctgctctctcatcccaggagactcagagccctggagcatctcatagcgttcccctcactcygtctcctgcagttgggatgtgccacagagctgggatggtgtgcgcagagccagcccrgctgtcactcagagctgcacatcgctccctgctaattgcttgtgacgaagcagcactgcagcatccatcagtcagtccccagggacaagcagtgctaactgcatccctgcacctgyccaggacagccctggagtggagagagcagccgggctcactcgtggcttttgcatttggatggatgtgctggtactgccttacccactgcagccctttgggtctcatctgttttgckatcctgccatc

SEQ ID NO: 80423 - DNA, 600 bp, Chicken  19866894372783_2
atccttctctggatatccacaccaggctgctgtcagtgagcacggtgaaggaaattaaatgaaaacccagcgctcagccaacaaagctgacagtggcctaatttggagaggcaatatgcctcaggccgtgccggtggggctgggagagcaaacgtttttaaacgttctaaaacccctttgcgctgctctctcatcccaggagactcagagccctggagcatctcatagcgttcccctcactcygtctcctgcagttgggatgtgccacagagctgggatggtgtgcgcagagccagcccrgctgtcactcagagctgcacatcgctccctgctaattgcttgtgacgaagcagcactgcagcatccatcagtcagtccccagggacaagcagtgctaactgcatccctgcacctgyccaggacagccctggagtggagagagcagccgggctcactcgtggcttttgcatttggatggatgtgctggtactgccttacccactgcagccctttgggtctcatctgttttgckatcctgccatccatccacaggcactgtgtcctccctgtgcccgttaaccttgtgcatatttttaaatg

SEQ ID NO: 80424 - DNA, 600 bp, Chicken  19866894372783_3
tgcctcaggccgtgccggtggggctgggagagcaaacgtttttaaacgttctaaaacccctttgcgctgctctctcatcccaggagactcagagccctggagcatctcatagcgttcccctcactcygtctcctgcagttgggatgtgccacagagctgggatggtgtgcgcagagccagcccrgctgtcactcagagctgcacatcgctccctgctaattgcttgtgacgaagcagcactgcagcatccatcagtcagtccccagggacaagcagtgctaactgcatccctgcacctgyccaggacagccctggagtggagagagcagccgggctcactcgtggcttttgcatttggatggatgtgctggtactgccttacccactgcagccctttgggtctcatctgttttgckatcctgccatccatccacaggcactgtgtcctccctgtgcccgttaaccttgtgcatatttttaaatgatgccatttcctttggcttgcacagcattttatttcttctttatggcactggtctcatgcagggtggatgttgctcagggagaaatagatgctgcgaggagaggacaggccagctc

SEQ ID NO: 80425 - DNA, 600 bp, Chicken  19866894372783_4
cccctcactcygtctcctgcagttgggatgtgccacagagctgggatggtgtgcgcagagccagcccrgctgtcactcagagctgcacatcgctccctgctaattgcttgtgacgaagcagcactgcagcatccatcagtcagtccccagggacaagcagtgctaactgcatccctgcacctgyccaggacagccctggagtggagagagcagccgggctcactcgtggcttttgcatttggatggatgtgctggtactgccttacccactgcagccctttgggtctcatctgttttgckatcctgccatccatccacaggcactgtgtcctccctgtgcccgttaaccttgtgcatatttttaaatgatgccatttcctttggcttgcacagcattttatttcttctttatggcactggtctcatgcagggtggatgttgctcagggagaaatagatgctgcgaggagaggacaggccagctctgtgtgctgcagccctcactgtgacattgactcaccactccctctctgccggcaaaacaaggtcagtgacactcacttggctgctgcaggagatcggggtgacaaactgcaccatt

SEQ ID NO: 80426 - DNA, 600 bp, Chicken  19866894372785_1
tgggttgtttggtcttgtgagtaatgagagcaggatttctaaataagattctaggggggaaagaaatcaaatcttaatgtcccccaaaccctttctgtttactaagttatgtaattaaagccagactgagcaggtaggaaataagtgtttaatgtaatggggacagcaatcagaaactctttagcagataatctcatcaataaaaacattccttttaggaaaaaaaaaatagaatattatagttttacactgtctttgtcagttcttatgatgaatcttttcaggcaggagcaaagtaakagattttattctgatgtataacttccttaaaagttaccattgctcatcactttttaagatagcataattttatttttttgagggacattttataacaggcaattaattgtagataaaaagttggcttagtcttccttgacaatggcctagattgaatcagggtgtaccttatggtcttccttggtgcctcaggagatttcaggttattattctgttacttgctctgaagcaacttaatgtaatacaaggacagtctggagatggtacaaaaccacaagacagtttytctaatttataaaa

SEQ ID NO: 80427 - DNA, 600 bp, Chicken  19866894372785_2
aggagcaaagtaakagattttattctgatgtataacttccttaaaagttaccattgctcatcactttttaagatagcataattttatttttttgagggacattttataacaggcaattaattgtagataaaaagttggcttagtcttccttgacaatggcctagattgaatcagggtgtaccttatggtcttccttggtgcctcaggagatttcaggttattattctgttacttgctctgaagcaacttaatgtaatacaaggacagtctggagatggtacaaaaccacaagacagtttytctaatttataaaagttaatccgctatagagacattctgatgaatctccctgggaaatttgtagatctgaaggcatgccagtaaatcatttgcatgtctgaccattcagccctccttacagactaataggctcctcatctctgtggcagagcatatggctaatatcaggagttccgtaatcccatcaaatgtaatgtatgtctcatctggtccttttaggggatgtcactctgtgtgatacaattgttttcatgcagagcaataattatgccttttrgaggccctcagtkctggcttggc

SEQ ID NO: 80428 - DNA, 600 bp, Chicken  19866894372785_3
gtacaaaaccacaagacagtttytctaatttataaaagttaatccgctatagagacattctgatgaatctccctgggaaatttgtagatctgaaggcatgccagtaaatcatttgcatgtctgaccattcagccctccttacagactaataggctcctcatctctgtggcagagcatatggctaatatcaggagttccgtaatcccatcaaatgtaatgtatgtctcatctggtccttttaggggatgtcactctgtgtgatacaattgttttcatgcagagcaataattatgccttttrgaggccctcagtkctggcttggctttgatttatttgttcacaacatagcatttgattaatttagctgtaattatgggagaataaatgaccataaagtttgaagattttggactcacagatgacgtatagaagtatctaacatcatctgaggtgcatcttttgagctaacctgatcaatcatgtcaaaagaagtttgaatatgctttcagaaaggccatgagcttttatattacttaaaaagagaaaattggttttggctgtttgttgttttttttttttcacattcaaaggcattctgtt

SEQ ID NO: 80429 - DNA, 600 bp, Chicken  19866894372785_4
agacagtttytctaatttataaaagttaatccgctatagagacattctgatgaatctccctgggaaatttgtagatctgaaggcatgccagtaaatcatttgcatgtctgaccattcagccctccttacagactaataggctcctcatctctgtggcagagcatatggctaatatcaggagttccgtaatcccatcaaatgtaatgtatgtctcatctggtccttttaggggatgtcactctgtgtgatacaattgttttcatgcagagcaataattatgccttttrgaggccctcagtkctggcttggctttgatttatttgttcacaacatagcatttgattaatttagctgtaattatgggagaataaatgaccataaagtttgaagattttggactcacagatgacgtatagaagtatctaacatcatctgaggtgcatcttttgagctaacctgatcaatcatgtcaaaagaagtttgaatatgctttcagaaaggccatgagcttttatattacttaaaaagagaaaattggttttggctgtttgttgttttttttttttcacattcaaaggcattctgtttcaaagctttgtg

SEQ ID NO: 80430 - DNA, 599 bp, Chicken  19866894372792_1
  misc_feature (1)..(24): n is any nucleotide
nnnnnnnnnnnnnnnnnnnnnnnntgcaatcgagccctggaggagaggtgggggtcatagtggtacaacctgcagtgccagcaaggtgaggccacggtggtggggtggtggagttcactctggtcttcctctgatgggcctgagagctgcactcacagcacagggaaggtaacgtgtgggtctgaacagttccagttctgctgatcctctctgttttcagctgacacagaaacacaagtgaggtagaccagaggaccagaggtgtgagaaagggtaaaggccttccttcactccggatckttttctctagtatttcatcagaccaagtgggcatacggtgccatttcgtcacttcctttggaaggcagtttccgtacttcttatacacccatacatacaacccgggttgtattttgccaggtttctgttttcaccatgaagtagaaaacagtcatggctgtcagtatgaattcttacaagtgcaaaggacgtaaaagtggcaccccctcccatcttcccacagtaccaaaataccacgtgtcaaagatgctcctgctgagagctgaattcccccttcacgcaaagttcggggactgagg

SEQ ID NO: 80431 - DNA, 599 bp, Chicken  19866894372794_1
  misc_feature (1)..(40): n is any nucleotide
nnnnnnnnnnnnnnnnnnnnnnnnnnnnnnnnnnnnnnnncagcgttgtgctggtacctgcagagcacttctgcgcaagtcagcatctgctgcgtgctaaagagccggcagaaagcaaccccccttcctacaagtgagaaaagaaggtcaagagccgctccgaatactcagaaatatgaataaagcactaccagacagctgaataaaaaccagaagtttagttacgtgaatgagtggttaaaaaaaaaatacagtgctgtgggtaaatagcagccccactcccaaaagtccctgcaatgsggaaagggaggctggctgaacgaggatggcttttgaggtggaaagttttgtaatttattaaatctacatttctagttatctaaaactattaatgcgattgttaaaattcacagcttccggtgactaaagaaatgcaattgttttatctgggtttctattatgtgaataaaatgtaacacggtctgagtaaaatggccccagagtttcattaaaaaataacagcctaattccctaatatgaagttattttaagtgttttattaatattgtcttctaaatgcacataagtgtgattccccc

SEQ ID NO: 80432 - DNA, 600 bp, Chicken  19866894372805_1
attcccgacagattgagtggctgagcaaacagactgctgcattcggaactagctggagcgcttggagagcagacagctccattcctagaggcacagtagcacagcagtcgagcccgagatgctacaaaaatacagatagatcatcgtctgccagccgagccaggcaggagtgggcgcagctcccttcccatccccagatggaggaggctgcccgcttgtcaccagcacgtcctgcgtgtgctcggcctcacccagcatccccagtaagggtcgatctctgctcggcaccaagagagctgygagattctcacattttaaggccgggggaccattttgatcatccggtctgatctacagtgcagcacaggccagagaatttcaccaatttcatttcctgtgtcaagcccacggcccctggtagcactacagcatctctttgagaaatgcatgcaaatgcttcaggcaacagggaattcaccaactctcaggtaaaccgttctggtatgtggccctctttattaatagtattgttcctcagatgaatttgtcaaacttcagtatttcgtaccagaaggttacggattgcagttgatgtgaggg

SEQ ID NO: 80433 - DNA, 600 bp, Chicken  19866894372805_2
gatgtgagggagctacagcgcgggtattgctgcacgtggctggcacctccactcttctgttccagtgagagcttttatatttgaataggatttctccttgagactactgcataccagagttctggacatggaggagttgcccatagcaaatcccagggcttcacccaagcactgtggcatgtagactccagagctcaggaatcatatctgcggttcaacctgtgctccctgctcggagctggcatgcagcgggctgcactcccaggcactagttagggtgcacattcccagctcccttcrtgagctgccatrtgtgctttggggcagggctgctgaratctgctctcacatcccagctgcagtggttgtgggctgcaggacatttacagagggaggatgcttggctgtgtcactggcttaggggagcagcagcaggatttgggcctctttcctgcaaattcactcagagcgactcctaagagattagccccagatctacagtctgaccccgtagtggggtctgtatgcaatagcaacgagcaatgtaattcttactcctcgcttccaagcaccgagattcacaaactgagctcactgaag

SEQ ID NO: 80434 - DNA, 600 bp, Chicken  19866894372805_3
ctacagcgcgggtattgctgcacgtggctggcacctccactcttctgttccagtgagagcttttatatttgaataggatttctccttgagactactgcataccagagttctggacatggaggagttgcccatagcaaatcccagggcttcacccaagcactgtggcatgtagactccagagctcaggaatcatatctgcggttcaacctgtgctccctgctcggagctggcatgcagcgggctgcactcccaggcactagttagggtgcacattcccagctcccttcrtgagctgccatrtgtgctttggggcagggctgctgaratctgctctcacatcccagctgcagtggttgtgggctgcaggacatttacagagggaggatgcttggctgtgtcactggcttaggggagcagcagcaggatttgggcctctttcctgcaaattcactcagagcgactcctaagagattagccccagatctacagtctgaccccgtagtggggtctgtatgcaatagcaacgagcaatgtaattcttactcctcgcttccaagcaccgagattcacaaactgagctcactgaagtgccctggggaa

SEQ ID NO: 80435 - DNA, 600 bp, Chicken  19866894372805_4
ggctggcacctccactcttctgttccagtgagagcttttatatttgaataggatttctccttgagactactgcataccagagttctggacatggaggagttgcccatagcaaatcccagggcttcacccaagcactgtggcatgtagactccagagctcaggaatcatatctgcggttcaacctgtgctccctgctcggagctggcatgcagcgggctgcactcccaggcactagttagggtgcacattcccagctcccttcrtgagctgccatrtgtgctttggggcagggctgctgaratctgctctcacatcccagctgcagtggttgtgggctgcaggacatttacagagggaggatgcttggctgtgtcactggcttaggggagcagcagcaggatttgggcctctttcctgcaaattcactcagagcgactcctaagagattagccccagatctacagtctgaccccgtagtggggtctgtatgcaatagcaacgagcaatgtaattcttactcctcgcttccaagcaccgagattcacaaactgagctcactgaagtgccctggggaaatagctttgtcattcacactctggc

SEQ ID NO: 80436 - DNA, 600 bp, Chicken  19866894372806_1
ggtcaatcagcacttcactgatatgtgacagtttctgtgacacccccccttgactaaggttcattgaacttaatcctttgtttcctgtcacccgaagaaaggagctgactgtatttgctgttatcctcaaacatttattttaattatacccgtcttcttttccagtattgtaaatgtcttcagctattaaagttcataagctgccagtttcactgctagctttgctgtgccactgaagatacacaactcatttcttccctgcatcagtacaagctaacagactagacagcccccttgcaytgagaacatacagcatgaacttgccattttttcttgtctcagctgatgttttaaaagtgtcactggaggttattagctatatgcatccaaaatgcatgtttttctacttttttatactttccttctggctatggacaacttttgaaacaagaatttaacactgaggatcttttgtgatttcataccagacatgcagtttaagaataaaagcagctaagaatgtggctgaaagctacttttcaaaaagaaaaatgcacgtataaaaattgtaatactgacgcagtgtgcatatcacttatc

SEQ ID NO: 80437 - DNA, 600 bp, Chicken  19866894372806_2
ccaaaatgcatgtttttctacttttttatactttccttctggctatggacaacttttgaaacaagaatttaacactgaggatcttttgtgatttcataccagacatgcagtttaagaataaaagcagctaagaatgtggctgaaagctacttttcaaaaagaaaaatgcacgtataaaaattgtaatactgacgcagtgtgcatatcacttatcaaataaggtaattaattgtttatggcagatgaaagcattaatggtctaggaattactcaattattgttctaaagaaacaacaaaartgctaactaatgccttaaaaaagaaaatgtgtaagatcttgcagattgaaagattttaaatgtttttattggctttgcaaaagattgattacttcctctttgttttatagtaatacttgaaagacccagacagccatttaataccataactagtatgctagttaaaatcaggttgtgtataagcagtagatttttcaatggccacctaataaaggatatggaagaaaatcccagcactacgatctctttattttccagccctgtgtttaataagagtgatggtgacctatcaaacagaaa

SEQ ID NO: 80438 - DNA, 600 bp, Chicken  19866894372808_1
ctttccattatttgtagcctgctgggtgtgagagaggttcacagaagcattcaggaacaaggtcttgccctgaggattttgctttctaatccttacatacagtatacacaaatgatgactcagattagaaaagcctgaatacacagcaattggtgaagtgacaatcaatcaacgtagccctatggaagccagcggtgttaatttacaacagctccaggaaacacacaggagacttcagtgatctgtatttcaggaatttatagttctttgtttttctgtcctgtgctgttttacagtctmcagcagttataataacgctgccttacttctgttcaaagtttacccaactgctagaagtaacacgaattttccttactgagcagtcaatactctgtgctattcatctctcctttgggggcccagaagtcctttccactggtaggaatatggtacaatgatggttcccctcttctctatttctatcaagatttccccatccactctaccattgataatatatggcaaatccaaaacccctttttatcagaggaagttgaagtcttttaggaacaggactgacactcctgaacataatgctga

SEQ ID NO: 80439 - DNA, 599 bp, Chicken  19866894372809_1
  misc_feature (1)..(63): n is any nucleotide
nnnnnnnnnnnnnnnnnnnnnnnnnnnnnnnnnnnnnnnnnnnnnnnnnnnnnnnnnnnnnnntagataatactaaatttggaggtatttcagtcaccagagagaatagaaccaatccagtttattcctactcatgctggtgctaatgacaagtttcacattcatgtcagctggagtatgtgcaagattacaaataactgttgttctaaaactacaaaatgctcaaaaaaaaaaaaaaaggcaaggaaatgtgtcagtgggaacgttaaggaaacattcaagaaaaatggcaagaatgartgctgtaaaatgtgggtagttaagactgtgcggggcaggggcgaaagtagctgaggtgtttgcagagctaaacaaggccattgctggtactgaggagccattcaaaggttcaagaagggatgctcaaaattagagagcttgtcatacaaaaggcgctagaatttttcatgtaaaaaaatggcataatcaacaatgactgaggggaggtctttgtcagccccaaatttactacaaatgcccataagtcatcttgggcggtaccagcaagaagggagatacrtttatggaaaatactccat

SEQ ID NO: 80440 - DNA, 600 bp, Chicken  19866894372809_2
agaaaaatggcaagaatgartgctgtaaaatgtgggtagttaagactgtgcggggcaggggcgaaagtagctgaggtgtttgcagagctaaacaaggccattgctggtactgaggagccattcaaaggttcaagaagggatgctcaaaattagagagcttgtcatacaaaaggcgctagaatttttcatgtaaaaaaatggcataatcaacaatgactgaggggaggtctttgtcagccccaaatttactacaaatgcccataagtcatcttgggcggtaccagcaagaagggagatacrtttatggaaaatactccattagtcactgacacgtttagtagtttaaacttgacccatgaaagatyttacgtgaccaacatacctcactttctcaartaaattacaaaagaaatctaacccggtgtgcagcttctgccttattcacatgcaccagaaatctagaggctgggaagaggaagagtgtgcatcagagtggttgtggattgcttggactggctcccagtctgcctttaaattacagcttatacattttctaacgtagtgaaagaatttcagacacttagttggtccgcatgttag

SEQ ID NO: 80441 - DNA, 600 bp, Chicken  19866894372809_3
agtagctgaggtgtttgcagagctaaacaaggccattgctggtactgaggagccattcaaaggttcaagaagggatgctcaaaattagagagcttgtcatacaaaaggcgctagaatttttcatgtaaaaaaatggcataatcaacaatgactgaggggaggtctttgtcagccccaaatttactacaaatgcccataagtcatcttgggcggtaccagcaagaagggagatacrtttatggaaaatactccattagtcactgacacgtttagtagtttaaacttgacccatgaaagatyttacgtgaccaacatacctcactttctcaartaaattacaaaagaaatctaacccggtgtgcagcttctgccttattcacatgcaccagaaatctagaggctgggaagaggaagagtgtgcatcagagtggttgtggattgcttggactggctcccagtctgcctttaaattacagcttatacattttctaacgtagtgaaagaatttcagacacttagttggtccgcatgttagggcccagtcgataaaggtgataggaaatgtaggctcacagtgtgcagagaagagcaatgaagctg

SEQ ID NO: 80442 - DNA, 600 bp, Chicken  19866894372809_4
gccattgctggtactgaggagccattcaaaggttcaagaagggatgctcaaaattagagagcttgtcatacaaaaggcgctagaatttttcatgtaaaaaaatggcataatcaacaatgactgaggggaggtctttgtcagccccaaatttactacaaatgcccataagtcatcttgggcggtaccagcaagaagggagatacrtttatggaaaatactccattagtcactgacacgtttagtagtttaaacttgacccatgaaagatyttacgtgaccaacatacctcactttctcaartaaattacaaaagaaatctaacccggtgtgcagcttctgccttattcacatgcaccagaaatctagaggctgggaagaggaagagtgtgcatcagagtggttgtggattgcttggactggctcccagtctgcctttaaattacagcttatacattttctaacgtagtgaaagaatttcagacacttagttggtccgcatgttagggcccagtcgataaaggtgataggaaatgtaggctcacagtgtgcagagaagagcaatgaagctggtgaggggtctggagcacaagtcttatgggg

SEQ ID NO: 80443 - DNA, 600 bp, Chicken  19866894372809_5
agtggttgtggattgcttggactggctcccagtctgcctttaaattacagcttatacattttctaacgtagtgaaagaatttcagacacttagttggtccgcatgttagggcccagtcgataaaggtgataggaaatgtaggctcacagtgtgcagagaagagcaatgaagctggtgaggggtctggagcacaagtcttatggggagtggctgagggagctgggattgtttagtgtggagaagaggaggctcaggggagacctcattgctctctacagctgcctgaaaggaggttgtggwgaggtgggtgtcagcctcttctcccatgtaacagcggtaggatgagaggaaacggcctcaagctgcaccaggggaggttcaggttggatattaggaaatatttcttctccaaatgaatggtgaggtgttggaatagactgtccgtggaggaggtggagtcatgatctctgaaggtgttcaagaaacgtggagatacattttattgagcatgatggtgatgggctgatggctggactagatgattttagtggtctttcttaacagtgttgtgcttctatgatactctggcatctgcatcct

SEQ ID NO: 80444 - DNA, 600 bp, Chicken  19866894372825_1
aaccaatatttaaatgatacttcaaaattttgctaacaacttttgttgtcttatatgatgtatagtttatagatgtattcttcacattaatttttgcatagaacttataatggcaataattttgtaatcatattcacaatactttatacttctttaccaaatattttgtactcgtataacataagggcatgtggctgaaggatggatatcccttttctctccttacttgctaattatagtcttttgattagatgtagcacctgtacagcttcttgctgaattaatacgtggaaaagatgrtctcatcagtatgcagttggcaaagcagaaaatggtagtagtgcaaagtgcatgggcccttttgatcagaaatatcttatgaggagctctttaaattgtaaagtkgctgagattgttctgcaggggcattattcagactgaactggaaatgctggttcttgccatggcttattactgaaggagatactgggtaacctggggggggatgtttaaaactgccctttctcaattagtactgtttcctcctatagagtattctgttaacgaagaagcakttacatttgaaaagagatgtcattt

SEQ ID NO: 80445 - DNA, 600 bp, Chicken  19866894372825_2
tataatggcaataattttgtaatcatattcacaatactttatacttctttaccaaatattttgtactcgtataacataagggcatgtggctgaaggatggatatcccttttctctccttacttgctaattatagtcttttgattagatgtagcacctgtacagcttcttgctgaattaatacgtggaaaagatgrtctcatcagtatgcagttggcaaagcagaaaatggtagtagtgcaaagtgcatgggcccttttgatcagaaatatcttatgaggagctctttaaattgtaaagtkgctgagattgttctgcaggggcattattcagactgaactggaaatgctggttcttgccatggcttattactgaaggagatactgggtaacctggggggggatgtttaaaactgccctttctcaattagtactgtttcctcctatagagtattctgttaacgaagaagcakttacatttgaaaagagatgtcatttatactttattagctatagttcatcagtcctttttttttttaagtttcaacttttgcttacgctgtaggtacttgaaacagttgaatatgaaccacctaggaaacc

SEQ ID NO: 80446 - DNA, 600 bp, Chicken  19866894372825_3
ctgaattaatacgtggaaaagatgrtctcatcagtatgcagttggcaaagcagaaaatggtagtagtgcaaagtgcatgggcccttttgatcagaaatatcttatgaggagctctttaaattgtaaagtkgctgagattgttctgcaggggcattattcagactgaactggaaatgctggttcttgccatggcttattactgaaggagatactgggtaacctggggggggatgtttaaaactgccctttctcaattagtactgtttcctcctatagagtattctgttaacgaagaagcakttacatttgaaaagagatgtcatttatactttattagctatagttcatcagtcctttttttttttaagtttcaacttttgcttacgctgtaggtacttgaaacagttgaatatgaaccacctaggaaacctcttgatttttgctatatttcgtgcttagtaatgaatttatggatttgaaactgctcagtttgatttaaatatacactcttctactgtaaaaccatgctctttcaatttttaattttgctatatgttgttgtacaattataattaagtcactgatcatttagaaccttct

SEQ ID NO: 80447 - DNA, 599 bp, Chicken  19866894372826_1
  misc_feature (1)..(153): n is any nucleotide
nnnnnnnnnnnnnnnnnnnnnnnnnnnnnnnnnnnnnnnnnnnnnnnnnnnnnnnnnnnnnnnnnnnnnnnnnnnnnnnnnnnnnnnnnnnnnnnnnnnnnnnnnnnnnnnnnnnnnnnnnnnnnnnnnnnnnnnnnnnnnnnnnnnnnnnnnttgcaaggctatagtgttcgcctcagcctccgttgggcttcagacctttaaccacaaggtacccacaagcccctagctcccaccccacactggtggggctgtatgagcagcctgcttccatcccaccattggtgctaaccctgagcrtcaccctctgatctgtgtgctgcagggcacacaggactgagcagctggtgggggcacaaagcaggaggtggattgcatttcatcccttctgagcgcttggagctgaatccttctatactgctctgcttgcagcctcttccctccttgtcctctgtcaccagtattatctgggatcctttcctttggttggaccggctaaactcagcgcaaacgatgacaaagcaaatcctgctccattaaagctgccatttccccctctttttctcactagtggcatttcagtgaacgtgcaagacctg

SEQ ID NO: 80448 - DNA, 599 bp, Chicken  19866894372831_1
  misc_feature (1)..(76): n is any nucleotide
nnnnnnnnnnnnnnnnnnnnnnnnnnnnnnnnnnnnnnnnnnnnnnnnnnnnnnnnnnnnnnnnnnnnnnnnnnnnacccagccagctctcagtcccagagctcgctctcagtgcactctttttactgcagcgttctgaactgctgttttgtttttttttaattacaccatcactctctgcagacattctcctggttcctagggtggaattacttgaaacttatttagcaaatacccaatgctaaggagtaataatctgttccatttgagctggaagcagaactgccaaataggaacacractcaaggctcctctgactaaggagaaagagaacaaagagatggagaaaaccacaaagggaaacttcctggctcaactgtaccaaacacaaacttatttatgaaaggagttgtttgtaaagatttcacgttaagtgctggcaggcagctgccttgtatgaaggtcaagctgcaagtgcagctataatggcagtggggaatggcccaaagcagcatttagttagttggaaattactgcttttccttttgcctggaacacaaatataattgtcctgaagtggacgtgtgtcttatggaggc

SEQ ID NO: 80449 - DNA, 600 bp, Chicken  19866894372831_2
aagcagcatttagttagttggaaattactgcttttccttttgcctggaacacaaatataattgtcctgaagtggacgtgtgtcttatggaggcacaaggccaagttcttatgttcttcctcccagaggtcataaccacaccaggcaccacatccctgaactactgcattcatcaaaaacagtcttccacaacaaaacatgtcacttaagttattcagcttagaattttttaagcaccaccaagtaaaaaaggagaagaacaagactgaactcagtatacaagctgagatggacagactaytgcctggcagtaatcatagcatgggagaagcmtctccagccctctgggaaccattctgagatttacttgcatcagcctgaacactctgtacacrtgccccaagccacgmagctcccaagaaattgccactgacaactgctgacctatgaccatagcctttgatgaacagattcagtgggcaaagatgaattatcgtatgtttcctgcttagttatatttatttaaaaacaaaaaccaaagtgaaaagacaataaggatgaattgagatatgtcaccacacagaacagctcaatctgttat

SEQ ID NO: 80450 - DNA, 600 bp, Chicken  19866894372831_3
tttccttttgcctggaacacaaatataattgtcctgaagtggacgtgtgtcttatggaggcacaaggccaagttcttatgttcttcctcccagaggtcataaccacaccaggcaccacatccctgaactactgcattcatcaaaaacagtcttccacaacaaaacatgtcacttaagttattcagcttagaattttttaagcaccaccaagtaaaaaaggagaagaacaagactgaactcagtatacaagctgagatggacagactaytgcctggcagtaatcatagcatgggagaagcmtctccagccctctgggaaccattctgagatttacttgcatcagcctgaacactctgtacacrtgccccaagccacgmagctcccaagaaattgccactgacaactgctgacctatgaccatagcctttgatgaacagattcagtgggcaaagatgaattatcgtatgtttcctgcttagttatatttatttaaaaacaaaaaccaaagtgaaaagacaataaggatgaattgagatatgtcaccacacagaacagctcaatctgttatgcctcgtgctataacccagtggacttcaaatt

SEQ ID NO: 80451 - DNA, 600 bp, Chicken  19866894372831_4
caaggccaagttcttatgttcttcctcccagaggtcataaccacaccaggcaccacatccctgaactactgcattcatcaaaaacagtcttccacaacaaaacatgtcacttaagttattcagcttagaattttttaagcaccaccaagtaaaaaaggagaagaacaagactgaactcagtatacaagctgagatggacagactaytgcctggcagtaatcatagcatgggagaagcmtctccagccctctgggaaccattctgagatttacttgcatcagcctgaacactctgtacacrtgccccaagccacgmagctcccaagaaattgccactgacaactgctgacctatgaccatagcctttgatgaacagattcagtgggcaaagatgaattatcgtatgtttcctgcttagttatatttatttaaaaacaaaaaccaaagtgaaaagacaataaggatgaattgagatatgtcaccacacagaacagctcaatctgttatgcctcgtgctataacccagtggacttcaaattacgctgaacagatcattaacgccattaggtacgttgcagaaagcagaacgtgtaccaagtct

SEQ ID NO: 80452 - DNA, 600 bp, Chicken  19866894372831_5
atgttcttcctcccagaggtcataaccacaccaggcaccacatccctgaactactgcattcatcaaaaacagtcttccacaacaaaacatgtcacttaagttattcagcttagaattttttaagcaccaccaagtaaaaaaggagaagaacaagactgaactcagtatacaagctgagatggacagactaytgcctggcagtaatcatagcatgggagaagcmtctccagccctctgggaaccattctgagatttacttgcatcagcctgaacactctgtacacrtgccccaagccacgmagctcccaagaaattgccactgacaactgctgacctatgaccatagcctttgatgaacagattcagtgggcaaagatgaattatcgtatgtttcctgcttagttatatttatttaaaaacaaaaaccaaagtgaaaagacaataaggatgaattgagatatgtcaccacacagaacagctcaatctgttatgcctcgtgctataacccagtggacttcaaattacgctgaacagatcattaacgccattaggtacgttgcagaaagcagaacgtgtaccaagtctggctgcccacaccct

SEQ ID NO: 80453 - DNA, 600 bp, Chicken  19866894372836_1
gacataatactgatccttaagttgtgtctcctttctgatgtaaaggacagtgcattgggttgagaacctggtgatttatgctccattttcaccattctaacataatcccttaggtgcgtcaattcccttctgcatgccatagtttcaccagctgcaaaattaagataaagctaacaaattcctttgtgaaaggctgattccactcccccaccaaaaaataaaaataaaaaaaagggcaatagaaaagttagggactactatgcacattaaaacaatggagctgatgcttttgttctaatygcactgtgaaaagatcaattgcttttgagctcatacacatgtggccatatttaattcagcctttacagaaactttgcccttctttttgataaactgaatttaaaatgaatgaaatgagctaagctgacactcttaacagccaagctcaactagcacatgtgtagctttgcttagtccagcaaagcttgcttctaccaaatctacragacacagtgcagaatttgggactcaattgtcagagatctcagccgtccttcctctggttgtgctccacacactcagagcacctgaaaatctggt

SEQ ID NO: 80454 - DNA, 600 bp, Chicken  19866894372836_2
ccccaccaaaaaataaaaataaaaaaaagggcaatagaaaagttagggactactatgcacattaaaacaatggagctgatgcttttgttctaatygcactgtgaaaagatcaattgcttttgagctcatacacatgtggccatatttaattcagcctttacagaaactttgcccttctttttgataaactgaatttaaaatgaatgaaatgagctaagctgacactcttaacagccaagctcaactagcacatgtgtagctttgcttagtccagcaaagcttgcttctaccaaatctacragacacagtgcagaatttgggactcaattgtcagagatctcagccgtccttcctctggttgtgctccacacactcagagcacctgaaaatctggttttagttaagaagcagtaaactggagaaaacaggattgaagatttctatgcataaggatgttactgatgttgaattgggatggcagctatggactgtactaaagagagggaagacaacccttgtaggggaagcagcattgctgcaatttggtttttttctttttctttgatatgtaattttgatacctactaatttggctatttt

SEQ ID NO: 80455 - DNA, 600 bp, Chicken  19866894372838_1
tttatcaggccctccagcatgagatctctaactcattaaaacaggtttcatatatttcattcttcttcttccttaggcactatccacttgttattaataattacattatgcatctgtttaaagcttcatattttcagtccttttttgatagaatttccttgccttctaatcagctgcgttcattgaacctattcatgtttgcttggggttttctacatctcttgctgttggtgttttgacatctctaagtctttttttgtggttaccttgttcttatcctgcagtttctattcaacttaskagaaggcccttgcttcccttctttggatttccaggcaaagaagagctcttgagtatagtgtgtcagactgccatggtgcctttgagcagcgtttgttctgtgttctttcctggggttcttgttagagctcactgcccatttgcaagggaggaagaacaatctgaatttccacttagcagacagttaatagagggtgaacaagaagctggccccatcctgcccaagcccagaacaaagattgaagctggagagagtggtgctcagaagaatgatctgacactgcctctgagtgaaccagt

SEQ ID NO: 80456 - DNA, 600 bp, Chicken  19866894372838_2
ttatcaggccctccagcatgagatctctaactcattaaaacaggtttcatatatttcattcttcttcttccttaggcactatccacttgttattaataattacattatgcatctgtttaaagcttcatattttcagtccttttttgatagaatttccttgccttctaatcagctgcgttcattgaacctattcatgtttgcttggggttttctacatctcttgctgttggtgttttgacatctctaagtctttttttgtggttaccttgttcttatcctgcagtttctattcaacttaskagaaggcccttgcttcccttctttggatttccaggcaaagaagagctcttgagtatagtgtgtcagactgccatggtgcctttgagcagcgtttgttctgtgttctttcctggggttcttgttagagctcactgcccatttgcaagggaggaagaacaatctgaatttccacttagcagacagttaatagagggtgaacaagaagctggccccatcctgcccaagcccagaacaaagattgaagctggagagagtggtgctcagaagaatgatctgacactgcctctgagtgaaccagtg

SEQ ID NO: 80457 - DNA, 600 bp, Chicken  19866894372839_1
atggtggactgagtgatcctgtgggtcttttccaatcttggtgattctatgattctatgaaaaaacaaggagttgctccaggccctcgtcagctgttttgaaggtggtatgaattgcaagacgtctcatcgtaacttaaatccagatccttcacttcttgaagactagtcaaagtaggcttatctatatctgtagcctcaaatgaaggaacagctatgtaaaccagtgaagtctggcagttttggtgctgataaacccttggtgggtcagactgatacacaattcaatttgactgggagwtacaacrgcttttagcaggagcaggagcactgcaaaaacatcccaaatgtatttataaagccactgcctttgagatacttgtcagagtgcatatctgcacaacttaccagtcattacttcaccagagaaacyctagcrgctacctgcatgcattattcatgtgtctcaacaatatttagactctcaatcacgtgctaatccctatttctacctatttctttctaccaaaagaaaaatggccatcaatatatttataaatacagatttaatagaagtgaaaaacaaaggtacttctcgcat

SEQ ID NO: 80458 - DNA, 600 bp, Chicken  19866894372839_2
actgagtgatcctgtgggtcttttccaatcttggtgattctatgattctatgaaaaaacaaggagttgctccaggccctcgtcagctgttttgaaggtggtatgaattgcaagacgtctcatcgtaacttaaatccagatccttcacttcttgaagactagtcaaagtaggcttatctatatctgtagcctcaaatgaaggaacagctatgtaaaccagtgaagtctggcagttttggtgctgataaacccttggtgggtcagactgatacacaattcaatttgactgggagwtacaacrgcttttagcaggagcaggagcactgcaaaaacatcccaaatgtatttataaagccactgcctttgagatacttgtcagagtgcatatctgcacaacttaccagtcattacttcaccagagaaacyctagcrgctacctgcatgcattattcatgtgtctcaacaatatttagactctcaatcacgtgctaatccctatttctacctatttctttctaccaaaagaaaaatggccatcaatatatttataaatacagatttaatagaagtgaaaaacaaaggtacttctcgcatatcacac

SEQ ID NO: 80459 - DNA, 600 bp, Chicken  19866894372839_3
aacttaaatccagatccttcacttcttgaagactagtcaaagtaggcttatctatatctgtagcctcaaatgaaggaacagctatgtaaaccagtgaagtctggcagttttggtgctgataaacccttggtgggtcagactgatacacaattcaatttgactgggagwtacaacrgcttttagcaggagcaggagcactgcaaaaacatcccaaatgtatttataaagccactgcctttgagatacttgtcagagtgcatatctgcacaacttaccagtcattacttcaccagagaaacyctagcrgctacctgcatgcattattcatgtgtctcaacaatatttagactctcaatcacgtgctaatccctatttctacctatttctttctaccaaaagaaaaatggccatcaatatatttataaatacagatttaatagaagtgaaaaacaaaggtacttctcgcatatcacacaygcagtacctgctgtttcaataccgtctttaagcccaaatagccatggctcccagctagacaatgctgttgtcatggagcacaatcaaagcctagactaatggcagtttctgtgaagtcccagt

SEQ ID NO: 80460 - DNA, 600 bp, Chicken  19866894372839_4
aatccagatccttcacttcttgaagactagtcaaagtaggcttatctatatctgtagcctcaaatgaaggaacagctatgtaaaccagtgaagtctggcagttttggtgctgataaacccttggtgggtcagactgatacacaattcaatttgactgggagwtacaacrgcttttagcaggagcaggagcactgcaaaaacatcccaaatgtatttataaagccactgcctttgagatacttgtcagagtgcatatctgcacaacttaccagtcattacttcaccagagaaacyctagcrgctacctgcatgcattattcatgtgtctcaacaatatttagactctcaatcacgtgctaatccctatttctacctatttctttctaccaaaagaaaaatggccatcaatatatttataaatacagatttaatagaagtgaaaaacaaaggtacttctcgcatatcacacaygcagtacctgctgtttcaataccgtctttaagcccaaatagccatggctcccagctagacaatgctgttgtcatggagcacaatcaaagcctagactaatggcagtttctgtgaagtcccagtgtcacc

SEQ ID NO: 80461 - DNA, 600 bp, Chicken  19866894372839_5
ttttagcaggagcaggagcactgcaaaaacatcccaaatgtatttataaagccactgcctttgagatacttgtcagagtgcatatctgcacaacttaccagtcattacttcaccagagaaacyctagcrgctacctgcatgcattattcatgtgtctcaacaatatttagactctcaatcacgtgctaatccctatttctacctatttctttctaccaaaagaaaaatggccatcaatatatttataaatacagatttaatagaagtgaaaaacaaaggtacttctcgcatatcacacaygcagtacctgctgtttcaataccgtctttaagcccaaatagccatggctcccagctagacaatgctgttgtcatggagcacaatcaaagcctagactaatggcagtttctgtgaagtcccagtgtcaccagatgaatggatcaagccttcttggcaatggagacaagtcagttcaagtcttgatgccagctttttttcacacctttctaagagagcagtgccccaaagccaatgagatcctggctcacttgtggcttcaagacataacagacacacatgaaataatgtgtccctgtagtt

SEQ ID NO: 80462 - DNA, 600 bp, Chicken  19866894372840_1
catctgaggtcagagtgagattacagccagctgctgcagtgggatttccaccagctcacagaaggagctcagggctaggaaacatcagaacagtcaaaatcactttatgttaagagtggaaattttgttaatgattggtcagtctgtcttcccctcaattctcactgtttccagtaggtaaggagtcagtgttgctctttccagttagttaagcatttccacaagttccagcttctctgtgtttccctgatatttatgacttggaatcatggcagaaagttgaaaacgttgtgttttttkttttttttttttccttaacaattacctctgctttgtttccccttgttgtggtttgaggagttaatcacatgacagccatccttcccctcgggagaaggggggaggaagaggaagaaacctgattgagatagtggaaactgatttattaaaagagatgtgatgtaatacagggtaattaagaataacaaatcagacaaaccaaaaacaaaaactggaggagagagagtaggtcaacccaagtccttgttggcaggcactgcacagctggtctgctggaaaagacaggagaatttccccttc

SEQ ID NO: 80463 - DNA, 600 bp, Chicken  19866894372840_2
aaacaaaaactggaggagagagagtaggtcaacccaagtccttgttggcaggcactgcacagctggtctgctggaaaagacaggagaatttccccttccctggctttggaagatcacatctcccagagctggaactcaggtgaaatagctggatcttctcaaaagcatagcatgcagggagtgcatccagcactgttcttaagcatcagacagcctgctgcatgatgccatggtatggaatatcataaataaaaccaggatacccctgtgaaatctgctatttctgtgcatccactgttyacagggttattgtgaacaaacttttgtcacagaaatatatgagagccaaccaaaaggaatcagatcatttgtctcctgcccatacagtcttgtttaaaacacactcctataaagaagggtgaccttgcttctccaggtacttgaatccatttccaaggtgtgcaaatttcatgtttcatttttggactcaaacacagacagtacaaaccttccttctgctttttggaggctggctgtaggacacctatctccagcagcttttgggaaggctgtgcctttcagtcttcttattttggttga

SEQ ID NO: 80464 - DNA, 599 bp, Chicken  19866894372848_1
  misc_feature (1)..(10): n is any nucleotide
nnnnnnnnnncatttcttattgttactgagctattgatcccacctctgccagtgacaccagccgctgcaacccagtcaaaaaatctccaaagacaattagattttctcccaagacgttctcacttctgggcaatttgttctaaaaatcagcgaggccacaccttcctgtcttcttgaggaatcctagaaagactttcctttaacgcgacgtccacaaaaacctgacacatttgttgggatcgtggattatcatgagagctattgtcttattattctctcatattcacttgatgcatttayctgctgctttctcacatatttagcatgcaatcttttgcaatctttgcactccatattcataaagcaccaagtgcactgcggtgttggcccacaaggagggcttctgaagcgctgtcataatacaaataagcacaaagacataacagcagctcatggaaagaattaatttaccctctgcttttagcagtaggaaaagaggacagaaaatgacgagggcatactgcagaacagactacgtgtgccagttaatgtacagggaagtgactttgcaggaagcctcatgattaccttcacagtga

SEQ ID NO: 80465 - DNA, 600 bp, Chicken  19866894372856_1
ttccccttgtcctgctgttacctgccctttcaaagagttgactcccctactgtttacagacttcctttaggtactgaaaggctgcaatgaggtcaccccacagccttctcttctccagactgaacaagcccagctccatcagcctgtcttcatagtgaaggtgctccagccctctgatcagcataaatatgtgcacatcttctgcgattgagggagtcatgcagtctacaacatgccagtgctgagcagtctacctcttcctcccctaggacctgcagatgtgtctttggcctgagcacmtacatttctgtgagggcctygactctctgtagtccccataaaaagcattcagggctgtagcaaacgtgggccccctgctcatgtactgcttgtcagtaagcaccgtacaaaatccgtcatcagaacagtatcagtaatgcactgtcacacttctaaaataaagcattatmacttctccagagtgccccagcataactacaagagctgtctgccctgatgctctccagagttgcagcctttattactacaacatactatttgtgcagctgaactcttacatcatgttgaataaagaatacc

SEQ ID NO: 80466 - DNA, 600 bp, Chicken  19866894372856_2
cctgccctttcaaagagttgactcccctactgtttacagacttcctttaggtactgaaaggctgcaatgaggtcaccccacagccttctcttctccagactgaacaagcccagctccatcagcctgtcttcatagtgaaggtgctccagccctctgatcagcataaatatgtgcacatcttctgcgattgagggagtcatgcagtctacaacatgccagtgctgagcagtctacctcttcctcccctaggacctgcagatgtgtctttggcctgagcacmtacatttctgtgagggcctygactctctgtagtccccataaaaagcattcagggctgtagcaaacgtgggccccctgctcatgtactgcttgtcagtaagcaccgtacaaaatccgtcatcagaacagtatcagtaatgcactgtcacacttctaaaataaagcattatmacttctccagagtgccccagcataactacaagagctgtctgccctgatgctctccagagttgcagcctttattactacaacatactatttgtgcagctgaactcttacatcatgttgaataaagaataccaaggcaggatctgcttttgg

SEQ ID NO: 80467 - DNA, 600 bp, Chicken  19866894372856_3
cctctgatcagcataaatatgtgcacatcttctgcgattgagggagtcatgcagtctacaacatgccagtgctgagcagtctacctcttcctcccctaggacctgcagatgtgtctttggcctgagcacmtacatttctgtgagggcctygactctctgtagtccccataaaaagcattcagggctgtagcaaacgtgggccccctgctcatgtactgcttgtcagtaagcaccgtacaaaatccgtcatcagaacagtatcagtaatgcactgtcacacttctaaaataaagcattatmacttctccagagtgccccagcataactacaagagctgtctgccctgatgctctccagagttgcagcctttattactacaacatactatttgtgcagctgaactcttacatcatgttgaataaagaataccaaggcaggatctgcttttggcagctcacagtattccttccgcccgtgtaagaaaaaaacccctttcatttcacatgtcacatgtttatctgtaagtcagaagtttttggaaagtttgtggttagtgtgggcacaacagtaaatgcaagcttcagctgtgtgtgattcttg

SEQ ID NO: 80468 - DNA, 560 bp, Chicken  19866894372857_1
gatggagatagcgtggctggaagccggcggtggtggatcctggctccaggctaacacgggctttgtgtggcagcagtgtgcgagctgcagcaggggagggctgctcacaaggctggccttgggcacttggttacgttccagttcatcttgtgactgtgatctattgcctgcggtcagggtgaagagagtgaaatccgctcaacagctaaactggtctttgcagtaggcatttctttcagaagccgttgaaggcaggacggggcagtgtgcgactgtgatacgctggaagaggagcagggygtatgatagctgacacctggcctgcagacttggctttccctgcctcattcatcatgcgtcagctccttcccaatgcagmtggtgctgcagggacggctggtcccttgttggtcccttgttcttctgcagcagattcctgaccacagcttggtgggccagcacaagcgttgacctgggtggtgataagcactgttcttcacaggcatgacttaaagcttccgtattagttatctcattatttccttagttgaaatgtgagg

SEQ ID NO: 80469 - DNA, 481 bp, Chicken  19866894372857_2
gcgagctgcagcaggggagggctgctcacaaggctggccttgggcacttggttacgttccagttcatcttgtgactgtgatctattgcctgcggtcagggtgaagagagtgaaatccgctcaacagctaaactggtctttgcagtaggcatttctttcagaagccgttgaaggcaggacggggcagtgtgcgactgtgatacgctggaagaggagcagggygtatgatagctgacacctggcctgcagacttggctttccctgcctcattcatcatgcgtcagctccttcccaatgcagmtggtgctgcagggacggctggtcccttgttggtcccttgttcttctgcagcagattcctgaccacagcttggtgggccagcacaagcgttgacctgggtggtgataagcactgttcttcacaggcatgacttaaagcttccgtattagttatctcattatttccttagttgaaatgtgagg

SEQ ID NO: 80470 - DNA, 600 bp, Chicken  19866894372858_1
ctttttttctgcatgtgcacatacacatgtgcattaaatgaaatcatttttgctgtcttatttctatagctatagataaaggtgtgtctcaagaggttcgcagagttcaagcttagttttcacatacttaaatatagaattttagtttttcagtagccaacaaaaggtcagaatacaggataaacacaaattactaatccatctgcagtgatgctctgtgttcaccataaagcactgacacacaaggcccaaatctaaaatgctgactcttgtagagtaacggtttgtttaacagtcccrtgatacagtgatgctataaattcaggtcaaatcgctgcactgcatgtggatcagtaccaaacctgaggcccaaatattttcagccagtatttacacactaaagccctgatcatgtaatggcattgagcgtattcttactattaaagtaagaaagacatctagtgaaccacttcaatgctcaaagttcaacctatgctttacacatggtgtcaaagtatgcctttaatttctacaggaccatttgcatttacagtgaaaagtaaatacccttggctgggttgtagttaaatcatattccca

SEQ ID NO: 80471 - DNA, 592 bp, Chicken  19866894372860_1
tattgcacagaatcacctgacgttgttaaatctttattgatgaatattttgccgtgagtaaactattatagttacagaaaattacaacatctaggatttttggaggcaccccctcacatggaaaccagattttatccaggtaaattaccaatggatgctggcgttgctattgtttcaggcatttactaacaagtttctctgtaatgaagttaatgagtaaacgatataacctctggcccatgtcactcctttgtgagtcttaaagaaagttctcactgtaaagaaggcaacgggatacaramaaagcagaaacttcaagggaaaaagaaaagcagagaaagagggaaggaaggactgggtgatgtaaggacagtattttgcttcaagatatggtctgactgaagactggctgaggtaggatatcgctatgctctcgtttaggtgtmtgtgtgatctgaacttgtattcttcactgaaactgtagggtgctatgaggttgtttaacccaagcgatctgaatgttctgaaaataatttgtttgcaatcaaatcaggatttcattaatggctgtcctaaggtttccagttactta

SEQ ID NO: 80472 - DNA, 590 bp, Chicken  19866894372860_2
ttgcacagaatcacctgacgttgttaaatctttattgatgaatattttgccgtgagtaaactattatagttacagaaaattacaacatctaggatttttggaggcaccccctcacatggaaaccagattttatccaggtaaattaccaatggatgctggcgttgctattgtttcaggcatttactaacaagtttctctgtaatgaagttaatgagtaaacgatataacctctggcccatgtcactcctttgtgagtcttaaagaaagttctcactgtaaagaaggcaacgggatacaramaaagcagaaacttcaagggaaaaagaaaagcagagaaagagggaaggaaggactgggtgatgtaaggacagtattttgcttcaagatatggtctgactgaagactggctgaggtaggatatcgctatgctctcgtttaggtgtmtgtgtgatctgaacttgtattcttcactgaaactgtagggtgctatgaggttgtttaacccaagcgatctgaatgttctgaaaataatttgtttgcaatcaaatcaggatttcattaatggctgtcctaaggtttccagttactta

SEQ ID NO: 80473 - DNA, 446 bp, Chicken  19866894372860_3
accaatggatgctggcgttgctattgtttcaggcatttactaacaagtttctctgtaatgaagttaatgagtaaacgatataacctctggcccatgtcactcctttgtgagtcttaaagaaagttctcactgtaaagaaggcaacgggatacaramaaagcagaaacttcaagggaaaaagaaaagcagagaaagagggaaggaaggactgggtgatgtaaggacagtattttgcttcaagatatggtctgactgaagactggctgaggtaggatatcgctatgctctcgtttaggtgtmtgtgtgatctgaacttgtattcttcactgaaactgtagggtgctatgaggttgtttaacccaagcgatctgaatgttctgaaaataatttgtttgcaatcaaatcaggatttcattaatggctgtcctaaggtttccagttactta

SEQ ID NO: 80474 - DNA, 600 bp, Chicken  19866894372866_1
ttcccccagctggggagaattttgtgtctaatggcactgcagacttgcagtgttcagtgcttcaccacaagcgtgtgacgacaaatggaaaaggtacactaaaaaataaacaccaccttagcaagagatctgaaggaaggggctgttagttgtgcctgtcacctcttatatcaattatataggtcatattttatttttccacctccttgctcaggcttcacggttaccttcatgtcttgcttcaaggagctcctgctctccctggaccgcataattcacactacaacagaaggagcagtkctcccagcacaacaaaccagctctgcccattaataagcagaaaaccctatgccctgctatactgtatgcctgacgatatgctatggaaagtaratttacccttacagagcgtggaacctgtcactgcacctttcttttatgttgggaaccaaggagataagaaacttttctttggggtaagttctgacagcctctgtgtcttgtacgcttgtaccatgcttaacgtagataaaagtacaaatattttgcataattacatggatgctaacattcatagtgcctgtggcatcagttctaatt

SEQ ID NO: 80475 - DNA, 600 bp, Chicken  19866894372866_2
gtacactaaaaaataaacaccaccttagcaagagatctgaaggaaggggctgttagttgtgcctgtcacctcttatatcaattatataggtcatattttatttttccacctccttgctcaggcttcacggttaccttcatgtcttgcttcaaggagctcctgctctccctggaccgcataattcacactacaacagaaggagcagtkctcccagcacaacaaaccagctctgcccattaataagcagaaaaccctatgccctgctatactgtatgcctgacgatatgctatggaaagtaratttacccttacagagcgtggaacctgtcactgcacctttcttttatgttgggaaccaaggagataagaaacttttctttggggtaagttctgacagcctctgtgtcttgtacgcttgtaccatgcttaacgtagataaaagtacaaatattttgcataattacatggatgctaacattcatagtgcctgtggcatcagttctaatttagcaaagtgaatcagttcctcttcttaacaattcatcagcgctgtgccagagaggctgtgttgtgcatggctgttaccaccctgaaacatta

SEQ ID NO: 80476 - DNA, 600 bp, Chicken  19866894372867_1
ggaatagaaaggaaatagagaagcagtaaataaaatgtggacacaatccctgacaggcaagtgtaaggggaacagatcagctattggaagactgctggcagagccaggcttctccgtgaataagaatgcagacctgggaattctggacatggaaggaggaagctgatggtggatcttgccatctgataagggatgtgcaggaactggggaggaccaatgagaaggataggtggaaggggctgcggaataattgctagaggtgacgtagaaatgaaacttatattaatagtacagcattgytcacacattaaggaaaggtacaaaagcagagtgtgtctgatccattccayggaatttccctgggcaatatcaggtgttggcagcatcaggggagcttgatgtgctgacttgaggagaagtggcatgaagggtggagcagaacaaagacactatgaccaggctctgtgataccactgccaggataggaacttgatggtactacagagctgataagccatgtatttgstaccctgaaccagtctgtcattctttgacaaaatgccatcatttgtgtcaactttgctcggtataacatttttg

SEQ ID NO: 80477 - DNA, 600 bp, Chicken  19866894372867_2
tgacaggcaagtgtaaggggaacagatcagctattggaagactgctggcagagccaggcttctccgtgaataagaatgcagacctgggaattctggacatggaaggaggaagctgatggtggatcttgccatctgataagggatgtgcaggaactggggaggaccaatgagaaggataggtggaaggggctgcggaataattgctagaggtgacgtagaaatgaaacttatattaatagtacagcattgytcacacattaaggaaaggtacaaaagcagagtgtgtctgatccattccayggaatttccctgggcaatatcaggtgttggcagcatcaggggagcttgatgtgctgacttgaggagaagtggcatgaagggtggagcagaacaaagacactatgaccaggctctgtgataccactgccaggataggaacttgatggtactacagagctgataagccatgtatttgstaccctgaaccagtctgtcattctttgacaaaatgccatcatttgtgtcaactttgctcggtataacatttttgtaacacaagaacacacctccttcttgaaagctacttgcctctgaggtgtg

SEQ ID NO: 80478 - DNA, 600 bp, Chicken  19866894372867_3
taggtggaaggggctgcggaataattgctagaggtgacgtagaaatgaaacttatattaatagtacagcattgytcacacattaaggaaaggtacaaaagcagagtgtgtctgatccattccayggaatttccctgggcaatatcaggtgttggcagcatcaggggagcttgatgtgctgacttgaggagaagtggcatgaagggtggagcagaacaaagacactatgaccaggctctgtgataccactgccaggataggaacttgatggtactacagagctgataagccatgtatttgstaccctgaaccagtctgtcattctttgacaaaatgccatcatttgtgtcaactttgctcggtataacatttttgtaacacaagaacacacctccttcttgaaagctacttgcctctgaggtgtggcaactcctcagtgagctcacactcactgaattttttcgtctatacctttaaaagcaaagttaggtaattttaaaccatttgtaacaaaggtatgtattactggtgtccctcaaggtcacattagggccacgaagatgatcagagggataagcacctcccctatgaagtaaggttg

SEQ ID NO: 80479 - DNA, 600 bp, Chicken  19866894372873_1
tcaccagaattagtgcacggctcctaaaaggaaaaagacgctaacaactataatagatctccctagctcaagaaaggatgcacttttaagacagtagctaagcaaagatgatctagaaacaaatatcaatagtaattatctgaaaatataatattttgttagaaacttaaaaataacttgctgcataaacttgttactggtgtttctttaaggctacagagggaaagcataacatacacattaagaaacaacctatcaggccataaaaagcaaacataaaactatatgaacagaaaaaawatatatactccagaaggaaattgttccgttcaaacaaagtatgcacaaattgcacctttgaaaccaattccagctttaaagaatttacatgcttcccttcctcccactcagaacccctgaatttggagaaaaacttttcartggtttctatagtcatctagataggggacaccaaagagttaaattcattccaagcaattataacatgaggcagtaatttgaccagtgagaacataagtttgatttacaatgttctatattcaatatcataaaatttaaacataaaagagggcagaaagt

SEQ ID NO: 80480 - DNA, 600 bp, Chicken  19866894372873_2
gaaaatataatattttgttagaaacttaaaaataacttgctgcataaacttgttactggtgtttctttaaggctacagagggaaagcataacatacacattaagaaacaacctatcaggccataaaaagcaaacataaaactatatgaacagaaaaaawatatatactccagaaggaaattgttccgttcaaacaaagtatgcacaaattgcacctttgaaaccaattccagctttaaagaatttacatgcttcccttcctcccactcagaacccctgaatttggagaaaaacttttcartggtttctatagtcatctagataggggacaccaaagagttaaattcattccaagcaattataacatgaggcagtaatttgaccagtgagaacataagtttgatttacaatgttctatattcaatatcataaaatttaaacataaaagagggcagaaagtaagcaatgaagctatcaaaaaaaatacgagtacaaaaagattactacagtaaaggtcgttgattttatgttagaactgttatgagcaaaagcactcaaatcatcccagaagaattagcttaaagtgtcactagcagagcac

SEQ ID NO: 80481 - DNA, 600 bp, Chicken  19866894372874_1
ctccaattactgatattggtatgtgctttacaccaattgttaagataaattttaatacattattggtatgaatgctttgattgttttgggttcatttttatctctgctggttacaggattggcaatatccatgtgtatgcattcaaggtgaattcttagtcatcttttttacctttaagcattttgactgccacagttctgcaggtagcagttttgtcaatcccaaaggcatcagcttctatgacttggccaaaagctccacgcccaagaggtttaccttgaagtgagaagaacagaccrattcatttgcctggtacagtggtcaaaagacacagaataaacagcaaactgaatttctatatgataaattaacagatgacwgacagtggggagaggctgtattatatcctawgggactttggagcgctcccaggaggctgtgcatcagggcagtcccaccacccgcyctgaagcccctcctggtgcagggctggctgcagggtcacataatggcctgtgcagggaagacacacctagcttcagtcggtctctgggaaactcccacttgctggcatcatacggaagccgctcgcagtgctc

SEQ ID NO: 80482 - DNA, 600 bp, Chicken  19866894372874_2
tgttttgggttcatttttatctctgctggttacaggattggcaatatccatgtgtatgcattcaaggtgaattcttagtcatcttttttacctttaagcattttgactgccacagttctgcaggtagcagttttgtcaatcccaaaggcatcagcttctatgacttggccaaaagctccacgcccaagaggtttaccttgaagtgagaagaacagaccrattcatttgcctggtacagtggtcaaaagacacagaataaacagcaaactgaatttctatatgataaattaacagatgacwgacagtggggagaggctgtattatatcctawgggactttggagcgctcccaggaggctgtgcatcagggcagtcccaccacccgcyctgaagcccctcctggtgcagggctggctgcagggtcacataatggcctgtgcagggaagacacacctagcttcagtcggtctctgggaaactcccacttgctggcatcatacggaagccgctcgcagtgctcatctatggggacttcatcaggatccatgatgattgacaagtacccagtcttcatgtcacctccattggcctggaaaatggc

SEQ ID NO: 80483 - DNA, 593 bp, Chicken  19866894372874_3
acaggattggcaatatccatgtgtatgcattcaaggtgaattcttagtcatcttttttacctttaagcattttgactgccacagttctgcaggtagcagttttgtcaatcccaaaggcatcagcttctatgacttggccaaaagctccacgcccaagaggtttaccttgaagtgagaagaacagaccrattcatttgcctggtacagtggtcaaaagacacagaataaacagcaaactgaatttctatatgataaattaacagatgacwgacagtggggagaggctgtattatatcctawgggactttggagcgctcccaggaggctgtgcatcagggcagtcccaccacccgcyctgaagcccctcctggtgcagggctggctgcagggtcacataatggcctgtgcagggaagacacacctagcttcagtcggtctctgggaaactcccacttgctggcatcatacggaagccgctcgcagtgctcatctatggggacttcatcaggatccatgatgattgacaagtacccagtcttcatgtcacctccattggcctggaaaatggcattagttgtaaatgtataagtttt

SEQ ID NO: 80484 - DNA, 538 bp, Chicken  19866894372874_4
tttacctttaagcattttgactgccacagttctgcaggtagcagttttgtcaatcccaaaggcatcagcttctatgacttggccaaaagctccacgcccaagaggtttaccttgaagtgagaagaacagaccrattcatttgcctggtacagtggtcaaaagacacagaataaacagcaaactgaatttctatatgataaattaacagatgacwgacagtggggagaggctgtattatatcctawgggactttggagcgctcccaggaggctgtgcatcagggcagtcccaccacccgcyctgaagcccctcctggtgcagggctggctgcagggtcacataatggcctgtgcagggaagacacacctagcttcagtcggtctctgggaaactcccacttgctggcatcatacggaagccgctcgcagtgctcatctatggggacttcatcaggatccatgatgattgacaagtacccagtcttcatgtcacctccattggcctggaaaatggcattagttgtaaatgtataagtttt

SEQ ID NO: 80485 - DNA, 600 bp, Chicken  19866894372876_1
aagagctgaagagcaaagcaatcacgcaatatttgtgcttataaaggcaaaaggtgaatttcaaataatcatcagtgcagctgtaatgaactaaaatacagaaacaaaatttcgtttcaagagggtcaaagaacatctgacaaaccaaatacgaagaaaagttagggaaaatgatcttatgtttaagaaacaaaatattccagccctctcattgtccatgctgtttaggttagtcacaatgcctgtatatgcaggatgaaggttccattcaccttatcctgtatgataggcttttcactwgattacacttaagttttttaaacagacacatcaactggtgtcagcaacagcaaatccatgagagaaatccgctgactaagaggacagacggatctcaacaattaccaaaatcattgttacttctatatgaggaaagaaaaacaaaaaacamcacaaaagaacacattaaaagaatgtggtgactcagcttgtcaacacatttcaatgaagaaacctgcaaaagcagatcatcgcccaaagctgcgatttcctctcagcaggtgtaacagcagtagtcagaggttcttactactttctact

SEQ ID NO: 80486 - DNA, 600 bp, Chicken  19866894372876_2
cgaagaaaagttagggaaaatgatcttatgtttaagaaacaaaatattccagccctctcattgtccatgctgtttaggttagtcacaatgcctgtatatgcaggatgaaggttccattcaccttatcctgtatgataggcttttcactwgattacacttaagttttttaaacagacacatcaactggtgtcagcaacagcaaatccatgagagaaatccgctgactaagaggacagacggatctcaacaattaccaaaatcattgttacttctatatgaggaaagaaaaacaaaaaacamcacaaaagaacacattaaaagaatgtggtgactcagcttgtcaacacatttcaatgaagaaacctgcaaaagcagatcatcgcccaaagctgcgatttcctctcagcaggtgtaacagcagtagtcagaggttcttactactttctacttgcagaatattattcttcagcctatttgcttttttttttttttttaatttgcatttggtgttattttagagcgctctacctttgagctgagatcagagagctacaaagctgacccagcaggtggaagggattctatatatgaagtctgtcc

SEQ ID NO: 80487 - DNA, 600 bp, Chicken  19866894372878_1
caatcttcaacagtaacacttactgcttgctatacccagggaaggggttatttatacccaaaggaggcttacatgctcatttttgatttaagattcttctcatctttctaacctgctataaaagcaaatccaacagcaaaaaaataccatatgaatgactgaatttgtataatctcagcccaaggaacagtgattgaagtacttttcaaacaccaagtgccaaagctttactcaagttgtcatttcatctcctgttcttgaatacattcctgaactctacagcaggcaagaaggcagaaraagraagtcacaaatctcacaaatcataaagcagtgttaagtagattgcaatataaataaataaataaatgcgggggcctaaaggtgcatcctggaatctacccaaatgtcatctataacttcaaagtaattgagtaaaaagatgtcataggtttcaacacaaatctgctcagcctgcttaataaagaacaaactgcgttttccatgacaactgaaatacagatttgatggtacaaacttctgagtacctgagtttgatatttcagttctatcacttcaatgtgggtttttttctttagg

SEQ ID NO: 80488 - DNA, 600 bp, Chicken  19866894372878_2
cttcaacagtaacacttactgcttgctatacccagggaaggggttatttatacccaaaggaggcttacatgctcatttttgatttaagattcttctcatctttctaacctgctataaaagcaaatccaacagcaaaaaaataccatatgaatgactgaatttgtataatctcagcccaaggaacagtgattgaagtacttttcaaacaccaagtgccaaagctttactcaagttgtcatttcatctcctgttcttgaatacattcctgaactctacagcaggcaagaaggcagaaraagraagtcacaaatctcacaaatcataaagcagtgttaagtagattgcaatataaataaataaataaatgcgggggcctaaaggtgcatcctggaatctacccaaatgtcatctataacttcaaagtaattgagtaaaaagatgtcataggtttcaacacaaatctgctcagcctgcttaataaagaacaaactgcgttttccatgacaactgaaatacagatttgatggtacaaacttctgagtacctgagtttgatatttcagttctatcacttcaatgtgggtttttttctttaggaata

SEQ ID NO: 80489 - DNA, 600 bp, Chicken  19866894372880_1
tttgtacactaatatataatgcataggtctatgaaagaaattgaaagtttatgctaaatctatcttctgtttaacaaagagtaaaagtgacctctcacaaaccgagaaaaggaatatagttcattagtgatttgccatgagactgccaattaatgatgaagatctaacttcaaaaaggatcaataagaaaagtaaataggaaactcatttgaatataggagagagttgggaaagaatggtaaaataaactgtaagatttgttactaagatataacacttttcaagagtagtgtgtctttwggatgtagcagcaagtgtctatgtagataaatataaagttctctttaagaacagatctagtcaactgttattagattatttcacaagaagtcaggcatttactagaagataagcaataaaatgataccaaactaggtgtttagttctgtttcagtgtttgtatttttttgttttatcctcagtcacatctacactagcataatccatgctatatttagaatatatatctatattcatacagtcatttccttgaataaaatgaccagacattctgaacacagcatcagattaaaaatattg

SEQ ID NO: 80490 - DNA, 600 bp, Chicken  19866894372886_1
actatgtccccgtttctacctgacatttcacacagtacctcttctaggtggagcgctcatctagcattgttcaatagcaacagaaagaacacctcacgcctaagcaggttatcacaacgaggatcgtcagtacaactacaactggtcactttagccacacaaagttaggcagacggttacaaagcttattccacatatccacgattccaacagaagggtcatgtaaggagacttggtgtagctcttaaacgcctctccaaattgcctataaatcactctctacatgtacatttcggtccrtgtaagcgcagtgactatggttaataatcacacagacccctcatgcctttgcgctaagaaggtcgagggccattctattctgcaagactgatttactacagcgtgagatctctgtctgaagaccctggatggcttctaaacttaggttctcaattctttccatagtgactgatacattcacaactgcttgctccagttcaatgactccaacagctgaaagtacccatcaaataaaactagggaattccatagtcctttcaactggtggattattccctctcttagtgtatagccgcatgg

SEQ ID NO: 80491 - DNA, 600 bp, Chicken  19866894372888_1
gctccgggaacacctcactgtggccttccaatgcttgaaaggagagtatgaacaggagggagaatgactatatataagtgtggacagtgatagaacaagggggaatggttttaaactaagacaggagctttagtttagatattaggaggtaggttttctctcagagggtggtgacacactggaacaagctgcccaaggacatcgtggatgccacatccctggaggtattcaaggccaggctggatgtggctctgggcagcctggtctagtggttggcgaacctgcgcatagcaggggggwtgaaactaggtgatcattatggtccttgttaacccagaccatgctatgattctatgatgattcacttttatcccatcaacaagactatgtaccgtgatttctaagtgacaccaaaaaatacaaaacagtaaccaaatgtttcccaaaagcttcatatgtcaattattataaaaagaaacattggaagggggcattttatctgaaaactatccagaatatttctcatttaactcatatacaacaactaataaactatttttgactattaaagaagcacaaactagtggtactgattaacag

SEQ ID NO: 80492 - DNA, 600 bp, Chicken  19866894372892_1
cagttgggcagaattagcaataaaaaaaatgtgtgaaataagcaatacagctgagaaaacacaacacagtctccctggtaaaatcatatttggtctttggaaggaaagagctgtggctcaggagctgctggctatatacagaatgtggcagagaaacgcttttccttacagaggccccagatttgtcagttttaactctgggcagtagagtgaacacacacacacactcatatttaaaagacttgactgggagtgttatatttcagcaaaattttatataattacctttaaaatgaaaakaaaaggcatgagcacgtttgcagagagcaataccctgaaatcccccgtcagctccacatcgctacattaggaagccaggcacacttgcagagctttactcttgcctctcccttaccttgaaatctgtcgtccttctatacgtaaatgctagattcagcaagaggtatagaattctttttttcttcttttttctctcttttctcttcctgacttctatggactcccagcgatctgcataccccactgaggacagtcagccttctgaactcggataccacaagtgggcattgttatctcttc

SEQ ID NO: 80493 - DNA, 600 bp, Chicken  19866894372892_2
gaggacagtcagccttctgaactcggataccacaagtgggcattgttatctcttccacgcacattcgtaaataaaactgacagtgcgtgtattcgatagacgctgttattctatccttaccagattttacttcaagatggcagttccgtatctgcagagaaattagccttcacaagttttctggggaaaactcaagccctgtggactactaggtgtctgagagcttattaggattttatcattctgttttttaacctagcagtcttcaaattatgcttgtgctcttttttagattccatwttgtctttacatttagtgtatctttctgcagttggttcctctgatttgcactgcagccaatttgagcaaggacagaaatacagtgatgcatatttttccccctacttaactgaaagtgatttgtgagagacttagaattacataatgccaaagcaacagaaagcgcattcagtggataagcacctttctaatcctaccctggactgcaatgctatttgcaccactgaagacaaaatgtaattctgctgaaatggaagcagttacgctcacgttttctattatgtgggttgctataaaaca

SEQ ID NO: 80494 - DNA, 578 bp, Chicken  19866894372895_1
cacagctattcacccagttccttatcagtcacatagtctatccatcaaatccacatctactactacagcttagaaaaactggagattagttctaataaatatgtattttacaacattaaagtcattttttttagaatgtaatatataactacctttgcctaaaaggatgaaaataattcaccctgcagggaaagttaagaagagtaaagaagaaagaaggaaaactagatgaaagctgtactgcgtctggctcagatggagtttattttcctcatactagcccatatattggtctactgyacacctggggctacagaagtgttgataatgttagcacttcgagtgcttgtgcagcaccagagttttctctygaaaccacttccctcactaaatgctagtagactatgggtagaaagaatttttagaggtgacataactgggacagctaacccaaacagaccaaagggatataccataacttacaatgtcatgcttaggagtaaaaactgaggaaaagaaggaggatgcaaggacattcctgtaaatgacatttgccctccttagcaatatttatgagg

SEQ ID NO: 80495 - DNA, 507 bp, Chicken  19866894372895_2
agaaaaactggagattagttctaataaatatgtattttacaacattaaagtcattttttttagaatgtaatatataactacctttgcctaaaaggatgaaaataattcaccctgcagggaaagttaagaagagtaaagaagaaagaaggaaaactagatgaaagctgtactgcgtctggctcagatggagtttattttcctcatactagcccatatattggtctactgyacacctggggctacagaagtgttgataatgttagcacttcgagtgcttgtgcagcaccagagttttctctygaaaccacttccctcactaaatgctagtagactatgggtagaaagaatttttagaggtgacataactgggacagctaacccaaacagaccaaagggatataccataacttacaatgtcatgcttaggagtaaaaactgaggaaaagaaggaggatgcaaggacattcctgtaaatgacatttgccctccttagcaatatttatgagg

SEQ ID NO: 80496 - DNA, 600 bp, Chicken  19866894372896_1
cagaatctggatacttcatttcgcaacaggaggaccaacgttctcagtgagaagagtggggggactgactgcattagcctctccttacatacatctctgtcactcaggcactggctcagctttctcagctggatatagaccaactttttctttcaccaggtttcagactgatatggaagaaaaagaatgtttgcaaggaatcttaacaattatctacaactgctatccttgtgccttatgcactcattttgctagcctggggctatgggaaccctgctcagagcttttgcaatgggtccrttccctaagaagcacttgacctgcatatgagagaggaggagaaggtgacagagagaaaggagaaagaaaccgtaacctgtaggacatccatcaagtgttttaagtctatacatatggctgcaattttgcctttgaaagatgaatcaagtaatgctgccgacacttactctttcctgtcagactcttcttttactctcaagtctgtcgatagcttaaaagttatatcttctccagtgttagtgcagcagtttcccatttgatttcatattcagttcatatttgtggaagcaggaggggctc

SEQ ID NO: 80497 - DNA, 600 bp, Chicken  19866894372897_1
gtcactttgttaaaaacgcctctcaagaagcactgaagatgtgaagaactgaactcatttgttggatctggtgccaccaaagtaaatgcagggcagaaatttcaaagctggtgtggagacttaaggatatagagttatgtttatttactccagttacgttactattttttttttctttttctttttttttttagttaggctttgtataaaaagctcacatttcctgtggaaagagatggagaaattcactctctgttggatatagggacattggtcttatctggaaggcagatgatctcmagagtctggatgtttgaagttaatgaggaaaggctttggaatgaatatcattccatgtgagagaaataaaaagatctgtattgaagcagatagttggaaggactaaccttcagatgtgtgtgraagagaatcttataggaatacaattgaaaggataaagggttatgatgtagaaaattgttgcttaaaaaataatactgtacaatgcagagggaactaatataaccaaaaaagaaaaaaatgtatctccttttctgtaaattgcagctcagtagctaatggctagtgatggcattgcag

SEQ ID NO: 80498 - DNA, 600 bp, Chicken  19866894372897_2
aggatatagagttatgtttatttactccagttacgttactattttttttttctttttctttttttttttagttaggctttgtataaaaagctcacatttcctgtggaaagagatggagaaattcactctctgttggatatagggacattggtcttatctggaaggcagatgatctcmagagtctggatgtttgaagttaatgaggaaaggctttggaatgaatatcattccatgtgagagaaataaaaagatctgtattgaagcagatagttggaaggactaaccttcagatgtgtgtgraagagaatcttataggaatacaattgaaaggataaagggttatgatgtagaaaattgttgcttaaaaaataatactgtacaatgcagagggaactaatataaccaaaaaagaaaaaaatgtatctccttttctgtaaattgcagctcagtagctaatggctagtgatggcattgcaggcagagtcactggttacctttttccttggtcttagagtgcagtgagatggtggaatatatcaacaaccttggacaatacttgacactgctgttgagagactgtcccaggtgtgtgcctcagcc

SEQ ID NO: 80499 - DNA, 600 bp, Chicken  19866894372905_1
accgtgatgcttcctgatggctgtgtgtcagtgcagagagtttctgtggcaacctgaagatttgcaattcatagaaagcctggagcgagacaaaacttttaagccctggctgtcactgctgtgcagtgggtaccaccaacacctggcgaccttcttcccttgcttgcttttcacgcttggcagaagaaatcatataaaagtaacatgcacagttaacccttcttaaaatatgtgtgccttctgcgttttcaattgctttatacgaaagaaaggctcatggggaagtgttttaaaaatgaktatttgctttgtatcctagctgcagacttactgttggaaatactgctttcctgtggtcagatagcaaaaataatataaaataggtattgggttaaagactgawaatcatataaccatagaatcgtttgatttggaagggaytcttgatggccatctggtccactcccctgtaaggaacagggatacccacagctccatcaggtgcaaaattaggcagccttgagttggtgatatgtaaggtatcattagctctgaagtatgacccagtagatgaagcttagcaggcagcctcacatatga

SEQ ID NO: 80500 - DNA, 600 bp, Chicken  19866894372905_2
ccctggctgtcactgctgtgcagtgggtaccaccaacacctggcgaccttcttcccttgcttgcttttcacgcttggcagaagaaatcatataaaagtaacatgcacagttaacccttcttaaaatatgtgtgccttctgcgttttcaattgctttatacgaaagaaaggctcatggggaagtgttttaaaaatgaktatttgctttgtatcctagctgcagacttactgttggaaatactgctttcctgtggtcagatagcaaaaataatataaaataggtattgggttaaagactgawaatcatataaccatagaatcgtttgatttggaagggaytcttgatggccatctggtccactcccctgtaaggaacagggatacccacagctccatcaggtgcaaaattaggcagccttgagttggtgatatgtaaggtatcattagctctgaagtatgacccagtagatgaagcttagcaggcagcctcacatatgatggatatgccagattttcagccttatcctttctggttgcagccttctctcactgtctttcccctgggccaaatgctctttgtgctgggtttcccactgcagtt

SEQ ID NO: 80501 - DNA, 600 bp, Chicken  19866894372905_3
cctggcgaccttcttcccttgcttgcttttcacgcttggcagaagaaatcatataaaagtaacatgcacagttaacccttcttaaaatatgtgtgccttctgcgttttcaattgctttatacgaaagaaaggctcatggggaagtgttttaaaaatgaktatttgctttgtatcctagctgcagacttactgttggaaatactgctttcctgtggtcagatagcaaaaataatataaaataggtattgggttaaagactgawaatcatataaccatagaatcgtttgatttggaagggaytcttgatggccatctggtccactcccctgtaaggaacagggatacccacagctccatcaggtgcaaaattaggcagccttgagttggtgatatgtaaggtatcattagctctgaagtatgacccagtagatgaagcttagcaggcagcctcacatatgatggatatgccagattttcagccttatcctttctggttgcagccttctctcactgtctttcccctgggccaaatgctctttgtgctgggtttcccactgcagtttggaagtctccagacctggaaggagagtgccaatagca

SEQ ID NO: 80502 - DNA, 599 bp, Chicken  19866894372915_1
  misc_feature (1)..(211): n is any nucleotide
nnnnnnnnnnnnnnnnnnnnnnnnnnnnnnnnnnnnnnnnnnnnnnnnnnnnnnnnnnnnnnnnnnnnnnnnnnnnnnnnnnnnnnnnnnnnnnnnnnnnnnnnnnnnnnnnnnnnnnnnnnnnnnnnnnnnnnnnnnnnnnnnnnnnnnnnnnnnnnnnnnnnnnnnnnnnnnnnnnnnnnnnnnnnnnnnnnnnnnnnnnnnnnnnnnnaggcaaaatgaaacatttttgattccattccaggcctcttagtagcaaatatttctccactgaagaaatgtggtcaaggctgttttttytgttgttgtttgtttgctttatgtttattctccccccgccctctaacttactggaagtttcyatccaaaaagcagaatcctactcttctagtaagtaattcataktaaagctggtagctacttttgtactggttttgtatgccaagctttctggatccagaatgtaggaaggaagagaactgtgattcattagagttttctaatgtggttaaatttactcttatgtttataagatagaatcaactccattaacgtgattggttaaagtgtattaactttttaaagttaggragaagagg

SEQ ID NO: 80503 - DNA, 599 bp, Chicken  19866894372915_2
  misc_feature (1)..(149): n is any nucleotide
nnnnnnnnnnnnnnnnnnnnnnnnnnnnnnnnnnnnnnnnnnnnnnnnnnnnnnnnnnnnnnnnnnnnnnnnnnnnnnnnnnnnnnnnnnnnnnnnnnnnnnnnnnnnnnnnnnnnnnnnnnnnnnnnnnnnnnnnnnnnnnnnnnnnnaggcaaaatgaaacatttttgattccattccaggcctcttagtagcaaatatttctccactgaagaaatgtggtcaaggctgttttttytgttgttgtttgtttgctttatgtttattctccccccgccctctaacttactggaagtttcyatccaaaaagcagaatcctactcttctagtaagtaattcataktaaagctggtagctacttttgtactggttttgtatgccaagctttctggatccagaatgtaggaaggaagagaactgtgattcattagagttttctaatgtggttaaatttactcttatgtttataagatagaatcaactccattaacgtgattggttaaagtgtattaactttttaaagttaggragaagaggagctgatagcattagtcgctatcacattattaatcatttttactgcaatggaactgagattt

SEQ ID NO: 80504 - DNA, 599 bp, Chicken  19866894372915_3
  misc_feature (1)..(106): n is any nucleotide
nnnnnnnnnnnnnnnnnnnnnnnnnnnnnnnnnnnnnnnnnnnnnnnnnnnnnnnnnnnnnnnnnnnnnnnnnnnnnnnnnnnnnnnnnnnnnnnnnnnnnnnnnnaggcaaaatgaaacatttttgattccattccaggcctcttagtagcaaatatttctccactgaagaaatgtggtcaaggctgttttttytgttgttgtttgtttgctttatgtttattctccccccgccctctaacttactggaagtttcyatccaaaaagcagaatcctactcttctagtaagtaattcataktaaagctggtagctacttttgtactggttttgtatgccaagctttctggatccagaatgtaggaaggaagagaactgtgattcattagagttttctaatgtggttaaatttactcttatgtttataagatagaatcaactccattaacgtgattggttaaagtgtattaactttttaaagttaggragaagaggagctgatagcattagtcgctatcacattattaatcatttttactgcaatggaactgagatttctgtattttagttttaagtgacattcaagaagacagtatattc

SEQ ID NO: 80505 - DNA, 600 bp, Chicken  19866894372915_4
tgttttttytgttgttgtttgtttgctttatgtttattctccccccgccctctaacttactggaagtttcyatccaaaaagcagaatcctactcttctagtaagtaattcataktaaagctggtagctacttttgtactggttttgtatgccaagctttctggatccagaatgtaggaaggaagagaactgtgattcattagagttttctaatgtggttaaatttactcttatgtttataagatagaatcaactccattaacgtgattggttaaagtgtattaactttttaaagttaggragaagaggagctgatagcattagtcgctatcacattattaatcatttttactgcaatggaactgagatttctgtattttagttttaagtgacattcaagaagacagtatattctgtaaatttaagcctactccaygtytgagcagatgagtatgtacaagcaagtctcagataaaattactccagttagaatgaatgcgaagagcagaacttgtattccaagattagtgttttcactaaagttctgaagtacctgtacatcagaatattttttgtttttctttaaaggtttttcactata

SEQ ID NO: 80506 - DNA, 562 bp, Chicken  19866894372915_5
tactggttttgtatgccaagctttctggatccagaatgtaggaaggaagagaactgtgattcattagagttttctaatgtggttaaatttactcttatgtttataagatagaatcaactccattaacgtgattggttaaagtgtattaactttttaaagttaggragaagaggagctgatagcattagtcgctatcacattattaatcatttttactgcaatggaactgagatttctgtattttagttttaagtgacattcaagaagacagtatattctgtaaatttaagcctactccaygtytgagcagatgagtatgtacaagcaagtctcagataaaattactccagttagaatgaatgcgaagagcagaacttgtattccaagattagtgttttcactaaagttctgaagtacctgtacatcagaatattttttgtttttctttaaaggtttttcactatatttttgaagtaactatgttagtcactcttgtctttttcttaagaggttttttcacctctctttcctatggaggagttcttgcgaggaaaagactgaa

SEQ ID NO: 80507 - DNA, 559 bp, Chicken  19866894372915_6
tggttttgtatgccaagctttctggatccagaatgtaggaaggaagagaactgtgattcattagagttttctaatgtggttaaatttactcttatgtttataagatagaatcaactccattaacgtgattggttaaagtgtattaactttttaaagttaggragaagaggagctgatagcattagtcgctatcacattattaatcatttttactgcaatggaactgagatttctgtattttagttttaagtgacattcaagaagacagtatattctgtaaatttaagcctactccaygtytgagcagatgagtatgtacaagcaagtctcagataaaattactccagttagaatgaatgcgaagagcagaacttgtattccaagattagtgttttcactaaagttctgaagtacctgtacatcagaatattttttgtttttctttaaaggtttttcactatatttttgaagtaactatgttagtcactcttgtctttttcttaagaggttttttcacctctctttcctatggaggagttcttgcgaggaaaagactgaa

SEQ ID NO: 80508 - DNA, 600 bp, Chicken  19866894372916_1
aaactacctagaccagttaagacagaaacaatagccagaaatacttaaatatagaacaactgtaggaagatgcactgacttggattgttacagacaataagacagaaggacagaaatgcatcactcagtaaagcattgactaagattaatttccaaacataaggggtgtaaggaccaagatgcagtgttacagtaaaagctgtcacttggtctgtggcacacaggcaatggaaaagaacagtctgtataagtgtttcagcactgcccagctaccatgttctccatacactcagaagagtyaaataagggctgataaacactagaaaaataatctaaagaaaagaggaacataaatactgcataagtcaagcattactaaacaaaataacaaaaaaaagtttcaaaatgaattccaataaagatgtactgaacaataatgagcctctactggagaagactggtagaaggaacaaaaaagctgaaaacaattaaagcaaagatgaggaggccaattatcttgtgttactgaagtgttcaaatatatgcagagcccttcaagactgttccccgatgcacttgcttaagttacttccagaaaga

SEQ ID NO: 80509 - DNA, 599 bp, Chicken  19866894372928_1
  misc_feature (1)..(201): n is any nucleotide
nnnnnnnnnnnnnnnnnnnnnnnnnnnnnnnnnnnnnnnnnnnnnnnnnnnnnnnnnnnnnnnnnnnnnnnnnnnnnnnnnnnnnnnnnnnnnnnnnnnnnnnnnnnnnnnnnnnnnnnnnnnnnnnnnnnnnnnnnnnnnnnnnnnnnnnnnnnnnnnnnnnnnnnnnnnnnnnnnnnnnnnnnnnnnnnnnnnnnnnnntgcttgattgaaactgaaataaagggtaactttctcaacacattataggaagggaaaagcaaatggctgagtgctttaataaggatatatgatatccartgtccggttatgagcatacagcttcctctggcatgtggtgccagtccagaggaaagacctcagtggaaagaccaactgtgtcttactcatgtgctcagcgtgccccttattccaaatacctttcgcacgtctgtgcagagagagttaaggctcttctggaacattgctttcattgtaagtgcttcttgccagagcaattatttttgcagaatattttctatgaaaaatagtccactttgttcaagttctgccccgcattaccgatgcaaatgaaaggaatgcatatgtgaacttgtatt

SEQ ID NO: 80510 - DNA, 600 bp, Chicken  19866894372928_2
gacctcagtggaaagaccaactgtgtcttactcatgtgctcagcgtgccccttattccaaatacctttcgcacgtctgtgcagagagagttaaggctcttctggaacattgctttcattgtaagtgcttcttgccagagcaattatttttgcagaatattttctatgaaaaatagtccactttgttcaagttctgccccgcattaccgatgcaaatgaaaggaatgcatatgtgaacttgtatttcatcagcaaactaacccttcaccaactttcactgccatttacaagcttgaattawcttcaatttgaatgcaagtcattagataatagctgcttaaagacatgtcagcaactttgctttgctttaaaataacacagaaaatggaaaaataataagagagctgcatagcaccgcttgttgaaatgtgccctatgatgtgtactttgataactgcccgtgctgatgcacgtcaggctgctccagacagacatgtgctgcacactcactgtggaagccaaaagggaactggaacgttttacttgcaagagccatggtaagagctcagctcagccacgctgttgatttacatgcactgta

SEQ ID NO: 80511 - DNA, 600 bp, Chicken  19866894372933_1
tccattttatctcttttctatggggaaatggcagtttggaatgaccacagcaatcaatatgaaactctgagtgtttgatacctagatttcaatatgtttcatgtacattggatattcactgtatcaccaaatagctttcatgtgtctttcagcagtatttttctggaaaatctcatttttgtgattgcattccagtgttgtaaatataatatcctgggtgtgcttagggctttgctgtaagaactaaaccttgaagtagctggagatgatggtaacactgatgacagtggagagctcaakggaaggtgcaagaaacagtgttcactgtttgattccgattgatataatttttgctcttcctactatcaaagtaaatgcaagctagctgttctgtctgaattacttttaatgcacytcagatgttcagttttccatttagaggtgtagctatttccaactccgtttgtttagctgcatcctcctggttaaaccttgtaaggctgaaatacagacctagatgcatggtctagctcagaaccctttttaaactgctgccgtttcattctgtccaaagccatacacrgactcctagtgtatgaa

SEQ ID NO: 80512 - DNA, 578 bp, Chicken  19866894372933_2
tcactgtatcaccaaatagctttcatgtgtctttcagcagtatttttctggaaaatctcatttttgtgattgcattccagtgttgtaaatataatatcctgggtgtgcttagggctttgctgtaagaactaaaccttgaagtagctggagatgatggtaacactgatgacagtggagagctcaakggaaggtgcaagaaacagtgttcactgtttgattccgattgatataatttttgctcttcctactatcaaagtaaatgcaagctagctgttctgtctgaattacttttaatgcacytcagatgttcagttttccatttagaggtgtagctatttccaactccgtttgtttagctgcatcctcctggttaaaccttgtaaggctgaaatacagacctagatgcatggtctagctcagaaccctttttaaactgctgccgtttcattctgtccaaagccatacacrgactcctagtgtatgaacagtgctgtttaatcctgtcctctcagcctgactaaagtgtgactgcaaagcgtgaatgtaaaggtttgctgagatgggctgtgtatcctggg

SEQ ID NO: 80513 - DNA, 410 bp, Chicken  19866894372933_3
acagtggagagctcaakggaaggtgcaagaaacagtgttcactgtttgattccgattgatataatttttgctcttcctactatcaaagtaaatgcaagctagctgttctgtctgaattacttttaatgcacytcagatgttcagttttccatttagaggtgtagctatttccaactccgtttgtttagctgcatcctcctggttaaaccttgtaaggctgaaatacagacctagatgcatggtctagctcagaaccctttttaaactgctgccgtttcattctgtccaaagccatacacrgactcctagtgtatgaacagtgctgtttaatcctgtcctctcagcctgactaaagtgtgactgcaaagcgtgaatgtaaaggtttgctgagatgggctgtgtatcctggg

SEQ ID NO: 80514 - DNA, 600 bp, Chicken  19866894372939_1
atgagactttcctactctcatactacagatctgatgagacaagactaatgtgcatgggtgacaactctatcattctggtcatgtgtgaaatgtactagcaaaattaggaagaacatttcttgtgtacagagcctataaacatacactgctattaattttcttatatagtggatatgctttaaaatgggactgatcccaagtatgctgaacagctcatacatttaatttagtattatataagaatcactgaaatccagtgcaatgaattaaatttaacttgtttatacttattatagctcmatttttacacagataatcagagaagcatgtttaattctaataatggagatttttgtctgtgcttacagcctcataccccaagacactgctgtggaaataagttaaacactagaatagatgtgattcggaagtctggtaaaatgatttatactggttcccagcctccagttcacagtcagctacggcacattggttttggctgcattagccaggatgtcatctttcttgtgccaacagactgcttgatgaacaggtcgctgctacaccaaattcttccttttcaccatgtctgttagaagt

SEQ ID NO: 80515 - DNA, 600 bp, Chicken  19866894372944_1
attagcttcctgtactgtagtgcattgtaaagcactttataaagcaatgaattacacatctgaagtggagtaaccacatgcaagcaaatacgacaaccattatgctctcagcaacatcccccacacagccacgaacatttgcattagtgccaattaatctgaggtggtacaaacgcagcgaggcataggatttgttctttggtgtgaaggaggaagggagaggagaaaaatatccttttgtcttcagagaggaaacatctgtaggagttttcaagggcttcggtgactttgtttagcttygagcgggggagcgtgctattgagtgctttgatctcaccagcaggtgacactgcagcaagtgggagcagctataaaaagtttgaagcgttccagggacaagtcgcacaaccggagcgcaaatgttttacacgtgtgactcacggttgccgagaagtgggaacgtgcagcacgggctgctctttgggttttagcatctcgctgtgtaccagcgtcttccttttcccctcgatgcccaccaccaccgctttcaagcacggtggtgaagygcagaattgggaaggacrttgcgtcttttaacct

SEQ ID NO: 80516 - DNA, 600 bp, Chicken  19866894372944_2
gttttcaagggcttcggtgactttgtttagcttygagcgggggagcgtgctattgagtgctttgatctcaccagcaggtgacactgcagcaagtgggagcagctataaaaagtttgaagcgttccagggacaagtcgcacaaccggagcgcaaatgttttacacgtgtgactcacggttgccgagaagtgggaacgtgcagcacgggctgctctttgggttttagcatctcgctgtgtaccagcgtcttccttttcccctcgatgcccaccaccaccgctttcaagcacggtggtgaagygcagaattgggaaggacrttgcgtcttttaacctcgctgcacatggaaacacatatggttaaagcaacactagggaaaactgtttaaacagccctacctcttgctgaagtcagcaggaaagccatatcctttcacgtcagtgcataatgtcgagaggagcctaccaagcacaacatggggggggctgtgcttttccagtcccacgttctgaccagcctttctgtacaagaaaatgatggcatttatgaaacgtgttctcctctgagctattgtttttaaccctgtgattaatacagagga

SEQ ID NO: 80517 - DNA, 600 bp, Chicken  19866894372944_3
gactttgtttagcttygagcgggggagcgtgctattgagtgctttgatctcaccagcaggtgacactgcagcaagtgggagcagctataaaaagtttgaagcgttccagggacaagtcgcacaaccggagcgcaaatgttttacacgtgtgactcacggttgccgagaagtgggaacgtgcagcacgggctgctctttgggttttagcatctcgctgtgtaccagcgtcttccttttcccctcgatgcccaccaccaccgctttcaagcacggtggtgaagygcagaattgggaaggacrttgcgtcttttaacctcgctgcacatggaaacacatatggttaaagcaacactagggaaaactgtttaaacagccctacctcttgctgaagtcagcaggaaagccatatcctttcacgtcagtgcataatgtcgagaggagcctaccaagcacaacatggggggggctgtgcttttccagtcccacgttctgaccagcctttctgtacaagaaaatgatggcatttatgaaacgtgttctcctctgagctattgtttttaaccctgtgattaatacagaggaaagtagactaaatattga

SEQ ID NO: 80518 - DNA, 600 bp, Chicken  19866894372952_1
attttcctggcatcgagatacagaacaacctgtcttacaagattgctggaccatttgttccctgcgctctaactgggtgcttatcacattcagctttctcaggtacaagtgggttccaagggctgtgtcttggagagggaagtgggttctcatggtgctgcacagcactgaggcagtgcctcccaccagtaacttggggctgagctctcagctctggcttttctgctctttgcctctccaagctgcagtttttgaggctgtttggatatagctgttggtattccaagtctgtcctcagcraaggaatcagatgtatttgacaaagtagaatgaagtgcatgtggattaaatacttacccccatgtatgtgtagtatgtgagygagcatatgggactgtgcatgctggtatgacaatctagttataaagcagtaaaaaaagaaaaggaaagaaaaaaaaaagccgtgtgcgtagacagttttggcactgcagccctgggaaatggcaggcggccagagtgtgctgaggcagagccaaggctgtctgaagaacaccaagcactgaggctggatgcagctccttcgctccagtttcactccat

SEQ ID NO: 80519 - DNA, 600 bp, Chicken  19866894372952_2
atcacattcagctttctcaggtacaagtgggttccaagggctgtgtcttggagagggaagtgggttctcatggtgctgcacagcactgaggcagtgcctcccaccagtaacttggggctgagctctcagctctggcttttctgctctttgcctctccaagctgcagtttttgaggctgtttggatatagctgttggtattccaagtctgtcctcagcraaggaatcagatgtatttgacaaagtagaatgaagtgcatgtggattaaatacttacccccatgtatgtgtagtatgtgagygagcatatgggactgtgcatgctggtatgacaatctagttataaagcagtaaaaaaagaaaaggaaagaaaaaaaaaagccgtgtgcgtagacagttttggcactgcagccctgggaaatggcaggcggccagagtgtgctgaggcagagccaaggctgtctgaagaacaccaagcactgaggctggatgcagctccttcgctccagtttcactccatcctgtgtgcctgcagcttgccagctcctggccaggtagatgcagatgatatcacaaagcagaacgggagataggagcggaga

SEQ ID NO: 80520 - DNA, 593 bp, Chicken  19866894372956_1
  misc_feature (1)..(138): n is any nucleotide
nnnnnnnnnnnnnnnnnnnnnnnnnnnnnnnnnnnnnnnnnnnnnnnnnnnnnnnnnnnnnnnnnnnnnnnnnnnnnnnnnnnnnnnnnnnnnnnnnnnnnnnnnnnnnnnnnnnnnnnnnnnnnnnnnnnnnnnnnnccgccgctctccatctccggggccgtccaccatctgagcccgcagagcagcgcaggccgagcaccagacccgcccccccctcccccccccggctatttttacctgcggttccgtcttagcgcaccccatggatttctggatctccttccccaggggagcacraggtcgcagcatcgccctccgtgacccaccgatgcccacggctccttccctcaccccctctatattcagctttacccctccgagccccccccgcccacgaccccaagcgggaatttctgcccctcgccrtgggggggacaccacagagcgcagccgagatggacatcagagggactttgcagggagggcggctgtggggcggggaagggtccacttggaggactaaaaagccgataatcccccaccacagcgtcccgcatggaaacgatcatccccagggagacatgcgggtt

SEQ ID NO: 80521 - DNA, 464 bp, Chicken  19866894372956_2
  misc_feature (1)..(9): n is any nucleotide
nnnnnnnnnccgccgctctccatctccggggccgtccaccatctgagcccgcagagcagcgcaggccgagcaccagacccgcccccccctcccccccccggctatttttacctgcggttccgtcttagcgcaccccatggatttctggatctccttccccaggggagcacraggtcgcagcatcgccctccgtgacccaccgatgcccacggctccttccctcaccccctctatattcagctttacccctccgagccccccccgcccacgaccccaagcgggaatttctgcccctcgccrtgggggggacaccacagagcgcagccgagatggacatcagagggactttgcagggagggcggctgtggggcggggaagggtccacttggaggactaaaaagccgataatcccccaccacagcgtcccgcatggaaacgatcatccccagggagacatgcgggtt

SEQ ID NO: 80522 - DNA, 599 bp, Chicken  19866894372957_1
  misc_feature (1)..(47): n is any nucleotide
nnnnnnnnnnnnnnnnnnnnnnnnnnnnnnnnnnnnnnnnnnnnnnnaaatgtagctgtgctagggtgacagccatacaggcaaacaatgttgttacgtcctctgagactggatccaggcctggaagagccatccaagtgtgcacagctgaggctcagcacatcaggatgagcaactgatggatctggctctgctagcaaagctttacctggatgccagtgccagcagccaatgcaaacaaggtattcctgtgttggcagtgagccttaacatttggcagaattgatcaatggattttcraaaacaggactctaaattaggctgattgcagggagatggtgggttttccttgttgacagcctggcacatagcattagtggttttgagagagcaggcttctggttactgaaccaggatgtgctgtccttccctggtactaaggcaagagacaatgagctatgcctgtcagaagtcctttggactttgtcatatcaagacttcatgtcataagtttccttactcaagatggaaataacattgctatcatttctacctgaggctgagaagagttaagtgacactctcaagggtaaagagtga

SEQ ID NO: 80523 - DNA, 600 bp, Chicken  19866894372957_2
tactgcattctcttagcaaaaagggggaaaactctattggaaggaagtagcatccttggttgcagagggattcatgacaaaggccaaaagtctgtgttgactttcctagggaaacaaatcttgggcaattgctctgcaagcctgtctgtcagtctgtcctgattttcacctgctatctcatccgagcccagtttgacaaacatccaaagctgtatcttcccttctggggaaatgagtgcattccaagatcagcttcggtaggagacatcagagaagccccacagcatgatacatctccakayttcttcatctccaagtgacttatttcttctctactctgacagttcaaccccagggatgcctctactgcctgtgctttttccagggaaattcttgctaatttgcagctgggctgagcgaggcagaggaggaggtcaagtgatgtgttcaggggtcacacagatgattcaggctcatctgctgtcctcctgaggcagcacatgagttatggggtcaggtcaggcacagtgggacatctcccctccttgcctgcccttgtcggcccaagcacagctcttctctctgatggcttgatagctg

SEQ ID NO: 80524 - DNA, 600 bp, Chicken  19866894372957_3
ctgcattctcttagcaaaaagggggaaaactctattggaaggaagtagcatccttggttgcagagggattcatgacaaaggccaaaagtctgtgttgactttcctagggaaacaaatcttgggcaattgctctgcaagcctgtctgtcagtctgtcctgattttcacctgctatctcatccgagcccagtttgacaaacatccaaagctgtatcttcccttctggggaaatgagtgcattccaagatcagcttcggtaggagacatcagagaagccccacagcatgatacatctccakayttcttcatctccaagtgacttatttcttctctactctgacagttcaaccccagggatgcctctactgcctgtgctttttccagggaaattcttgctaatttgcagctgggctgagcgaggcagaggaggaggtcaagtgatgtgttcaggggtcacacagatgattcaggctcatctgctgtcctcctgaggcagcacatgagttatggggtcaggtcaggcacagtgggacatctcccctccttgcctgcccttgtcggcccaagcacagctcttctctctgatggcttgatagctgtg

SEQ ID NO: 80525 - DNA, 599 bp, Chicken  19866894372969_1
  misc_feature (1)..(166): n is any nucleotide
nnnnnnnnnnnnnnnnnnnnnnnnnnnnnnnnnnnnnnnnnnnnnnnnnnnnnnnnnnnnnnnnnnnnnnnnnnnnnnnnnnnnnnnnnnnnnnnnnnnnnnnnnnnnnnnnnnnnnnnnnnnnnnnnnnnnnnnnnnnnnnnnnnnnnnnnnnnnnnnnnnnnnnccccttcacattttcagtgtcttccagtgctgcaaacactcggacattcctgctgcactcatacctgtatggacatctattggctgtgtctgcattactctgtgaaaaagggagaaatagctcacatcagtgcrtttaattctacaagaattttattctatcccattccatcttctttttgggatattggaaagctgctgcacatgcaagaaaagagatctggatttcacaaatgattccagctggatggctacttcagagggagaccaggagaaacaccgctgtgaaaggccatgtgattaacgtgcagtaagacatccagactgtgcactttgactgcagggaggatatggccttccatgagaggaaagattccggttcattttactgtgtgtaggaagtggatttatgcagtgctatcggtagacaggga

SEQ ID NO: 80526 - DNA, 599 bp, Chicken  19866894372972_1
  misc_feature (1)..(15): n is any nucleotide
nnnnnnnnnnnnnnnttctgtggggtttacgctctgtttccccgcctcttgcacggcacggatcgtctcgcagtgctctcacaggactgccctgcccatcacttaagctgctccctggctctgcatacccaaggtgagcctgctgcagggccccgtgctgtcctgagccacaagggacgggccggactgggggtcatgagagctgccagggtgcccagcagttccacggcacccccaggcacagtctgcaggtcagggcagggcctcctgctgcagcccttgttgcagcagccaggtccytttgcagagaccrtatctgggtcagtgcgcagrgytgatcagcacagggctggctgcaggagggtgaaatactgttctggtccctgctgccctgtagtggcacctggggtgaaagaactgactgatgcgtggctgttgttgggcagagcgcagcacagcctcatctcagtgcatcccactgctctgctgcctgcagtgccttgcttcgctttgcaccatcgttaagcactgggatacggactgcagctgtcccagccaggtgcactggattcttacaaagggaaaaacatttctggaag

SEQ ID NO: 80527 - DNA, 599 bp, Chicken  19866894372972_2
  misc_feature (1)..(2): n is any nucleotide
nnttctgtggggtttacgctctgtttccccgcctcttgcacggcacggatcgtctcgcagtgctctcacaggactgccctgcccatcacttaagctgctccctggctctgcatacccaaggtgagcctgctgcagggccccgtgctgtcctgagccacaagggacgggccggactgggggtcatgagagctgccagggtgcccagcagttccacggcacccccaggcacagtctgcaggtcagggcagggcctcctgctgcagcccttgttgcagcagccaggtccytttgcagagaccrtatctgggtcagtgcgcagrgytgatcagcacagggctggctgcaggagggtgaaatactgttctggtccctgctgccctgtagtggcacctggggtgaaagaactgactgatgcgtggctgttgttgggcagagcgcagcacagcctcatctcagtgcatcccactgctctgctgcctgcagtgccttgcttcgctttgcaccatcgttaagcactgggatacggactgcagctgtcccagccaggtgcactggattcttacaaagggaaaaacatttctggaagacgagaatttctg

SEQ ID NO: 80528 - DNA, 600 bp, Chicken  19866894372972_3
ctgtttccccgcctcttgcacggcacggatcgtctcgcagtgctctcacaggactgccctgcccatcacttaagctgctccctggctctgcatacccaaggtgagcctgctgcagggccccgtgctgtcctgagccacaagggacgggccggactgggggtcatgagagctgccagggtgcccagcagttccacggcacccccaggcacagtctgcaggtcagggcagggcctcctgctgcagcccttgttgcagcagccaggtccytttgcagagaccrtatctgggtcagtgcgcagrgytgatcagcacagggctggctgcaggagggtgaaatactgttctggtccctgctgccctgtagtggcacctggggtgaaagaactgactgatgcgtggctgttgttgggcagagcgcagcacagcctcatctcagtgcatcccactgctctgctgcctgcagtgccttgcttcgctttgcaccatcgttaagcactgggatacggactgcagctgtcccagccaggtgcactggattcttacaaagggaaaaacatttctggaagacgagaatttctgytcgtgctctgcttgtcctca

SEQ ID NO: 80529 - DNA, 600 bp, Chicken  19866894372972_4
gtttccccgcctcttgcacggcacggatcgtctcgcagtgctctcacaggactgccctgcccatcacttaagctgctccctggctctgcatacccaaggtgagcctgctgcagggccccgtgctgtcctgagccacaagggacgggccggactgggggtcatgagagctgccagggtgcccagcagttccacggcacccccaggcacagtctgcaggtcagggcagggcctcctgctgcagcccttgttgcagcagccaggtccytttgcagagaccrtatctgggtcagtgcgcagrgytgatcagcacagggctggctgcaggagggtgaaatactgttctggtccctgctgccctgtagtggcacctggggtgaaagaactgactgatgcgtggctgttgttgggcagagcgcagcacagcctcatctcagtgcatcccactgctctgctgcctgcagtgccttgcttcgctttgcaccatcgttaagcactgggatacggactgcagctgtcccagccaggtgcactggattcttacaaagggaaaaacatttctggaagacgagaatttctgytcgtgctctgcttgtcctcagc

SEQ ID NO: 80530 - DNA, 600 bp, Chicken  19866894372972_5
tatctgggtcagtgcgcagrgytgatcagcacagggctggctgcaggagggtgaaatactgttctggtccctgctgccctgtagtggcacctggggtgaaagaactgactgatgcgtggctgttgttgggcagagcgcagcacagcctcatctcagtgcatcccactgctctgctgcctgcagtgccttgcttcgctttgcaccatcgttaagcactgggatacggactgcagctgtcccagccaggtgcactggattcttacaaagggaaaaacatttctggaagacgagaatttctgytcgtgctctgcttgtcctcagcctgcatggcgttcgtggtgctgggagcacagtgggggggggctgggaagctgtgagtgctccgagccccagcagctcacagggtatatgggcatgcagggagctgatggtgaagatgagcactgtctgtcgtgcaccaggagcacggcgcacgggtgggcttagagaacaaatgttccracacagtatcagatctgtttcttcgatgatacagttgctactacaaatgcctattgatagtgcattgtgctacaggctctgcattttagcgaggctcct

SEQ ID NO: 80531 - DNA, 600 bp, Chicken  19866894372972_6
accatcgttaagcactgggatacggactgcagctgtcccagccaggtgcactggattcttacaaagggaaaaacatttctggaagacgagaatttctgytcgtgctctgcttgtcctcagcctgcatggcgttcgtggtgctgggagcacagtgggggggggctgggaagctgtgagtgctccgagccccagcagctcacagggtatatgggcatgcagggagctgatggtgaagatgagcactgtctgtcgtgcaccaggagcacggcgcacgggtgggcttagagaacaaatgttccracacagtatcagatctgtttcttcgatgatacagttgctactacaaatgcctattgatagtgcattgtgctacaggctctgcattttagcgaggctccttcacgttctgctggtgtagacctcctcagctgcttattcctgcagctgtgcagcgtttgggatgaacgcggggcatgctggctgtggtttgctgtttgctctgggtccctgtgcctgcatgcaggagcagcagtttcgcagccccgaggccgtctccaagcaccgggtcgggggagaatttccatgagaacgacaaaatga

SEQ ID NO: 80532 - DNA, 600 bp, Chicken  19866894372984_1
gcccgggtgctgctgaggaaccgcaccaggcagtccccagtgtgcacaaaggacatccaaacagttctcaagacgtctttggctgagtgtgaacctggaggctgagcagctcacagcctcctgtgggacagcgcccacttctataggggaaaatctcagctctgggatcctccaatacagatacgccgtacttgagaccccaaatccaagttaagtgcagcccacacgtgggagcagccccttttggtgcccacctccagcagagaagcaaacgacagcaaacagccgctgccaggagcrgccccactgctgcacccccctccagggctcagggaacgcacccacggctcacctgcgtgttggaatagaggtgtggagggggcggtgggggcagcgctcccggggggtacgggtagcccggattcccaaaattcatgactccaggggggggagaagtagggtcggtgcgagcagctgctgcggcgggggctgccctgggggcatggagacccggcggaggatagagcccagggtttgccatcggggcccggtgtctgatgggggatgtaaacctgaaggagagacaaagacgagctgagc

SEQ ID NO: 80533 - DNA, 600 bp, Chicken  19866894372992_1
gcgggcgcttcctgcctcttgattgcagatgctgggctctgatcaccgcttcctcccctgttgctcacccaccgctggggctctgggctccatggctttgttggcactgtcccttgctccaaatttacctcccacaactggttttccccatgttgtttgcttcctcctcttccaacaagttcgtgtgccgggctggctctcagctgccaacgctttgcagcgagggctggtgcctgctcgtgctgcctgtcagagataagaactaatctctggtttatggtcgcaaacacggcgcgtagrtctgagcctccgcacggaaatcaggactgcacaaacacgggcagcaaagggagggggctggcagcacatcccttttctcaacgcttgttgttctcttgcagagcaccaggctttgtcattacagaggtatagctccagaaagcctttggtaggggcagcaaatacatggtagggtagaagggtttgtttttagactcatcagaggctacacatggggtttctccatgagctttccctgaatgcatccttcccaaaactgtgaggggcagaagagaggcaccctaacaaaatgataacctg

SEQ ID NO: 80534 - DNA, 587 bp, Chicken  19866894372998_1
gaaaacactgacacagtacctaggccatctcctaagaaagacactgccacattttgctagccatgaattaaggcttattagtttgtctgctccctagcattagcatcagtactgcccaaggcaaagttcagcatcccaaagacaaataggtgagtgtctgtcactgggctgagtgactacctgcaggctaggatggacagaacagggcaggctggcctccaaggggccttgggaagcatggttcattgaaggactgggtccaatctctgttgcaccggagggaggtattgtactgatgcyggtgaccatgtatgtacgtgcttaaaacccaagctactgggggcatgtgattttgcaaacataataacaagatctcaggaagtaattagctcttgtggctgcagggcaaagtttagaacttaacctgaaaagctcaaaaacctcaaaaggaatacaaaggactcaaatcaattgtatgattctttttcagaaggaagttgatccatctttgttgggctcaataaaattttcgctaaggtataaacagctgcagtcctcatttatctacactagcataagaacacttc

SEQ ID NO: 80535 - DNA, 600 bp, Chicken  19866894373003_1
ggtggaagggagggagaagacaacaaacacgtaaaggggatgggctgcagcatgtctgccgtaacagtatattttgaatgatttcttccaaaggttgtttaaattggcttcagggctgctggcccatatagaaatacagattaaaaaaaaaaaaaaaaaaaaaagcttctaaaaggatgatctgtctgaagatctgtatggtaataaaccattggacagagtgtcttacacaatctttcaaaagcaattcaaaatggcttggatgcaagccagctggactggaagttggctgaggaactrcaaacaaatggtgatgttacacagtaatgtatcaagttgtccattcagacaccagaaagagcagcgttctgtcaggtcttatttaaagtattgctctgctctggaaagtgacaagataaaatggcacctactttctcagcaactctgatctatgtatgtatccagtcatatctagttagtgacaaaaatttattcctattacttctgcagagccaaaataatttagagttgactaaaaggtgttactgccagtacctcattgaaatagtcggctaggttccagtcagttatagttgtata

SEQ ID NO: 80536 - DNA, 600 bp, Chicken  19866894373005_1
tatacttcttcatcttcaagagcaacaataaggatgagtttcaacaaagcaactagtaattggaaaaattagaccccacctttccatcaaaattgcatttgatgttctgacagggataacaaaattatgaatgcagagttccaagcaacaatattacagccagtgatgctggaaagtgcagagtatcatattccttagagatcactcaacttcattacatcttttatagggcagacattgttgaacaagcaccagtcactagatgtatggttgtgtgagacaactgctaagaactcactrttattattaccagtcctcaaagactgatttgcaacaggattgcttgaaaaaaaaaaaaaattaaatataaaaacctcagaagatattgataaaaaatcccctcagagtcatgcctcggatcttattatggaaaatgtgcacagtataggaagagatattctgatttatgtttctgaaaacgtattaatggattacactggtgaagcagaagtatatgaaaacaaaattgcattgctttaaacaaaggaaaagagtgcatgctgttcatctataagcacaatgtttgaataaagctttctc

SEQ ID NO: 80537 - DNA, 600 bp, Chicken  19866894373008_1
attataatggagttacttatttaccatgaccatatttgctatacaagtattttgtacataaccatccatgcttttctgctgtattgacaataatcttttttcaaatatttaatttttaatatcacccttttttaaaccagaatttttcagtataaacacaaccatattcccaggtgagaagtcctattgggaatcagtatgatccaccacaaatcaaaatttcaggagcaaatattgttaatagtgagtcttgtgctccatcaaaaccctactgtcagatgtaactcctgcacagatttwaatatagtacaacaaaaggaagcagatacttgtcacagagtattcattaaggaagtgagtttattcacatccacgatrctgagtgaatttctgctgttctacaaatttccaaagtgctggctaaggagataagattagtataatgtcagtcaataccctcaaaacattacacagacatagttttgaagtataatgcaatttattgtagaggttcatctggttggagaatagaatttttcagcactttatttcttctaagctcccacgtctatgaagtcactttktagtgaattagggaag

SEQ ID NO: 80538 - DNA, 600 bp, Chicken  19866894373008_2
ctgtattgacaataatcttttttcaaatatttaatttttaatatcacccttttttaaaccagaatttttcagtataaacacaaccatattcccaggtgagaagtcctattgggaatcagtatgatccaccacaaatcaaaatttcaggagcaaatattgttaatagtgagtcttgtgctccatcaaaaccctactgtcagatgtaactcctgcacagatttwaatatagtacaacaaaaggaagcagatacttgtcacagagtattcattaaggaagtgagtttattcacatccacgatrctgagtgaatttctgctgttctacaaatttccaaagtgctggctaaggagataagattagtataatgtcagtcaataccctcaaaacattacacagacatagttttgaagtataatgcaatttattgtagaggttcatctggttggagaatagaatttttcagcactttatttcttctaagctcccacgtctatgaagtcactttktagtgaattagggaagtgcatcagtgttgtagatacgaccctggagcctttgttaccttactgctcttggatacttagtgttccaagaattttt

SEQ ID NO: 80539 - DNA, 600 bp, Chicken  19866894373008_3
ctcctgcacagatttwaatatagtacaacaaaaggaagcagatacttgtcacagagtattcattaaggaagtgagtttattcacatccacgatrctgagtgaatttctgctgttctacaaatttccaaagtgctggctaaggagataagattagtataatgtcagtcaataccctcaaaacattacacagacatagttttgaagtataatgcaatttattgtagaggttcatctggttggagaatagaatttttcagcactttatttcttctaagctcccacgtctatgaagtcactttktagtgaattagggaagtgcatcagtgttgtagatacgaccctggagcctttgttaccttactgctcttggatacttagtgttccaagaatttttaactttaccatcattgtatttcattacttgcctctcagatacctaatgatatttggacaggaatgaaaggcagaaagtcagttttccctgaaaaaataggtactgtctagtgaacagagctgaccatccaatctctgttttgtttgtgatgttgtgctgccatctcagaagttattcaccacctcctctgtttctccagcttttca

SEQ ID NO: 80540 - DNA, 599 bp, Chicken  19866894373013_1
  misc_feature (1)..(92): n is any nucleotide
nnnnnnnnnnnnnnnnnnnnnnnnnnnnnnnnnnnnnnnnnnnnnnnnnnnnnnnnnnnnnnnnnnnnnnnnnnnnnnnnnnnnnnnnnnnngtttgcaagtcattacttcagttagtaagcacaatccccgggcaacactctccaaaacttctgctttgtttggttattgttatgatttttaagttaatgtgcacactcagaagttaacagtacgatagatggatagtttaattcctcaacgtcttttacctgtaaaacccctgatgctgctgtgtctgctttctggagtaaatactgyttgccaggactgcaggcaacaaaggacagacttctcttctttttggagtaccatattcattttcccagtcaagcagcacatagcacactattaattcaatacaacaactgtccatctttatctacyttctcacttgttaaactacagcagtaatattaaaatgccataaaygtacaagctgttaatttagaatttgctttcattccagggcatctatttggtgcacctgaaaatgtcttaataaaacactggaaagaattgttaattcagatagygatatctgaaaatacatacaggcc

SEQ ID NO: 80541 - DNA, 600 bp, Chicken  19866894373013_2
tccccgggcaacactctccaaaacttctgctttgtttggttattgttatgatttttaagttaatgtgcacactcagaagttaacagtacgatagatggatagtttaattcctcaacgtcttttacctgtaaaacccctgatgctgctgtgtctgctttctggagtaaatactgyttgccaggactgcaggcaacaaaggacagacttctcttctttttggagtaccatattcattttcccagtcaagcagcacatagcacactattaattcaatacaacaactgtccatctttatctacyttctcacttgttaaactacagcagtaatattaaaatgccataaaygtacaagctgttaatttagaatttgctttcattccagggcatctatttggtgcacctgaaaatgtcttaataaaacactggaaagaattgttaattcagatagygatatctgaaaatacatacaggcctaggttttgcatgtcctgcacagggaatataatgctgtcatgttccaatgcagatacaagcaaaggctacctgcaggtgctaatagtggggaacagcaaacccacgttcccagctggactgggaaaa

SEQ ID NO: 80542 - DNA, 600 bp, Chicken  19866894373013_3
ttatgatttttaagttaatgtgcacactcagaagttaacagtacgatagatggatagtttaattcctcaacgtcttttacctgtaaaacccctgatgctgctgtgtctgctttctggagtaaatactgyttgccaggactgcaggcaacaaaggacagacttctcttctttttggagtaccatattcattttcccagtcaagcagcacatagcacactattaattcaatacaacaactgtccatctttatctacyttctcacttgttaaactacagcagtaatattaaaatgccataaaygtacaagctgttaatttagaatttgctttcattccagggcatctatttggtgcacctgaaaatgtcttaataaaacactggaaagaattgttaattcagatagygatatctgaaaatacatacaggcctaggttttgcatgtcctgcacagggaatataatgctgtcatgttccaatgcagatacaagcaaaggctacctgcaggtgctaatagtggggaacagcaaacccacgttcccagctggactgggaaaaaaaaggataaaaatacaacagagaatgcacgcattcctcctgtgt

SEQ ID NO: 80543 - DNA, 600 bp, Chicken  19866894373013_4
gtctgctttctggagtaaatactgyttgccaggactgcaggcaacaaaggacagacttctcttctttttggagtaccatattcattttcccagtcaagcagcacatagcacactattaattcaatacaacaactgtccatctttatctacyttctcacttgttaaactacagcagtaatattaaaatgccataaaygtacaagctgttaatttagaatttgctttcattccagggcatctatttggtgcacctgaaaatgtcttaataaaacactggaaagaattgttaattcagatagygatatctgaaaatacatacaggcctaggttttgcatgtcctgcacagggaatataatgctgtcatgttccaatgcagatacaagcaaaggctacctgcaggtgctaatagtggggaacagcaaacccacgttcccagctggactgggaaaaaaaaggataaaaatacaacagagaatgcacgcattcctcctgtgtccctaccctgaagttaggagaaagtcaaagatagtgcagcaaaatccagttctctggactgttttatttttactttatgcttgcacgtgcagcgttgtgcttac

SEQ ID NO: 80544 - DNA, 600 bp, Chicken  19866894373015_1
cccgccagccattaatgagccccagccacgtcccccacaaagtcattttgcatactgtcaaaacctgcttttctcaaggccataattctttttctgctgctgccctttcaacattcccctatcagccttttggtccagatgctaatgtgctctccagatcccacacaattcatcactgcgggctcactgacatttattaggttcagcagagctccctaccctgccactctgtaagggctctctgcctgctgaaatcattcagcttggcaacgtcacccctgcaagcttcccgcaccacarctaagaagggcagtggtgggagcagaatacctttacacagtaccccatcattcttctcgtggccaaagagccaaattaggacccgttcaatctccagtgaaaccaacagagttaacgtcagggatacgtatggtcccgtaactgcagggctgaaatgaagtgcactaaccttctgttgtttttcctccttatactaaagctgctattcttctgccctctcgtgcccatcatgacaaaaaccaaaacaattgcacctcctgtctgtcctgcaaagccagtcgcatggatagggcctggact

SEQ ID NO: 80545 - DNA, 600 bp, Chicken  19866894373017_1
ttttaataggtgactcaggcactcagtagctcactggggttggaggtaggagcaaggctacagagggtgccagtcgtggccgtggcggacaccaacaggtgggtagcatgcttttttctataggataaagcagttgaaatggaaagcagagtgagctgctgtgttaacagagagatggggttttctcaggggaaggagggatgaagcactttgttaggggtttgttttccgcttgctgggagttggatggcagatttaacagagacattttgaaacaaagagaggtgcagtgttatcttytgcaggagacagagctgttgttgacttatgggcaatagccaaagaggaagtgattgaatatttagattaatttgtgaatctttttccctcattctctttcctttccctttcttcctcttctgtctaggaaagtcagggagaaaaaagtagagactaggaatggtttttccccatcgcggggctgaatatctctgaaccctactgtttagggctgaatatctctgaacagcagcctgttgccaggagggtcagactcctcctccacacatttagctgcgaggagctctttttctccccaga

SEQ ID NO: 80546 - DNA, 599 bp, Chicken  19866894373018_1
  misc_feature (1)..(122): n is any nucleotide
nnnnnnnnnnnnnnnnnnnnnnnnnnnnnnnnnnnnnnnnnnnnnnnnnnnnnnnnnnnnnnnnnnnnnnnnnnnnnnnnnnnnnnnnnnnnnnnnnnnnnnnnnnnnnnnnnnnnnnnnnnacaaaagccaggaactcctgaaccatggactgtctgtgcagtagatctccttatgctttcttattcattcctcgtacagctgaagctgcaatatcatgctgtacccatatcaggatctcaacatcacagcacttgcactctgctttgcgttaagtgtgtgcacacgtttgaatgaatragaattactgtcagtctggttaatttattctaattatccttttcactcctccttattctgcttatgtccaatccaatctcccacagcatggcgtaaacacatcttctttttagtggctgcaggcatgccaagtccttctttctcctyttyctcttatcatatattttcttcctttgaagggctttttctgccacccatctatcttctccctagactaaaacaactcaaaccatactgtttttctcccacatcctacatttcaaaccactgattatgaacaacatgtatttcacagcagc

SEQ ID NO: 80547 - DNA, 600 bp, Chicken  19866894373018_2
tggactgtctgtgcagtagatctccttatgctttcttattcattcctcgtacagctgaagctgcaatatcatgctgtacccatatcaggatctcaacatcacagcacttgcactctgctttgcgttaagtgtgtgcacacgtttgaatgaatragaattactgtcagtctggttaatttattctaattatccttttcactcctccttattctgcttatgtccaatccaatctcccacagcatggcgtaaacacatcttctttttagtggctgcaggcatgccaagtccttctttctcctyttyctcttatcatatattttcttcctttgaagggctttttctgccacccatctatcttctccctagactaaaacaactcaaaccatactgtttttctcccacatcctacatttcaaaccactgattatgaacaacatgtatttcacagcagccctcaaggaaagaagaaaaatgttgggttatcaggctttctgggaagaggctaagagagcgtgaatgccagagacctcacaagggtcacgcagaacattagcagcctcaaaggcaacagaytgcagaaactgctggctctcaacactt

SEQ ID NO: 80548 - DNA, 600 bp, Chicken  19866894373018_3
actgtctgtgcagtagatctccttatgctttcttattcattcctcgtacagctgaagctgcaatatcatgctgtacccatatcaggatctcaacatcacagcacttgcactctgctttgcgttaagtgtgtgcacacgtttgaatgaatragaattactgtcagtctggttaatttattctaattatccttttcactcctccttattctgcttatgtccaatccaatctcccacagcatggcgtaaacacatcttctttttagtggctgcaggcatgccaagtccttctttctcctyttyctcttatcatatattttcttcctttgaagggctttttctgccacccatctatcttctccctagactaaaacaactcaaaccatactgtttttctcccacatcctacatttcaaaccactgattatgaacaacatgtatttcacagcagccctcaaggaaagaagaaaaatgttgggttatcaggctttctgggaagaggctaagagagcgtgaatgccagagacctcacaagggtcacgcagaacattagcagcctcaaaggcaacagaytgcagaaactgctggctctcaacactttgc

SEQ ID NO: 80549 - DNA, 600 bp, Chicken  19866894373018_4
aggcatgccaagtccttctttctcctyttyctcttatcatatattttcttcctttgaagggctttttctgccacccatctatcttctccctagactaaaacaactcaaaccatactgtttttctcccacatcctacatttcaaaccactgattatgaacaacatgtatttcacagcagccctcaaggaaagaagaaaaatgttgggttatcaggctttctgggaagaggctaagagagcgtgaatgccagagacctcacaagggtcacgcagaacattagcagcctcaaaggcaacagaytgcagaaactgctggctctcaacactttgctgcctactttgcattgtggagaaagaaggtcaaagtcatcttccttgacatcatgaacagttgccagtagaaaaaaaaatctgcagtctttctctttatcagagggatttcctgagacattatctttgatgtggcgacagctgggaaagctacaaaaggtacagaatgaactattaaccttgtgtgccatttccaggggttttccgcctttgatgagaataccgttctgcgcagcaactcctgtgcccaccatcacagctgttggagtag

SEQ ID NO: 80550 - DNA, 600 bp, Chicken  19866894373022_1
tgctttaccaaaaaactttgtgctttgcattccctaaacatcttccactgaaccaaagggaccaaccataattgcaagtaaattcttgcacccacaaactggatggagtatgcaacaccttttttcccaaagctcaaaaacctatttcccatcaccatcttcacctactcttctctaggaaattcattttaagaaacaaacatggactcttgcctgaaaagagggcaatgctgcataacagttatgagaaccccttgctcatgctcagccagcctgcaggggcagccctgatcccactgrgacccacgtgctcacagtcccttactttccccaggaatacttcatcccatgctgtgctcaccctttgtgctcacgcaggcccagtgtgcaaatgggttcagcaccctgccaagtgaatgcatactgatattcaagccttgggataaatattttactgtggtctcatggtagagtctgggccaacagcagtgacaactctctttacctctgttggtgatgttcttcactggagggtctttctgcgcatggtttgaagaggcactctctgctgcaggacttggtttcccagtctcccaggag

SEQ ID NO: 80551 - DNA, 600 bp, Chicken  19866894373026_1
gcatctgcatgatctccttcttatctttccagaataagtgtaaatcacaactgtaaatgctgaaaatatagtgctgagagggacataaatagtctaaaatgatagagaaatattgaacacaggagttttctgctactggtgataatgcttctagtgcagtgtattctgtaacttcattcagcctgctactgagaaatgctctgacgctgccttttgagcagcccttctgactgcatttcacattacaatagaaaagacaaaattgggtgccccacagaaacatcttcttgtgagtatcayggggaaaagtgtgttctctcatcccacccagaggtgtgtttcaccccactgtgttttgttactgctggagttacttgtgctgtgttctgtggagcacgccttggtgtttgttatgttagagaaaggcygcttggcattttttaaggatggtgtctctttaaatatgcttttcttataagccattgttttagagcaaggagatttctaaatgtgcattcatttagggaatatctaaagttgcgtgagagattgccatagctcacactctcttgtaaatcaccattgaacagtagtaaccca

SEQ ID NO: 80552 - DNA, 600 bp, Chicken  19866894373026_2
tctgctactggtgataatgcttctagtgcagtgtattctgtaacttcattcagcctgctactgagaaatgctctgacgctgccttttgagcagcccttctgactgcatttcacattacaatagaaaagacaaaattgggtgccccacagaaacatcttcttgtgagtatcayggggaaaagtgtgttctctcatcccacccagaggtgtgtttcaccccactgtgttttgttactgctggagttacttgtgctgtgttctgtggagcacgccttggtgtttgttatgttagagaaaggcygcttggcattttttaaggatggtgtctctttaaatatgcttttcttataagccattgttttagagcaaggagatttctaaatgtgcattcatttagggaatatctaaagttgcgtgagagattgccatagctcacactctcttgtaaatcaccattgaacagtagtaacccaaagaatgaactgaaaacatgtctgttttcaattgtaaggcaagagacttgccaaaggctgcgattgattcagagaccaccctttggtagagcaatgttcctactgaccagattacctttaaaatctct

SEQ ID NO: 80553 - DNA, 600 bp, Chicken  19866894373030_1
atatccgtaagtattccttataaacttattacatctgtataaatgaaaaaacccaacacattgcttcccaaaacaatttcagatttttagttctaagactgtaaatttgaaagatttcaagagcaaggtatatttcagggcaacatttagaattctggacttgggaaagaggagtgagtatgggtaaccatgttgttcaggtccctgcctaaggaaatgcacatccttcaaacagaggagtagtcatctggcattatttgtgaatggttaaagatggttacaggttccagtttcactggragaaaagggaaagagggtgtatttgctttgaaaacacggtagcagttcagaagttttaaattaagtaaatcacaaaaacagtgcaaaccaaaaccaacatcagctttctgctgttgaaaattttttcatttttaatctcatttctttttttcattttttccagccaattatgtcactgtgaaccagcatactattgctagtacctaacctgtatggcatgaaatttttattactttggtgtaaagcttttgttgtttccacttaatacaacatgattaaacatgcaagagtggaaaactt

SEQ ID NO: 80554 - DNA, 600 bp, Chicken  19866894373033_1
aactgaggacagctgcacttgcactgcttatgcaaatcagatgtaaccaattaacttaacaacactatctacagcctttcacaaacagtttccatgtcagatactgcacacaaaacctcttccagggatcttgaattaccctggaggggactagcaatccaaatggggtcaagacagctgaattctttttcaacaggaagcttcccagaaaggaagacagaccaatgcactgcacccccttgctccttaatgcttattgacaaaagacacaaagatagaggaaagggagatttcaccccmtttccagttctcttgcaacagagtatagggcagaagcagctgtttaatacagttttcccagcttccttaaaagcagaaaagatagtaggtttcacaacaagcctgttaacaagcatcagaagagcccagacaaggcacagaggaaaggtgcgctgtcctgatagcttgtagtttgcagtggatcacgtgctagtttacaaagaagtctttactaggtcacccctttgcttgccacatcacctgctgtttcatactgactagcaggagcacacacaggtgcctatctcatattatgaaata

SEQ ID NO: 80555 - DNA, 600 bp, Chicken  19866894373038_1
gactcagcagcctgtgggtttctggctggtggcaactgaacagcctggcacactctagtggcagggaaccagaggtgggaactcctacaggaatgggttggtttcagccaccatgatttgagcattttcttgaagttcttaagtttgtaagatgctatgaggacaaaatcatatgtcctatgcatttaggaatatattcaaatttaattttaacacccatgtttctctgccaaacacgctctaatttcattgtggattttgttagctggaaagcaactaaccctggatattatttaaaargttgcatagcattcctagtcccgcttgctgaaaaggaagatgttaagccttaaagtctgctgggggaacacctctgagygcagagctgtgttcagtggtgtcgctgcaatcccactctgtcttcccagtatttggagactgtgtgttgccttatttcagttctctggctcagggaggcagctattggattgctactggagctttttggagcaatgaagcatgattgaaaattttccaccacaatcttttctaagatgtaataattatgataacgttttttccttagtccaggcagcaaaa

SEQ ID NO: 80556 - DNA, 600 bp, Chicken  19866894373038_2
aactcctacaggaatgggttggtttcagccaccatgatttgagcattttcttgaagttcttaagtttgtaagatgctatgaggacaaaatcatatgtcctatgcatttaggaatatattcaaatttaattttaacacccatgtttctctgccaaacacgctctaatttcattgtggattttgttagctggaaagcaactaaccctggatattatttaaaargttgcatagcattcctagtcccgcttgctgaaaaggaagatgttaagccttaaagtctgctgggggaacacctctgagygcagagctgtgttcagtggtgtcgctgcaatcccactctgtcttcccagtatttggagactgtgtgttgccttatttcagttctctggctcagggaggcagctattggattgctactggagctttttggagcaatgaagcatgattgaaaattttccaccacaatcttttctaagatgtaataattatgataacgttttttccttagtccaggcagcaaaagaaataatatggtgttaggcaatgggcatctcattcttttcagcttgggcaagggaagatgacaaagcagactgattta

SEQ ID NO: 80557 - DNA, 600 bp, Chicken  19866894373041_1
ctggggaatgggacaacataatggagtgcgctgacatctgcagtgctgctcagaggaagccgttgtggttgcttgacttgctcttgtccttctcagtggcatccactgtaggcaactctcacatacagactattacagtaggtaggcttttagaagaccctgcattgctattttattatctttaagttgttagcagtgcatattgtgaaggaaagaaggtagcctgaagagaaagacaacatgaatatcacaatgtaaggagggcaaatatgctaccgaacaggcttccaccaccacctygtgttctttgagcatacmaacaaaagatttggatgtgacaaatccagatcagtgcaacttaaaatcagtgcatgctgtcattattcactrtgtcatacaacaggtagaagatctcccagcgaggaagggaaggaaaatgtcatggtttgtctaaaatttctctggagcaaagcagttattagaaaacaaatcagatgttctgcatccccctttgtgacattaaacacttaattgtgtctattcaaacttagaaataagggactctaattaaaaagaaattgttttatagtagattgtgag

SEQ ID NO: 80558 - DNA, 600 bp, Chicken  19866894373041_2
taatggagtgcgctgacatctgcagtgctgctcagaggaagccgttgtggttgcttgacttgctcttgtccttctcagtggcatccactgtaggcaactctcacatacagactattacagtaggtaggcttttagaagaccctgcattgctattttattatctttaagttgttagcagtgcatattgtgaaggaaagaaggtagcctgaagagaaagacaacatgaatatcacaatgtaaggagggcaaatatgctaccgaacaggcttccaccaccacctygtgttctttgagcatacmaacaaaagatttggatgtgacaaatccagatcagtgcaacttaaaatcagtgcatgctgtcattattcactrtgtcatacaacaggtagaagatctcccagcgaggaagggaaggaaaatgtcatggtttgtctaaaatttctctggagcaaagcagttattagaaaacaaatcagatgttctgcatccccctttgtgacattaaacacttaattgtgtctattcaaacttagaaataagggactctaattaaaaagaaattgttttatagtagattgtgagtaatctgtgttttcttta

SEQ ID NO: 80559 - DNA, 600 bp, Chicken  19866894373041_3
tctcagtggcatccactgtaggcaactctcacatacagactattacagtaggtaggcttttagaagaccctgcattgctattttattatctttaagttgttagcagtgcatattgtgaaggaaagaaggtagcctgaagagaaagacaacatgaatatcacaatgtaaggagggcaaatatgctaccgaacaggcttccaccaccacctygtgttctttgagcatacmaacaaaagatttggatgtgacaaatccagatcagtgcaacttaaaatcagtgcatgctgtcattattcactrtgtcatacaacaggtagaagatctcccagcgaggaagggaaggaaaatgtcatggtttgtctaaaatttctctggagcaaagcagttattagaaaacaaatcagatgttctgcatccccctttgtgacattaaacacttaattgtgtctattcaaacttagaaataagggactctaattaaaaagaaattgttttatagtagattgtgagtaatctgtgttttctttaatcaagacaatctcctgagtaaaaaaaaaaaaaaaaaaaaagcagtcttcttgcctcatgggtaacataaat

SEQ ID NO: 80560 - DNA, 586 bp, Chicken  19866894373043_1
gggtttgtggggatgaggacttggggatgtgggatggggacaggggacatggggatgggactggttgtcttgctagccccagtagagatataagcttttgccagagcactgctaattctcacagtgtgctgctgctgcttctgctgctgctgctgcagaaagcaaaggtcctcaggctgttctagtccacatccactggggaaagctaaaggagctccacctcttgtgttgctcagccacttgagccgttgtatcagggctgcctttgccaccttcttaaaggctaattgatgaaagttsgtctgtgctgcctctagctggtctagcagctgggcacagtgctacctgggatttgacaccctggagttccaggtatgtctacccagccaagatgatgaaggagagctactcccagtacttaagctttggtgctgaaagcagcttggagtgtagaaattctccccaaactctaggcaaacccattgccatctcagctgaagaggtatttcaatatttccttccaaatggaatagaatgtataaacaccaaccgatgtaacatgcagctaacttttatttttgataaa

SEQ ID NO: 80561 - DNA, 599 bp, Chicken  19866894373050_1
  misc_feature (1)..(85): n is any nucleotide
nnnnnnnnnnnnnnnnnnnnnnnnnnnnnnnnnnnnnnnnnnnnnnnnnnnnnnnnnnnnnnnnnnnnnnnnnnnnnnnnnnnnnaaaaagctttgaaaatatagtaatattcttgtaagaattgtaaaatacaaaacactgtggaattcagtttcctttagcattacaatcagcttctacacgactttttgagggatggtcagagaatttgatttcagaccagatccttaagacacatgtataaagacactgttgagcacctgcttctggaaaagctaaataaaagatcagactgcttytgcttcaaacaaactgcatrctgtccgactcatccttttgcaaaaggaaggctgtggcattatcaaatgttgcattctcacaaacaaaactgtgtgaaaactttaaaaaaamcaaacaaatgtaaatgctttgaaagcatgtcgcatgcaatgacttgagtctattttaagcaaaacagtttctgcttggtttggtgagtgatgccmtggacttccatgtgtgtgcccacctgactgatggtactcatggctctcatgtagctctcattgcgtgagcggaacttgggggacgtcagcag

SEQ ID NO: 80562 - DNA, 599 bp, Chicken  19866894373050_2
  misc_feature (1)..(65): n is any nucleotide
nnnnnnnnnnnnnnnnnnnnnnnnnnnnnnnnnnnnnnnnnnnnnnnnnnnnnnnnnnnnnnnnnaaaaagctttgaaaatatagtaatattcttgtaagaattgtaaaatacaaaacactgtggaattcagtttcctttagcattacaatcagcttctacacgactttttgagggatggtcagagaatttgatttcagaccagatccttaagacacatgtataaagacactgttgagcacctgcttctggaaaagctaaataaaagatcagactgcttytgcttcaaacaaactgcatrctgtccgactcatccttttgcaaaaggaaggctgtggcattatcaaatgttgcattctcacaaacaaaactgtgtgaaaactttaaaaaaamcaaacaaatgtaaatgctttgaaagcatgtcgcatgcaatgacttgagtctattttaagcaaaacagtttctgcttggtttggtgagtgatgccmtggacttccatgtgtgtgcccacctgactgatggtactcatggctctcatgtagctctcattgcgtgagcggaacttgggggacgtcagcagccctgcagggtccaggctgt

SEQ ID NO: 80563 - DNA, 600 bp, Chicken  19866894373050_3
cttgtaagaattgtaaaatacaaaacactgtggaattcagtttcctttagcattacaatcagcttctacacgactttttgagggatggtcagagaatttgatttcagaccagatccttaagacacatgtataaagacactgttgagcacctgcttctggaaaagctaaataaaagatcagactgcttytgcttcaaacaaactgcatrctgtccgactcatccttttgcaaaaggaaggctgtggcattatcaaatgttgcattctcacaaacaaaactgtgtgaaaactttaaaaaaamcaaacaaatgtaaatgctttgaaagcatgtcgcatgcaatgacttgagtctattttaagcaaaacagtttctgcttggtttggtgagtgatgccmtggacttccatgtgtgtgcccacctgactgatggtactcatggctctcatgtagctctcattgcgtgagcggaacttgggggacgtcagcagccctgcagggtccaggctgtccaagctcctgttgattgagacttcgctcacygccctcaggtaactgtggctccggatctgaagctttggcgagtgttcactggatatcctga

SEQ ID NO: 80564 - DNA, 600 bp, Chicken  19866894373050_4
atttgatttcagaccagatccttaagacacatgtataaagacactgttgagcacctgcttctggaaaagctaaataaaagatcagactgcttytgcttcaaacaaactgcatrctgtccgactcatccttttgcaaaaggaaggctgtggcattatcaaatgttgcattctcacaaacaaaactgtgtgaaaactttaaaaaaamcaaacaaatgtaaatgctttgaaagcatgtcgcatgcaatgacttgagtctattttaagcaaaacagtttctgcttggtttggtgagtgatgccmtggacttccatgtgtgtgcccacctgactgatggtactcatggctctcatgtagctctcattgcgtgagcggaacttgggggacgtcagcagccctgcagggtccaggctgtccaagctcctgttgattgagacttcgctcacygccctcaggtaactgtggctccggatctgaagctttggcgagtgttcactggatatcctgagaggtttgtgggaaaagaaagaaagaaaaagatacttcatcaaacacaaatggcctcaccagaagtggggataaacaagtgcttttcaatgggac

SEQ ID NO: 80565 - DNA, 600 bp, Chicken  19866894373050_5
ctgtggcattatcaaatgttgcattctcacaaacaaaactgtgtgaaaactttaaaaaaamcaaacaaatgtaaatgctttgaaagcatgtcgcatgcaatgacttgagtctattttaagcaaaacagtttctgcttggtttggtgagtgatgccmtggacttccatgtgtgtgcccacctgactgatggtactcatggctctcatgtagctctcattgcgtgagcggaacttgggggacgtcagcagccctgcagggtccaggctgtccaagctcctgttgattgagacttcgctcacygccctcaggtaactgtggctccggatctgaagctttggcgagtgttcactggatatcctgagaggtttgtgggaaaagaaagaaagaaaaagatacttcatcaaacacaaatggcctcaccagaagtggggataaacaagtgcttttcaatgggacagcaatacttgaactggtcgttatcgttatttcataaatatacaaatactgtgtaatgtcagcactcttatttggattactcttccccttcatttggtggaaagagagaagtaaggtgtaaaccatgcctaagcagaatggtaa

SEQ ID NO: 80566 - DNA, 600 bp, Chicken  19866894373050_6
cacaaatggcctcaccagaagtggggataaacaagtgcttttcaatgggacagcaatacttgaactggtcgttatcgttatttcataaatatacaaatactgtgtaatgtcagcactcttatttggattactcttccccttcatttggtggaaagagagaagtaaggtgtaaaccatgcctaagcagaatggtaacataacttttattttatttactgagagcagcacagcaaaattttatgttgtgtctatggtggcagctaccagccccaataaaaacttcaccatgtgggacaagargagcaatgacattgaaacaacttaatgtgtaggttttaaaagaccaagtggagctattgaggtgagagcaatagaagaaagtgcttagaggtgaacgctgcaaccaccaaaatcagacagagggcatggtgaggaaaggagaggcctgagactaaatctgtgtgtattaacctcaacacacctgccaaacacttcttgatgtggccagaggttctattttttttatgtgcttgttcctctctcagaaaggctggtgtccatcagacctggctctgtgactcatgcatgtttctgttaaat

SEQ ID NO: 80567 - DNA, 600 bp, Chicken  19866894373051_1
ggacttaaaattatttctcttttgtttgctaggtgctaaaaggggattttaaagtgctgaggagctgagagcttttgcaagctaggcctgcagtaagatataattccttctgaggattatgcacaccgatgccttgtgatctgacctcagcagatccatggagctcagaggtggatctaaagcatgccttactgaggagatgtttaatgtaattatccatgtaacaaacaaacaaaaagattgcgaaatgtggaggcttcctcttcaagggaagtagggactgggatcagagttgtgagytcccttccagctttgaccatcagtctgttgcatgccctctctccaacactgttttccagttggtaaagttatctgtgttctcaccttttaaaaaytgctttgaaatctcgattaaagaatgaataagagcatagctttttttagttcaatttttttttccctgtgaatttagttctaccacagcagtgtagctgtaacaagtcttttcagtcraagaataatagaatatgatgtttgatgactgtgtttttaactgtggctttgtctcgaactctgtggyctaatactttgtagggatgg

SEQ ID NO: 80568 - DNA, 600 bp, Chicken  19866894373051_2
agatataattccttctgaggattatgcacaccgatgccttgtgatctgacctcagcagatccatggagctcagaggtggatctaaagcatgccttactgaggagatgtttaatgtaattatccatgtaacaaacaaacaaaaagattgcgaaatgtggaggcttcctcttcaagggaagtagggactgggatcagagttgtgagytcccttccagctttgaccatcagtctgttgcatgccctctctccaacactgttttccagttggtaaagttatctgtgttctcaccttttaaaaaytgctttgaaatctcgattaaagaatgaataagagcatagctttttttagttcaatttttttttccctgtgaatttagttctaccacagcagtgtagctgtaacaagtcttttcagtcraagaataatagaatatgatgtttgatgactgtgtttttaactgtggctttgtctcgaactctgtggyctaatactttgtagggatggatgtaagcacacatccatgtagctgtacgtctactgaaaaagcagatgaatattctccttttaggatttcagaagccaactgcaaagcaacccag

SEQ ID NO: 80569 - DNA, 600 bp, Chicken  19866894373051_3
tatccatgtaacaaacaaacaaaaagattgcgaaatgtggaggcttcctcttcaagggaagtagggactgggatcagagttgtgagytcccttccagctttgaccatcagtctgttgcatgccctctctccaacactgttttccagttggtaaagttatctgtgttctcaccttttaaaaaytgctttgaaatctcgattaaagaatgaataagagcatagctttttttagttcaatttttttttccctgtgaatttagttctaccacagcagtgtagctgtaacaagtcttttcagtcraagaataatagaatatgatgtttgatgactgtgtttttaactgtggctttgtctcgaactctgtggyctaatactttgtagggatggatgtaagcacacatccatgtagctgtacgtctactgaaaaagcagatgaatattctccttttaggatttcagaagccaactgcaaagcaacccagacagatacctttgttagctggttggctgcctgacagtgacttccatgtttatgtctgggctttccagacagatacaagcaaacacatctgttaatacgcattgagctgaggagctgat

SEQ ID NO: 80570 - DNA, 600 bp, Chicken  19866894373051_4
ctgggatcagagttgtgagytcccttccagctttgaccatcagtctgttgcatgccctctctccaacactgttttccagttggtaaagttatctgtgttctcaccttttaaaaaytgctttgaaatctcgattaaagaatgaataagagcatagctttttttagttcaatttttttttccctgtgaatttagttctaccacagcagtgtagctgtaacaagtcttttcagtcraagaataatagaatatgatgtttgatgactgtgtttttaactgtggctttgtctcgaactctgtggyctaatactttgtagggatggatgtaagcacacatccatgtagctgtacgtctactgaaaaagcagatgaatattctccttttaggatttcagaagccaactgcaaagcaacccagacagatacctttgttagctggttggctgcctgacagtgacttccatgtttatgtctgggctttccagacagatacaagcaaacacatctgttaatacgcattgagctgaggagctgatgtgcactactttgttacacaggttgtctctgtgccagatactgtagctttgatgcatgtatgaaata

SEQ ID NO: 80571 - DNA, 600 bp, Chicken  19866894373057_1
tccatggggcacattgccagtcttggttggactgtctcaccacacccaccctacagaccaggtttggtaccttctgatttccatctgcttgggatggtgggaagatggactgtgtgggtgatgttttccgagcaataacactgttacagcagctgtgaaacagtgggtcacctctgctggtgcaggtttttccagtgtgacatgcaggctcttatttattgctggcaaaaatgcacagctaatggtattctttttagcacagtcaccaccattttgcagctgagaatttcctctatcaartagtgttgttgcgctctttgtatctgttgggatttccatggaaataaacaggaggcattactttcagagcaatctacatggttggttgttggggcttttaaagaaaaaggcattcccaattagaactacagacacactgaccttctgtatcagcctacagtgtgttttgttcttgggtgcttatggacaatgtcgtattttcagggaactcagggtggaagttggtacaacttgtttatttctagcgctctgcactgctccaaagcctcttgagtgagctggacagtgatgtgggggtac

SEQ ID NO: 80572 - DNA, 600 bp, Chicken  19866894373065_1
cgaggaaggagatctgctcactcaaggagtcgattctgtccagttgctggagggagtgggacagtcggctgatggggtctgtgccgacgtcctctggtgcagatggcatgaggttgtggaagggagccagcaccaactggagtttctgcagggagaagggggagccatgagcagtcaggaggagcctcagcgcagtatttggttgtgttcaaagggccgctgggctggaagagctgctgtgaggctctgcctgcagtgtggagcacagctgggatccttgcctgctccctgcctgagagrtcagtgtggtgttaaaaatagagcaggggtggagggaaaccctggctgtgcacagcctgggcttggagccggctgcacgtggccacgggcargggaggaaggggcagagggggacacaaaacacccacctgctccagtgcttccactctgttcttcaggtctttcatttcttccttcacttcactggagggatctgaaagaaagggccaaaataagttacttagtaaaaatccattgcctgaggtgaagtgggatgtgctgggctcaggtaagcactgctgcttggtgctcccctcctag

SEQ ID NO: 80573 - DNA, 600 bp, Chicken  19866894373065_2
tctggtgcagatggcatgaggttgtggaagggagccagcaccaactggagtttctgcagggagaagggggagccatgagcagtcaggaggagcctcagcgcagtatttggttgtgttcaaagggccgctgggctggaagagctgctgtgaggctctgcctgcagtgtggagcacagctgggatccttgcctgctccctgcctgagagrtcagtgtggtgttaaaaatagagcaggggtggagggaaaccctggctgtgcacagcctgggcttggagccggctgcacgtggccacgggcargggaggaaggggcagagggggacacaaaacacccacctgctccagtgcttccactctgttcttcaggtctttcatttcttccttcacttcactggagggatctgaaagaaagggccaaaataagttacttagtaaaaatccattgcctgaggtgaagtgggatgtgctgggctcaggtaagcactgctgcttggtgctcccctcctagggaatctcagggttcaggaactggatgcaatgcctgctgcaagcacagcagtacctagartaaagtgagggagtttcttaggctgtggggtg

SEQ ID NO: 80574 - DNA, 596 bp, Chicken  19866894373065_3
gcttggagccggctgcacgtggccacgggcargggaggaaggggcagagggggacacaaaacacccacctgctccagtgcttccactctgttcttcaggtctttcatttcttccttcacttcactggagggatctgaaagaaagggccaaaataagttacttagtaaaaatccattgcctgaggtgaagtgggatgtgctgggctcaggtaagcactgctgcttggtgctcccctcctagggaatctcagggttcaggaactggatgcaatgcctgctgcaagcacagcagtacctagartaaagtgagggagtttcttaggctgtggggtgatgcttcaaggacaaartatcctttcgtgcctttgctgtcaacagatgagttagcactcatgtcttccctgtcccatggtgagccctgctgcagacacagggcaaaagcaggcagtgtttgggacgcatgtagatggctctcccaggcgttgcccacgtgatgccagtgctgaccacagcgcattattactcacggtacgagtttaagtgtcacagcgcgtaccaaaagtaataatgggccgtcaccagcagctcctgatgctc

SEQ ID NO: 80575 - DNA, 547 bp, Chicken  19866894373065_4
ggggacacaaaacacccacctgctccagtgcttccactctgttcttcaggtctttcatttcttccttcacttcactggagggatctgaaagaaagggccaaaataagttacttagtaaaaatccattgcctgaggtgaagtgggatgtgctgggctcaggtaagcactgctgcttggtgctcccctcctagggaatctcagggttcaggaactggatgcaatgcctgctgcaagcacagcagtacctagartaaagtgagggagtttcttaggctgtggggtgatgcttcaaggacaaartatcctttcgtgcctttgctgtcaacagatgagttagcactcatgtcttccctgtcccatggtgagccctgctgcagacacagggcaaaagcaggcagtgtttgggacgcatgtagatggctctcccaggcgttgcccacgtgatgccagtgctgaccacagcgcattattactcacggtacgagtttaagtgtcacagcgcgtaccaaaagtaataatgggccgtcaccagcagctcctgatgctc

SEQ ID NO: 80576 - DNA, 600 bp, Chicken  19866894373067_1
ccccacctgcaggctctcggctcccaaccactgtcatctccctggcagtggagctgcagccagcaccatgctgtgattgggcagcagggggttgtggctggagcacagcccagctccgctcgctcccttatgtgatggttctggggaggcagcacacacagcacctgcacgggttgcaaacaggtctgtgcttctgttatcgatcagctttgtcttgcctccattctcagctcaccagctgcaaactggagctgatggactgatccgaacagacacagcaagtactggggctgactgtgkgccttgctgcaggcccctgcctgagcgtgaaggcgtgcaagggaacaatattgtagctgtggcatacacactgctgtaaaacagctgttttcacatctgcccccagctttaatgcacacctctaaggacgtgaagactcctgtgaaaatgagagcaggttcacgacctgaaaycctaagttgaagaaaggattaaaaaaaataacaaatcactttgccaaacacacagtgaagcacctggggacacagcacagctactgagcaacagaatgctgcaggcacaccaaggtcccagggcagc

SEQ ID NO: 80577 - DNA, 600 bp, Chicken  19866894373067_2
ttgcaaacaggtctgtgcttctgttatcgatcagctttgtcttgcctccattctcagctcaccagctgcaaactggagctgatggactgatccgaacagacacagcaagtactggggctgactgtgkgccttgctgcaggcccctgcctgagcgtgaaggcgtgcaagggaacaatattgtagctgtggcatacacactgctgtaaaacagctgttttcacatctgcccccagctttaatgcacacctctaaggacgtgaagactcctgtgaaaatgagagcaggttcacgacctgaaaycctaagttgaagaaaggattaaaaaaaataacaaatcactttgccaaacacacagtgaagcacctggggacacagcacagctactgagcaacagaatgctgcaggcacaccaaggtcccagggcagccggtccttacacaccctcagtgctgctgataaagtgaggtaaggttgagctgcagaagctgggagctcacaggaagctcaggagcctcacacaaaagacaagagcagacagggttacacctttgtactttcctccatgcaaacactgcctgcaggtaaacacagaaccaaaga

SEQ ID NO: 80578 - DNA, 600 bp, Chicken  19866894373067_3
ctaagttgaagaaaggattaaaaaaaataacaaatcactttgccaaacacacagtgaagcacctggggacacagcacagctactgagcaacagaatgctgcaggcacaccaaggtcccagggcagccggtccttacacaccctcagtgctgctgataaagtgaggtaaggttgagctgcagaagctgggagctcacaggaagctcaggagcctcacacaaaagacaagagcagacagggttacacctttgtactttcctccatgcaaacactgcctgcaggtaaacacagaaccaaagarcctttaacaatagaagaacagtctggattaaaagtcaaaataaatcaagcaaacatgaaacaagcccagctagcttgcaacagatctgcaagcgcgggcatggcaggaaagacaccttgttcttgtggcttgcaaaactgcagaagaacaagcaacacttgtaatatacagcgagttccattttaaaatcctctttcaacaactgctgttggatggaacacatccaaccgtcttttgatggcttcactttggacaagcggtgaccgacgcctgaagggatggaaagcagtgtgtgacaaa

SEQ ID NO: 80579 - DNA, 484 bp, Chicken  19866894373070_1
aataacagtactgatgagggagacctgtttgaactgggtgatgggagtggtagaactggtggctcaatctaacgtacacttctagcaagtgttttagccaactaaactctgtgagttatgatagtataattgtccagttccacagcatttaaggtgcttataaagtaaaaatgaaactcagtgtagcctataaatgatgtgagtgcccagctatcagttctatgaacactgcttagtgaggagaggacaggtacaccagtaaatacctgtaagatcaaattccccaggcaaaaaataaaratatatatatatatatatgtatattgtttttctatatgaaacctttttcctctccttcacttattctttagagcacaaaaacagggtaggttggttcttttcaactctgctcttgccacataattgaaggagcagaaataacacatgaacgagttccccatcgtcccagttgtatggcaagagt

SEQ ID NO: 80580 - DNA, 484 bp, Chicken  19866894373070_2; identical to SEQ ID NO: 80579

SEQ ID NO: 80581 - DNA, 484 bp, Chicken  19866894373070_3; identical to SEQ ID NO: 80579

SEQ ID NO: 80582 - DNA, 484 bp, Chicken  19866894373070_4; identical to SEQ ID NO: 80579

SEQ ID NO: 80583 - DNA, 600 bp, Chicken  19866894373078_1
aaatgacctatttattatgtagtaacagctacaaaatataaaaattacagggcatgacataagaagttccttcttaaagaaatgtttttaaataccatgaatcaagtggcaataccgaatttcaagcagcacagacccgttcaagaaataccacaatgataactgtaagtatggccacttaaggatttgctatccctgccaagatccacctccaaacatagatggagaaaaccatttctacctttggactagaacaactcacatacagattgccccaacatgattcatcatctgaatttragtgtttttatataactgatgtttttcaaatgaaactgaagttttctttcaataagaattctaattaatattgctcaaacatttgttcacaacagtggtttccaaagccaaagactgaatggattcaaatacgtcctttcttcatttgaatgtatatttattgatttgtagaggaagtattatagaacaagggtaggatatttgcctacctttaacgtcaagtaaaagctacaaagcagtcaggcacaggaacacatcgaacactgatgtgcattttcttgccagttagagaggagtgtt

SEQ ID NO: 80584 - DNA, 600 bp, Chicken  19866894373078_2
tcacaacagtggtttccaaagccaaagactgaatggattcaaatacgtcctttcttcatttgaatgtatatttattgatttgtagaggaagtattatagaacaagggtaggatatttgcctacctttaacgtcaagtaaaagctacaaagcagtcaggcacaggaacacatcgaacactgatgtgcattttcttgccagttagagaggagtgttcccaggaacactgcacccctctgaggaagacaccatatcaaagttgttctacagttgtgcaaagcattgtacgtttacacacacaraaaaaaaccagcaatcattccagcagttccacaaggctgctctggagagccagccctcctgccctctcttccaaccagacattgaagccrattctcctgaagcataccaaccttgacagacatttccacaaacacaaaacatgcaatttaaatctgaaagaccagctttattaaaaaatcaaattaagaaaaacttaattagaacacagttatacaacttgtatatgagaaggaagggttgtatttcctaaatttggtgtctgtccaattactaagagccttacttcccaaccttaatat

SEQ ID NO: 80585 - DNA, 600 bp, Chicken  19866894373078_3
gtattatagaacaagggtaggatatttgcctacctttaacgtcaagtaaaagctacaaagcagtcaggcacaggaacacatcgaacactgatgtgcattttcttgccagttagagaggagtgttcccaggaacactgcacccctctgaggaagacaccatatcaaagttgttctacagttgtgcaaagcattgtacgtttacacacacagaaaaaaaccagcaatcattccagcagttccacaaggctgctctggagagccagccctcctgccctctcttccaaccagacattgaagccrattctcctgaagcataccaaccttgacagacatttccacaaacacaaaacatgcaatttaaatctgaaagaccagctttattaaaaaatcaaattaagaaaaacttaattagaacacagttatacaacttgtatatgagaaggaagggttgtatttcctaaatttggtgtctgtccaattactaagagccttacttcccaaccttaatattacgttactggagatatatatttgggaagatagaatattatctctgctgaactccaaacagctctggaacataatgctttaagcaaactt

SEQ ID NO: 80586 - DNA, 555 bp, Chicken  19866894373083_1
ggaaaaaaaatcacaaagaaatgtggaagtgttattattagaggcccctaattcagttttgtttttctctgaaaattcagctagacttcctctgtcagctgtctgtacatattcttcattattattttttttttcaagcacagagacatgcaagacaggtccctcagaaagggttcctggcatttgcactgaaaaagtgaaaaggttaagctcatattcatgaggaatgatgaatatgcccattaggaggatatgaaggagaaatgatatccctgttaggagtggggaatacagcagagrgacttacaaagaagtcccttaccactatgcagtaatgatgggagctacctatggagcatctcggggtcactttgttcaacctcctgctagagcttctgagcttcatagcttgttctccaggtttctaatgataaaaagttaagataaaaaaaaagtttgtaggcttttttgctctttacctacccaggaagcagaggtgaagtcagaaaatcagtgtatgttctcctggtagctgcttccttaaacatgttttta

SEQ ID NO: 80587 - DNA, 600 bp, Chicken  19866894373084_1
ataacagactcataacaaattcagttgcataatatgaactcagctggatagcacatgctaatggccaaggagaacatttgctccaatgtaacagaaaggttatttttgctaattttctttttattttattaaaaattgaatttattgatgaaaatttattgtttcaagtagtaaatcctttttactttaacataaatgcatgaaaattaggtcacaggagatcacatcttggacttgaagaagtctgttctggcagtgtatattcctgattacagcaccacattgttctgtgttgctttwaagacaggcagaagaagagttccaccaaaggcttaggcactgtgggatctcattccctcctctaaaataatctgtattgacatttgtttctgtttggtgcctgccttctctttagctttttactccttggtgaggaccctctttgaaagaactgttttaatacagggtattcactgcattgtttttcackttttttggttcctgtatgaatttccatgatgckttttcggttccattcrggtatcccttttaccctctcagcaagtctctcatgttgctttgctccatatttttccctgt

SEQ ID NO: 80588 - DNA, 600 bp, Chicken  19866894373084_2
cataaatgcatgaaaattaggtcacaggagatcacatcttggacttgaagaagtctgttctggcagtgtatattcctgattacagcaccacattgttctgtgttgctttwaagacaggcagaagaagagttccaccaaaggcttaggcactgtgggatctcattccctcctctaaaataatctgtattgacatttgtttctgtttggtgcctgccttctctttagctttttactccttggtgaggaccctctttgaaagaactgttttaatacagggtattcactgcattgtttttcackttttttggttcctgtatgaatttccatgatgckttttcggttccattcrggtatcccttttaccctctcagcaagtctctcatgttgctttgctccatatttttccctgtactttctcctgagtgatctcatccattagcagtgtgaagctcttgcctgaatgttgatcgtttgcagatctacattatgtccttacatccaatgcacaatttaaaaaatacttctccacaaatcatcttggctggcttgtcagcacctaatccctgctcagtacagcacatggcttccaacttcttcttc

SEQ ID NO: 80589 - DNA, 600 bp, Chicken  19866894373084_3
acatcttggacttgaagaagtctgttctggcagtgtatattcctgattacagcaccacattgttctgtgttgctttwaagacaggcagaagaagagttccaccaaaggcttaggcactgtgggatctcattccctcctctaaaataatctgtattgacatttgtttctgtttggtgcctgccttctctttagctttttactccttggtgaggaccctctttgaaagaactgttttaatacagggtattcactgcattgtttttcackttttttggttcctgtatgaatttccatgatgckttttcggttccattcrggtatcccttttaccctctcagcaagtctctcatgttgctttgctccatatttttccctgtactttctcctgagtgatctcatccattagcagtgtgaagctcttgcctgaatgttgatcgtttgcagatctacattatgtccttacatccaatgcacaatttaaaaaatacttctccacaaatcatcttggctggcttgtcagcacctaatccctgctcagtacagcacatggcttccaacttcttcttctgtccatcatttgtcttcactttgttaactcaa

SEQ ID NO: 80590 - DNA, 600 bp, Chicken  19866894373084_4
gaagtctgttctggcagtgtatattcctgattacagcaccacattgttctgtgttgctttwaagacaggcagaagaagagttccaccaaaggcttaggcactgtgggatctcattccctcctctaaaataatctgtattgacatttgtttctgtttggtgcctgccttctctttagctttttactccttggtgaggaccctctttgaaagaactgttttaatacagggtattcactgcattgtttttcackttttttggttcctgtatgaatttccatgatgckttttcggttccattcrggtatcccttttaccctctcagcaagtctctcatgttgctttgctccatatttttccctgtactttctcctgagtgatctcatccattagcagtgtgaagctcttgcctgaatgttgatcgtttgcagatctacattatgtccttacatccaatgcacaatttaaaaaatacttctccacaaatcatcttggctggcttgtcagcacctaatccctgctcagtacagcacatggcttccaacttcttcttctgtccatcatttgtcttcactttgttaactcaattatatcctttttatc

SEQ ID NO: 80591 - DNA, 600 bp, Chicken  19866894373092_1
ataatgacaagtgaatgtgcgcttggctggtgagcctgatcctgcattcatcacatccgtgaacaaaagccctgttactgaggccagctgcccaacctaagtgtggatgtggggcctgaggagatccctcacactcctcaccttctgcctgcctgtctgagctctggtaagcatggctttacttgggttctttttgtttgtttgtttatcttgcagaaaagtgtttgaatttcagggacatttctcttcctctatgcacatacgccagtaaatgaatatattacaagcattaggataacmacaactggcatcaataaaagctcacagaagcataaactattacattctgcaagaagtgtaatacttgcaagggccatttctaatgctgccatcctctggggtcttcaattaaggctgtttgcttctctcttcttcaagcactaataaatctacaaaagaacaactaaaacagacatcctattatattgaaaatatataacttatgtaaaatgcctgtttatccattagccaatactcaatttctcaaccctatataatccaatttgtcgccatgccccatctgcatggtgaagttcctct

SEQ ID NO: 80592 - DNA, 600 bp, Chicken  19866894373104_1
ataaatctaacatcttttgatagcattggcaaagtctgcaagaacagtgccagggatgattatatttggagaccaaatcaacctttcactagaggaaagacttaaagattactagtatcgtgctgttagggagtcatagctacaaagtataacatcatgctgtacttaggcaaggaatgaaataaatacattttttttttttttctcagtggtatcagtttatctcaattcacatgcttttgtttaaagcaaatgttatttgttaaatttgaactaataaactgattggtttaatgtatrtaaatatacattaaatttctgatctatacaaaatataaagcaacataagagttttaaattgagtcaataaatacgatcttacacaattacttttcagttcaaagcaagaaaggtactccatacttttaaaattaagaattaggttggcctagatacatttggtttatctttaagaagcaagttaatagaactgctgctgtattctctctccactggagaagactcttctgtttgtttctttgtttgtttgtttgttttaaccatagaatcaaaaatcaatgtaagaatggtctctgggga

SEQ ID NO: 80593 - DNA, 599 bp, Chicken  19866894373114_1
  misc_feature (1)..(137): n is any nucleotide
nnnnnnnnnnnnnnnnnnnnnnnnnnnnnnnnnnnnnnnnnnnnnnnnnnnnnnnnnnnnnnnnnnnnnnnnnnnnnnnnnnnnnnnnnnnnnnnnnnnnnnnnnnnnnnnnnnnnnnnnnnnnnnnnnnnnnnnnntttatacaaaagattttgaagaggatcaaaaaaagctcctcagactgcgtttacatgtcacataaataccagcagtgctactggagccgtttctcattgactttgcaggcgctgttgcagctggagtcttttcctatgtctgatatattcatctaagatgccmaatgctttccactgtattttataatcctacttgttcagttcgaaaccaatttattcayttaaaattgtggatgcttaaaaatggccttgcttgaccactttagctttttacgttccctctgaactggaagatactaattgccatacctcttataacacagtgggatacctttaacwttttctctggaggtgcctaaattktgaagtctctggaggcctcaacccttctgcatcagagagaaagaaaacctgaggtgatgtcagctccctgtctaggcaacctcagcaaggtacatgctc

SEQ ID NO: 80594 - DNA, 599 bp, Chicken  19866894373114_2
  misc_feature (1)..(79): n is any nucleotide
nnnnnnnnnnnnnnnnnnnnnnnnnnnnnnnnnnnnnnnnnnnnnnnnnnnnnnnnnnnnnnnnnnnnnnnnnnnnnnntttatacaaaagattttgaagaggatcaaaaaaagctcctcagactgcgtttacatgtcacataaataccagcagtgctactggagccgtttctcattgactttgcaggcgctgttgcagctggagtcttttcctatgtctgatatattcatctaagatgccmaatgctttccactgtattttataatcctacttgttcagttcgaaaccaatttattcayttaaaattgtggatgcttaaaaatggccttgcttgaccactttagctttttacgttccctctgaactggaagatactaattgccatacctcttataacacagtgggatacctttaacwttttctctggaggtgcctaaattktgaagtctctggaggcctcaacccttctgcatcagagagaaagaaaacctgaggtgatgtcagctccctgtctaggcaacctcagcaaggtacatgctctgcagtgcaacaggtctaacccccagcctggggttggctcagaataacaggagagtga

SEQ ID NO: 80595 - DNA, 600 bp, Chicken  19866894373114_3
tcagactgcgtttacatgtcacataaataccagcagtgctactggagccgtttctcattgactttgcaggcgctgttgcagctggagtcttttcctatgtctgatatattcatctaagatgccmaatgctttccactgtattttataatcctacttgttcagttcgaaaccaatttattcayttaaaattgtggatgcttaaaaatggccttgcttgaccactttagctttttacgttccctctgaactggaagatactaattgccatacctcttataacacagtgggatacctttaacwttttctctggaggtgcctaaattktgaagtctctggaggcctcaacccttctgcatcagagagaaagaaaacctgaggtgatgtcagctccctgtctaggcaacctcagcaaggtacatgctctgcagtgcaacaggtctaacccccagcctggggttggctcagaataacaggagagtgacttttccccagmrcactgctgcatgtcagatagcctggggtaactatctatggaggcactcctgatctatgtcctttccaaggtagcatcttgctgtaggttagcgtaaagccaatgag

SEQ ID NO: 80596 - DNA, 600 bp, Chicken  19866894373114_4
aaataccagcagtgctactggagccgtttctcattgactttgcaggcgctgttgcagctggagtcttttcctatgtctgatatattcatctaagatgccmaatgctttccactgtattttataatcctacttgttcagttcgaaaccaatttattcayttaaaattgtggatgcttaaaaatggccttgcttgaccactttagctttttacgttccctctgaactggaagatactaattgccatacctcttataacacagtgggatacctttaacwttttctctggaggtgcctaaattktgaagtctctggaggcctcaacccttctgcatcagagagaaagaaaacctgaggtgatgtcagctccctgtctaggcaacctcagcaaggtacatgctctgcagtgcaacaggtctaacccccagcctggggttggctcagaataacaggagagtgacttttccccagmrcactgctgcatgtcagatagcctggggtaactatctatggaggcactcctgatctatgtcctttccaaggtagcatcttgctgtaggttagcgtaaagccaatgagggctaagttaactcaaattatggt

SEQ ID NO: 80597 - DNA, 600 bp, Chicken  19866894373114_5
gatgcttaaaaatggccttgcttgaccactttagctttttacgttccctctgaactggaagatactaattgccatacctcttataacacagtgggatacctttaacwttttctctggaggtgcctaaattktgaagtctctggaggcctcaacccttctgcatcagagagaaagaaaacctgaggtgatgtcagctccctgtctaggcaacctcagcaaggtacatgctctgcagtgcaacaggtctaacccccagcctggggttggctcagaataacaggagagtgacttttccccagmrcactgctgcatgtcagatagcctggggtaactatctatggaggcactcctgatctatgtcctttccaaggtagcatcttgctgtaggttagcgtaaagccaatgagggctaagttaactcaaattatggtgtatttgctgtgcactcagagtgtgcggatagaccagctgatgtatgggaacttacttacctgatgtaatttgttgtttgtgtgcctgagcccttgtagtctacagtaatgaggttttaaaaagatggatgcttcctcagctccaaggtctcttggaaaagttgtgtat

SEQ ID NO: 80598 - DNA, 600 bp, Chicken  19866894373114_6
atgcttaaaaatggccttgcttgaccactttagctttttacgttccctctgaactggaagatactaattgccatacctcttataacacagtgggatacctttaacwttttctctggaggtgcctaaattktgaagtctctggaggcctcaacccttctgcatcagagagaaagaaaacctgaggtgatgtcagctccctgtctaggcaacctcagcaaggtacatgctctgcagtgcaacaggtctaacccccagcctggggttggctcagaataacaggagagtgacttttccccagmrcactgctgcatgtcagatagcctggggtaactatctatggaggcactcctgatctatgtcctttccaaggtagcatcttgctgtaggttagcgtaaagccaatgagggctaagttaactcaaattatggtgtatttgctgtgcactcagagtgtgcggatagaccagctgatgtatgggaacttacttacctgatgtaatttgttgtttgtgtgcctgagcccttgtagtctacagtaatgaggttttaaaaagatggatgcttcctcagctccaaggtctcttggaaaagttgtgtatt

SEQ ID NO: 80599 - DNA, 600 bp, Chicken  19866894373127_1
aatgtcacccatctcagtcagacacatttgcaagctggtatgaacccagcagattacctgtggcccaacttcttgctacagtggtaatactcagggtttcactgccaggttctgcctctttacagaagtaatagcatattattaggttttatacaccaactagttctcagctcttggtcatcatcatactactccatattacaatacctctgtttttttatcatattctggtttgggatcaaacacagatctttattccatctcaaaaattaggtctttttcccttttcctttctgagtmtttttccactctgttgtgtcacataatcttcatcaaaataaatttccacagacaataaacacgtttaaaagacaatcttaaattctattgtaaaatctgtaggcaaatcatgtgacatactaaatctttatggactagaaacctaaaaatacattgttaattttctgtctttctccctcttcagctttttgagagatttttagtgatcacgtaggagtgccttaaaggatataaaattccacactcttatttcttatgcttcttttaacctcataactatttaaaacattttakgttttc

SEQ ID NO: 80600 - DNA, 600 bp, Chicken  19866894373127_2
tgagtmtttttccactctgttgtgtcacataatcttcatcaaaataaatttccacagacaataaacacgtttaaaagacaatcttaaattctattgtaaaatctgtaggcaaatcatgtgacatactaaatctttatggactagaaacctaaaaatacattgttaattttctgtctttctccctcttcagctttttgagagatttttagtgatcacgtaggagtgccttaaaggatataaaattccacactcttatttcttatgcttcttttaacctcataactatttaaaacattttakgttttcctcatctcccctctgcaaaaactatttctgctaacaacaaagatttatttctgtctttctggaaggtgccttttatttctgaagttttggtgcctgcagtgtgcaggactgcaggcaccctcctgacttgagtaatcctccttgattttttgaaggcttggacatcggtagggacacagtacttcaatgtacacttctgccagtgaaggcaaaattatatttcatgtccatagaaaagaccctttatgagctgatggagatggtcttttggctaacataagtgaaatctgctca

SEQ ID NO: 80601 - DNA, 599 bp, Chicken  19866894373136_1
  misc_feature (1)..(64): n is any nucleotide
nnnnnnnnnnnnnnnnnnnnnnnnnnnnnnnnnnnnnnnnnnnnnnnnnnnnnnnnnnnnnnnntttctgtgtccagaatatttacaaaattaattaatttccttaagtacacttaaaaagagattttgttatttaaacttcagctgcattgttgaatttgtcctgatataaccagatgaccataacacaattcttcatctgttccaagcctgcaaaatgagaagtgaaaagcattttccttttaaaccagagtgaacaaattaaatggccagaaagaaagctcttattcggagcatagrgtatatgtggtggctgatgctgtttattttaaatttgtttttgttgcatggctctaaataatatcatttcagatgctacacacactgttataaagtcactggagaactctcttcccatgggagaaaatgccatttaaagtgtttatgtttccactggtgttggcttagatcatcttttctttgacctgatctgctggttgcaaagggtgcagtacttgatcccagcttctggacatagtgagaggagaccagacagcagtcaaaccccacagcctgaggtgcttactggcaaagtcaaa

SEQ ID NO: 80602 - DNA, 600 bp, Chicken  19866894373136_10
atggtagatctgtcctttttctcccctgtgaaatatggaaatgtgcctacaaagatttgtgaaaataaacagcattctttgccaaagaaaacagaagttgaaaatgtcctggttttatatttatatggattatattccatyccctccagaaatgtatcattttttatcttaaagacatgtgaactataaagcaaagtattgttcaaatgtgtagtttaaatggaactttcatctgttatgtcactttaaggcttcttgagggaacaggctgtaagttgctattggcaaaccttaaaagayggaaggcaaaaaatatgttatttattgactgtagactgtgtgtttagccctgaacaacagagggagcaaaacatactgcttcccaggagagtttatgttaggtggtataatataagcacacaaatttctttcagatcaactacaggcctggcttcaacaaggtgttaaagtatagggtgcacagtaggcattcaatttgtagtgcagtatcttgggaagttgtggtgggaaaatatatattaaagagggatttgaaaaagcaagggcataaaggggagcagatacataasgagatggttt

SEQ ID NO: 80603 - DNA, 600 bp, Chicken  19866894373136_11
cttaaaagayggaaggcaaaaaatatgttatttattgactgtagactgtgtgtttagccctgaacaacagagggagcaaaacatactgcttcccaggagagtttatgttaggtggtataatataagcacacaaatttctttcagatcaactacaggcctggcttcaacaaggtgttaaagtatagggtgcacagtaggcattcaatttgtagtgcagtatcttgggaagttgtggtgggaaaatatatattaaagagggatttgaaaaagcaagggcataaaggggagcagatacataasgagatggtttgaagactaagagtccactgagacaacacttttcaagtacttaagtgttttttggtattgaacgttccttagcaagtgcaaacatttcacattctttctacactctggtagtagcttgtgagaaatctctctgctctatgatttatacatctgttatactactgagcaaaggggtacatattaaaaatacatatatttgcatggatctgaatttatttgcataaaattatctggttttattgctcatttgttggctatgtgcctgtcagacttccaggtttgaactgcttt

SEQ ID NO: 80604 - DNA, 600 bp, Chicken  19866894373136_2
agtacttgatcccagcttctggacatagtgagaggagaccagacagcagtcaaaccccacagcctgaggtgcttactggcaaagtcaaacagaatatacttttctctgctgtctatgtccttcagcagctgctggtagcatgattctcattttacagaaggaagtatctgcctcagaggaaaacctctaaattagttagctactaatccaaggctgcgctgcttttaactttgtccttttccagggaggtctagttattcctcatcttgggggattcactttatttcagatactactgtytttaacttgttggggcttcttagtcagattctttgttgaatatgtgaaaatcttttctgaatatatgaatatgaagatttttctgcatagaatagtgaagtataatgatagttgaagttgatagcgtagaaaatatcttttggaagaaagacaaattggacaaagtatacttttgcttctctgatctattttctgctgacaaatatgcagactttttggctcctgccaggaacctccagtgtttcccatcttccttttctgttctccatcctagtgagcatgccccaagtgggctctcat

SEQ ID NO: 80605 - DNA, 600 bp, Chicken  19866894373136_3
tcatgtttttgaaaggtttgcttggaactgatgcattaacacatttgtcagtgtgattttttgagaggtggtgggactgcagccctcttcaccccctccagaaaatccatatctgcaccaaacacatccctcgcacaacctcccccaaatcaggcttctggaacccaattggcacagaacaatgatctgatatgagagaagaggtttttagttttgcaactatgaatacgtaatataagctttaggagccagggatgctaatccacattaatcatccaaacattttcatgaacccatatwgttgattgactgaaatcaatttataattcactgaaatcccttgacagcagaaaggtgcttggtgtataaataacagctgatgtgtcttctgtatattaaagcagagctgactgagtaacagggaaatgagaagtgcattaatcagaataaaatgatgtttcctttttgtgtcaaattaactggtatatttacctcaaaatttttactaatctatatgtctagaaaagtatgcattatttgagagaaaaacagcaaagaaacagatttagaccagcaaaacataatggtaaggtagcatat

SEQ ID NO: 80606 - DNA, 600 bp, Chicken  19866894373136_4
tgaagtattatttttttttacataagaaataggacagaacaacagacaacagctttcagctacttctttcccatataaccttctggactcaaggaaccaggcaatttaatctaatatttggtttatttcctccaaaggaaggatgaagaacactaataaatgcagtggttccacatttacagatgataatcattcctcttttctgtttttcacccttttggaagttcctgtggctagtcctgtttttccacccatctttccatctgcctgaggctggcctctccattgcactcactcacyggtttatgtggaagagttccttgaaaagacctggtttaaggaaatagaaaaagacacattgccactttttgcaaagaaaaatcaaaaggtatgctttccttggctccttcatatagacattatttttgttcttattttcycattcctataattgaaagagrcattttatatgctgaaaactgttggcatttcagcaagtttcttgaagcaaaacraccaagacacacacaacaaataacggataacactggactgcaattcatttggacaattacacataaatacattaagggaaatcac

SEQ ID NO: 80607 - DNA, 600 bp, Chicken  19866894373136_5
ggatgaagaacactaataaatgcagtggttccacatttacagatgataatcattcctcttttctgtttttcacccttttggaagttcctgtggctagtcctgtttttccacccatctttccatctgcctgaggctggcctctccattgcactcactcacyggtttatgtggaagagttccttgaaaagacctggtttaaggaaatagaaaaagacacattgccactttttgcaaagaaaaatcaaaaggtatgctttccttggctccttcatatagacattatttttgttcttattttcycattcctataattgaaagagrcattttatatgctgaaaactgttggcatttcagcaagtttcttgaagcaaaacraccaagacacacacaacaaataacggataacactggactgcaattcatttggacaattacacataaatacattaagggaaatcacatcatttcccagagagttttcagcaagaaaaatagaaaaaaatacttggctcmgtagagaaattgcttatccagctctagtagtaacacatttaagagattaatttcttctgttgaaagctcttccgcaatggtagatct

SEQ ID NO: 80608 - DNA, 600 bp, Chicken  19866894373136_6
gcagtggttccacatttacagatgataatcattcctcttttctgtttttcacccttttggaagttcctgtggctagtcctgtttttccacccatctttccatctgcctgaggctggcctctccattgcactcactcacyggtttatgtggaagagttccttgaaaagacctggtttaaggaaatagaaaaagacacattgccactttttgcaaagaaaaatcaaaaggtatgctttccttggctccttcatatagacattatttttgttcttattttcycattcctataattgaaagagrcattttatatgctgaaaactgttggcatttcagcaagtttcttgaagcaaaacraccaagacacacacaacaaataacggataacactggactgcaattcatttggacaattacacataaatacattaagggaaatcacatcatttcccagagagttttcagcaagaaaaatagaaaaaaatacttggctcmgtagagaaattgcttatccagctctagtagtaacacatttaagagattaatttcttctgttgaaagctcttccgcaatggtagatctgtcctttttctcccctgtgaa

SEQ ID NO: 80609 - DNA, 600 bp, Chicken  19866894373136_7
ttttggaagttcctgtggctagtcctgtttttccacccatctttccatctgcctgaggctggcctctccattgcactcactcacyggtttatgtggaagagttccttgaaaagacctggtttaaggaaatagaaaaagacacattgccactttttgcaaagaaaaatcaaaaggtatgctttccttggctccttcatatagacattatttttgttcttattttcycattcctataattgaaagagrcattttatatgctgaaaactgttggcatttcagcaagtttcttgaagcaaaacraccaagacacacacaacaaataacggataacactggactgcaattcatttggacaattacacataaatacattaagggaaatcacatcatttcccagagagttttcagcaagaaaaatagaaaaaaatacttggctcmgtagagaaattgcttatccagctctagtagtaacacatttaagagattaatttcttctgttgaaagctcttccgcaatggtagatctgtcctttttctcccctgtgaaatatggaaatgtgcctacaaagatttgtgaaaataaacagcattctttgccaaa

SEQ ID NO: 80610 - DNA, 600 bp, Chicken  19866894373136_8
acacattgccactttttgcaaagaaaaatcaaaaggtatgctttccttggctccttcatatagacattatttttgttcttattttcycattcctataattgaaagagrcattttatatgctgaaaactgttggcatttcagcaagtttcttgaagcaaaacraccaagacacacacaacaaataacggataacactggactgcaattcatttggacaattacacataaatacattaagggaaatcacatcatttcccagagagttttcagcaagaaaaatagaaaaaaatacttggctcmgtagagaaattgcttatccagctctagtagtaacacatttaagagattaatttcttctgttgaaagctcttccgcaatggtagatctgtcctttttctcccctgtgaaatatggaaatgtgcctacaaagatttgtgaaaataaacagcattctttgccaaagaaaacagaagttgaaaatgtcctggttttatatttatatggattatattccatyccctccagaaatgtatcattttttatcttaaagacatgtgaactataaagcaaagtattgttcaaatgtgtagtttaaatgga

SEQ ID NO: 80611 - DNA, 600 bp, Chicken  19866894373136_9
attacacataaatacattaagggaaatcacatcatttcccagagagttttcagcaagaaaaatagaaaaaaatacttggctcmgtagagaaattgcttatccagctctagtagtaacacatttaagagattaatttcttctgttgaaagctcttccgcaatggtagatctgtcctttttctcccctgtgaaatatggaaatgtgcctacaaagatttgtgaaaataaacagcattctttgccaaagaaaacagaagttgaaaatgtcctggttttatatttatatggattatattccatyccctccagaaatgtatcattttttatcttaaagacatgtgaactataaagcaaagtattgttcaaatgtgtagtttaaatggaactttcatctgttatgtcactttaaggcttcttgagggaacaggctgtaagttgctattggcaaaccttaaaagayggaaggcaaaaaatatgttatttattgactgtagactgtgtgtttagccctgaacaacagagggagcaaaacatactgcttcccaggagagtttatgttaggtggtataatataagcacacaaatttctttcagatcaact

SEQ ID NO: 80612 - DNA, 593 bp, Chicken  19866894373138_1
tgaaatggcagtgcacaggaccagctcatgaaaagaaacatctggtacaaccctgagcacatacttggaggccagaaggtggcatctgtttgtttgttcagacactcttccttagagatctctgtgtcatgattaaatcccaatgttgacttaacagagcaccaagcaccacggctgcatggcggcatttgcagaggacagccaccaatagactgaaggctgttgccttctgcacctctcctccaggtgggaggtgtgatctcacagaatcataggaaggtttgagttggaagggacctstaatggccatctggtccaactccctgcaataaacagggacacctacagctccatcagactctcagagacccatccagcctgaccttgagtgtctccagggatggggaatccatcacctctctgggtaacctgttccagggcctcaccacccttactgtaaggaactttttccttatatacagtctaaattaaccctcttttagtttgaaaccaaatgtcattgctattgctcacagtaacattaccacaaagtactgcttgtacagagacccctttggcctatgctctttcaa

SEQ ID NO: 80613 - DNA, 600 bp, Chicken  19866894373155_1
attccccacacagtgtctccagagcaaaatagtcataaactctaaagcagatgtccccgggataatgatccttttcccaagcagtacagaaacatacaacttctccataattttctcagcatcatgggaatggctaggtgaagcaggtatgactcgttaatgactagaccattagtattatgttcactggggactggtagttctttttaaccaattgtttagattcttggcatgccaaaattgatctctgtaaatttacatgataaaatcggtaaattttttaaccttgcaatagaacaraccaagaattatggtctacaatattcatcatacttttctattcctatctccatagatctttaaacctccatttaacatgataacaagaggatgttgttaaacttatatatgagcctgaaggaaaggagcagagctgagaccttggctctttcaggctcagagaaaaccattctaagcctagaggattcacaatctgctaacacttattagacaatcctacagtattgggcaattgtggaacttgtttcattacagtgtggagattcctttctcattctttgacagttgaactgtagcaat

SEQ ID NO: 80614 - DNA, 600 bp, Chicken  19866894373161_1
acacattttaaaatatgattgccaggttcagacattgcaacatacagtacatagtgacataacattgcagtagagccaaagtccagaggcaggctagagtgggtgctttcctttgttgattatataatttgaaaagggttttgttccttcagagccaccaaatgcaaaggcaaggctaatattataattttgcctgttctgtagtagtaggctgagttcgtaggggtcatggctttaaagaaagtagtggaaaacaacaactgtgtttgcaaacctttatgtgtaacttcataaaaggcygagaaaagccatgaagrtttcttgtagtattgaacattaacatgaaagggctatgagatctctactctctgtattatttaagtagctgttaaccaaccatgtactgtacaagaaagggataggttttcttctgttgaagcctacagcaaatgagcaaactgagtcaaatgggagaactaccatttctcctagaattttggaagctttaggctgtacgatctacttatgggcaattaaattttaaatagtttgcagcatgtcctgtaacatattttcatggtcatactctaactttgctat

SEQ ID NO: 80615 - DNA, 600 bp, Chicken  19866894373161_2
attgccaggttcagacattgcaacatacagtacatagtgacataacattgcagtagagccaaagtccagaggcaggctagagtgggtgctttcctttgttgattatataatttgaaaagggttttgttccttcagagccaccaaatgcaaaggcaaggctaatattataattttgcctgttctgtagtagtaggctgagttcgtaggggtcatggctttaaagaaagtagtggaaaacaacaactgtgtttgcaaacctttatgtgtaacttcataaaaggcygagaaaagccatgaagrtttcttgtagtattgaacattaacatgaaagggctatgagatctctactctctgtattatttaagtagctgttaaccaaccatgtactgtacaagaaagggataggttttcttctgttgaagcctacagcaaatgagcaaactgagtcaaatgggagaactaccatttctcctagaattttggaagctttaggctgtacgatctacttatgggcaattaaattttaaatagtttgcagcatgtcctgtaacatattttcatggtcatactctaactttgctatagtgctgtatcagtatt

SEQ ID NO: 80616 - DNA, 599 bp, Chicken  19866894373167_1
  misc_feature (1)..(95): n is any nucleotide
nnnnnnnnnnnnnnnnnnnnnnnnnnnnnnnnnnnnnnnnnnnnnnnnnnnnnnnnnnnnnnnnnnnnnnnnnnnnnnnnnnnnnnnnnnnnnnngatgcttgcatagtgtcttaaaaattaaaaataaattacaggaggctgtttaaaaaaaaaaaaaaaaagcctgcgttaaactattgtttggttttaaaactgtcccccatttcctcaatatatcacagaacccagaagcaaggcaaaagattttaggtcaaattaaacatttcaggtcaaagactttgtttgtgaagtctgtctraagaatacaaactttcactttaggattagtctgaaataattttgggcaggttttttctttctttccatggaagtggaaaggaaaagaccctcttttaattgttcagtgctagaagtgtttgtgccaggccacycatctccagctgcagttcagcctgggtttgaggactgaaatgctccctatagcctgagcctcccagagcagcttgtccctggggcaatgcagtgttccatgtgggatgtgtgtagggttttagggctcctcacgcaggtgtgagcaagccagatcctcagggagaa

SEQ ID NO: 80617 - DNA, 600 bp, Chicken  19866894373167_2
caggaggctgtttaaaaaaaaaaaaaaaaagcctgcgttaaactattgtttggttttaaaactgtcccccatttcctcaatatatcacagaacccagaagcaaggcaaaagattttaggtcaaattaaacatttcaggtcaaagactttgtttgtgaagtctgtctraagaatacaaactttcactttaggattagtctgaaataattttgggcaggttttttctttctttccatggaagtggaaaggaaaagaccctcttttaattgttcagtgctagaagtgtttgtgccaggccacycatctccagctgcagttcagcctgggtttgaggactgaaatgctccctatagcctgagcctcccagagcagcttgtccctggggcaatgcagtgttccatgtgggatgtgtgtagggttttagggctcctcacgcaggtgtgagcaagccagatcctcagggagaaaggaggctctgggtggctttgctggtgtcttcactgcaggctccactctagaccyggggttacctatgcttgtgtcyaggcttcacccttgctttgattcagttcatttatttattactcattcatgacctgag

SEQ ID NO: 80618 - DNA, 584 bp, Chicken  19866894373167_3
ttctttctttccatggaagtggaaaggaaaagaccctcttttaattgttcagtgctagaagtgtttgtgccaggccacycatctccagctgcagttcagcctgggtttgaggactgaaatgctccctatagcctgagcctcccagagcagcttgtccctggggcaatgcagtgttccatgtgggatgtgtgtagggttttagggctcctcacgcaggtgtgagcaagccagatcctcagggagaaaggaggctctgggtggctttgctggtgtcttcactgcaggctccactctagaccyggggttacctatgcttgtgtcyaggcttcacccttgctttgattcagttcatttatttattactcattcatgacctgagcatgtttctcagtcagtactgtgtgctgtgctgtcagtgctaaggtcactaaagctccacaactgcccagcctctgtactagctggtggccatgctctccatggccagcttggtgagtgctggctcagtgaggtttctacagcaagctccaycacgtggtatgaacaatttggaggaaaaaatgagtctgatgttatccctgtgt

SEQ ID NO: 80619 - DNA, 562 bp, Chicken  19866894373167_4
aaaggaaaagaccctcttttaattgttcagtgctagaagtgtttgtgccaggccacycatctccagctgcagttcagcctgggtttgaggactgaaatgctccctatagcctgagcctcccagagcagcttgtccctggggcaatgcagtgttccatgtgggatgtgtgtagggttttagggctcctcacgcaggtgtgagcaagccagatcctcagggagaaaggaggctctgggtggctttgctggtgtcttcactgcaggctccactctagaccyggggttacctatgcttgtgtcyaggcttcacccttgctttgattcagttcatttatttattactcattcatgacctgagcatgtttctcagtcagtactgtgtgctgtgctgtcagtgctaaggtcactaaagctccacaactgcccagcctctgtactagctggtggccatgctctccatggccagcttggtgagtgctggctcagtgaggtttctacagcaagctccaycacgtggtatgaacaatttggaggaaaaaatgagtctgatgttatccctgtgt

SEQ ID NO: 80620 - DNA, 353 bp, Chicken  19866894373167_5
atcctcagggagaaaggaggctctgggtggctttgctggtgtcttcactgcaggctccactctagaccyggggttacctatgcttgtgtcyaggcttcacccttgctttgattcagttcatttatttattactcattcatgacctgagcatgtttctcagtcagtactgtgtgctgtgctgtcagtgctaaggtcactaaagctccacaactgcccagcctctgtactagctggtggccatgctctccatggccagcttggtgagtgctggctcagtgaggtttctacagcaagctccaycacgtggtatgaacaatttggaggaaaaaatgagtctgatgttatccctgtgt

SEQ ID NO: 80621 - DNA, 600 bp, Chicken  19866894373169_1
tcctgctgccacagagcagcccggctgtgggagatggatggctgcagctgagccggctccctgccctcccctctcccttagcagcagtgagaggggccgatggtccccgggctgtgcagtgctgtggggtgggaggtgacagagagcttagcagagccccaaggcttagcagccgtcccagccaccctggatgcaccgcactgccctgagcacactgcgagctcctgccaaaccctgctctgttctgaatgacagctttaccgaaccttggtttggctgtcacagctttcccattttgcygtgctcaggcagccgygagcctctgcatctccatcaatgcagtgccagatgagaagtggcagccagatgctggaggacctgtcccccctcagtgcctttttgctcttttccaggacgtgatgccctggaggagcccgagggggatccaacccttgtgtgcatggagcaggagggtgggaacacacagctctacagggctttgcagcctgagatgcacacacaggtgctccagcccagcaggatcctctctgtgcactgagatgctgatatcagacccatgcgtgcatctctcctgcgtgc

SEQ ID NO: 80622 - DNA, 600 bp, Chicken  19866894373169_2
cagcccggctgtgggagatggatggctgcagctgagccggctccctgccctcccctctcccttagcagcagtgagaggggccgatggtccccgggctgtgcagtgctgtggggtgggaggtgacagagagcttagcagagccccaaggcttagcagccgtcccagccaccctggatgcaccgcactgccctgagcacactgcgagctcctgccaaaccctgctctgttctgaatgacagctttaccgaaccttggtttggctgtcacagctttcccattttgcygtgctcaggcagccgygagcctctgcatctccatcaatgcagtgccagatgagaagtggcagccagatgctggaggacctgtcccccctcagtgcctttttgctcttttccaggacgtgatgccctggaggagcccgagggggatccaacccttgtgtgcatggagcaggagggtgggaacacacagctctacagggctttgcagcctgagatgcacacacaggtgctccagcccagcaggatcctctctgtgcactgagatgctgatatcagacccatgcgtgcatctctcctgcgtgcagccctacggaaggga

SEQ ID NO: 80623 - DNA, 600 bp, Chicken  19866894373175_1
gaaagcagcactgttgtgctcaggtcactttgccagggctctacggactctgtttgcagaagtaaaatctaaaggtgaaccacaatgtaaccaagccttctggtcctgaacagcaggggaaagggaaagctctccactgacttacgagagtcgcccctggttcctcgaaccacggctcagttttgcatagagtccaacaaaaaaaaaaccactccaatcgcccatctctattttcagatggaaagcctatggtaaagaaggacctgaggggttatttaccatctgtacagggtgaagagmacgaacaggagcagctgaaatctgttcggtctgcaggatgggctctgtaggacagtgagagtgaggtgccacaggcagccctgggctggaaagcactgtgtgctcacagctgcacagagcaacgagatggagcacagccacaacacgcgttgtcccatctcatgtgtgaaaatgtgggtggaaaagtcaaaccaaagcgaagagctgaagcacagtgaaaataagtgctacggtggaaagacctgtgaagccttaagcatcctgtgctgatgagatcatgcagcctttgaccgtacaggc

SEQ ID NO: 80624 - DNA, 600 bp, Chicken  19866894373199_1
catatggtacctacacatgggacctgtgctatacatttctgcacagaaagtttcaaattacaagctttttaagaaattgtactcttcctgtactctacccccaacgactgctcacaaatgtgcatgctgacaaaaagcaatgacatgattaagacatgactgtgaggtaagggttatttttccctggtaagagaggtcttatgagagtctggtaatgagacatgatcagatttttgaattgaatatctgattgcaactcaatacattacatttgaaaatttgcagttaatgtatttatawaaaatcaaaatgttgtcacaataataaattgacggattattttattattttttttaatcttgaaccttttctcaaactcctttatcaaaatgtaaagcaaagcagcttacattttacagtgtatttagccaatgtatcaaaaatgcatataattatttgctgttacctgacttggcactgcacagcactgccctccccattgcactgcactgccatggtgtcagttgacacagtgtattaaccagtgtatagtgcactgatggtttgattattgttgagtgatgagtgcatgcctggggc

SEQ ID NO: 80625 - DNA, 600 bp, Chicken  19866894373202_1
agatgaagtttagaaatgcagtgagggaactcagctctccttgaagaggaattcctgacttcccagaataaaatggcagtgtttagaaacccaaactcggcaatatttaccctggtgaaaacccagttttgagtgtgatgtgacagagctctgcctggctgcctttctgagtagggtggaaaatacatttgtctgcaaaatctgtgcatcaggaagcgacttgcagaggtgttgtttttccttgggagaagatggtcagttatcactgtatacaaatacaaatgaaactcacgctaagcrcagtgcaaacaaaccctgctttaagcatttgcagtcaatgcagacaagatgtaggtgaattattgtcttcattttgagaacgaagaactgttacactggcagaataagtgacttgccatgaatcaagaaggcagtctctggcagagccaagaataagatccagatcccactaaaacaacctaaccaggaacatccttcccactgaacagtttaattaacataaattaagcagcaagytgacacaacatgttcttaatttttcatgtgtacttcagagaacacaataattgcattttgtaa

SEQ ID NO: 80626 - DNA, 600 bp, Chicken  19866894373202_2
ttccttgggagaagatggtcagttatcactgtatacaaatacaaatgaaactcacgctaagcrcagtgcaaacaaaccctgctttaagcatttgcagtcaatgcagacaagatgtaggtgaattattgtcttcattttgagaacgaagaactgttacactggcagaataagtgacttgccatgaatcaagaaggcagtctctggcagagccaagaataagatccagatcccactaaaacaacctaaccaggaacatccttcccactgaacagtttaattaacataaattaagcagcaagytgacacaacatgttcttaatttttcatgtgtacttcagagaacacaataattgcattttgtaatctaaaaataaacacacgtctgtcaraaaaataacaggcatgaaggaaaaatagcttggtgctttattatatttggtgtgaagtcctttgttaggactaaaatcgtgatgtgatgtgatgcaaaggaagaaggcaaagaaccctctccttctgtgctagtttattgggattaaagataatccttcttttaagtctgtactgtctgaatgccagggctgtgtgtacacagaagagcca

SEQ ID NO: 80627 - DNA, 600 bp, Chicken  19866894373202_3
atttgcagtcaatgcagacaagatgtaggtgaattattgtcttcattttgagaacgaagaactgttacactggcagaataagtgacttgccatgaatcaagaaggcagtctctggcagagccaagaataagatccagatcccactaaaacaacctaaccaggaacatccttcccactgaacagtttaattaacataaattaagcagcaagytgacacaacatgttcttaatttttcatgtgtacttcagagaacacaataattgcattttgtaatctaaaaataaacacacgtctgtcaraaaaataacaggcatgaaggaaaaatagcttggtgctttattatatttggtgtgaagtcctttgttaggactaaaatcgtgatgtgatgtgatgcaaaggaagaaggcaaagaaccctctccttctgtgctagtttattgggattaaagataatccttcttttaagtctgtactgtctgaatgccagggctgtgtgtacacagaagagccaaatgctggaaaccttaagcacagatcctgtcaaatctgccacatcctcagtctgcttaatgatgttcagtgtgcaggaggcagagctga

SEQ ID NO: 80628 - DNA, 600 bp, Chicken  19866894373208_1
gaccggtcccatctgggacagagagctgcactgtgtggcaaatgaatccaggctctcctcctgccccatggggacccctcaggaccaaccctgcacccagacaagcactgctgccgtcagctgcacacgtaagtgctcagggaaggctgttggatgctgagtgtgtgccagggacagggacagggctgtgttgagtgtgaggtcaggagggtgaagtggtattttgtagccctaaggcagtgctgaaggaggaggcttcatgttgtccctttggcctctcctccgtctcctgagggaacsagagcacaaatcactcycctccatcctcctctgtcctcaattcacagggttcaggctggtgaatggcagcacggcgtgcatgggcagggtggaagtggaggtgcagggaacatggggcaccctttgtgcctcccgctgggacctcttggacgcccacgttctctgccatcaactcggatgtgggtttgcggtgtccgttcctgaaggagggcattttgggagaggaaccggcccggtctggagtgattcattccattgtaaggggactgagtccagcctggatcagtgctcagtgaccgc

SEQ ID NO: 80629 - DNA, 600 bp, Chicken  19866894373208_2
acagagagctgcactgtgtggcaaatgaatccaggctctcctcctgccccatggggacccctcaggaccaaccctgcacccagacaagcactgctgccgtcagctgcacacgtaagtgctcagggaaggctgttggatgctgagtgtgtgccagggacagggacagggctgtgttgagtgtgaggtcaggagggtgaagtggtattttgtagccctaaggcagtgctgaaggaggaggcttcatgttgtccctttggcctctcctccgtctcctgagggaacsagagcacaaatcactcycctccatcctcctctgtcctcaattcacagggttcaggctggtgaatggcagcacggcgtgcatgggcagggtggaagtggaggtgcagggaacatggggcaccctttgtgcctcccgctgggacctcttggacgcccacgttctctgccatcaactcggatgtgggtttgcggtgtccgttcctgaaggagggcattttgggagaggaaccggcccggtctggagtgattcattccattgtaaggggactgagtccagcctggatcagtgctcagtgaccgccctgggggcctctccgt

SEQ ID NO: 80630 - DNA, 600 bp, Chicken  19866894373216_1
ccttggtgtggttttctttatgacatttcatattatataaaaatgatttgctgttactgtcttggtgacccttgaacattactatgtaccatgatacatagtcagaactgtgtatctcaaatatatctaaagattaggaatgtagagttaagctgcagtctttcttagatgcactctttcttagagtcttagatttcttagaagctgatgtctttcttagacttttatttcaaatggcttttttacagctatgattttaattcttttttgctcttcagaattgcatttcttttcacattyttttcatataacttactctctgctggaaagaatggacgtatatttgccaaaaagaagagcagccagaaaatgaactaactagataaagcaggtttttcttatttttctccccatgagattttactaggtgagacgataaacctgtatatgccttaaagggtttcctgtggagaatacacttagcctacttgagtttttgctgtgtaatgcacttgtacatatttaatctaaatgtaccttcaattttacaaaagatagcaaaaaagctgaagtaggtagtagttttattgagaagccaat

SEQ ID NO: 80631 - DNA, 600 bp, Chicken  19866894373227_1
ccatgagccttagcagcattgtgccttcctacatagccacatccttaccagtaatgacatctgtaagtgtgtgagctcatagggggagatgcttctataaataagtagaggaaataagggaggaataaagacacctacaactgtttttcactggaccatacagatataaacaggtgataaagcaatagaggctggaaattttccagattggttaaaatgggctttggaactaccttctagtagaagctatagatagaaaagatctgaattttttttatatggtgcttgataagcttataragggtttgaacagtatgcctgccagctattccagaatgctgcaygtgactgaatttttccatttcagttctttattcctccatttaaactcacacatttctttacgaaagcacaagtaccacttaaaaccaatcaccaatttgtcagtggctgagtttgctctcggttttcatgtttacagacatgctttgtccaaaccatagaggctgcagttagaagtgagaataaagctgtttgagaagcacaacttgctctcttttacaacaaggtctctcttctagtggtttagcttaagaaaac

SEQ ID NO: 80632 - DNA, 600 bp, Chicken  19866894373227_2
ttaccagtaatgacatctgtaagtgtgtgagctcatagggggagatgcttctataaataagtagaggaaataagggaggaataaagacacctacaactgtttttcactggaccatacagatataaacaggtgataaagcaatagaggctggaaattttccagattggttaaaatgggctttggaactaccttctagtagaagctatagatagaaaagatctgaattttttttatatggtgcttgataagcttataragggtttgaacagtatgcctgccagctattccagaatgctgcaygtgactgaatttttccatttcagttctttattcctccatttaaactcacacatttctttacgaaagcacaagtaccacttaaaaccaatcaccaatttgtcagtggctgagtttgctctcggttttcatgtttacagacatgctttgtccaaaccatagaggctgcagttagaagtgagaataaagctgtttgagaagcacaacttgctctcttttacaacaaggtctctcttctagtggtttagcttaagaaaacactgaaacgttcctcctacttccacaactcatatattagcaagc

SEQ ID NO: 80633 - DNA, 600 bp, Chicken  19866894373227_3
tcacacatttctttacgaaagcacaagtaccacttaaaaccaatcaccaatttgtcagtggctgagtttgctctcggttttcatgtttacagacatgctttgtccaaaccatagaggctgcagttagaagtgagaataaagctgtttgagaagcacaacttgctctcttttacaacaaggtctctcttctagtggtttagcttaagaaaacactgaaacgttcctcctacttccacaactcatatattagcaagctgaatgggtatgttccatccatattttcaaatactattctttctrtcttggtattgatttcttttctacatatcatgtaacttccctaaggcaggtgctaaatgtttgtaaactacagtagactttaaaataggaatggacaaaattgaatgctttggcacaaaagtctttccttagaacaagctggaacttggaaaagtatttctcaagggtgtaggtttagtcaccaaaatgaagaacttctttctaaacccaaccttgttttcattacagatctcccaaagtaggctaatgtacaatttaagaaggttcaaatgttccttgtggtactcagatcaagcatgg

SEQ ID NO: 80634 - DNA, 600 bp, Chicken  19866894373234_1
agatcatttctctttgcatcccgtagtacggatgttttcttgtatttatttatttttctttacattggaaatgtgacggaggcatgaaaataataacccttagtaagactggaagccactggtttacaaaagcaatgatgagtagccaatctctgtggcatctcatcctgtctgtcttgtactttcagttagaaggttgaattaaaagtagattgctgtccacaaaacaaaaaattccaggtcagcagtaacccactgtccgaaactttaaacaactgtgaatagcagaacgatatttgytcgcttctagtttggacttctgcaactgtgtaaaagcagtgatttcacttgagctaagcattttaagactcaatcctgctgctgtggcctatggatgtcggtaggttgagggtgtctttgaattagatgtttggcactgagcgaattgctgtccagggagtcaggttttatgaggtctccactgaatttatggcatcttktcttattgggaccaactgttgtaatgtttgaaacaagagtgattgaattgttgtaacttaagcttttcatatggtgctacatatcaaactgagcacacac

SEQ ID NO: 80635 - DNA, 495 bp, Chicken  19866894373234_2
attaaaagtagattgctgtccacaaaacaaaaaattccaggtcagcagtaacccactgtccgaaactttaaacaactgtgaatagcagaacgatatttgytcgcttctagtttggacttctgcaactgtgtaaaagcagtgatttcacttgagctaagcattttaagactcaatcctgctgctgtggcctatggatgtcggtaggttgagggtgtctttgaattagatgtttggcactgagcgaattgctgtccagggagtcaggttttatgaggtctccactgaatttatggcatcttktcttattgggaccaactgttgtaatgtttgaaacaagagtgattgaattgttgtaacttaagcttttcatatggtgctacatatcaaactgagcacacacaagaaatttgaactgaatttgtatagttgttacaatcaacatttagattttgttactcccagtcacagtatttttcccaaataccaatttacgtt

SEQ ID NO: 80636 - DNA, 401 bp, Chicken  19866894373236_1
gtgctggattctgtggcactgatgtgttctccacaggtcctcgtgcggacagagctgcaggggatccggtacaagttcaatgctcccatcagcagagatgcatccaaccagtactcatggcactacaccccgtggaccaagtgctcagtgctgtgtgcaggaggtgagatttgacctggtatcagcagagggaagctctcccctggatcccatgggctgctttccatgggagctgacacaagggtttgcatcaggtcttactgtagaatcgtttgagttggaagggacctctgaaggtcrtgtaatccatctccatggctatggagagcctggatgagagtgagaatggagagcctttgaaaagmaaagtctgataatgtttcctgctgaaagctaaggcc

SEQ ID NO: 80637 - DNA, 336 bp, Chicken  19866894373236_2
ccggtacaagttcaatgctcccatcagcagagatgcatccaaccagtactcatggcactacaccccgtggaccaagtgctcagtgctgtgtgcaggaggtgagatttgacctggtatcagcagagggaagctctcccctggatcccatgggctgctttccatgggagctgacacaagggtttgcatcaggtcttactgtagaatcgtttgagttggaagggacctctgaaggtcrtgtaatccatctccatggctatggagagcctggatgagagtgagaatggagagcctttgaaaagmaaagtctgataatgtttcctgctgaaagctaaggcc

SEQ ID NO: 80638 - DNA, 600 bp, Chicken  19866894373241_1
aagatttcactacaacctcgtcttcttgatcgatggctgttttatgacagtgaagcaaccacatattagattcatctggcctagtgctttcatatttcatctgtgtatatgttgaaatgtatttgctatttgctgtgtgtagttgctattgctcttttttatctgatgaaatgttttttttttttttttccatcatgtaagggctctagaggtgggactcagctgcctaagtatgagcacacaatgttatttgagatgttttaggggttcctgttgggctgcttgctgcctctccagaargatatgaccctcacacaggccatgtgctccatgcagatgtctcacactgctgcatgcagtatgcattaccttggcacrtgtamcctaccatgtatttagtggctgtgattaaacaacacatgtatgagaactgctgaatcatgacctgaacctctgattgaccacctgaggcgagcactgagtcagctgtgggagcacaggtgaaggcaattcacctrtgagaccggaaggggtggagcctggctgcacctctcctcgacccccaattaakggttgactgccagtgaggaagaatctttt

SEQ ID NO: 80639 - DNA, 600 bp, Chicken  19866894373241_2
gcctagtgctttcatatttcatctgtgtatatgttgaaatgtatttgctatttgctgtgtgtagttgctattgctcttttttatctgatgaaatgttttttttttttttttccatcatgtaagggctctagaggtgggactcagctgcctaagtatgagcacacaatgttatttgagatgttttaggggttcctgttgggctgcttgctgcctctccagaargatatgaccctcacacaggccatgtgctccatgcagatgtctcacactgctgcatgcagtatgcattaccttggcacrtgtamcctaccatgtatttagtggctgtgattaaacaacacatgtatgagaactgctgaatcatgacctgaacctctgattgaccacctgaggcgagcactgagtcagctgtgggagcacaggtgaaggcaattcacctrtgagaccggaaggggtggagcctggctgcacctctcctcgacccccaattaakggttgactgccagtgaggaagaatcttttcctggagattgctcctcatggagtttttgtgagcctacaacaccagcgagcacctttctgattatcttttccaatgca

SEQ ID NO: 80640 - DNA, 600 bp, Chicken  19866894373241_3
gtgctttcatatttcatctgtgtatatgttgaaatgtatttgctatttgctgtgtgtagttgctattgctcttttttatctgatgaaatgttttttttttttttttccatcatgtaagggctctagaggtgggactcagctgcctaagtatgagcacacaatgttatttgagatgttttaggggttcctgttgggctgcttgctgcctctccagaargatatgaccctcacacaggccatgtgctccatgcagatgtctcacactgctgcatgcagtatgcattaccttggcacrtgtamcctaccatgtatttagtggctgtgattaaacaacacatgtatgagaactgctgaatcatgacctgaacctctgattgaccacctgaggcgagcactgagtcagctgtgggagcacaggtgaaggcaattcacctrtgagaccggaaggggtggagcctggctgcacctctcctcgacccccaattaakggttgactgccagtgaggaagaatcttttcctggagattgctcctcatggagtttttgtgagcctacaacaccagcgagcacctttctgattatcttttccaatgcagtaat

SEQ ID NO: 80641 - DNA, 600 bp, Chicken  19866894373241_4
tcagctgcctaagtatgagcacacaatgttatttgagatgttttaggggttcctgttgggctgcttgctgcctctccagaargatatgaccctcacacaggccatgtgctccatgcagatgtctcacactgctgcatgcagtatgcattaccttggcacrtgtamcctaccatgtatttagtggctgtgattaaacaacacatgtatgagaactgctgaatcatgacctgaacctctgattgaccacctgaggcgagcactgagtcagctgtgggagcacaggtgaaggcaattcacctrtgagaccggaaggggtggagcctggctgcacctctcctcgacccccaattaakggttgactgccagtgaggaagaatcttttcctggagattgctcctcatggagtttttgtgagcctacaacaccagcgagcacctttctgattatcttttccaatgcagtaatcttaccagcctaacttctctgtatactgtataacatctgtatacttactaaccatacaaacacagcatctcctttctyatcctgccatcttaacctttctccagaaacttttctgatgacgcaggagtcacattt

SEQ ID NO: 80642 - DNA, 600 bp, Chicken  19866894373241_5
tgttgggctgcttgctgcctctccagaargatatgaccctcacacaggccatgtgctccatgcagatgtctcacactgctgcatgcagtatgcattaccttggcacrtgtamcctaccatgtatttagtggctgtgattaaacaacacatgtatgagaactgctgaatcatgacctgaacctctgattgaccacctgaggcgagcactgagtcagctgtgggagcacaggtgaaggcaattcacctrtgagaccggaaggggtggagcctggctgcacctctcctcgacccccaattaakggttgactgccagtgaggaagaatcttttcctggagattgctcctcatggagtttttgtgagcctacaacaccagcgagcacctttctgattatcttttccaatgcagtaatcttaccagcctaacttctctgtatactgtataacatctgtatacttactaaccatacaaacacagcatctcctttctyatcctgccatcttaacctttctccagaaacttttctgatgacgcaggagtcacatttgttcagaaaccaaaattaaactgcttccaagctttcawgttcaggcagaacac

SEQ ID NO: 80643 - DNA, 600 bp, Chicken  19866894373241_6
ccacctgaggcgagcactgagtcagctgtgggagcacaggtgaaggcaattcacctrtgagaccggaaggggtggagcctggctgcacctctcctcgacccccaattaakggttgactgccagtgaggaagaatcttttcctggagattgctcctcatggagtttttgtgagcctacaacaccagcgagcacctttctgattatcttttccaatgcagtaatcttaccagcctaacttctctgtatactgtataacatctgtatacttactaaccatacaaacacagcatctcctttctyatcctgccatcttaacctttctccagaaacttttctgatgacgcaggagtcacatttgttcagaaaccaaaattaaactgcttccaagctttcawgttcaggcagaacactggtcagggtgtttcatgctttactttctttatctgtttacgttatcagcaactagaaaccctcatgatcatcctgggcatcacatataaacagtaaaagggatggacagtggattcagcaccagattaactgatttatttgtggaccttgggttggaggagaattttagggagtgatttgaatggggac

SEQ ID NO: 80644 - DNA, 600 bp, Chicken  19866894373241_7
cgacccccaattaakggttgactgccagtgaggaagaatcttttcctggagattgctcctcatggagtttttgtgagcctacaacaccagcgagcacctttctgattatcttttccaatgcagtaatcttaccagcctaacttctctgtatactgtataacatctgtatacttactaaccatacaaacacagcatctcctttctyatcctgccatcttaacctttctccagaaacttttctgatgacgcaggagtcacatttgttcagaaaccaaaattaaactgcttccaagctttcawgttcaggcagaacactggtcagggtgtttcatgctttactttctttatctgtttacgttatcagcaactagaaaccctcatgatcatcctgggcatcacatataaacagtaaaagggatggacagtggattcagcaccagattaactgatttatttgtggaccttgggttggaggagaattttagggagtgatttgaatggggacaatgagaagttctttgttatttgtagagttctcaggacatacatgagagcctggctgaggggcttacctgaaaatggaacctgtaagagaaagag

SEQ ID NO: 80645 - DNA, 599 bp, Chicken  19866894373245_1
  misc_feature (1)..(81): n is any nucleotide
nnnnnnnnnnnnnnnnnnnnnnnnnnnnnnnnnnnnnnnnnnnnnnnnnnnnnnnnnnnnnnnnnnnnnnnnnnnnnnnnnaacctgaggagcaaatggattggcgagatccgcaaccatctgccccgcatccctgttttggtagtggccacgcagaccgaccagcgtgacacggggccctaccgctcctcctgcatcagctccatggacggcaagcggctggcccaggatgtgcgagccaaaggctacctggagtgctcagccctcagcaaccgcggcgtgcagcaggtgttcgagtaygctgtgcggacggcagtcaatcaagccaagaggcagaacaggcggaaactcttctccattaacgagtgcaagatcttctgaggactgccggcggtggttttgcctatgttcgttgtttctgcctttgcacaaagacgctgtggcagagataatgggagcgaatcaaagacaggaggactcctgccaggaccacagtacaggtggccccagtaaaacagatgtgcactctgcctgttctgttcccctacccaacacgcatggccgctatctttaaaaacgacagatgcaggcaagggcct

SEQ ID NO: 80646 - DNA, 600 bp, Chicken  19866894373247_1
tgtatcatgtggacgtgtgtaataagaaggtgtgatgcaggtggacgttcacactgccacttctgcaaagtttgttgtctcggggttgtcgtccctgcagagacagcacagtgcacaaaggcagcgtgaaggtggccaatacaccttcctgtcctgctgcaggcacagggctgaactcactgctctcccccagctctgcaccctttgcacaccctgctgcaaatccccgacctgctgatgtgacagctgctatccaaatccaagcagcagcagctcctggggatgctgctgagtgaaackgcccyggcacggggaattactccagctctgcttcaagatgctgcagtgtaactcagcgagcatctcctgaaggttgggtggaatgtttcccaaggcaaacagcagcagcagcaagtggcaattgaaacccactgctaaccaacttawgcatgggaatgggcagaaagcatgctttgctgggctcatgaaggctctattccatggcagggcaggtttgggtgtaggaaggctgctgtggggtccagcacggtgacagcagtctttgggctgttgcaccggacacaggcagacatatgagct

SEQ ID NO: 80647 - DNA, 600 bp, Chicken  19866894373247_2
catgtggacgtgtgtaataagaaggtgtgatgcaggtggacgttcacactgccacttctgcaaagtttgttgtctcggggttgtcgtccctgcagagacagcacagtgcacaaaggcagcgtgaaggtggccaatacaccttcctgtcctgctgcaggcacagggctgaactcactgctctcccccagctctgcaccctttgcacaccctgctgcaaatccccgacctgctgatgtgacagctgctatccaaatccaagcagcagcagctcctggggatgctgctgagtgaaackgcccyggcacggggaattactccagctctgcttcaagatgctgcagtgtaactcagcgagcatctcctgaaggttgggtggaatgtttcccaaggcaaacagcagcagcagcaagtggcaattgaaacccactgctaaccaacttawgcatgggaatgggcagaaagcatgctttgctgggctcatgaaggctctattccatggcagggcaggtttgggtgtaggaaggctgctgtggggtccagcacggtgacagcagtctttgggctgttgcaccggacacaggcagacatatgagctgtgct

SEQ ID NO: 80648 - DNA, 600 bp, Chicken  19866894373247_3
cctgtcctgctgcaggcacagggctgaactcactgctctcccccagctctgcaccctttgcacaccctgctgcaaatccccgacctgctgatgtgacagctgctatccaaatccaagcagcagcagctcctggggatgctgctgagtgaaackgcccyggcacggggaattactccagctctgcttcaagatgctgcagtgtaactcagcgagcatctcctgaaggttgggtggaatgtttcccaaggcaaacagcagcagcagcaagtggcaattgaaacccactgctaaccaacttawgcatgggaatgggcagaaagcatgctttgctgggctcatgaaggctctattccatggcagggcaggtttgggtgtaggaaggctgctgtggggtccagcacggtgacagcagtctttgggctgttgcaccggacacaggcagacatatgagctgtgctcacggtgtggattacggaagtatttggggaccttttacagcagagagctctctcaccgttaattctaaaagcccctttggagctgttaggctctgctgtgtcaacacatgggaatggagattttttaaggtcttcttcttta

SEQ ID NO: 80649 - DNA, 600 bp, Chicken  19866894373251_1
ggattaaatacaaacaggcagaagccactggtcctgtatgagtgcaggctgttgttacatctgttttcagcgtgctctaaaaatgggctgcttgagttggtaagggattcggatcttgtgctacttgctctcagttcccaagagaacttcattacaaatgttgtcagcaaggtgccttgcagcctctgtggcttcgctaaagctgggcaatccagtgctgttttgaggactgtaccactgcttgctcatctcaatgttttggtcagtttttgtgtgcaggagacagggttgtttctgtcrgtgttgattcgttagttgtccaaagattgtggtttaaaaaatgagtttatctaaggggctgcagtacaggaggagtcacaagttggctgcctttgttgctcacagcatgagttttgcttgttcgasgtgtgcagcaaggtagaggatgcacccttacattgtgaacatgcctttgtcatcacacaaacaggtttcaatgtgtgtgtggaatgtttgggtttgcagcatgatggcgtttatttctggctgatgtttatagccttaaatatagctgctgctttgctgacttgattagctgag

SEQ ID NO: 80650 - DNA, 600 bp, Chicken  19866894373251_2
gctctcagttcccaagagaacttcattacaaatgttgtcagcaaggtgccttgcagcctctgtggcttcgctaaagctgggcaatccagtgctgttttgaggactgtaccactgcttgctcatctcaatgttttggtcagtttttgtgtgcaggagacagggttgtttctgtcrgtgttgattcgttagttgtccaaagattgtggtttaaaaaatgagtttatctaaggggctgcagtacaggaggagtcacaagttggctgcctttgttgctcacagcatgagttttgcttgttcgasgtgtgcagcaaggtagaggatgcacccttacattgtgaacatgcctttgtcatcacacaaacaggtttcaatgtgtgtgtggaatgtttgggtttgcagcatgatggcgtttatttctggctgatgtttatagccttaaatatagctgctgctttgctgacttgattagctgagaaagaaaaggtaaagcagcataaatcaggtaaactaggtttgaaaacatctgaaaagaaggtttcttttcagttacaagttttaaacttgctaaaatgtcaccttgcattttcagtgctgaatcca

SEQ ID NO: 80651 - DNA, 511 bp, Chicken  19866894373252_1
ctgacacaaaatacctgtctgtaattcttcctcaaatgatattcccatgcaacagcatgtgttaagtccaaagccctaagacagtactcagttacctgatctcagtgcttatagccgtgtgggttaggatgaacattttctgggtatggagttaggatgacgatgtacttgtgtgtctgaaacaaacacgagaacagatgaacttcttcaccgtttccacttatatgaacaaggacagttggcacatgactaaatgctcgcattaatctgtgtccgtgtgaagtattaattatttaggcrtgcagtaggtgagctgtgaagatcgctgctctgtagcacagcggaggactccaycagaatgccagcagcttgctgctggaacaaagctgcccagaaggatttccagtttacttctgcattctgtcattgctccatggatagcacaccatggcaaggacactggaattaatggaatcacactgcaacaccaacaggacatgctatgatcctg

SEQ ID NO: 80652 - DNA, 457 bp, Chicken  19866894373252_2
gcatgtgttaagtccaaagccctaagacagtactcagttacctgatctcagtgcttatagccgtgtgggttaggatgaacattttctgggtatggagttaggatgacgatgtacttgtgtgtctgaaacaaacacgagaacagatgaacttcttcaccgtttccacttatatgaacaaggacagttggcacatgactaaatgctcgcattaatctgtgtccgtgtgaagtattaattatttaggcrtgcagtaggtgagctgtgaagatcgctgctctgtagcacagcggaggactccaycagaatgccagcagcttgctgctggaacaaagctgcccagaaggatttccagtttacttctgcattctgtcattgctccatggatagcacaccatggcaaggacactggaattaatggaatcacactgcaacaccaacaggacatgctatgatcctg

SEQ ID NO: 80653 - DNA, 599 bp, Chicken  19866894373254_1
  misc_feature (1)..(176): n is any nucleotide
nnnnnnnnnnnnnnnnnnnnnnnnnnnnnnnnnnnnnnnnnnnnnnnnnnnnnnnnnnnnnnnnnnnnnnnnnnnnnnnnnnnnnnnnnnnnnnnnnnnnnnnnnnnnnnnnnnnnnnnnnnnnnnnnnnnnnnnnnnnnnnnnnnnnnnnnnnnnnnnnnnnnnnnnnnnnnnnnctgactgcctaaccatctgtttcattgctgccatgtcaacatttgcactggactagtattctcgttagacagcttatcagcagacaaaaagttttatgcacatgtgatcagcgaatgtttattkcagaaaataaattcactgatccacaaaatggggttctgttaggaagatgaattaatcatagaatcacagaatcacagaatggtctgggttgaaaaggacctcaaagatcatctagtttcaaccaccctgccatgggcagggttgtcaaccaccagaccaggctgtccagagcctggcacataatcatgtattttttcagccatcattgcaatgacatacatcaaattttcagttaggagtattaatgrtttgcccaataatattttttaaaagtgcttactattacatgaaattgtttt

SEQ ID NO: 80654 - DNA, 600 bp, Chicken  19866894373254_2
cttatcagcagacaaaaagttttatgcacatgtgatcagcgaatgtttattkcagaaaataaattcactgatccacaaaatggggttctgttaggaagatgaattaatcatagaatcacagaatcacagaatggtctgggttgaaaaggacctcaaagatcatctagtttcaaccaccctgccatgggcagggttgtcaaccaccagaccaggctgtccagagcctggcacataatcatgtattttttcagccatcattgcaatgacatacatcaaattttcagttaggagtattaatgrtttgcccaataatattttttaaaagtgcttactattacatgaaattgtttttgtattaactggaaaagttaataattactctttatttttctcattatgattgctactatcaatatcatttatattatttcacttacacccgcagtacacatcataatttggtatctatatctcaaataagaagaagaaatacatggggacaaatgacagtttacctgaatagtaatgcacattccagagtttctaagacaaccatactggtaaaggttttctttaaagaaatactttctgcttcgatga

SEQ ID NO: 80655 - DNA, 600 bp, Chicken  19866894373256_1
atcctttttgcctttctccagctggaggactgagcctattagctctggtgcatcaaaaaggcatccagtattaacatctgcctgggttcttcctttccccctttgacaggaccttgagttgcccagagccttaaagtggaactaccccaccttctcctttgaagtgagcataacaaaagacatcaaaaggctccccagtctctaaagctaactgtattagagaatgaactattaagctagaatacagtggctctgaagagagagaaaatacaggaccgaccgagacagatgaaacaagarcatctaaaacaaaaattactttttccttactatgtgagtgtgtggtccttttctccaacctttcctgctaattctgcaatgttcagtgtcttttcagtcaaattaactctgaaatgtccctctgggttctttggaaaccttccctccatcacctttgggctaaagaaaaacctgcttgctgctgatagcacattcctactcctctcagaaggctcccagtttgctctcttctggctgttgctgcctgctctgctctctgcgctgaagctctgccccacagagcatgctgagttcctctgg

SEQ ID NO: 80656 - DNA, 600 bp, Chicken  19866894373257_1
aattggaggcaacctagaggtggagctggtatgctaatagcatgattctaattgatcttgaaaagaatcacactatagtctcagccctaggaggtcaggttttcataactccgaacttttcaaacatggtttagagaagaaatgttgtgaagagtgataggatgctgataatcctgatagttttttatattctatcaaacacattttaaggttttctacctagcaggaaacaatttattattgaagtatgggaaaacagattatcttaactttctggagtacagtaataataataaaaaraaagaaagaaagaaaaaagaaaaaagttgcattgagataatcatttcctaaagtgcttagaagtaatgtaaaacgttagctcagtactagctttggaagaggaaaccggcggcaaactgttgctcctcagggatccattttaggatcagtgtgttagagaagcacttcgtatctttaccagaagtatcagtgtccttgttaaaggcctttatgagatgtaatttggactactgtgagctattctagtcaatcacattgagaaagattaattgaaaaaagagcagctgctaactatctggg

SEQ ID NO: 80657 - DNA, 600 bp, Chicken  19866894373257_2
caggggcaaatggtggtggtatttgcagtcctggttcccaccaatattctgttgcattttattgtcatgtgacagatggcagcagaggggcagtctgacataatggcacctgacatgaaagtgtgtatgaagcaaaggtgtgtcactgaattcctccatgcagaaagaatggcacccattgacattcattgacatttgctgaatgttggtggataccaaacagtggatgtgagcacagcgaggcagtggtggtgcattttagcagtggtgacagcagcagtgggtcacctcctcaggtgyagatagttacaagcctggcatgcaggctcctgtccattgctggcgaaaatgcacagctaatggtggtgactatgctgaaaagtagtgctttgtagctgggaatttgctctatcaaatagcgttattgtatgggaamtgttgaatcatggcctgaatctctgattgaccacctgaggcgagcgctgagtcagctgcaggggcacaggtgaatgcaatttcacctggtgacctcttagaccccaattaagggctgactcccaaggaggaaggatctctagctggagataattcttcttggag

SEQ ID NO: 80658 - DNA, 600 bp, Chicken  19866894373257_3
ggtgtgtcactgaattcctccatgcagaaagaatggcacccattgacattcattgacatttgctgaatgttggtggataccaaacagtggatgtgagcacagcgaggcagtggtggtgcattttagcagtggtgacagcagcagtgggtcacctcctcaggtgyagatagttacaagcctggcatgcaggctcctgtccattgctggcgaaaatgcacagctaatggtggtgactatgctgaaaagtagtgctttgtagctgggaatttgctctatcaaatagcgttattgtatgggaamtgttgaatcatggcctgaatctctgattgaccacctgaggcgagcgctgagtcagctgcaggggcacaggtgaatgcaatttcacctggtgacctcttagaccccaattaagggctgactcccaaggaggaaggatctctagctggagataattcttcttggagcccttctgggagcccaggacacaggtatgatctttatttcatttctcctttgtaatgcaataatctctccggtccaatacctgtatacctgtttgccatacaagcgttactgtatgctttgtgtctgttgtagttt

SEQ ID NO: 80659 - DNA, 599 bp, Chicken  19866894373258_1
  misc_feature (1)..(155): n is any nucleotide
nnnnnnnnnnnnnnnnnnnnnnnnnnnnnnnnnnnnnnnnnnnnnnnnnnnnnnnnnnnnnnnnnnnnnnnnnnnnnnnnnnnnnnnnnnnnnnnnnnnnnnnnnnnnnnnnnnnnnnnnnnnnnnnnnnnnnnnnnnnnnnnnnnnnnnnnnnngagctgtgcttctgcatgtgcttacacagctcgtggagctttgtgctggtgacagctccagctggagacatgctcagcctctcattctgtgcatgacagaaccccccaggctttgagggctggattagaagtgctgcgacttcasagtgagtgattcagttgctccgtgctgagctgctgttccatctcgttgctgcaggcggtccctgggggaggcagcacgtctctgctgtgtgactggtgtgcttaatgcacctggcctggctcagtttccagggaaatcattttaaagcatttcctcatttttgtatatccttctcatgtgtggatttgtactgcaaaagcagttttgaaagtggcagatgatattaaagcctgccatgctgtagtcagtctttttggttaaataaaattgtcagtggcacctttctgctgctgatgttt

SEQ ID NO: 80660 - DNA, 600 bp, Chicken  19866894373258_2
ttccagggaaatcattttaaagcatttcctcatttttgtatatccttctcatgtgtggatttgtactgcaaaagcagttttgaaagtggcagatgatattaaagcctgccatgctgtagtcagtctttttggttaaataaaattgtcagtggcacctttctgctgctgatgttttctgcactgaactggtagaaacctcaggcctaggtctgggaacctggtgttgctccattgaatgtaggttactgccagtttttggaatcagtaggtacaagggaaaacaccagcaccaagttaatytttaattcttgstgtgattaaatcagttgtgctgacagcgtgtttctggcatgcctgaggtaaatatttttgtagatgtgtcaaattgtttgggttttgtttaaattccagttttcatctgaatctactttgacctcagtttcaagtgaaaaacagaaccgttccatttactgttctcagactttaagcttttctctttttatgttggagaggtgttgtaaggactgcaccactgtcagggactgtgtgagcaatctagaaagcatcctccaggcgtgcaggggagagctgctgcattca

SEQ ID NO: 80661 - DNA, 600 bp, Chicken  19866894373258_3
cattttaaagcatttcctcatttttgtatatccttctcatgtgtggatttgtactgcaaaagcagttttgaaagtggcagatgatattaaagcctgccatgctgtagtcagtctttttggttaaataaaattgtcagtggcacctttctgctgctgatgttttctgcactgaactggtagaaacctcaggcctaggtctgggaacctggtgttgctccattgaatgtaggttactgccagtttttggaatcagtaggtacaagggaaaacaccagcaccaagttaatytttaattcttgstgtgattaaatcagttgtgctgacagcgtgtttctggcatgcctgaggtaaatatttttgtagatgtgtcaaattgtttgggttttgtttaaattccagttttcatctgaatctactttgacctcagtttcaagtgaaaaacagaaccgttccatttactgttctcagactttaagcttttctctttttatgttggagaggtgttgtaaggactgcaccactgtcagggactgtgtgagcaatctagaaagcatcctccaggcgtgcaggggagagctgctgcattcactatgcaggctg

SEQ ID NO: 80662 - DNA, 600 bp, Chicken  19866894373261_1
atcgccagatgttgagattgtgcagggaaaaaaaaaatatctcgctatgtcctgggctgatctgttcatccaccagcttacgtggaggcgaaggttgacaaatttctgatatcaaacccagctgtcagaacaacacggggtaatagctgtccttgtcaaacgcgccaattaattcactggactgtcaatgtggggataattgatagactccacaatctggctgagtaatgaaagtcggaagcattactaagtccacttcacctcctaagagatctcctaatgtaacctgagctgtcagcrctgtggcaagggatgcttggaaaaaaaagcaaagcaacagttttctgcaatggcaagcagagatttcataggaatccttattttaagggtagaaaaacattatgtggaggaaaaaagaagagtatgaaacagtggaataatattgtggagtgacagttttatccaaatactccctagagtgaaatggaaaatattattttaattatttctctctgggaagctctgttgtgagggtcattgttctgatgagctgtctctagaagaaaacatggccattgtcttaaggctgcggctgtcaga

SEQ ID NO: 80663 - DNA, 600 bp, Chicken  19866894373266_1
tgaaataaataaataaataaacattttgagtacaaaaagaacacattcactgatagtcacatgtgttctcagagtcagaaaaggattttcacacaggagctataagagctgatcaatagagctttaaactatttttgaagggagaaaaaggataaaaccaagttaaccagtgctaaactatgggaagatatgctaaaatttgaaggattctgtgctagtgaaatccttcagtctgctctacaaggtgctaagtacaatgaaggacatctgaagtgtttctacaccaatgcgcacaacatyaggaaaaatcaagaggaactagaagccttgtcttagtcccagagctatgacatccttgacataagtgaagatgggaagaattctgtgtctgttgtgtcacagtgaatggttctgagcaattcaggagggccaggcagggtagatgaggaagaagatgatgtgatgtgtgagggaagggctggattgtgtggagctcacagttagcagagacacagttgagagcctgtggataaggatagagagacaaacaaataaagaggatgccattacaggaggctactgcagacttctagccagaat

SEQ ID NO: 80664 - DNA, 600 bp, Chicken  19866894373268_1
tcctggaccagtgactccggtgggacatattttggtggtgattcacaggcgtggtaaaccgtgacgggctgcgggattgagtcaccctcgacacgcatggtgggaagggatggccacaggcagcaagcaccacgctgattaatcaccccaagttactaaaatcttctggtctagggaaacaggtggtgctaagggaagtcttagggggtgacaaggatggtgaccgcgctgtcttactgcatcagtcaatgtgacacttgcctctctcggtgcaaagcgacaggcaactgaaacacgggsattattttaaagaaagaagatggaaaacacagctcaggaggtggtgaacatcaattttgctacttttctttcgctctctctctctttgcagagagttttcacctgaggcggaaggagaacaaagcttttgtttttgaaagatacttattctctaggttataaaaaaacatcaaaatgatctttattctccgcatcacttgtgagccctgtctttttgtattaagggtaaggaaaagaagagacaaagggattttgtttgagtggggaataagtcatatctgagttagtatggctgatatg

SEQ ID NO: 80665 - DNA, 600 bp, Chicken  19866894373270_1
ctaaatctgcttgatttctctgtgtctttctgtgcaggttacaaaagtacgatctcttgcagcccttaggataggaacgaggtagagatcagcagaagacctggggtctgccaaggcctgctgctgcgcctctaaatctggacagttttcagcactttaccttaagtgctgcctggtccacaaagacttttcgggacggaccgggaagcgcaattccagcatctcgttaacatttggttctctcatgctctctcgaaatctttcctttgttgtcttttcctgggagaaaatgagcgcttygaagtactccagttgttttcccccgtaaaacgggagctcataccgatgtattaacctttaacatgtgatggaacgtgttagagtgagcggtgatgtgaccctgccaagggttggggcacttgaaggctttgaccaccgtgtgggaagcctgactgtatccagcctgggtagagcgagatgaaggtagatactttccaagttttattggttttctacaccctttctaacagccctgatgatgcaggaatactgtcaggtattttttaatgtaaaactaccgatttgctatgtctgtacata

SEQ ID NO: 80666 - DNA, 600 bp, Chicken  19866894373273_1
catgggtctgtccagcctatcattttggctttggtgagacaatactcagataagatgaattaccagaaaacatgcagtgaggcttccccataaaactgactttccagtaatttgtaacatcctaagtaagaaacaatctcaaatggaggcttcaatgagaatttaatgcaatcttctttcctgcctttctgctgtctaatggaaaggaattcctgcctcaaatggtgtttagaagagctgtatgactgaggaaagacttaatctatgtcttcactttctaagagtgactcttagaaatcragaatgatatagctaagacctgaatctcattacacaataacagaataactatagcttgactttatttggaaatggtcagtagagggatgattaatgtttctcagggtaatgtctcccagggacaagtcacatttctcggaggttggtattgggatcagtactatttaacaaytttgttgtcaacgtggacagtgggattaagtgcaccctcagcaagtttgcaactgtctccaagctgagtgttttggtcaacactctggaaagaagggatgcaatccatasggaccttgacstatgaag

SEQ ID NO: 80667 - DNA, 600 bp, Chicken  19866894373273_2
cttctttcctgcctttctgctgtctaatggaaaggaattcctgcctcaaatggtgtttagaagagctgtatgactgaggaaagacttaatctatgtcttcactttctaagagtgactcttagaaatcragaatgatatagctaagacctgaatctcattacacaataacagaataactatagcttgactttatttggaaatggtcagtagagggatgattaatgtttctcagggtaatgtctcccagggacaagtcacatttctcggaggttggtattgggatcagtactatttaacaaytttgttgtcaacgtggacagtgggattaagtgcaccctcagcaagtttgcaactgtctccaagctgagtgttttggtcaacactctggaaagaagggatgcaatccatasggaccttgacstatgaagaaaggttgagagagttgaggtttttcaacttggagaagagaagacttcaggtagaacttgtaccagccttccttcacataaacgggaactacaggaaagctggagagggactctttttcagacagtgcagtaacaggacaaaggctagtggttttaagtggaaagagggaag

SEQ ID NO: 80668 - DNA, 600 bp, Chicken  19866894373273_3
agtgactcttagaaatcragaatgatatagctaagacctgaatctcattacacaataacagaataactatagcttgactttatttggaaatggtcagtagagggatgattaatgtttctcagggtaatgtctcccagggacaagtcacatttctcggaggttggtattgggatcagtactatttaacaaytttgttgtcaacgtggacagtgggattaagtgcaccctcagcaagtttgcaactgtctccaagctgagtgttttggtcaacactctggaaagaagggatgcaatccatasggaccttgacstatgaagaaaggttgagagagttgaggtttttcaacttggagaagagaagacttcaggtagaacttgtaccagccttccttcacataaacgggaactacaggaaagctggagagggactctttttcagacagtgcagtaacaggacaaaggctagtggttttaagtggaaagagggaagatttaaattagacattaggaagaattcttaactcagagtgtgatgaggygctggcacaggctgctcagagaatctgtggatgccccaaccctggagctgttcaaggccag

SEQ ID NO: 80669 - DNA, 600 bp, Chicken  19866894373273_4
gaaatcragaatgatatagctaagacctgaatctcattacacaataacagaataactatagcttgactttatttggaaatggtcagtagagggatgattaatgtttctcagggtaatgtctcccagggacaagtcacatttctcggaggttggtattgggatcagtactatttaacaaytttgttgtcaacgtggacagtgggattaagtgcaccctcagcaagtttgcaactgtctccaagctgagtgttttggtcaacactctggaaagaagggatgcaatccatasggaccttgacstatgaagaaaggttgagagagttgaggtttttcaacttggagaagagaagacttcaggtagaacttgtaccagccttccttcacataaacgggaactacaggaaagctggagagggactctttttcagacagtgcagtaacaggacaaaggctagtggttttaagtggaaagagggaagatttaaattagacattaggaagaattcttaactcagagtgtgatgaggygctggcacaggctgctcagagaatctgtggatgccccaaccctggagctgttcaaggccagattggatggtt

SEQ ID NO: 80670 - DNA, 600 bp, Chicken  19866894373273_5
caactgtctccaagctgagtgttttggtcaacactctggaaagaagggatgcaatccatasggaccttgacstatgaagaaaggttgagagagttgaggtttttcaacttggagaagagaagacttcaggtagaacttgtaccagccttccttcacataaacgggaactacaggaaagctggagagggactctttttcagacagtgcagtaacaggacaaaggctagtggttttaagtggaaagagggaagatttaaattagacattaggaagaattcttaactcagagtgtgatgaggygctggcacaggctgctcagagaatctgtggatgccccaaccctggagctgttcaaggccagattggatggttcctcaaaaggaacctgacctatgggaggagtctcatctcagaacagagagctcatctttaaggtctcttccaacactaaccattctaagttactatttttctatgtttttatgaaattcactttctgtagcacatagtacaggatgctgatgattaaaatagttcaaggaaagagaaaagtatggcaggaggctgaaaactaggcagcactgtccagtgcattgattt

SEQ ID NO: 80671 - DNA, 599 bp, Chicken  19866894373276_1
  misc_feature (1)..(89): n is any nucleotide
nnnnnnnnnnnnnnnnnnnnnnnnnnnnnnnnnnnnnnnnnnnnnnnnnnnnnnnnnnnnnnnnnnnnnnnnnnnnnnnnnnnnnnnnnttaaacaagtgactgccttcctgtgtacagccacaatggagtggaacatgaggctcctatctggccatgcagctgctgtcagtttccttttcttgtcggtgctgcagttttgtagagtagttcccagctgataggaaagagccagctaaagtttgtgaaactgcagcaccagcccagcactgagagcagtgcaacactggacacgtgggakttaatgacatatcagactccaaatcctgacacgtaggatgctagcatctaggcttaggttggaacggaccttaaggcccgttcagttctaacccttgcaataggctgctcacaccccatcagatcaggttgtccagggctctatccatcctggcactgggcaccttcagaaagtgggcacccacagcttctctgggcagtctgtgccagggcctcactgtcccctgagtaaagaatttctcactagtatctacatttattttaaagctattttcctttgctaccatgtaaaaagtcagt

SEQ ID NO: 80672 - DNA, 405 bp, Chicken  19866894373286_1
ttactgtttaggacttaattagatgagttttttctttagaagtgagctttcattttaaagctttttggtaaatcatttgcctttcgttttacaatagggattttcatataaaggagtaatttcttcaggcttggcacatggttttccttgagctctttgaactgtaagtgctgaaaaactagctgtatttgagagtacaagcatcctgcgtacctggaggcgtgtatgtatgaaatcacacagatagttctttgcaatgcttctttcccaatctgacaaaagatttggagggctatgaarcattttgccttgatttaaccattcaaaagacatttgaagcctgaaactgcctgaagaagtcatgtaaatatagctggcagcactgctcataaacagctgtatatt

SEQ ID NO: 80673 - DNA, 600 bp, Chicken  19866894373291_1
aaagcaccagctatagagtttagtgacctgatattagtaggcaggctaattgaaagtcactgcttaaatggataaagaaaatacaaaaatcggtatgcaataatttatacgcacagacatatatatatataaacaatctattattttaagcttttttttttcattttttaattgattatgtgctaatagtcccctcccttcaggttcctgacacatttttaaattagttatctagtggaaaagacaaggttttttttttcatgcaacgatgaatatcatggtatatttatgaagctaaasaacaggtgacttaaatttaaaagagcattaggaattacttctatcgtcactttgtgtatttccttaatttctgatgacctataagtttaaagaaaagaaaaaactctgtaacttcaaacccaacttcacacttaatagtaaatttttgtgcaaagaaaacttgacagcccttaagttaccatctgatcttctcagattttctatcatttatgcagtccttcttaccataaaagactgaatactgaggacaagaaaataaaaccttattttgaagttcttatttgttcgatgatgtttgat

SEQ ID NO: 80674 - DNA, 599 bp, Chicken  19866894373302_1
  misc_feature (1)..(26): n is any nucleotide
nnnnnnnnnnnnnnnnnnnnnnnnnngtgaaatggccctctgcatttgaaaaggacttaaaatttctttttattgatagtttttctttatgtaattgttactttttttttctttataaggttattaaatgtaattacaggttacagatgacagaatttataaatcccaacatgatttcttgtgcacttctctcctgctcatttatattgcaagtggcttctgctatgcagaaatccccattcttctgattagacacgctcaaataattttttggtcaatacagaatcctctcatacacarcctctatagttggctgcatactgttgtagagatctaccagatctatcaaagaagcctttgtacatggtccttttgcattttgcaacacctcacatagcattatttgcagaaacgttggcttggggaaggacataaattcattcttccctctccattcgtggaaatcctttctagagtcttccatgtattactcactgtgctggrtacacaactggccgaaaaatatagcctttcagagaaggaggaataacttataataggctctgtactgttactgccctttttcttaaaacattcca

SEQ ID NO: 80675 - DNA, 600 bp, Chicken  19866894373302_2
tattgcaagtggcttctgctatgcagaaatccccattcttctgattagacacgctcaaataattttttggtcaatacagaatcctctcatacacarcctctatagttggctgcatactgttgtagagatctaccagatctatcaaagaagcctttgtacatggtccttttgcattttgcaacacctcacatagcattatttgcagaaacgttggcttggggaaggacataaattcattcttccctctccattcgtggaaatcctttctagagtcttccatgtattactcactgtgctggrtacacaactggccgaaaaatatagcctttcagagaaggaggaataacttataataggctctgtactgttactgccctttttcttaaaacattccaattactctgaaatgtcctacagaagggagactggctgattatagggcttattgcaaatcaagaacagttacttattaattcaaagaaacctgataataggaccagcttgggccaattgaacttaatgggtttttttttgccagtagcttcaatgagaagaacagtcctcatgatgttctaagtgaagacaagttaaaagaaaata

SEQ ID NO: 80676 - DNA, 599 bp, Chicken  19866894373304_1
  misc_feature (1)..(12): n is any nucleotide
nnnnnnnnnnnncttcagatcttgaaaaaattttactatccaaactctgtaattataggtgtagggtcactagaaaagtactgtatcaatttctggaactgacttctaaactatgtactgttcctgggttttggggctcagtttgttctcctgcatcctttatttattggaatacagacagcagatgagctgtgctggggttgaccataggttttattgacaccgatttcaggttgtgtgtgtaactcacagctctgctcccagcagtaggtgatgttgtatttgtcagtaaacttatastggtttcacagatgttttcttggagacatgttagytcctgtgctcgtggcacattggtagttgaaagctgtgcagctcctaaatgtttccaggggaaaaactgctcttcagtgaactgtatgaaaccttaccccttcgtatccatgcggaacttgctaatgcagaactttatggaagagcgtgataggcatggctctgtgcgttgtacaggttttacagtaatgtcacgtacagrattgtgtacatattagtgctgtcttcatgttaaatttaaatgtagcagaaaatagtcaactgtt

SEQ ID NO: 80677 - DNA, 600 bp, Chicken  19866894373304_2
ctatccaaactctgtaattataggtgtagggtcactagaaaagtactgtatcaatttctggaactgacttctaaactatgtactgttcctgggttttggggctcagtttgttctcctgcatcctttatttattggaatacagacagcagatgagctgtgctggggttgaccataggttttattgacaccgatttcaggttgtgtgtgtaactcacagctctgctcccagcagtaggtgatgttgtatttgtcagtaaacttatastggtttcacagatgttttcttggagacatgttagytcctgtgctcgtggcacattggtagttgaaagctgtgcagctcctaaatgtttccaggggaaaaactgctcttcagtgaactgtatgaaaccttaccccttcgtatccatgcggaacttgctaatgcagaactttatggaagagcgtgataggcatggctctgtgcgttgtacaggttttacagtaatgtcacgtacagrattgtgtacatattagtgctgtcttcatgttaaatttaaatgtagcagaaaatagtcaactgttttcctggcttacatatgttactagcacagttggcac

SEQ ID NO: 80678 - DNA, 600 bp, Chicken  19866894373304_3
gtgtgtgtaactcacagctctgctcccagcagtaggtgatgttgtatttgtcagtaaacttatastggtttcacagatgttttcttggagacatgttagytcctgtgctcgtggcacattggtagttgaaagctgtgcagctcctaaatgtttccaggggaaaaactgctcttcagtgaactgtatgaaaccttaccccttcgtatccatgcggaacttgctaatgcagaactttatggaagagcgtgataggcatggctctgtgcgttgtacaggttttacagtaatgtcacgtacagrattgtgtacatattagtgctgtcttcatgttaaatttaaatgtagcagaaaatagtcaactgttttcctggcttacatatgttactagcacagttggcacttatcagcaatgggctttaagttccatcttcctgactttaaaggagtgtgaaactgttggcttgtacaagctcttgtccttgctgccctctgtacagttccaccatgtcaggtggcagaaagaccatataaactggttttgtccagccatctccatttcccaagctttagaagcaagttagcagagccttgcttaatgaa

SEQ ID NO: 80679 - DNA, 599 bp, Chicken  19866894373310_1
  misc_feature (1)..(151): n is any nucleotide
nnnnnnnnnnnnnnnnnnnnnnnnnnnnnnnnnnnnnnnnnnnnnnnnnnnnnnnnnnnnnnnnnnnnnnnnnnnnnnnnnnnnnnnnnnnnnnnnnnnnnnnnnnnnnnnnnnnnnnnnnnnnnnnnnnnnnnnnnnnnnnnnnnnnnnngttttattactcagaggatttggaacccgtgattacaaaagttaccacctttgtccagactccagagaaaatagtggtagcttcttcttagctaaagtgttgcaaaatattctatatttgtacgtcttgcagaatactgacttagcccygaagatcagttttcattagaaaaagtaagtgcaggactgtactgtcagctagtggatatttttttccaaacacttctacaaaatgcatgtggaaagtttatactatgattttcccctaaacacagtctaactctgaaggagctatttgaaagtgaatgaactattaaaaaaaattcaaagccattagctgcaagctyggcattatttattttgaaatgattgcttttgcctgtttcctttaaaaaatggatccaacttgctgacacttgcaacaaacgtttttttgtttcattttggca

SEQ ID NO: 80680 - DNA, 600 bp, Chicken  19866894373310_2
acctttgtccagactccagagaaaatagtggtagcttcttcttagctaaagtgttgcaaaatattctatatttgtacgtcttgcagaatactgacttagcccygaagatcagttttcattagaaaaagtaagtgcaggactgtactgtcagctagtggatatttttttccaaacacttctacaaaatgcatgtggaaagtttatactatgattttcccctaaacacagtctaactctgaaggagctatttgaaagtgaatgaactattaaaaaaaattcaaagccattagctgcaagctyggcattatttattttgaaatgattgcttttgcctgtttcctttaaaaaatggatccaacttgctgacacttgcaacaaacgtttttttgtttcattttggcatggtcagttactgaagaattttagcaccattgtaaggtataatacatcatttcccttccacattgctcttttwaaatttatttatttttgctaattggtctgtrtgtataacattcctatgttaacttggtcttagttgtccttacactaagaaagctttccctgacctctrtacagatttgctcactgaaaatcaag

SEQ ID NO: 80681 - DNA, 600 bp, Chicken  19866894373310_3
cttctacaaaatgcatgtggaaagtttatactatgattttcccctaaacacagtctaactctgaaggagctatttgaaagtgaatgaactattaaaaaaaattcaaagccattagctgcaagctyggcattatttattttgaaatgattgcttttgcctgtttcctttaaaaaatggatccaacttgctgacacttgcaacaaacgtttttttgtttcattttggcatggtcagttactgaagaattttagcaccattgtaaggtataatacatcatttcccttccacattgctcttttwaaatttatttatttttgctaattggtctgtrtgtataacattcctatgttaacttggtcttagttgtccttacactaagaaagctttccctgacctctrtacagatttgctcactgaaaatcaagctgattgatttctcatctgttcttggtgaggctggccaaatttctgagctgatcccaaatctcttcagagtagcctcttgtatgtggaaaaaatataccagtttccagttttcattctattttctagactgtgtatactcaaccaaaatctgtttttgttttagagaactacctt

SEQ ID NO: 80682 - DNA, 600 bp, Chicken  19866894373310_4
tatgattttcccctaaacacagtctaactctgaaggagctatttgaaagtgaatgaactattaaaaaaaattcaaagccattagctgcaagctyggcattatttattttgaaatgattgcttttgcctgtttcctttaaaaaatggatccaacttgctgacacttgcaacaaacgtttttttgtttcattttggcatggtcagttactgaagaattttagcaccattgtaaggtataatacatcatttcccttccacattgctcttttwaaatttatttatttttgctaattggtctgtrtgtataacattcctatgttaacttggtcttagttgtccttacactaagaaagctttccctgacctctrtacagatttgctcactgaaaatcaagctgattgatttctcatctgttcttggtgaggctggccaaatttctgagctgatcccaaatctcttcagagtagcctcttgtatgtggaaaaaatataccagtttccagttttcattctattttctagactgtgtatactcaaccaaaatctgtttttgttttagagaactaccttgtttggttattgaaaagtatccaacaatatt

SEQ ID NO: 80683 - DNA, 600 bp, Chicken  19866894373310_5
aattcaaagccattagctgcaagctyggcattatttattttgaaatgattgcttttgcctgtttcctttaaaaaatggatccaacttgctgacacttgcaacaaacgtttttttgtttcattttggcatggtcagttactgaagaattttagcaccattgtaaggtataatacatcatttcccttccacattgctcttttwaaatttatttatttttgctaattggtctgtrtgtataacattcctatgttaacttggtcttagttgtccttacactaagaaagctttccctgacctctrtacagatttgctcactgaaaatcaagctgattgatttctcatctgttcttggtgaggctggccaaatttctgagctgatcccaaatctcttcagagtagcctcttgtatgtggaaaaaatataccagtttccagttttcattctattttctagactgtgtatactcaaccaaaatctgtttttgttttagagaactaccttgtttggttattgaaaagtatccaacaatattgatgaaagaattattttgatcaattgataaatcccataattcaaaagtttaggtttaaaaagttgcca

SEQ ID NO: 80684 - DNA, 600 bp, Chicken  19866894373314_1
aggggctgcgtaggaattgtgtatattatggaggaggaaaagatgacttctgattcactgtaagggaagtggctgcagggttttttttctcataactgagtcacttccatactttgcccacgaaggcaggtggagaaatgatgcagaccttctgcaactggaggataatctgtgttgaaaactgttctcagtactgatgaagaaatgtgtgctgaggaagatcttgtaatccctttgggagaaataaaggaacctgatttatgtttctatggtttatgccttgcagattgggtagaaatkattctgcttttggacagtacacaggagtagctgtcaaagctctgtgccttaaatcctctcatatgtccaaagccataattgtttagtgtcccttagaaattcaaacaaaacataaactggagggaggcaatttactgcttagactgagagtcacatggggctttgtggctgatttatctctgctttgatccagcagaaagagaagcaaacgtgaggcttggctggcagcctgcttggttaggctaaagggtttgcgtgggacggagtgcatcctggttagggacagttactgagccatct

SEQ ID NO: 80685 - DNA, 600 bp, Chicken  19866894373317_1
aaattcaactctgacatctttggcagaggaattattaaatgatgcaaacagaaaatttttgcttaaacaaattaccttaggagaatattggaaaatttctgtgtcttaagtgtcaattctggcagaggcacaccttttctcattttagaaagatatcctggcttataagattataggtaattgatctgtcctagcatgttcaagcttgagagtaactaaagaaggtgtctggatgctgtaattagctgtgatggctcatctgtacccactttgcatgctacatgggcacaaatatttttyttctacagcaagacacaaagtatgtcttcactatatccctcatrttatacttacactactatggaaaagagctggagaggctggagtaggcaggtgcaatatccagtcacactacagagaggttgaaattgttcctgaaaaatcccagaatttaaacattattctaaatatcaaggattttttattttttatttttatttttttactcatttctgaattgaatgtccctgaggacagtgttagaggagagcccttgtgaacttttttggaagggatttgtgtgggagggggcatcctcaa

SEQ ID NO: 80686 - DNA, 600 bp, Chicken  19866894373317_2
caaacagaaaatttttgcttaaacaaattaccttaggagaatattggaaaatttctgtgtcttaagtgtcaattctggcagaggcacaccttttctcattttagaaagatatcctggcttataagattataggtaattgatctgtcctagcatgttcaagcttgagagtaactaaagaaggtgtctggatgctgtaattagctgtgatggctcatctgtacccactttgcatgctacatgggcacaaatatttttyttctacagcaagacacaaagtatgtcttcactatatccctcatrttatacttacactactatggaaaagagctggagaggctggagtaggcaggtgcaatatccagtcacactacagagaggttgaaattgttcctgaaaaatcccagaatttaaacattattctaaatatcaaggattttttattttttatttttatttttttactcatttctgaattgaatgtccctgaggacagtgttagaggagagcccttgtgaacttttttggaagggatttgtgtgggagggggcatcctcaaggcaaggctggatggggacatgggcagcctgatccagtgggtgg

SEQ ID NO: 80687 - DNA, 599 bp, Chicken  19866894373325_1
  misc_feature (1)..(84): n is any nucleotide
nnnnnnnnnnnnnnnnnnnnnnnnnnnnnnnnnnnnnnnnnnnnnnnnnnnnnnnnnnnnnnnnnnnnnnnnnnnnnnnnnnnntcagctttcaagacttaatgacacataatgaacaatgtttatttacaaagaactcttctgtgtaaatcataccgaattcctcattagatcacaaattgttgctcaggataacaagattgagtcttctggcacctaaaaataagcagagctttgagtatttccctcgtaaattcgtcagaatataatcacattttgtaacaattaatgataacaaawamgatgactatttctactttwaaaatgtgccattaattattaactggctcaaactcctcccctcttacacgaccttacatcaaatgcatttaggaattttccagctcagttcttatgcctgtccctgtctggcatacagcattagggagcacacttggggttgtgtttgacaattgtagccctgaagmtggaggctgcagacatggaatgctggtgagaagcacccagacgggctcccttacaatgttaaaatccaactgtatgtcacccctggtaattacagcctgctggctgttccc

SEQ ID NO: 80688 - DNA, 599 bp, Chicken  19866894373325_2
  misc_feature (1)..(82): n is any nucleotide
nnnnnnnnnnnnnnnnnnnnnnnnnnnnnnnnnnnnnnnnnnnnnnnnnnnnnnnnnnnnnnnnnnnnnnnnnnnnnnnnnntcagctttcaagacttaatgacacataatgaacaatgtttatttacaaagaactcttctgtgtaaatcataccgaattcctcattagatcacaaattgttgctcaggataacaagattgagtcttctggcacctaaaaataagcagagctttgagtatttccctcgtaaattcgtcagaatataatcacattttgtaacaattaatgataacaaawamgatgactatttctactttwaaaatgtgccattaattattaactggctcaaactcctcccctcttacacgaccttacatcaaatgcatttaggaattttccagctcagttcttatgcctgtccctgtctggcatacagcattagggagcacacttggggttgtgtttgacaattgtagccctgaagmtggaggctgcagacatggaatgctggtgagaagcacccagacgggctcccttacaatgttaaaatccaactgtatgtcacccctggtaattacagcctgctggctgttcccca

SEQ ID NO: 80689 - DNA, 599 bp, Chicken  19866894373325_3
  misc_feature (1)..(63): n is any nucleotide
nnnnnnnnnnnnnnnnnnnnnnnnnnnnnnnnnnnnnnnnnnnnnnnnnnnnnnnnnnnnnnntcagctttcaagacttaatgacacataatgaacaatgtttatttacaaagaactcttctgtgtaaatcataccgaattcctcattagatcacaaattgttgctcaggataacaagattgagtcttctggcacctaaaaataagcagagctttgagtatttccctcgtaaattcgtcagaatataatcacattttgtaacaattaatgataacaaawamgatgactatttctactttwaaaatgtgccattaattattaactggctcaaactcctcccctcttacacgaccttacatcaaatgcatttaggaattttccagctcagttcttatgcctgtccctgtctggcatacagcattagggagcacacttggggttgtgtttgacaattgtagccctgaagmtggaggctgcagacatggaatgctggtgagaagcacccagacgggctcccttacaatgttaaaatccaactgtatgtcacccctggtaattacagcctgctggctgttccccagtcgtcactaattcttaca

SEQ ID NO: 80690 - DNA, 600 bp, Chicken  19866894373325_4
aggataacaagattgagtcttctggcacctaaaaataagcagagctttgagtatttccctcgtaaattcgtcagaatataatcacattttgtaacaattaatgataacaaawamgatgactatttctactttwaaaatgtgccattaattattaactggctcaaactcctcccctcttacacgaccttacatcaaatgcatttaggaattttccagctcagttcttatgcctgtccctgtctggcatacagcattagggagcacacttggggttgtgtttgacaattgtagccctgaagmtggaggctgcagacatggaatgctggtgagaagcacccagacgggctcccttacaatgttaaaatccaactgtatgtcacccctggtaattacagcctgctggctgttccccagtcgtcactaattcttacagcttttgcaactgattttaaagcagctctgcagcctacagggctgagcatggtgcagctgagaactggggtatgcagtgttaccgtggttgtgttcctaagccactgatgacaaaaatgccaggagaagctgagatctggcactggctttaggcaaagcagtcagtgt

SEQ ID NO: 80691 - DNA, 470 bp, Chicken  19866894373325_5
agacatggaatgctggtgagaagcacccagacgggctcccttacaatgttaaaatccaactgtatgtcacccctggtaattacagcctgctggctgttccccagtcgtcactaattcttacagcttttgcaactgattttaaagcagctctgcagcctacagggctgagcatggtgcagctgagaactggggtatgcagtgttaccgtggttgtgttcctaagccactgatgacaaaaatgccaggagaagctgagatctggcactggctttaggcaaagcagtcagtgtttgggctgcyccctcacttccrtttcaattytgtacttcagttccaggtaaaggggtgaggatgggtcccagaggatggtcatgctcctcctaatccccctaaataataaagttaaatttcccttctaaacagaggtagataaagggacatggggaggagtacggtcaacctcaaggcag

SEQ ID NO: 80692 - DNA, 458 bp, Chicken  19866894373325_6
ctggtgagaagcacccagacgggctcccttacaatgttaaaatccaactgtatgtcacccctggtaattacagcctgctggctgttccccagtcgtcactaattcttacagcttttgcaactgattttaaagcagctctgcagcctacagggctgagcatggtgcagctgagaactggggtatgcagtgttaccgtggttgtgttcctaagccactgatgacaaaaatgccaggagaagctgagatctggcactggctttaggcaaagcagtcagtgtttgggctgcyccctcacttccrtttcaattytgtacttcagttccaggtaaaggggtgaggatgggtcccagaggatggtcatgctcctcctaatccccctaaataataaagttaaatttcccttctaaacagaggtagataaagggacatggggaggagtacggtcaacctcaaggcag

SEQ ID NO: 80693 - DNA, 449 bp, Chicken  19866894373325_7
agcacccagacgggctcccttacaatgttaaaatccaactgtatgtcacccctggtaattacagcctgctggctgttccccagtcgtcactaattcttacagcttttgcaactgattttaaagcagctctgcagcctacagggctgagcatggtgcagctgagaactggggtatgcagtgttaccgtggttgtgttcctaagccactgatgacaaaaatgccaggagaagctgagatctggcactggctttaggcaaagcagtcagtgtttgggctgcyccctcacttccrtttcaattytgtacttcagttccaggtaaaggggtgaggatgggtcccagaggatggtcatgctcctcctaatccccctaaataataaagttaaatttcccttctaaacagaggtagataaagggacatggggaggagtacggtcaacctcaaggcag

SEQ ID NO: 80694 - DNA, 600 bp, Chicken  19866894373329_1
tgtggcagccctgcctcggcccggagcgcgggcaatgtgaccatcgtggagtgctctgcgtgcagagatgagatgtttgtcactgctggaaggtaaggctgtgcttactgcaagaacccctatgaggaacaagcccatggacccatctcctttttcagagcctttacttaaataggaggaatattaagcatcattgtgctcatgggttttttcttctcatctcaatgggctcatgaataaccagcagcttgtctctttaaagcatttttccttgtcctccacataagagcacgctttcaragcagctcacacggaccagcatgcttaatttctgttctttatagcagggattttgctcagcattccctctgcagtccttaatgtatttcgttcccagtgtctacacaagaaaagcagccaatgaacagctctggacagtgccttattcatgtaaggagaatgatatctcatggattgtcagatcttctcctactcttggcagatgcaatgtacaattgggctctggtctgtaccacaagttgttacaacaggtcacatttcccatggatttcagacagcccccacgtatccaacctggct

SEQ ID NO: 80695 - DNA, 600 bp, Chicken  19866894373335_1
aactgcagcttgaaaacgctcctctagggaaaatactggctgcaaaacaagttcaaacaacaacagagtaagtaagatacaagcaatcaggcaaaaatcagggcaaaatgctttggtgtttaacatgtctcagtatttctgccttgtaggaatccactgttcctccttatctgaatatgttcatgacaatctataacctgccttttaagttacattgcaaatttgtccattcacccattctttgtttcgcccttttggtttggcatggaggcaccttcatgtaaaataatctttccttcmcatttttcacatgttctcccgaagcatggatgctgagcaaccacctacccagtctgacttcacagacaatgaaggataaggcaagaaaatgatctggtagaagacaatatgcagaggaacagaggaactaccctaagtgtggcatactcccctgccccgggagtatgcaggtttactgcacagatgctttatgaatgtgtgctggcacacattgatgcctctcagcacatgctggtacactttataaacatgccactgttttgctttctaacgagcaatgcacaaattaccttactcctc

SEQ ID NO: 80696 - DNA, 599 bp, Chicken  19866894373339_1
  misc_feature (1)..(140): n is any nucleotide
nnnnnnnnnnnnnnnnnnnnnnnnnnnnnnnnnnnnnnnnnnnnnnnnnnnnnnnnnnnnnnnnnnnnnnnnnnnnnnnnnnnnnnnnnnnnnnnnnnnnnnnnnnnnnnnnnnnnnnnnnnnnnnnnnnnnnnnnnnnnaccgccccaagcaccacgtgaaggaaagccaacccctctgtgccagcccagccgccccatgtccccatcctgcgctggccgcagtggcagagggccatccaggtttctgtgacatgagtggctctgcacacagctgggctgaccggtggtctgagaccaygccaggctgccgtggggcccctgctgctcccgcacaccgagaggaggaggattgccacctccccagctgtgcctggtgcagcacggacrtgggatgcggtgtttccatggcgggccgmccgcccggagggacggatgggtcctcatgcgctgccattgcggggagggccagcagggagaggggacagccccacggctgctcccggccccgcagccccactcatcaccccgccattcatcgggccagacagatgcccccaaataaaggccgccgtgattgatacccaaagacaatggggt

SEQ ID NO: 80697 - DNA, 599 bp, Chicken  19866894373339_2
  misc_feature (1)..(51): n is any nucleotide
nnnnnnnnnnnnnnnnnnnnnnnnnnnnnnnnnnnnnnnnnnnnnnnnnnnaccgccccaagcaccacgtgaaggaaagccaacccctctgtgccagcccagccgccccatgtccccatcctgcgctggccgcagtggcagagggccatccaggtttctgtgacatgagtggctctgcacacagctgggctgaccggtggtctgagaccaygccaggctgccgtggggcccctgctgctcccgcacaccgagaggaggaggattgccacctccccagctgtgcctggtgcagcacggacrtgggatgcggtgtttccatggcgggccgmccgcccggagggacggatgggtcctcatgcgctgccattgcggggagggccagcagggagaggggacagccccacggctgctcccggccccgcagccccactcatcaccccgccattcatcgggccagacagatgcccccaaataaaggccgccgtgattgatacccaaagacaatggggtgggaggggccagcggggctccgcatgaataaacatgacggtctttggacagagcttcctctcttcacaaaatgggactgattgtgtggc

SEQ ID NO: 80698 - DNA, 599 bp, Chicken  19866894373339_3
  misc_feature (1)..(22): n is any nucleotide
nnnnnnnnnnnnnnnnnnnnnnaccgccccaagcaccacgtgaaggaaagccaacccctctgtgccagcccagccgccccatgtccccatcctgcgctggccgcagtggcagagggccatccaggtttctgtgacatgagtggctctgcacacagctgggctgaccggtggtctgagaccaygccaggctgccgtggggcccctgctgctcccgcacaccgagaggaggaggattgccacctccccagctgtgcctggtgcagcacggacrtgggatgcggtgtttccatggcgggccgmccgcccggagggacggatgggtcctcatgcgctgccattgcggggagggccagcagggagaggggacagccccacggctgctcccggccccgcagccccactcatcaccccgccattcatcgggccagacagatgcccccaaataaaggccgccgtgattgatacccaaagacaatggggtgggaggggccagcggggctccgcatgaataaacatgacggtctttggacagagcttcctctcttcacaaaatgggactgattgtgtggcaggcatttaacattcagctgtggtcggcc

SEQ ID NO: 80699 - DNA, 600 bp, Chicken  19866894373341_1
ggactgtgtaaacataaattgctggtactacaaaagaggccagaaaagtagaattagacttttttttctctctcactgtgtttgaaaattgcaagtcgtgcttagaattgaatttgttcctgaagcgtggagtttgtccaatgtgggattaagcaatgcatcattgtgttgagaacagcattttaaaagctgaagtgttttgccagtggataagatgggaattctgaaacgtagaggataatactaagggcagagattgtgtggcgctaagccatgacaaatggctatgacaaaaagacyatcagttgatggttttcaaaatccygtggaaaggtctgaacctggtcgtctcttctcagagtcagcataactctctctagctttatrttttaaaaacaaacagttcttaaattcatgcaagtaactcaatagtctgaagcccaaccattatgctttcaagtcagtgtgcaagtataaaagagtaatgatagtcttttcaaatgaacttgaggcaaaaacctccagacctctactgaagtggtaatcttgatggtgggtgggcaggagttatatgtccttaaatgatgtttctgttcatat

SEQ ID NO: 80700 - DNA, 600 bp, Chicken  19866894373341_2
tactacaaaagaggccagaaaagtagaattagacttttttttctctctcactgtgtttgaaaattgcaagtcgtgcttagaattgaatttgttcctgaagcgtggagtttgtccaatgtgggattaagcaatgcatcattgtgttgagaacagcattttaaaagctgaagtgttttgccagtggataagatgggaattctgaaacgtagaggataatactaagggcagagattgtgtggcgctaagccatgacaaatggctatgacaaaaagacyatcagttgatggttttcaaaatccygtggaaaggtctgaacctggtcgtctcttctcagagtcagcataactctctctagctttatrttttaaaaacaaacagttcttaaattcatgcaagtaactcaatagtctgaagcccaaccattatgctttcaagtcagtgtgcaagtataaaagagtaatgatagtcttttcaaatgaacttgaggcaaaaacctccagacctctactgaagtggtaatcttgatggtgggtgggcaggagttatatgtccttaaatgatgtttctgttcatatctgaatttttgccaaagaaaatttt

SEQ ID NO: 80701 - DNA, 600 bp, Chicken  19866894373341_3
attgcaagtcgtgcttagaattgaatttgttcctgaagcgtggagtttgtccaatgtgggattaagcaatgcatcattgtgttgagaacagcattttaaaagctgaagtgttttgccagtggataagatgggaattctgaaacgtagaggataatactaagggcagagattgtgtggcgctaagccatgacaaatggctatgacaaaaagacyatcagttgatggttttcaaaatccygtggaaaggtctgaacctggtcgtctcttctcagagtcagcataactctctctagctttatrttttaaaaacaaacagttcttaaattcatgcaagtaactcaatagtctgaagcccaaccattatgctttcaagtcagtgtgcaagtataaaagagtaatgatagtcttttcaaatgaacttgaggcaaaaacctccagacctctactgaagtggtaatcttgatggtgggtgggcaggagttatatgtccttaaatgatgtttctgttcatatctgaatttttgccaaagaaaattttctaaataagtctggctctctgaaagccagttgtaagctgtatttacttctggatgaatccag

SEQ ID NO: 80702 - DNA, 599 bp, Chicken  19866894373354_1
  misc_feature (1)..(122): n is any nucleotide
nnnnnnnnnnnnnnnnnnnnnnnnnnnnnnnnnnnnnnnnnnnnnnnnnnnnnnnnnnnnnnnnnnnnnnnnnnnnnnnnnnnnnnnnnnnnnnnnnnnnnnnnnnnnnnnnnnnnnnnnnncttttaacattcacattgtcgtttttatcactgtgtgaatgtgactgcaagcattgctttcctggtacggtactaaatgtttatgctgaataggagccataggaaaacacagagcacagtaggatgtgaatcaaaattgatttgcagacatacacttcctgtctcaaaatatggaccwctgtagagccacaaagatttattgttttttcaccaggtcctaaggtgtatgtttaattaggtgtgtttgtgagaaggaaatgactcttgaaagagggtattgagcttgaaatggtgcagttgtgagttgagctgcatacagaacaatgccataatagtgcgccgtgagggaggtgacggttctgctgctcagagrcatagaagataccatcttgcactgcctgctttgtagcaccagccttgtagkgctggcaaggtgagttctggtgatggaggtgcccacctacctttattttttct

SEQ ID NO: 80703 - DNA, 600 bp, Chicken  19866894373354_2
taaatgtttatgctgaataggagccataggaaaacacagagcacagtaggatgtgaatcaaaattgatttgcagacatacacttcctgtctcaaaatatggaccwctgtagagccacaaagatttattgttttttcaccaggtcctaaggtgtatgtttaattaggtgtgtttgtgagaaggaaatgactcttgaaagagggtattgagcttgaaatggtgcagttgtgagttgagctgcatacagaacaatgccataatagtgcgccgtgagggaggtgacggttctgctgctcagagrcatagaagataccatcttgcactgcctgctttgtagcaccagccttgtagkgctggcaaggtgagttctggtgatggaggtgcccacctacctttattttttctgaagaagttcsactgaaccaataactaaaacatgagtgggatattgggctattagctttgcatgagagatgcttgtccaagggtcatatttctttggaggaatacaggattgaaaaggactgaaagctgttgaaaataaaacttccaaaagttctccaattcgttaggctgcagagttcattaacttttctggaag

SEQ ID NO: 80704 - DNA, 583 bp, Chicken  19866894373354_3
tgtgaatcaaaattgatttgcagacatacacttcctgtctcaaaatatggaccwctgtagagccacaaagatttattgttttttcaccaggtcctaaggtgtatgtttaattaggtgtgtttgtgagaaggaaatgactcttgaaagagggtattgagcttgaaatggtgcagttgtgagttgagctgcatacagaacaatgccataatagtgcgccgtgagggaggtgacggttctgctgctcagagrcatagaagataccatcttgcactgcctgctttgtagcaccagccttgtagkgctggcaaggtgagttctggtgatggaggtgcccacctacctttattttttctgaagaagttcsactgaaccaataactaaaacatgagtgggatattgggctattagctttgcatgagagatgcttgtccaagggtcatatttctttggaggaatacaggattgaaaaggactgaaagctgttgaaaataaaacttccaaaagttctccaattcgttaggctgcagagttcattaacttttctggaagggttgggatataaactagggaaaatgctgcagcc

SEQ ID NO: 80705 - DNA, 519 bp, Chicken  19866894373354_4
acaaagatttattgttttttcaccaggtcctaaggtgtatgtttaattaggtgtgtttgtgagaaggaaatgactcttgaaagagggtattgagcttgaaatggtgcagttgtgagttgagctgcatacagaacaatgccataatagtgcgccgtgagggaggtgacggttctgctgctcagagrcatagaagataccatcttgcactgcctgctttgtagcaccagccttgtagkgctggcaaggtgagttctggtgatggaggtgcccacctacctttattttttctgaagaagttcsactgaaccaataactaaaacatgagtgggatattgggctattagctttgcatgagagatgcttgtccaagggtcatatttctttggaggaatacaggattgaaaaggactgaaagctgttgaaaataaaacttccaaaagttctccaattcgttaggctgcagagttcattaacttttctggaagggttgggatataaactagggaaaatgctgcagcc

SEQ ID NO: 80706 - DNA, 599 bp, Chicken  19866894373359_1
  misc_feature (1)..(132): n is any nucleotide
nnnnnnnnnnnnnnnnnnnnnnnnnnnnnnnnnnnnnnnnnnnnnnnnnnnnnnnnnnnnnnnnnnnnnnnnnnnnnnnnnnnnnnnnnnnnnnnnnnnnnnnnnnnnnnnnnnnnnnnnnnnnnnnnnnnnttcagagttttcctactgctgtgaacgcttctttgtagtacatcctttgcagaactgccatgtccctgagagctgccccttctaggaatttgctaggatcttctgtgacttctctaagctgctgcttccttagagctttaaaagcaaaggccgtgttccctcacaacrtggataagtacatgcactactgccaaggtttgcatgcttytttcttttgttatcgaggtgtctaggttattaacagggacagctgaggcagtagagagccagtagagttaaaaaacaaatgactctatcactggcacatcacttcagcagcatcccttcaactgtcatttttttccttccttgtttcctaattcagctcaygagaaatgctggcgtaggttaatcatttacttgaccatgaagcrttctttccaaactttcctctctttggcaaaatgatggaaattgaagaagtaaat

SEQ ID NO: 80707 - DNA, 599 bp, Chicken  19866894373359_2
  misc_feature (1)..(92): n is any nucleotide
nnnnnnnnnnnnnnnnnnnnnnnnnnnnnnnnnnnnnnnnnnnnnnnnnnnnnnnnnnnnnnnnnnnnnnnnnnnnnnnnnnnnnnnnnnnnttcagagttttcctactgctgtgaacgcttctttgtagtacatcctttgcagaactgccatgtccctgagagctgccccttctaggaatttgctaggatcttctgtgacttctctaagctgctgcttccttagagctttaaaagcaaaggccgtgttccctcacaacrtggataagtacatgcactactgccaaggtttgcatgcttytttcttttgttatcgaggtgtctaggttattaacagggacagctgaggcagtagagagccagtagagttaaaaaacaaatgactctatcactggcacatcacttcagcagcatcccttcaactgtcatttttttccttccttgtttcctaattcagctcaygagaaatgctggcgtaggttaatcatttacttgaccatgaagcrttctttccaaactttcctctctttggcaaaatgatggaaattgaagaagtaaatgtgtagagggatgcaaaatcaatttctcaaacgttaggac

SEQ ID NO: 80708 - DNA, 600 bp, Chicken  19866894373359_3
gagctgccccttctaggaatttgctaggatcttctgtgacttctctaagctgctgcttccttagagctttaaaagcaaaggccgtgttccctcacaacrtggataagtacatgcactactgccaaggtttgcatgcttytttcttttgttatcgaggtgtctaggttattaacagggacagctgaggcagtagagagccagtagagttaaaaaacaaatgactctatcactggcacatcacttcagcagcatcccttcaactgtcatttttttccttccttgtttcctaattcagctcaygagaaatgctggcgtaggttaatcatttacttgaccatgaagcrttctttccaaactttcctctctttggcaaaatgatggaaattgaagaagtaaatgtgtagagggatgcaaaatcaatttctcaaacgttaggacaaatcygaaccagttgcttatacaactgtaattacaaattttcacgtgcattcgttagcatgcactttttaattgtatcatccaatgtttttattttgctgtaccmttgcctcatgcagtgtacatgtggcttatttctgctgaatggtttctactcatatg

SEQ ID NO: 80709 - DNA, 600 bp, Chicken  19866894373359_4
ctaagctgctgcttccttagagctttaaaagcaaaggccgtgttccctcacaacrtggataagtacatgcactactgccaaggtttgcatgcttytttcttttgttatcgaggtgtctaggttattaacagggacagctgaggcagtagagagccagtagagttaaaaaacaaatgactctatcactggcacatcacttcagcagcatcccttcaactgtcatttttttccttccttgtttcctaattcagctcaygagaaatgctggcgtaggttaatcatttacttgaccatgaagcrttctttccaaactttcctctctttggcaaaatgatggaaattgaagaagtaaatgtgtagagggatgcaaaatcaatttctcaaacgttaggacaaatcygaaccagttgcttatacaactgtaattacaaattttcacgtgcattcgttagcatgcactttttaattgtatcatccaatgtttttattttgctgtaccmttgcctcatgcagtgtacatgtggcttatttctgctgaatggtttctactcatatgttgaataaaagataagcttccttgtcaagccctggttagtcttc

SEQ ID NO: 80710 - DNA, 600 bp, Chicken  19866894373359_5
tttgttatcgaggtgtctaggttattaacagggacagctgaggcagtagagagccagtagagttaaaaaacaaatgactctatcactggcacatcacttcagcagcatcccttcaactgtcatttttttccttccttgtttcctaattcagctcaygagaaatgctggcgtaggttaatcatttacttgaccatgaagcrttctttccaaactttcctctctttggcaaaatgatggaaattgaagaagtaaatgtgtagagggatgcaaaatcaatttctcaaacgttaggacaaatcygaaccagttgcttatacaactgtaattacaaattttcacgtgcattcgttagcatgcactttttaattgtatcatccaatgtttttattttgctgtaccmttgcctcatgcagtgtacatgtggcttatttctgctgaatggtttctactcatatgttgaataaaagataagcttccttgtcaagccctggttagtcttctaactctgaacaagctacattaaaaaacaatgtgaggaatatattctctgtgcaccagaaggagaggccattgttgctttaaatctgcagagatttccac

SEQ ID NO: 80711 - DNA, 600 bp, Chicken  19866894373359_6
agcagcatcccttcaactgtcatttttttccttccttgtttcctaattcagctcaygagaaatgctggcgtaggttaatcatttacttgaccatgaagcrttctttccaaactttcctctctttggcaaaatgatggaaattgaagaagtaaatgtgtagagggatgcaaaatcaatttctcaaacgttaggacaaatcygaaccagttgcttatacaactgtaattacaaattttcacgtgcattcgttagcatgcactttttaattgtatcatccaatgtttttattttgctgtaccmttgcctcatgcagtgtacatgtggcttatttctgctgaatggtttctactcatatgttgaataaaagataagcttccttgtcaagccctggttagtcttctaactctgaacaagctacattaaaaaacaatgtgaggaatatattctctgtgcaccagaaggagaggccattgttgctttaaatctgcagagatttccaccagttcagtgaactgagttcctttaaattcatgcgagcacgtgcattgctgagtattaattctattaatttgaataagacagtagtttattttttgtaca

SEQ ID NO: 80712 - DNA, 599 bp, Chicken  19866894373376_1
  misc_feature (1)..(63): n is any nucleotide
nnnnnnnnnnnnnnnnnnnnnnnnnnnnnnnnnnnnnnnnnnnnnnnnnnnnnnnnnnnnnnnactatcttactctgctttccactgctccatgtttgtcaaaaggatgttttacggtgtaagttactctttgatatgtggaagaatgtaggaattaaagagaattgtggtcaattaatgacaattattgacaagacaaattaacaaggcctaacatatgactgctatttagaagcttctacttgtggtagggaggtaaacttgatatagtgctgttgcttactggggcacaagaccacyattggggaaatacaggttctgttcccactttgggctgattggtgattatggtaatgttgctgtactcagttttctgacttgatgatgagaaatggtagttttctctcctgtaaactgagagtcaatgaaaaaattaatgtaatcastaggtgtcattaaagaaagaaaacactgttattgttttcaggatccataataaatccacgcacaaaatactactgttgacaaagatttcttctactatgaaactaagtatatttgcacaacaacttaaaagcaggaaatctcccagaggtaaa

SEQ ID NO: 80713 - DNA, 487 bp, Chicken  19866894373376_2
actatcttactctgctttccactgctccatgtttgtcaaaaggatgttttacggtgtaagttactctttgatatgtggaagaatgtaggaattaaagagaattgtggtcaattaatgacaattattgacaagacaaattaacaaggcctaacatatgactgctatttagaagcttctacttgtggtagggaggtaaacttgatatagtgctgttgcttactggggcacaagaccacyattggggaaatacaggttctgttcccactttgggctgattggtgattatggtaatgttgctgstaggtgtcattaaagaaagaaaacactgttattgttttcaggatccataataaatccacgcacaaaatactactgttgacaaagatttcttctactatgaaactaagtatatttgcacaacaacttaaaagcaggaaatctcccagaggtaaagctgataaaatgtatgtatactatggtagtttag

SEQ ID NO: 80714 - DNA, 600 bp, Chicken  19866894373390_1
ttcagccacccagtgcagatagaggactcttaccagcaatgaatttctacaaattgcacaaacggaaacagaagcttaaacacagggaaaaaacacacacaacatccttaatgcactaggactggtttacccagctgcacggtagagtgtccagccttggcaatattcagaacacagctggacaaggcctggagcaacttggtgtacctttgaatttagccctgctctgagcaagagactgaaactcacgatcctcaaaaatgtctcagcatttcattcaggtcacagagtaactctgcygctgatggagggctagccctggtgttttctatccaattgtcaccagctgtgttagagagccaactcccttcttctaaacacattaactgctccttctctaatcagcacgaggtttataagccttaccttctttctgtctctacccttcatctctctctcatgcccgtaataaagaaatgcctctcagtgtctacgtaccatttctgttctaggacaaaggtgtcatttcaatagattactctaattctccacttctcctgcacaagtcaaagttactgcaataaatacgagtaggaaagt

SEQ ID NO: 80715 - DNA, 570 bp, Chicken  19866894373390_2
gaggtttataagccttaccttctttctgtctctacccttcatctctctctcatgcccgtaataaagaaatgcctctcagtgtctacgtaccatttctgttctaggacaaaggtgtcatttcaatagattactctaattctccacttctcctgcacaagtcaaagttactgcaataaatacgagtaggaaagtttatgaaaacacacaaggtcaatgaaggaagtgagccaatgacagaagtaacaaaattaaatattctacaacttctgcttcagtgcatacaattgagtcagaaaagawgatcaattatttcagtgctcaatcaatcacagctactcacttggcagtaaaaygtctttataagcatgagacaccaagatgaaaaggttaagagatcctgaaagcacaactggtccaagtctcagttacattaaggacttgccagctaccaaacgaactgaacctgtaagacgttaactgcctactatcatctaaaagtagctacacatgttgctcaagagtggctgccagcatatgcacttccactcttattcatagtattcacagctt

SEQ ID NO: 80716 - DNA, 517 bp, Chicken  19866894373390_3
gcccgtaataaagaaatgcctctcagtgtctacgtaccatttctgttctaggacaaaggtgtcatttcaatagattactctaattctccacttctcctgcacaagtcaaagttactgcaataaatacgagtaggaaagtttatgaaaacacacaaggtcaatgaaggaagtgagccaatgacagaagtaacaaaattaaatattctacaacttctgcttcagtgcatacaattgagtcagaaaagawgatcaattatttcagtgctcaatcaatcacagctactcacttggcagtaaaaygtctttataagcatgagacaccaagatgaaaaggttaagagatcctgaaagcacaactggtccaagtctcagttacattaaggacttgccagctaccaaacgaactgaacctgtaagacgttaactgcctactatcatctaaaagtagctacacatgttgctcaagagtggctgccagcatatgcacttccactcttattcatagtattcacagctt

SEQ ID NO: 80717 - DNA, 600 bp, Chicken  19866894373393_1
taagtgtttgttcttaatataaaacgtcacatttcactctgggagtttaaaccagtttatccattagggcaagagatggttccagctcaaggcaaggttgaaagctgacaaaccttctgccagtattgccaatgagaccctttgattctcgaattccacaatgtttctgtgaagggattgccagtattttaagcacatctgttgaaatagtacagggaggcagcattgttgtgtcagtggattcagaaaccattcagtttcctggatcttcagcagtgccacataacctgtcttctgtarcatggatgcacatggctgtggaacagtgtgttgcaccgtgggtccccaacacgtggcatggggacagaacttcctgagctgctttcagggtgggcaatggagatacagratcagtcagaactgcagcagtgggcacagagagcagcaagcttagctactaaaacgaaataaagggcctcatcagttcccggtgcacacacgagacagcttatttcattaggaagctgttccaaccaggaggcacaggtaacgaggtctaactatcaccactaaggaaagcggatggattcagctgaagct

SEQ ID NO: 80718 - DNA, 600 bp, Chicken  19866894373393_2
aaaccttctgccagtattgccaatgagaccctttgattctcgaattccacaatgtttctgtgaagggattgccagtattttaagcacatctgttgaaatagtacagggaggcagcattgttgtgtcagtggattcagaaaccattcagtttcctggatcttcagcagtgccacataacctgtcttctgtarcatggatgcacatggctgtggaacagtgtgttgcaccgtgggtccccaacacgtggcatggggacagaacttcctgagctgctttcagggtgggcaatggagatacagratcagtcagaactgcagcagtgggcacagagagcagcaagcttagctactaaaacgaaataaagggcctcatcagttcccggtgcacacacgagacagcttatttcattaggaagctgttccaaccaggaggcacaggtaacgaggtctaactatcaccactaaggaaagcggatggattcagctgaagctctggctggccgttaggaagtgccacacgttttctctccttcctcaaaaagacagacagccgttctgtgactgaggtaaaacacagcccaggtcaccgcacacaactggc

SEQ ID NO: 80719 - DNA, 431 bp, Chicken  19866894373398_1
gagggatcaattattgaaccatattcctcgaagatgcagaaggagcacccatgagatcaaacagaagctgctgaagatgaggaaatgaagctgctatccatatgcatgaagaaagagccatctataaatagaaaagtaggaagtctcctttaggaacattatttatatcaagttgtactcgttcccagcttcagaagtgagaaataggaggagcaataaaactttattgcaagccgatgtagatatcgggcggcagatttctcatctctgcagtcccataaactgcttcacatgagagcrttacggctccagaaccacagagcagaacgtcggcagagcgyatccccagcatgcacgaatgggagccatcgcccatgggagatgttcaagaacagcggagatgtggcactgagggacgtggtggggatggg

SEQ ID NO: 80720 - DNA, 390 bp, Chicken  19866894373398_2
ggagcacccatgagatcaaacagaagctgctgaagatgaggaaatgaagctgctatccatatgcatgaagaaagagccatctataaatagaaaagtaggaagtctcctttaggaacattatttatatcaagttgtactcgttcccagcttcagaagtgagaaataggaggagcaataaaactttattgcaagccgatgtagatatcgggcggcagatttctcatctctgcagtcccataaactgcttcacatgagagcrttacggctccagaaccacagagcagaacgtcggcagagcgyatccccagcatgcacgaatgggagccatcgcccatgggagatgttcaagaacagcggagatgtggcactgagggacgtggtggggatggg

SEQ ID NO: 80721 - DNA, 600 bp, Chicken  19866894373399_1
tggaggggaagcagagatgtttagtaatggtactcttttccaaacaattcaagtaactaaatacctgtaggggggtgtaagcttggggtgtgtggggggtactctgtattttagatcacaggttcccaattgtctggccattgtcaactgtcaatatttaccatgtatcatcactggtgtactgttaatatctggcttgtaagtaaaaaaaaatccaaaacagtatgactcaagtccaattatcaaggcctcaggactacttgtaatgctcagaccacagtaggaactgctcaaagcatrctgaacgtatctgttacaaaaatatctacactgtgtttttctttcctctttcagccgccaagttctacaggtgcataggtccaatgggctggatgacctggggggcattagctggcaattgaccctctgtttattgttaatcttcatcattgtatacttcagcatctggaaaggggtcaaaacatctggcaaggtgaatgcaaaagcaagacaaatcacttggtacagtatagcctagcacaagttctgaaggagccaattaacatgacagttatcccagactgtcttcagggcagggat

SEQ ID NO: 80722 - DNA, 600 bp, Chicken  19866894373399_2
gtccacgtaaaacataacagtaagttatgccacggttctgtgcacaagagcaaccccacgcagagaaagcatggatatttatgtgcaatctgcccatttacagaacttttgagaagttcatatgaagatgttataaatgctaagagttatcctttgaaagttatcataaacttttctcatctcttcattttctacccatggcaaacactatctcaatgttctccctcgcaggtggtgtgggtgacagccacgttcccttatgtcatactttttatcctgctcgtgagaggggcaactctrccyggtgcctggagaggtgtcctctactacctgaaacctgaatggcagaagctcctggccactgaggtaagaacattacagaacagttgggactcacttatagcctttcagcatgtgtaccacatgtataaactccaatgtgtactttcagtacagagtatgactacacagatgtcttggcatggacttaaaagccttacgtcatgcatttaacagtcatcctattctttccgtaactatatagatgttttttaaagattagatggggttcctggttctgttctgctatgtaagttcatt

SEQ ID NO: 80723 - DNA, 600 bp, Chicken  19866894373399_3
cacgtaaaacataacagtaagttatgccacggttctgtgcacaagagcaaccccacgcagagaaagcatggatatttatgtgcaatctgcccatttacagaacttttgagaagttcatatgaagatgttataaatgctaagagttatcctttgaaagttatcataaacttttctcatctcttcattttctacccatggcaaacactatctcaatgttctccctcgcaggtggtgtgggtgacagccacgttcccttatgtcatactttttatcctgctcgtgagaggggcaactctrccyggtgcctggagaggtgtcctctactacctgaaacctgaatggcagaagctcctggccactgaggtaagaacattacagaacagttgggactcacttatagcctttcagcatgtgtaccacatgtataaactccaatgtgtactttcagtacagagtatgactacacagatgtcttggcatggacttaaaagccttacgtcatgcatttaacagtcatcctattctttccgtaactatatagatgttttttaaagattagatggggttcctggttctgttctgctatgtaagttcattgtg

SEQ ID NO: 80724 - DNA, 600 bp, Chicken  19866894373409_1
agtggtagacctggatgcatatcagtgtctaatggccaggggaaagaagttgtacagttgtaaatggccacttgcctatacagactgagagcaattaactctgcttagctgagcatcaccctcctcagactgctataacaacctttaaatattatttagaaggttactgaaagcatattctttatattcacgaggcacaacagcgctgcccctctgtaaatctctgaggtttacagcctccctgtaatgagcacctcagcacaatgctgtggagcggaatgcaccactgggctcacaaakattcagtgtgtgtgattaagcatatggaaaaaaaagccttactactcagccacaaaacgtgcaacaattatttagatatttgattacagcaggataaaattacaacttgactttcaatcagcgatttgtaactcaacctcagtctaatgcctaagaaaatatcaagccctgtctttcctcatatgctgttatcaagcagttgacagttctgataataaataggcaggacaagagagcaagaggagagtgactttgggcacataaactttcttgtgctaagaagacagatgttagaccagg

SEQ ID NO: 80725 - DNA, 600 bp, Chicken  19866894373417_1
gttcacaccatctgcatgcttgacttcattcaccacaactgccattctttctcagacggtggtggtgatgcatggttggtactgagaagtcaccactggatgtgcttttatgatctcaggaattttgttgtggttgtggcaacaagtttttagagagaatcacttaattaaactgacggctctggagcagactaaaagctgagaagcttctcagacccacaggcctttgaagaatgcagctgtcttctaaatctgtctgttgctgtagtagttgcttatgtgtctgtagagaactgtgcrtgaaactcatatatcaaagcactcttcaatctstaaagacaaatctagaatcattaactcattttatgagaaagagtttatggaggactatgaagtggttgccaactacaaattaaggttgctttttcacctttagcctggaaggttctggcaatttggaaaactatgaaggtgcggaagtttcatctcctgcttaggtgtactgtaaactctgtgctgtgtggtgtgggagaatctgcattcttggctgtggaagaggggcagatcacagcagttgcatccagcagcatgttatctcag

SEQ ID NO: 80726 - DNA, 600 bp, Chicken  19866894373417_2
cacaactgccattctttctcagacggtggtggtgatgcatggttggtactgagaagtcaccactggatgtgcttttatgatctcaggaattttgttgtggttgtggcaacaagtttttagagagaatcacttaattaaactgacggctctggagcagactaaaagctgagaagcttctcagacccacaggcctttgaagaatgcagctgtcttctaaatctgtctgttgctgtagtagttgcttatgtgtctgtagagaactgtgcrtgaaactcatatatcaaagcactcttcaatctstaaagacaaatctagaatcattaactcattttatgagaaagagtttatggaggactatgaagtggttgccaactacaaattaaggttgctttttcacctttagcctggaaggttctggcaatttggaaaactatgaaggtgcggaagtttcatctcctgcttaggtgtactgtaaactctgtgctgtgtggtgtgggagaatctgcattcttggctgtggaagaggggcagatcacagcagttgcatccagcagcatgttatctcagtgctcctgcagccgtgaaatttcatgtttattt

SEQ ID NO: 80727 - DNA, 599 bp, Chicken  19866894373422_1
  misc_feature (1)..(56): n is any nucleotide
nnnnnnnnnnnnnnnnnnnnnnnnnnnnnnnnnnnnnnnnnnnnnnnnnnnnnnnnatctgtacgcaattgtactttaaagactgaaacaacacacagccacaagatgcatgtcaggctacattaaggacatcatctggaaaaaaaatatttttgataaaaataatttaaaaatggcttccatttatcaagagaaactacaagtaaacacacatctgttttgcaaaaactccactgttcccttctacatgttgtacaaataccaataaacttaccaaccagagaaaatatcccaagattktgcagagtcatcagagattccatccaggagaaaggacagcagtttaaaaatcaaataactacattcactacattatgaagtcaatacaatgcaaactgacagaacagaacatatatgtttatgcattatccagaaaaataggaaatgaattaaatatgtcacacaattaaggtgtatcttgactggcattaactaacatgctgtagtcaaaccaaaagtctacatctctaacacctggacaccactggcaaagagttgtgccaaacattttgagtacttggaaaagttcaattttacag

SEQ ID NO: 80728 - DNA, 600 bp, Chicken  19866894373433_1
tatacttccatgccatggaactgctcaaatacagatctgttaagctgtctagtcctttcactggcaggactttagtttttaactaattatctgtgtgtatataaacacgtgttggggatactgcaacttttactttaggcatcaaatgtagagtctctgaactcttcttacaatgtactgcccacttctggaggctgatcagggcagtttggatgttctgctgaatgcatagcgagagatcttaaattcttaattcagccactcagattagcacttgaagacatgaagtggctacttcaragagcagccaagcataaaattttgtttagttataggtaacaagacaattttattgtagcatttttagtatatcttatagattttctagaatattaagaagtactgcaaagaaattatcaagctatcagtcaaaattggaatgttttgcaggacagtaatatctgcgtgtccatgcatttaagctgatggtatactatctccttctgacagtgcttcattcttctgattgtaatgctccatttttctggttgagtctcaaagagctgatccttataagacatgttctcttaccttacacag

SEQ ID NO: 80729 - DNA, 580 bp, Chicken  19866894373433_2
tatcaagctatcagtcaaaattggaatgttttgcaggacagtaatatctgcgtgtccatgcatttaagctgatggtatactatctccttctgacagtgcttcattcttctgattgtaatgctccatttttctggttgagtctcaaagagctgatccttataagacatgttctcttaccttacacagatattcatacctgacccgagcagttattttctactcctaatagcatgtacaaggatgtgctgctgcaggcctttttttttttttttattcctctggtgatgcatagaggctatmgaatcttatcagactacagcttaatgatgttccttatgtagtgcattttggggccatttacaggttgttacagagcatgtgacgaggtgtcagcagcaggctrttgctattctactggttacgtttgatcataggcaggcagatacaacttatagcagatttgaagtgtactgtttgtcctgcctaactgcaagtatctgtacatgtacctagtttttattataggcatagagtctagagcatgatttgcctaaaaatacttgtttctgtttcaggaaga

SEQ ID NO: 80730 - DNA, 477 bp, Chicken  19866894373433_3
ttcttctgattgtaatgctccatttttctggttgagtctcaaagagctgatccttataagacatgttctcttaccttacacagatattcatacctgacccgagcagttattttctactcctaatagcatgtacaaggatgtgctgctgcaggcctttttttttttttttattcctctggtgatgcatagaggctatmgaatcttatcagactacagcttaatgatgttccttatgtagtgcattttggggccatttacaggttgttacagagcatgtgacgaggtgtcagcagcaggctrttgctattctactggttacgtttgatcataggcaggcagatacaacttatagcagatttgaagtgtactgtttgtcctgcctaactgcaagtatctgtacatgtacctagtttttattataggcatagagtctagagcatgatttgcctaaaaatacttgtttctgtttcaggaaga

SEQ ID NO: 80731 - DNA, 600 bp, Chicken  19866894373438_1
ttcaaagtgacaccatgcctaaaattttgtgggaggattgggaagagagaggaagcagagaagaagagaggagggccatctccctgtgatttttattatgaactcctgttgctacagacttcacattgagggtatacagccatgggcagaggcattaaaccttaaaataaacaagagaaggtggtctgaaaagaatggtctaagtgaaatgactagtctccagcaaatattagtaaaagaaaagtcatagattgcagctctatatcagtaaatgtaatatgtttttccgttgactgtaayatacactaacaggacttccaatatctatgtctcggtgcctggagttggttgtaaaaggaagcaaataccttcaaaagctctttttttttttyttcccatttattgtaattcaactctaaattccagttttggttgggtatttaatcaagtgaaatagcaattatccccagagaaggaagatgacacagacttgggaaacaggaattttgctcagaccagaaagagactgtcagtgaagtaatattcatctctataggcttcacaaatttccaggtgtcagctcctctgtaaagagacttt

SEQ ID NO: 80732 - DNA, 600 bp, Chicken  19866894373438_2
ttattatgaactcctgttgctacagacttcacattgagggtatacagccatgggcagaggcattaaaccttaaaataaacaagagaaggtggtctgaaaagaatggtctaagtgaaatgactagtctccagcaaatattagtaaaagaaaagtcatagattgcagctctatatcagtaaatgtaatatgtttttccgttgactgtaayatacactaacaggacttccaatatctatgtctcggtgcctggagttggttgtaaaaggaagcaaataccttcaaaagctctttttttttttyttcccatttattgtaattcaactctaaattccagttttggttgggtatttaatcaagtgaaatagcaattatccccagagaaggaagatgacacagacttgggaaacaggaattttgctcagaccagaaagagactgtcagtgaagtaatattcatctctataggcttcacaaatttccaggtgtcagctcctctgtaaagagactttaccatattttttcattgatgtctgcagttatgaaactttctttttaagttgttacttaagtgctattgaatatcagtggagtttctctttga

SEQ ID NO: 80733 - DNA, 599 bp, Chicken  19866894373440_1
  misc_feature (1)..(14): n is any nucleotide
nnnnnnnnnnnnnngttggctgttggttggctgttggtttttggttggctgttggttggttgttggtttttggttggttggtggctggctgtcaattggctgttggttggttgttggctgttggttggttgttgattggctgttgattggctgttggttggctgttggttggttgtcgattggctgttggttggctgttggttggatgttggttggctgttggttggttggttgttggctggctgttgattggctgtttcttggctgttggttggttgttgcttggctgttggttggttkgttgttggctggttgttgattggctgtttcttggctgttggttggttgttgcttggctgttggttgtttggttgttggctagctgttgatcggctgttggttggcttttggttggctgttggttgacttttggttggctgttggttggttggttgttggctgttggttggttgttggttggttggctgttggttagttgttggttggtacagcccaacttgggctcgttctggctggaggctgagcacgggctgtgcagctctgtgggctcctgcgcagctccgtggctttggggcagc

SEQ ID NO: 80734 - DNA, 599 bp, Chicken  19866894373442_1
  misc_feature (1)..(72): n is any nucleotide
nnnnnnnnnnnnnnnnnnnnnnnnnnnnnnnnnnnnnnnnnnnnnnnnnnnnnnnnnnnnnnnnnnnnnnnncaaacatgggcagagttcaaggcaatccaaagagatggtgcaatgagggctggccgagctggaatagaatgactcaaaatatttccttttgcttccttcgcttatctggctgccagatttgactttttttttttcctccttttatttttggtagggagttattactgttgctaatgagagtcaattgagtcatttaaaaataaaactgaatggaagtttgatttattrcaaataacaaggattgttaaatctcttgaaaaagatagggagagatgtgtgtactagttacctgtagcaatgataaggatatttaagggtttgggcagtgcctggcatggcttctttaaccttgggaaagcttctagaatgaatgcagaaacgtttggtactgtgtagtgatctgttttggttttctcctgagttttcttatgtaaaayaacaagtatattaatttaactccaaaatctgttgtaatggccatgacatggctcccttttctggtatgatctgttgttgttyggacttcg

SEQ ID NO: 80735 - DNA, 600 bp, Chicken  19866894373442_2
ccttttatttttggtagggagttattactgttgctaatgagagtcaattgagtcatttaaaaataaaactgaatggaagtttgatttattrcaaataacaaggattgttaaatctcttgaaaaagatagggagagatgtgtgtactagttacctgtagcaatgataaggatatttaagggtttgggcagtgcctggcatggcttctttaaccttgggaaagcttctagaatgaatgcagaaacgtttggtactgtgtagtgatctgttttggttttctcctgagttttcttatgtaaaayaacaagtatattaatttaactccaaaatctgttgtaatggccatgacatggctcccttttctggtatgatctgttgttgttyggacttcgaggtcttttattttctttccaattaccactccctggatccttctgaaaatttttgtttcggcattctttccccttacatcacctattacaacactgctcactgcctggctgctctgaaaaatgaaaacaataatactttgtacatggcattaccttatgagtaataactgcttttggcaagcagaatggtgactgctaaatgtcagcatc

SEQ ID NO: 80736 - DNA, 600 bp, Chicken  19866894373442_3
gatttattrcaaataacaaggattgttaaatctcttgaaaaagatagggagagatgtgtgtactagttacctgtagcaatgataaggatatttaagggtttgggcagtgcctggcatggcttctttaaccttgggaaagcttctagaatgaatgcagaaacgtttggtactgtgtagtgatctgttttggttttctcctgagttttcttatgtaaaayaacaagtatattaatttaactccaaaatctgttgtaatggccatgacatggctcccttttctggtatgatctgttgttgttyggacttcgaggtcttttattttctttccaattaccactccctggatccttctgaaaatttttgtttcggcattctttccccttacatcacctattacaacactgctcactgcctggctgctctgaaaaatgaaaacaataatactttgtacatggcattaccttatgagtaataactgcttttggcaagcagaatggtgactgctaaatgtcagcatcatattagccagactgatggatttggtaccctcttattagctatttggctatgggttttccttataggagttaaaatatagca

SEQ ID NO: 80737 - DNA, 599 bp, Chicken  19866894373447_1
  misc_feature (1)..(87): n is any nucleotide
nnnnnnnnnnnnnnnnnnnnnnnnnnnnnnnnnnnnnnnnnnnnnnnnnnnnnnnnnnnnnnnnnnnnnnnnnnnnnnnnnnnnnnnacgtgtagcctaggaaacagcaaagagcaaaaatctgtttgaataagaattttgatgtcttcaagtgaaataagagcatagtagaagactacatacaaaacaccttgttacagtgggtataaaacactaaaacactctagatgtaatttagttgatttattatgcactgcagctagtcactgaagacattcatgtaaaagggattattttacrtcaaaatatttaactgggtgcttttgttcacattttcataaccagtggcttaaggatggcacaatagggtctgatgacactagggtccgagcatcttcagattgataaggagtatccttgactaacctccactggttaagacccagagttctttcttgaattttcatggacaaataagccacgaagtctctcataatttcttccaaatctcaaccccctatattttttattttttaaactttattgtattctactgtagactgcagctatacagagttcatggacattaaggtcagatg

SEQ ID NO: 80738 - DNA, 600 bp, Chicken  19866894373449_1
tgagggcttttgcccatgctgtgattccaagattataaatgtgaagcaattagcactgattcattcttgtaagttctgcttgaaggttcagctgaggatctgtgcttttgtatgcttttgtgtaagtggtgcttcagcatgtttaataaggtcggttataatgcgtgtttgaaaactgaataaatggtatcaggaaaatatttctgattacatgagtaatagttttactgtttaaaatgtagtaaattacaatttgatatcaattaagttgaatgttagagatgtttttactttaacaarcttaaaatctcatatccttttgactgattgttctgattaggcattcgtttatagcaagtgaggagggactatccagttcctgaggaaaagacatttatagatgtcatgaaaccaaatcctgtgtctgtggttactcatacattccaggcaatcataatagtgcagaagcaggctcagggctcaagacaagtctgagaatgatgtaaagctatgtttaggattgtgtgtgatatcaaaatgcagtggaaaaagctgtccaactaatagctctcatgtaaagcagccagtgatactgcttgc

SEQ ID NO: 80739 - DNA, 600 bp, Chicken  19866894373452_1
acagctgatgtagagctgtgtggatgaacagttcaaaagcctggattagggccttttgttagccctgtaatggatgccaagtcccggacgtcagcttccagtgaacacaatggcttctgtaacagaccagagaaaacaaataagcatgtgggatgcagaatggaaaaaagggagaagccaaggataagcaggtcaaggtgaaagatctaagatgccagaggaaccgttgacttaaacaagctcaccagacatcccaagggaaaataaccctggaaaattcaagagaaagtgaacagcccwagaactcttccatggcaacattcaaggtttcctaacttggtctggaacaaaaccaaaaccttttatgcaccctcacaaagggaatgatgtcaaaacagctgtttctaaatcaagaagggttttcacactcctcatctctgggagcaaagacagcgaagctgcatttgccactgtgcactgaatgaaagaggatattctggggtgggaagaggagacgaaggttcaagtagatttatagtgtgggcacaacatactttattttgggtgactctactccttacagactaaattatcctcaac

SEQ ID NO: 80740 - DNA, 600 bp, Chicken  19866894373461_1
aataaaaatggtttgtacaaaagtgtatcagggagcgtcccctgccagcatatcttcagcacataaaatgctagtggtttattacataggtgaaagcaatgcatttatgaagtgtgctggtgataagtgttcaatcaacatttacgcaaatagaactgaactcactctgctgtttttatgacccttttaatacaatttctttgtcattcatattagcagagctgaataattccagctgaaattctgccttgtctttaactcaacttcacccaattctgaacattttacactttttgctgyaacaaaggttttgaagtttgaaagaatgcttaatgttttactcattttctcttttttaaaacttcattcatccagctttgtcagctgtaccccacrcccaaacttcactttgtgtagtgttttagaatatggctgaccttgcatcaaaaacatgaaatatcaaatctcacccccgtgaagcctatgttaatatgaattcatgtaagcgagctgcaaagtacttttcactcaaaagagaaaaaataaagaaaaaaaagcatgcatcttactgatattttttttcacagaaacaaacccatt

SEQ ID NO: 80741 - DNA, 600 bp, Chicken  19866894373461_2
caatgcatttatgaagtgtgctggtgataagtgttcaatcaacatttacgcaaatagaactgaactcactctgctgtttttatgacccttttaatacaatttctttgtcattcatattagcagagctgaataattccagctgaaattctgccttgtctttaactcaacttcacccaattctgaacattttacactttttgctgyaacaaaggttttgaagtttgaaagaatgcttaatgttttactcattttctcttttttaaaacttcattcatccagctttgtcagctgtaccccacrcccaaacttcactttgtgtagtgttttagaatatggctgaccttgcatcaaaaacatgaaatatcaaatctcacccccgtgaagcctatgttaatatgaattcatgtaagcgagctgcaaagtacttttcactcaaaagagaaaaaataaagaaaaaaaagcatgcatcttactgatattttttttcacagaaacaaacccattttcaagcttgactgaaaagtgcgatagtgattttgtatttcatcatgaatatttcaaacacatctgatttctacaaacacgatgattgctaacgtg

SEQ ID NO: 80742 - DNA, 600 bp, Chicken  19866894373468_1
atctagagggttttcactgtatgctgttgagtaaaactcaacaaagctacaatgagaaaaaagggctacatcacacaagagcatttgctacgaatgcctgctttcctggatgactgtaatctgtaaagagagtggcctttctctttgcagtcagctacatgtgattcaaacaagaatctctcagaccttttatcactgaggcacatcatcaagttatttccagattggaatgcagatgtgtgtagctgagactctgtgcatgctgttcctaactgctgcatgtgatgtttcatatccctrtgaatcggtattttctagtgaatcagcccccagacgtgtcacagagtgtctgcatttgcgtgcaaaaggtttttgaagagaccttcagcacagctctgatgagacacagcctmtgctggagcgaggaacccccctggcagaagtgagtgagcgcatgaacgagggaaggagtgaaagactgcctgtcaggtgagctccctttgctggcaatgaggagctgtggttgtgtgactcactggctggccgtcatgggaatgtctgagagcaggacgatgtgggcatgctgtggacagaccacaa

SEQ ID NO: 80743 - DNA, 600 bp, Chicken  19866894373468_2
ctgtaatctgtaaagagagtggcctttctctttgcagtcagctacatgtgattcaaacaagaatctctcagaccttttatcactgaggcacatcatcaagttatttccagattggaatgcagatgtgtgtagctgagactctgtgcatgctgttcctaactgctgcatgtgatgtttcatatccctrtgaatcggtattttctagtgaatcagcccccagacgtgtcacagagtgtctgcatttgcgtgcaaaaggtttttgaagagaccttcagcacagctctgatgagacacagcctmtgctggagcgaggaacccccctggcagaagtgagtgagcgcatgaacgagggaaggagtgaaagactgcctgtcaggtgagctccctttgctggcaatgaggagctgtggttgtgtgactcactggctggccgtcatgggaatgtctgagagcaggacgatgtgggcatgctgtggacagaccacaagtggagcactgtttagattcatctgttcctgctttagggaatcacggcaaattatgatggcaagcttaaaacaacctggaaattataaaactttattttaaacacagctgtta

SEQ ID NO: 80744 - DNA, 600 bp, Chicken  19866894373470_1
cgcagttcctaagataccagtcaaagccttaactgtttaaaaaggtacaggagtccaaaactgatggtgagcacacctccaggcttgctgcagcacaagtaagcgctgctctgagaggctgctgcaaaatcaaacaagtgaacaaccaaatgggatttcatcactcatcctcctgctgttacaacaggtctaccaggacacagccactgcacaggaaccccaaaccctgcctgcagagcgaccagggggtgatctacaatgcctactccagctccaggcagagtctcaggcttcaattcstcccctgtacctcctttgatccttccttcagattatcctgatttttctccctcaggaagaaagaaaaggatctagaaaaggagtacaagttcagacttgacgcaagggcagtgccggtggaaaagattgcgcttgtaagcaaccgcagcagctgttaggaaatgaggcatacgaagggaacagaaaccagcatttaaactttaacagtgagaaaataagtggcccacgtagaaaaagaaatccaagccaagacactgacttctcttattttctccccaagactttgcatctgcatctctg

SEQ ID NO: 80745 - DNA, 600 bp, Chicken  19866894373477_1
actttctccattgaagtgtattgcttgaaacttgatacaatagaagaagtaattataaatttggctcagagtcgcacaggagctgtgtctgattggatctatagctgttcaatattcatttttattcttccttttgcacagtgaagggacacaatttatttttacaattgtattgagatattttgtggatgcttatcaggtgaaccatttagctggaatcttttcgctgtaccgagaagctgttcttggtcagtctttttatgcatacacatagaattcaggcctgaaggcaaaatgagrcttcctgtagtcacgttacatagtatacagctcggtcacagtcagatataatgagaaggggagcataggaatctatatagcacagctatgcattgcactggatttgagattgtcactagaaggcatgggagttgccagctatgtgcccctggagccctacattttttctggtgagccaatttgcttttctgcctgttacctgcacccagctgttgagcagacaacactgaagcaaagcaggtttgctcccagccggtcagcttggatgcagttaggtactcagttcttatctaatgtaag

SEQ ID NO: 80746 - DNA, 600 bp, Chicken  19866894373478_1
aacagaacttcaccgtgtattttgcatgaacaaccatggagctgtgtcatagctgcacagtcagttggaaacaaggacataattaatctcctccatgcacctctcaggcactgtgattaagtgggtacagtactcatggctccttctgagtagtagcaccaggactatgaaaaaatttagtttctaaagtaaggcctttattgaaacaactagtatcattataatgaggaatccagtctttctagctctgtgtgggagtatgaagaaaagtaacagaaagttcatatgtagagaaatctsktacaccggaaaatgcttagacttcagcagcagcaggtgcattatttttctgtaagaaactctttaaataagtttattgctctcgtaggacttaatggcaggattattaaactgcccaaatgaaaataaatatacttacttttatggtggtctaaaagatttttgtcattctcaggctattttcttaaccttaggagcattatgatcttataatggtgattatttaggtgttttcaaaaaaatcattaaggttggggaagaccacagggtgtccaactgacatcccatgcccactaagtc

SEQ ID NO: 80747 - DNA, 600 bp, Chicken  19866894373478_2
acagaacttcaccgtgtattttgcatgaacaaccatggagctgtgtcatagctgcacagtcagttggaaacaaggacataattaatctcctccatgcacctctcaggcactgtgattaagtgggtacagtactcatggctccttctgagtagtagcaccaggactatgaaaaaatttagtttctaaagtaaggcctttattgaaacaactagtatcattataatgaggaatccagtctttctagctctgtgtgggagtatgaagaaaagtaacagaaagttcatatgtagagaaatctsktacaccggaaaatgcttagacttcagcagcagcaggtgcattatttttctgtaagaaactctttaaataagtttattgctctcgtaggacttaatggcaggattattaaactgcccaaatgaaaataaatatacttacttttatggtggtctaaaagatttttgtcattctcaggctattttcttaaccttaggagcattatgatcttataatggtgattatttaggtgttttcaaaaaaatcattaaggttggggaagaccacagggtgtccaactgacatcccatgcccactaagtca

SEQ ID NO: 80748 - DNA, 600 bp, Chicken  19866894373479_1
ctgtcacataatagcaacacagcaaattcttctgatttcctgtacatatagcccctgagaaaagtagtgctgattcctcttcttttcagagagagctatcattacctattttcctgtatgatccctatatgattgctctgcttcattatccattttatggttggattttaaagcagaaagccagttaataaatctcaatctaatgaatcattcaaaccatctagccacttggctgatggctcttctctcacagtgaccatttttcagagcaatattttatatattaagacattttggtcyttggatcataaaaagttgctaaccaatgtatttatttaccccagaggacagggatagtctgctactttaaaatattcccctagtttaaaatgtttctgcatttaagaaaaaaaacagcaaataaacaaggaaacaaactctcttccagtcaggtactataaataatattagatgattatataattcatcctttcagcaaagattcttttcctttctttgcttacttgtgagtttgatgtaatagctacagtygaattattatcctcagactggaaataattcacagataagaaacagcac

SEQ ID NO: 80749 - DNA, 412 bp, Chicken  19866894373479_2
gtgaccatttttcagagcaatattttatatattaagacattttggtcyttggatcataaaaagttgctaaccaatgtatttatttaccccagaggacagggatagtctgctactttaaaatattcccctagtttaaaatgtttctgcatttaagaaaaaaaacagcaaataaacaaggaaacaaactctcttccagtcaggtactataaataatattagatgattatataattcatcctttcagcaaagattcttttcctttctttgcttacttgtgagtttgatgtaatagctacagtygaattattatcctcagactggaaataattcacagataagaaacagcacttactttgccaaatatatatatatttggatctttggtatcacattatattatgcagaatcagag

SEQ ID NO: 80750 - DNA, 599 bp, Chicken  19866894373493_1
  misc_feature (1)..(109): n is any nucleotide
nnnnnnnnnnnnnnnnnnnnnnnnnnnnnnnnnnnnnnnnnnnnnnnnnnnnnnnnnnnnnnnnnnnnnnnnnnnnnnnnnnnnnnnnnnnnnnnnnnnnnnnnnnnnnaaactcctcaggctaatttctgaagccgtgcctctaaaaaagcatcaaaatattttgcgaatatgattttacatacttaaacctgcatgtaggtatagaaatcaggaaaagttccagtacaacaaaataagatctattcatccttttgaccgtaaagacattctgttattattcttttcccttatgactgmattgaaagagcttttataaaacytccatcacacttttaaaataaatattcaagaaagaaaacaacaaccaccacaaaacaaaacaggggttgtatgttttctgccaaaaaatccttacatcaatcaaacaagtatacattagcaagacagaaacacattaagactcattttcctttttygtgtgccaggctgcttctttcatactacatatcagaaggaaagtaattcacctctcaaaatattagagaagaaaatatgactgtgatgcacttctgcagaatacagtcagatttccataa

SEQ ID NO: 80751 - DNA, 599 bp, Chicken  19866894373493_2
  misc_feature (1)..(86): n is any nucleotide
nnnnnnnnnnnnnnnnnnnnnnnnnnnnnnnnnnnnnnnnnnnnnnnnnnnnnnnnnnnnnnnnnnnnnnnnnnnnnnnnnnnnnnaaactcctcaggctaatttctgaagccgtgcctctaaaaaagcatcaaaatattttgcgaatatgattttacatacttaaacctgcatgtaggtatagaaatcaggaaaagttccagtacaacaaaataagatctattcatccttttgaccgtaaagacattctgttattattcttttcccttatgactgmattgaaagagcttttataaaacytccatcacacttttaaaataaatattcaagaaagaaaacaacaaccaccacaaaacaaaacaggggttgtatgttttctgccaaaaaatccttacatcaatcaaacaagtatacattagcaagacagaaacacattaagactcattttcctttttygtgtgccaggctgcttctttcatactacatatcagaaggaaagtaattcacctctcaaaatattagagaagaaaatatgactgtgatgcacttctgcagaatacagtcagatttccataaaatgtctgcagggttttgcacat

SEQ ID NO: 80752 - DNA, 600 bp, Chicken  19866894373493_3
acatacttaaacctgcatgtaggtatagaaatcaggaaaagttccagtacaacaaaataagatctattcatccttttgaccgtaaagacattctgttattattcttttcccttatgactgmattgaaagagcttttataaaacytccatcacacttttaaaataaatattcaagaaagaaaacaacaaccaccacaaaacaaaacaggggttgtatgttttctgccaaaaaatccttacatcaatcaaacaagtatacattagcaagacagaaacacattaagactcattttcctttttygtgtgccaggctgcttctttcatactacatatcagaaggaaagtaattcacctctcaaaatattagagaagaaaatatgactgtgatgcacttctgcagaatacagtcagatttccataaaatgtctgcagggttttgcacattaaaatttctcatactaaaaatgtttatggaaataggtcattatgcacattactaatagagagcaatttgttgcttttaaaggagcttttatactaatagttgtgaataaacacatttatcagacatcctaaatataaacaatgtatatattgggtg

SEQ ID NO: 80753 - DNA, 600 bp, Chicken  19866894373497_1
atggtctacatgactgctgggacatatttctgcccaggtgtttgttaggtcactgcctcccctgtttttccaacctgtgcacggtgctgctttcctcatccaaataaaaaggatcagggcaaagagcatcatgagatgaaaaaaataaactgtgtgttaactacgaagtgtaagcatttctacagagagatgcatgcatgttcagtgtgaggttccctttgatatcccctaaagaattttaaagaatgtattttaaatcaagagcaaagtctgctcctctgctgtgagagtggatgggayrgggatgggyacagtcctgatcccactcctgatgyagtgtggctttgagagcattgcagccttcacatactggaagggcatttacaagcaggatggggaccaactttgtacatgatctgatatgatagataggacatggaggaatggcttgaaaataaaagaggggaaactgaggttggatgtgaggagaaaattctttgctcagagggcactgaggccctggcagtgctgcccagagctgtgggtgccccatccctggaggtgcccgaggccatggatgggccctgggcagctgagctg

SEQ ID NO: 80754 - DNA, 600 bp, Chicken  19866894373497_2
tggtctacatgactgctgggacatatttctgcccaggtgtttgttaggtcactgcctcccctgtttttccaacctgtgcacggtgctgctttcctcatccaaataaaaaggatcagggcaaagagcatcatgagatgaaaaaaataaactgtgtgttaactacgaagtgtaagcatttctacagagagatgcatgcatgttcagtgtgaggttccctttgatatcccctaaagaattttaaagaatgtattttaaatcaagagcaaagtctgctcctctgctgtgagagtggatgggayrgggatgggyacagtcctgatcccactcctgatgyagtgtggctttgagagcattgcagccttcacatactggaagggcatttacaagcaggatggggaccaactttgtacatgatctgatatgatagataggacatggaggaatggcttgaaaataaaagaggggaaactgaggttggatgtgaggagaaaattctttgctcagagggcactgaggccctggcagtgctgcccagagctgtgggtgccccatccctggaggtgcccgaggccatggatgggccctgggcagctgagctgg

SEQ ID NO: 80755 - DNA, 600 bp, Chicken  19866894373497_3
tgactgctgggacatatttctgcccaggtgtttgttaggtcactgcctcccctgtttttccaacctgtgcacggtgctgctttcctcatccaaataaaaaggatcagggcaaagagcatcatgagatgaaaaaaataaactgtgtgttaactacgaagtgtaagcatttctacagagagatgcatgcatgttcagtgtgaggttccctttgatatcccctaaagaattttaaagaatgtattttaaatcaagagcaaagtctgctcctctgctgtgagagtggatgggayrgggatgggyacagtcctgatcccactcctgatgyagtgtggctttgagagcattgcagccttcacatactggaagggcatttacaagcaggatggggaccaactttgtacatgatctgatatgatagataggacatggaggaatggcttgaaaataaaagaggggaaactgaggttggatgtgaggagaaaattctttgctcagagggcactgaggccctggcagtgctgcccagagctgtgggtgccccatccctggaggtgcccgaggccatggatgggccctgggcagctgagctgggggcagcca

SEQ ID NO: 80756 - DNA, 600 bp, Chicken  19866894373497_4
aggtgtttgttaggtcactgcctcccctgtttttccaacctgtgcacggtgctgctttcctcatccaaataaaaaggatcagggcaaagagcatcatgagatgaaaaaaataaactgtgtgttaactacgaagtgtaagcatttctacagagagatgcatgcatgttcagtgtgaggttccctttgatatcccctaaagaattttaaagaatgtattttaaatcaagagcaaagtctgctcctctgctgtgagagtggatgggayrgggatgggyacagtcctgatcccactcctgatgyagtgtggctttgagagcattgcagccttcacatactggaagggcatttacaagcaggatggggaccaactttgtacatgatctgatatgatagataggacatggaggaatggcttgaaaataaaagaggggaaactgaggttggatgtgaggagaaaattctttgctcagagggcactgaggccctggcagtgctgcccagagctgtgggtgccccatccctggaggtgcccgaggccatggatgggccctgggcagctgagctgggggcagccagcacatggcagggtggggctggggg

SEQ ID NO: 80757 - DNA, 600 bp, Chicken  19866894373504_1
acaacatagatcctccaagcccatttaaaacacttttttttttcgtgagtcggaggcctcgtcattgcacaaagcgtgtgtgtgtgtgtttgttatggatttaaatggatggtgcacatatgcacatctgacactgaccaggcccttgagggaaatggtttagtcacggcaatgaaagcgagctctgctgggataggctcttaaaggagagacacaaacacacagcgatgcgtatggcccctctgcagccagtctctcctgctgctgttctgtggttgatatgcaggaatggagttaaaygactagaaaggttttgtctttattttggtgcccactgctacccagctggaggagaagcctagcaaacaggtgctcaccggcttcccctggggatggtcacccctcatgtgtttactcgctgagcccagcaggaaggaagacgcctgggatggagcagaagtccagactagacccatcatgtgtgtgaagctggggagcagtgagtcactgtgtcacaccacagctagcagccacggccgtgtctctccagccaacacctgacccaaagcagtgggagtcacagccatgcaggcctggaat

SEQ ID NO: 80758 - DNA, 600 bp, Chicken  19866894373505_1
aactgggtttttcttcagactttcaatgatctctggtgctttgtcaccatagatgcgatagatggccctgcgctggatcacttctgatgttcctcccaagcaatcatccagccgaaatttctcctgatcctcttgagtgagacgagaaagctttttctgcacactctccagcacacgtattgtggctaaattggtctccaagacaacatccagctgttaagagtccacaaagacacagtttaagaatgctgacatcaggaagatggagatgagcagtgctcaggtctgcagcccgctggrtggagctaagaagcatcagcaaggcttcttactgcaaaacagaccaatgccagttctccaagggtaacatgccttccagaactggactcatacctaagagaactattagactctaaacaagtgggaaaacaccaaactctagctcaacctaatgaacactaataaaacttccagtatttggccaatgattatttcagtaaaaatcctcaacagctagaagtattgttttgtgaggagggagaatggaagctgagcagcagaggtacctcraaccgctcatcctcacagcggtgcaactgt

SEQ ID NO: 80759 - DNA, 600 bp, Chicken  19866894373505_2
gagcagtgctcaggtctgcagcccgctggrtggagctaagaagcatcagcaaggcttcttactgcaaaacagaccaatgccagttctccaagggtaacatgccttccagaactggactcatacctaagagaactattagactctaaacaagtgggaaaacaccaaactctagctcaacctaatgaacactaataaaacttccagtatttggccaatgattatttcagtaaaaatcctcaacagctagaagtattgttttgtgaggagggagaatggaagctgagcagcagaggtacctcraaccgctcatcctcacagcggtgcaactgttcctcataaggagtcttcttggagctgacaaaagtcgagtcttcagaccaggatggaaatgaaacccaggtatcatttaacacctgcaagagtgcaaagacacactgaacaatgccttaggagcccagagctgttctaagagctctgatactttctctgttttattctttgcagttctttcttgagtttctcctggaggtttcagcctagctaacactgtcatgactactcctagatatttagaggtctgtgtagaaacgcatcagagtt

SEQ ID NO: 80760 - DNA, 600 bp, Chicken  19866894373510_1
acataaaaccaatgacagtagctgccagtactggtcagtcagaccttggtatctggctccatcctgataggaaacagcttctatggtgaagcaagcaggtatttctatgcctatttccaggagcaatcagctgcccgttatcaacgtaaacatggatttgctgagcagcagcatgcacagtttgaagctgcaaagttttagttatgtgattatggtgttcaggttttctagaaatgggaaatgtgataaaaaaagaaagaaaaccatgataatgttatttagctgttttgtgtcaattcrtagaatattttcctggtctgtctacagaagtttaaattatggccgctatttggtttgaacagaaaaccatttctacgctgaaaggctgggttatagagagtcatttttctaccctttttgaaaagccatctacaatattaaacagagcagtagttttgaaagtggcttgcataaaacctggtttattacagtttgtttttgttggagtttaatatgggtaagaatttatgtaattgttttactgattactttttgtaccaaataattatatctgtgctgatcctttgtatactgtttaga

SEQ ID NO: 80761 - DNA, 600 bp, Chicken  19866894373515_1
ccagcactgaaggaagcagagctggtccagagaaagaattaaaaccaaagtaaagaatatcattacagcagtgctcactgctcctgctctttttaatgtggtgttggcattttcattataaactcatatttccaggttttataactcaatcataaagaactgctgagggctaaatattggcaagcagctctgcttgccaaaaaatgaagcatttccacagtgtggagggagggcaagagtctccacctctgcttatttcactgggaaagcaaatctaacatcatcagttctataccaacwggcagcctctaccagaacctttgcacgatgtgccagaaggcccacagccacatgctgcagttgcaggcacagctcgcagctcctcagtccagaagcaatcagaagatcaaatttcccccaggtgtcaggtatgatattttctttttgctttagattttgaatcaaaaaaagaaaaatactgtatccctctgatgctactcaccatagccctccaggtgttatgtggcacttgtaagaagcagagccagttctctgcaggacagaatggatcacagtgcaggtctgggagcctgagtgctg

SEQ ID NO: 80762 - DNA, 600 bp, Chicken  19866894373518_1
gaagaatgtagagactctgtatcagtggaaaatattcagcttctccttttctttctcttttcagggatagttttggattctggggatggtgtcacgcacaatgtacctatctatgagggctatgccttgccccatgctattatgaggctggaccttgcagggagagatctgactgactatctcatgaagatccttacagagagaggctattcttttgtcaccactggtaatgagctttattttgcatgcactttgcttatatttgttctggtagttgtgttactatgctgtatgtatatrtatgcaatatacatatatgtatattttgatgtaatatgcatcagaaaccatttctctagcttagctaatggagttcttctggctgtgtcttgcagcatgtctattgagctcaaggacatagttactgctttgataggaaatcctgtgtcattgagaaatataactggttgtcagaatagatcatatctgttccacagacaaaggaacaaaattagtagctggtaayagatgaacgtctggagatttgatcaaagttttggcacataaaatataaaaattgatctctacagtatttggtaa

SEQ ID NO: 80763 - DNA, 600 bp, Chicken  19866894373518_2
gtaatgagctttattttgcatgcactttgcttatatttgttctggtagttgtgttactatgctgtatgtatatrtatgcaatatacatatatgtatattttgatgtaatatgcatcagaaaccatttctctagcttagctaatggagttcttctggctgtgtcttgcagcatgtctattgagctcaaggacatagttactgctttgataggaaatcctgtgtcattgagaaatataactggttgtcagaatagatcatatctgttccacagacaaaggaacaaaattagtagctggtaayagatgaacgtctggagatttgatcaaagttttggcacataaaatataaaaattgatctctacagtatttggtaacacaayacrtctttatcagcagatgagagaaatttggttatgcaaataggaartaatttagttaagatggcagagagatcaagtccaatggactgtatggacaccgtgggcctaaggaactgtgcatgagaatgtctgtgttcaatctgttgcactgtatgttgataaaaacgtattgaatctgcagcggaacgggagattgtgagggatgtaaaggagaagcttt

SEQ ID NO: 80764 - DNA, 600 bp, Chicken  19866894373518_3
atatacatatatgtatattttgatgtaatatgcatcagaaaccatttctctagcttagctaatggagttcttctggctgtgtcttgcagcatgtctattgagctcaaggacatagttactgctttgataggaaatcctgtgtcattgagaaatataactggttgtcagaatagatcatatctgttccacagacaaaggaacaaaattagtagctggtaayagatgaacgtctggagatttgatcaaagttttggcacataaaatataaaaattgatctctacagtatttggtaacacaayacrtctttatcagcagatgagagaaatttggttatgcaaataggaartaatttagttaagatggcagagagatcaagtccaatggactgtatggacaccgtgggcctaaggaactgtgcatgagaatgtctgtgttcaatctgttgcactgtatgttgataaaaacgtattgaatctgcagcggaacgggagattgtgagggatgtaaaggagaagctttgttatgtggctttagattttgaaaatgaaatggcaactgctgcttcctcctcctcccttgaaaagagctatgagcttcct

SEQ ID NO: 80765 - DNA, 600 bp, Chicken  19866894373518_4
tacatatatgtatattttgatgtaatatgcatcagaaaccatttctctagcttagctaatggagttcttctggctgtgtcttgcagcatgtctattgagctcaaggacatagttactgctttgataggaaatcctgtgtcattgagaaatataactggttgtcagaatagatcatatctgttccacagacaaaggaacaaaattagtagctggtaayagatgaacgtctggagatttgatcaaagttttggcacataaaatataaaaattgatctctacagtatttggtaacacaayacrtctttatcagcagatgagagaaatttggttatgcaaataggaartaatttagttaagatggcagagagatcaagtccaatggactgtatggacaccgtgggcctaaggaactgtgcatgagaatgtctgtgttcaatctgttgcactgtatgttgataaaaacgtattgaatctgcagcggaacgggagattgtgagggatgtaaaggagaagctttgttatgtggctttagattttgaaaatgaaatggcaactgctgcttcctcctcctcccttgaaaagagctatgagcttcctgat

SEQ ID NO: 80766 - DNA, 600 bp, Chicken  19866894373518_5
ctctagcttagctaatggagttcttctggctgtgtcttgcagcatgtctattgagctcaaggacatagttactgctttgataggaaatcctgtgtcattgagaaatataactggttgtcagaatagatcatatctgttccacagacaaaggaacaaaattagtagctggtaayagatgaacgtctggagatttgatcaaagttttggcacataaaatataaaaattgatctctacagtatttggtaacacaayacrtctttatcagcagatgagagaaatttggttatgcaaataggaartaatttagttaagatggcagagagatcaagtccaatggactgtatggacaccgtgggcctaaggaactgtgcatgagaatgtctgtgttcaatctgttgcactgtatgttgataaaaacgtattgaatctgcagcggaacgggagattgtgagggatgtaaaggagaagctttgttatgtggctttagattttgaaaatgaaatggcaactgctgcttcctcctcctcccttgaaaagagctatgagcttcctgatggacaagtcatcacgattggaaatgaaagattccgatgcccaga

SEQ ID NO: 80767 - DNA, 600 bp, Chicken  19866894373524_1
aaatatagttagcatgaactcgcttatagataactgtgcaccaacatctcctgctattctttaagtctgtgctggaatattaattgcagatttcctaagttgcaagtattttgctgtgggctttgtcttttagctataacattgcattagtgggaattcacgtactgtggtgatgagcacagtataaaataaggattagataggagctgaaatagagccaactgctgggctctgttgatacaagtctgccagcaattgctgttcctatactactcagttgtaggcctgggttttcaatakacatgccaaacggtttgagttttgtacatcagtggggaagcaagtttgttgaaatcttcatataagtcacagattttcacccacctatcttgtggagaaattcaactttcatcctcttttcttcttcagggtttgaagatatgatttgccattggaagtgctattttatttgcccgatcttttgtgaatatccctcccacctccacccagtatagcaagaaaagcttgttttattgtctttactctttgaggtcctgcttttggaagtgatggaaacgttttattctaatacatttaatg

SEQ ID NO: 80768 - DNA, 600 bp, Chicken  19866894373525_1
gctccatcgggtgctcagagccccatccagcctgacctcgaagtgtctgcagggatggggcatctgtgccagtgcctcactgcccttattgtaaaaaaccttctgccttatatcaaatctgtatctcccctcttttagtttgaacccatttccccttgtcatattgtggcagatcctgctagagaatctgtcctttcttaaagctcccctttagataatgaaaggctgccctcaggtctgcctggagccttctcttctccaggctgaacagccccagaccattagcctaccctagcaggraaggtgttccatctattggatcattcttgtggctcacaagtccttatggatatcatcataatttgtattgcaaagccattgtttttgccagacgtttctcatgtaaagtcacttactctgcacactctgggcatgtcttattttggatgaggtgtgaatttctgggtcattcctaccttttgtatttttgctgtcattataaagcagtcttggagcacataaacccatttcatatatacagaagatggagccaggctcttttcagtggtacccagtgccaggactgcagcagcaaaggct

SEQ ID NO: 80769 - DNA, 600 bp, Chicken  19866894373526_1
caggtatttgagatggttagatttcacagggaaccaggctaatttgtgaaaactaaatacaaataaattgaaatctgaacaactgacagcttaaatttgcacagagacagaagaacgttctccaagcacatcgggaaaacacttttatgtgggctcatttattatatcaaataacaaatacaaacacatataaatctctaggatccatttgtttttcatcaaactcaatgtttactgttaggtacagcctcttaaacagcttcctgagttatgatggaaatacgtgcctagaactggatwtggttgctggcaaatcagtgcctggcattatctgggaagccttgaggtacctgacgccagcatgtatatttcaagttggtagatatggcacacaggttacataggatccttgtgaggtgatggccaaagtgacccaggagcacctaacgcagcccagaagtcctcctgcttccatggtgaagcccaccctcttctcactggcctctcctgggcagctgttgcttccctagagggacatgaaggtggtccaggcccagactttcttctaccagccaaactgcatgggcaccttggggatgc

SEQ ID NO: 80770 - DNA, 600 bp, Chicken  19866894373534_1
ataaaaataaacattgctctactcttctgaagaccgctccaaactggtctgcagcatacgctttcagaaattacctgttcttagctctttcagactattattactaaatgaaactaggaaaatttaaagtgttggtgtatttacatgaaaatccaagagtctgagcagttaaaaatcacagctctcctaatgatgaccagctatgagctaagcattcatatgtttaacctcaatttgacttgctatactgacagcagtatgaaaatacatgatatatgaggtaaagaaaatttaatccaytagacaaaaaatactaagtcaagcagatcatgctgtgagctaaattacgaaaggctctttcccactagattttcatctctctctgcatggaacctttctcactagcagctatctccacccaccttatcaaacagaattgtgttatactatttctttacataattttctaatagataatcagatgctttatgcttgcttctgcakaaggctaaatttcacccagaatgcaaatcagattttcgtatggcagtttgtttcaggctattacctaataatttctactgctgtcagaaagactgt

SEQ ID NO: 80771 - DNA, 600 bp, Chicken  19866894373534_2
gagctaagcattcatatgtttaacctcaatttgacttgctatactgacagcagtatgaaaatacatgatatatgaggtaaagaaaatttaatccaytagacaaaaaatactaagtcaagcagatcatgctgtgagctaaattacgaaaggctctttcccactagattttcatctctctctgcatggaacctttctcactagcagctatctccacccaccttatcaaacagaattgtgttatactatttctttacataattttctaatagataatcagatgctttatgcttgcttctgcakaaggctaaatttcacccagaatgcaaatcagattttcgtatggcagtttgtttcaggctattacctaataatttctactgctgtcagaaagactgtggagcaagcagatttcataaggaggataacctaaattactccttcaggcccttccaatcctgtttttctacacccctacaagtttggaaagaattttccttctgtagctggaaactgaacccagtgcattgcttcattactttagtagcaaaaatggagcctgaataccagaccatcaaagctgaccattaaactccatgacat

SEQ ID NO: 80772 - DNA, 600 bp, Chicken  19866894373540_1
ttttttcagcaaactaccctcccttacatatggcagtgaggacttaggaattttgacacgagtgtgtcaacagtattggtaacaagctcagccaccccaggttcagccactctctaaatgggacagtccccctgatcatggcctctgctcctcagcatcactgagacctgacacacctcatcacacgaaaggtcagatttccatcacagaaagctcaaatgcagtcacaaatacatctacggacatttcccccttctctgtttcagcatcacaagcagctggttcatctatcatggcaaygaacaccgaggcaaggggtctggaagatctcagttaaatgagtaaggtgactttgggagttacggtttggctctgttgtaactgtaataarcacctgcagagtttttacttgcaatttaatctacatttttcaattcaacttctgctacactgcttacatgtgcattttcaaaggcccccagagtttaatatacacatacagttcttcagtaaggtaaagaaaatctagtactggaaagcagcatcaagaaacacatgaagaacatgactgctttttgtctaaacctcttttccccttaa

SEQ ID NO: 80773 - DNA, 600 bp, Chicken  19866894373540_2
ccaccccaggttcagccactctctaaatgggacagtccccctgatcatggcctctgctcctcagcatcactgagacctgacacacctcatcacacgaaaggtcagatttccatcacagaaagctcaaatgcagtcacaaatacatctacggacatttcccccttctctgtttcagcatcacaagcagctggttcatctatcatggcaaygaacaccgaggcaaggggtctggaagatctcagttaaatgagtaaggtgactttgggagttacggtttggctctgttgtaactgtaataarcacctgcagagtttttacttgcaatttaatctacatttttcaattcaacttctgctacactgcttacatgtgcattttcaaaggcccccagagtttaatatacacatacagttcttcagtaaggtaaagaaaatctagtactggaaagcagcatcaagaaacacatgaagaacatgactgctttttgtctaaacctcttttccccttaacaatggcatcctagaaggcatgtcttttttgcagcagaccatgacaagcagttcaccatcaatattaagcataatcaagctctaatgactg

SEQ ID NO: 80774 - DNA, 600 bp, Chicken  19866894373545_1
tctttttttttaattagccacactttttctgtttataaccagccttcagtgtgaggcctggcacatgtctcttatctcatgcttgccaaaaaaatctcagggaaagaaggaagggaaggcacttgagattatggtacttgtcttcatacttatgctgaggtcttgttctctaggaagcagctgaacacctgcctgcctgtggggaatgggtgaaaaaaaaaaatcatgttttgttttgcttacacagcttttgctttatctattaacctgcctctagctcaacccatgcattcttttctkattgtctcacccatcttgccatggggaagtaagcaagcacacagcattatgggtatttggctgctggcaatggtcaacctccagtaactgtttattccacccccttggtatcaaactctatctccttccccaggttcctaagttaaaactttatgttaatctttttcaaggttacttctgagctacttcacatacaaatgcttttgtgaaaaatgaaaggtgaaaatccaggtcatatcaagtatgttcattgcttttccagcatgggaaacagtactgtactttttaaagtatactgca

SEQ ID NO: 80775 - DNA, 598 bp, Chicken  19866894373548_1
agaaagcaaaggcagtgtttatgaaggctgctccagagcacagagcacacaaaggtttgtctccggctgctgaatatcaggaggggtgaagcagagagaaagcaggggacaaagctgaaaaggaatgaggaatgggaatggaaaatcaccatttcttgagccgaaatttgaaatttgaagtctgaaatttgatttggattgaaggtggaaatgaaaacttcagagatttttctgggaaggaaagggcaagagatgggaaggcaggcaggaacacttccccacctccctgggccatgggckgccagcactgagctgggaccgcccgtctcaccaagctgagccggttccccaaggcccctctcctcacaagccaatttccagmgcaagttgctgaatttcagaagtggaatgtgagtggcttgtgccatgtgatgacgatgaggagatctagcaccaaaagacgtccctgcacagggtctccagatgatcttagtgatcttttccaacatcaatgattctgtgattgtctctcatgcccatgtgagcccactcagctgagcacacgagtgcagctcagtgtcacagcaagccttgcgca

SEQ ID NO: 80776 - DNA, 516 bp, Chicken  19866894373548_2
ggggtgaagcagagagaaagcaggggacaaagctgaaaaggaatgaggaatgggaatggaaaatcaccatttcttgagccgaaatttgaaatttgaagtctgaaatttgatttggattgaaggtggaaatgaaaacttcagagatttttctgggaaggaaagggcaagagatgggaaggcaggcaggaacacttccccacctccctgggccatgggckgccagcactgagctgggaccgcccgtctcaccaagctgagccggttccccaaggcccctctcctcacaagccaatttccagmgcaagttgctgaatttcagaagtggaatgtgagtggcttgtgccatgtgatgacgatgaggagatctagcaccaaaagacgtccctgcacagggtctccagatgatcttagtgatcttttccaacatcaatgattctgtgattgtctctcatgcccatgtgagcccactcagctgagcacacgagtgcagctcagtgtcacagcaagccttgcgca

SEQ ID NO: 80777 - DNA, 599 bp, Chicken  19866894373550_1
  misc_feature (1)..(100): n is any nucleotide
nnnnnnnnnnnnnnnnnnnnnnnnnnnnnnnnnnnnnnnnnnnnnnnnnnnnnnnnnnnnnnnnnnnnnnnnnnnnnnnnnnnnnnnnnnnnnnnnnnnnaatttaattttcactcattcttttctcctctattttcctacttgggagaaatggctttatttaaggtgattgaatgttgctttgattctgcttcttttctggggttgatttgattatatatcatcacataaaacctgaattcacttttaaaggcaaacatttatttttgtttagcaatttaagggagaagtattgccaarttggttgctctttgttggagaagaattcttatacttctattttcaattataccaattgcatatctgacatgtatgtagagtatgaaaacttcagtgcaccagaggataaaggcactctttctaagagaacatcttacatgtatttgggaggaaagggctaaaggatggaagataaagaagtttacaaaggatgatcaaagagagatagttttggggaaaaaaaaatgactggaagagttccaaataaagcacaatcagacatgagaaatagcaagaaataagcaaattatgataatatt

SEQ ID NO: 80778 - DNA, 600 bp, Chicken  19866894373550_2
atgtagagtatgaaaacttcagtgcaccagaggataaaggcactctttctaagagaacatcttacatgtatttgggaggaaagggctaaaggatggaagataaagaagtttacaaaggatgatcaaagagagatagttttggggaaaaaaaaatgactggaagagttccaaataaagcacaatcagacatgagaaatagcaagaaataagcaaattatgataatattggtaaagtaaataacagggctagatatctgtgcccttcagctgccaaactcacccaattagcagagttccagrttggctgggcagcagtgacaacagagagttttttagaaatgccgtggtatcatctgctacttcatccagaactaaatcactgtttaatttgtctagaggttttcaaatgaacatgcaagtataattgaggcttaagctcttcatctttctctattggtcttccacacatgcacaaatatgcttttatctctgtgtgtgtatgtttgtggattacagaaaaattaatctgttgatagaaggttctgcaggtggacagaggttttctttaagcatattaccatgtttgaatacatgtactta

SEQ ID NO: 80779 - DNA, 599 bp, Chicken  19866894373551_1
  misc_feature (1)..(102): n is any nucleotide
nnnnnnnnnnnnnnnnnnnnnnnnnnnnnnnnnnnnnnnnnnnnnnnnnnnnnnnnnnnnnnnnnnnnnnnnnnnnnnnnnnnnnnnnnnnnnnnnnnnnnngttcggatgagcttgtccaacatgctgacaatttcatcaaacttgggcctgctgttgcggtctttctgccagcagtcaagcatcaactggtagagagcagcagggcagtccatgggacttggcaggcgatagccttcctccacggctttaatcacctatgggaagtaaaacacaaggctgatgggttgctttttttcytcttacctttttccccaaatgcagattggtttaaatagagaactctgggtctagcaatatgctcacgcgcaactgatccccscagcctctgcatacaggagaccaataacgtaaaccccattatctttcactgcttctatggcacaggttgaataattgatttttagtcactgcaaaatgagtctagaaatccaatgcaactagaaggtcagatctcatgttgcacttgttcaaagctcagcygaggtctgtaggtcacaccagaaaactcctagagactgttcttgtctgccagcagc

SEQ ID NO: 80780 - DNA, 599 bp, Chicken  19866894373551_2
  misc_feature (1)..(20): n is any nucleotide
nnnnnnnnnnnnnnnnnnnngttcggatgagcttgtccaacatgctgacaatttcatcaaacttgggcctgctgttgcggtctttctgccagcagtcaagcatcaactggtagagagcagcagggcagtccatgggacttggcaggcgatagccttcctccacggctttaatcacctatgggaagtaaaacacaaggctgatgggttgctttttttcytcttacctttttccccaaatgcagattggtttaaatagagaactctgggtctagcaatatgctcacgcgcaactgatccccscagcctctgcatacaggagaccaataacgtaaaccccattatctttcactgcttctatggcacaggttgaataattgatttttagtcactgcaaaatgagtctagaaatccaatgcaactagaaggtcagatctcatgttgcacttgttcaaagctcagcygaggtctgtaggtcacaccagaaaactcctagagactgttcttgtctgccagcagcagcctatggggctttctggcattgtcttggagtacagtgattttgtttattcagatgttggcttctttttaaatgaaaaggc

SEQ ID NO: 80781 - DNA, 600 bp, Chicken  19866894373551_3
acggctttaatcacctatgggaagtaaaacacaaggctgatgggttgctttttttcytcttacctttttccccaaatgcagattggtttaaatagagaactctgggtctagcaatatgctcacgcgcaactgatccccscagcctctgcatacaggagaccaataacgtaaaccccattatctttcactgcttctatggcacaggttgaataattgatttttagtcactgcaaaatgagtctagaaatccaatgcaactagaaggtcagatctcatgttgcacttgttcaaagctcagcygaggtctgtaggtcacaccagaaaactcctagagactgttcttgtctgccagcagcagcctatggggctttctggcattgtcttggagtacagtgattttgtttattcagatgttggcttctttttaaatgaaaaggcatgtgctcaaccacagatttgtattacagtaataaaagcctgactgtatttcaaaagagactttgaatgctaattgatggatggattcgaggcagaggcagaacaaccatctcatatatcattcaatactgtctgggtttagtygtttcttactgtgtccac

SEQ ID NO: 80782 - DNA, 542 bp, Chicken  19866894373551_4
cttgttcaaagctcagcygaggtctgtaggtcacaccagaaaactcctagagactgttcttgtctgccagcagcagcctatggggctttctggcattgtcttggagtacagtgattttgtttattcagatgttggcttctttttaaatgaaaaggcatgtgctcaaccacagatttgtattacagtaataaaagcctgactgtatttcaaaagagactttgaatgctaattgatggatggattcgaggcagaggcagaacaaccatctcatatatcattcaatactgtctgggtttagtygtttcttactgtgtccacgtttctgccaggaatttaaaatgtcagcctaagagtatgtaaattaaaaacagggggaagtttgttgcactgatttcaaatacaaaccatctatggttctatatccaaaacaagtggtaagcacatgtgctgcctgcactctgggaaaggcagaaatgaacaaatgagggcagaattgaataaagcaacttgtcttcattcatttggacagacttacagcaggg

SEQ ID NO: 80783 - DNA, 600 bp, Chicken  19866894373554_1
agaaagaaacacttctattaatggggctgatgggccagtcaaagtagcttgaaacttattaggcgatgcatttccatcaacaagtacgtttgtagcaattgaaatgcatttaaggatttggagacatcagagtatgattcagacacttgccttcaggataaggcatttgtttttatgctagctgttgtgcttagaaacatttcttcaaatactatagagaactaccctgcagtttcctgttccttgtattattttgcagctatctgatgtctgcaaaaggcaaaagattttaatgttttkgacagagaaaagacgaatacagtttgtggaatggtttgcatgatttgatgtgttctatcatacatgagattgatgtggcaaatatgtgataaatacatgaaaatattatacactcaattcatcctttgaagacacagatgtaattgcattctgtttgttctcagcagtgactgctgcctgtcattggcactgggttatttgctgtcaaatgtgagcaaaaattggctttcacagcacctagttcagacttcatagcctcttgacttccttcagcttgcttgatcaatttctcctcaaagt

SEQ ID NO: 80784 - DNA, 599 bp, Chicken  19866894373564_1
  misc_feature (1)..(119): n is any nucleotide
nnnnnnnnnnnnnnnnnnnnnnnnnnnnnnnnnnnnnnnnnnnnnnnnnnnnnnnnnnnnnnnnnnnnnnnnnnnnnnnnnnnnnnnnnnnnnnnnnnnnnnnnnnnnnnnnnnnnnnntcctttgcttaacagccatcagaagccctctgggacacttcccgaatagcgctgtgcaaactaatctctttctattacaacctatcaggaaggattcaaagcaaaagcagcacgacttgctttcctcatatctcattcttggaagaactgtgtcaatacaatatgataatagcacaataaygcacccactcagctttgtttctcagggaagaccaaagagaatttctccgaagaacagacatggctgaggttacctacagcaggcacaaccccagccccccataaacacaaatgctgtgatggttgaagtgacacaagcaaggttgtgcccccagtacagatttcttctttcccactgctgcagcttttgcttcacttgcatgtctcggccaccwgcacatcacactctaattgcccagtttaccatgctaacaaggggcaaggctgcatttcaacagaaccatagaaccattcaggttg

SEQ ID NO: 80785 - DNA, 600 bp, Chicken  19866894373564_2
tcaaagcaaaagcagcacgacttgctttcctcatatctcattcttggaagaactgtgtcaatacaatatgataatagcacaataaygcacccactcagctttgtttctcagggaagaccaaagagaatttctccgaagaacagacatggctgaggttacctacagcaggcacaaccccagccccccataaacacaaatgctgtgatggttgaagtgacacaagcaaggttgtgcccccagtacagatttcttctttcccactgctgcagcttttgcttcacttgcatgtctcggccaccwgcacatcacactctaattgcccagtttaccatgctaacaaggggcaaggctgcatttcaacagaaccatagaaccattcaggttggaaaagacctcttccgatccccgaggtccaaccccaacccaccccaccatgcccactgcccacacccctcagtgccacatctccacatctcaaacacctccagggatggcgaccccaccacctccctgggcagctgtgccactgcatcaccactcttccagagaagaaatttttcctaccatccaacctgcatcaacccattcccaccatgccct

SEQ ID NO: 80786 - DNA, 599 bp, Chicken  19866894373565_1
  misc_feature (1)..(137): n is any nucleotide
nnnnnnnnnnnnnnnnnnnnnnnnnnnnnnnnnnnnnnnnnnnnnnnnnnnnnnnnnnnnnnnnnnnnnnnnnnnnnnnnnnnnnnnnnnnnnnnnnnnnnnnnnnnnnnnnnnnnnnnnnnnnnnnnnnnnnnnnncttttcttacttggtttgttaagagcagctataggcatcactttttcgagaacttacactttcttctcctggccattttcacatttacctcattactcaaacaatcaaaaaatccatgaggcaaaaaaggaaagcttctgaataagaataatatgaacaattyagaagatttgagtgtggcaatttgcatttagggatggtttttgttcttagtgttcctggggttttttatgtcaatttttttctgtgttgtgataagcaatgctaaagtctcaagattctgataatgtaaatactagaaatactctcaaagtgcaatgcagtctttctttctagaagcatcttttcattaaatgccacaatcataactgaagagtaaggaaatggattattggtgcaagatatgtagagagaccaaaataggaatggatttttcccactgtaacaatgaatcagcaacac

SEQ ID NO: 80787 - DNA, 599 bp, Chicken  19866894373575_1
  misc_feature (1)..(132): n is any nucleotide
nnnnnnnnnnnnnnnnnnnnnnnnnnnnnnnnnnnnnnnnnnnnnnnnnnnnnnnnnnnnnnnnnnnnnnnnnnnnnnnnnnnnnnnnnnnnnnnnnnnnnnnnnnnnnnnnnnnnnnnnnnnnnnnnnnnntcttgggagtctgaactgtaattatagggatgtgtttctttcttgaaatagggctggaggattaaagaagttgaactttatctgtgtgtccatgaagggcttttctgagattgtttaaggtatatcagataaagtaatagatcagttactcatgtcctgtacttagarcggtacggaggttttacagctttgtacagatgcatctatttacagggatttattttcatagtagcgtatatagggttggatataactcttcctctttttcttactctgttctttcccycatagatttaatgtttggattgcttggttatgaagtagcataagcaagataaartaaaagcagatgacrataagataaygtcttgataggaagaaatacttaagatttactagctgtgagattgttttgtactctgaagtatgaaggtctttttttaatccaggaaagaaaagcttaatat

SEQ ID NO: 80788 - DNA, 599 bp, Chicken  19866894373575_2
  misc_feature (1)..(14): n is any nucleotide
nnnnnnnnnnnnnntcttgggagtctgaactgtaattatagggatgtgtttctttcttgaaatagggctggaggattaaagaagttgaactttatctgtgtgtccatgaagggcttttctgagattgtttaaggtatatcagataaagtaatagatcagttactcatgtcctgtacttagarcggtacggaggttttacagctttgtacagatgcatctatttacagggatttattttcatagtagcgtatatagggttggatataactcttcctctttttcttactctgttctttcccycatagatttaatgtttggattgcttggttatgaagtagcataagcaagataaartaaaagcagatgacrataagataaygtcttgataggaagaaatacttaagatttactagctgtgagattgttttgtactctgaagtatgaaggtctttttttaatccaggaaagaaaagcttaatattctttttaattggctatcgtttaaataatatactttattttttttcactgttgtgtactttgtttgtaatttagtttatttttgtgcccttcactggagacatgacaggtaaactgca

SEQ ID NO: 80789 - DNA, 600 bp, Chicken  19866894373575_3
tcttgaaatagggctggaggattaaagaagttgaactttatctgtgtgtccatgaagggcttttctgagattgtttaaggtatatcagataaagtaatagatcagttactcatgtcctgtacttagarcggtacggaggttttacagctttgtacagatgcatctatttacagggatttattttcatagtagcgtatatagggttggatataactcttcctctttttcttactctgttctttcccycatagatttaatgtttggattgcttggttatgaagtagcataagcaagataaartaaaagcagatgacrataagataaygtcttgataggaagaaatacttaagatttactagctgtgagattgttttgtactctgaagtatgaaggtctttttttaatccaggaaagaaaagcttaatattctttttaattggctatcgtttaaataatatactttattttttttcactgttgtgtactttgtttgtaatttagtttatttttgtgcccttcactggagacatgacaggtaaactgcatgagaaatttctgaaataccaaacttaataacaatatgcatttcatttatatcct

SEQ ID NO: 80790 - DNA, 600 bp, Chicken  19866894373575_4
ggaggattaaagaagttgaactttatctgtgtgtccatgaagggcttttctgagattgtttaaggtatatcagataaagtaatagatcagttactcatgtcctgtacttagarcggtacggaggttttacagctttgtacagatgcatctatttacagggatttattttcatagtagcgtatatagggttggatataactcttcctctttttcttactctgttctttcccycatagatttaatgtttggattgcttggttatgaagtagcataagcaagataaartaaaagcagatgacrataagataaygtcttgataggaagaaatacttaagatttactagctgtgagattgttttgtactctgaagtatgaaggtctttttttaatccaggaaagaaaagcttaatattctttttaattggctatcgtttaaataatatactttattttttttcactgttgtgtactttgtttgtaatttagtttatttttgtgcccttcactggagacatgacaggtaaactgcatgagaaatttctgaaataccaaacttaataacaatatgcatttcatttatatcctgttcccatactgctc

SEQ ID NO: 80791 - DNA, 600 bp, Chicken  19866894373575_5
agaagttgaactttatctgtgtgtccatgaagggcttttctgagattgtttaaggtatatcagataaagtaatagatcagttactcatgtcctgtacttagarcggtacggaggttttacagctttgtacagatgcatctatttacagggatttattttcatagtagcgtatatagggttggatataactcttcctctttttcttactctgttctttcccycatagatttaatgtttggattgcttggttatgaagtagcataagcaagataaartaaaagcagatgacrataagataaygtcttgataggaagaaatacttaagatttactagctgtgagattgttttgtactctgaagtatgaaggtctttttttaatccaggaaagaaaagcttaatattctttttaattggctatcgtttaaataatatactttattttttttcactgttgtgtactttgtttgtaatttagtttatttttgtgcccttcactggagacatgacaggtaaactgcatgagaaatttctgaaataccaaacttaataacaatatgcatttcatttatatcctgttcccatactgctcacttattttt

SEQ ID NO: 80792 - DNA, 600 bp, Chicken  19866894373576_1
acctgagtcttcagagttaagaaaggaaagatcaccttacttgctgactcatattcaggttaatttcactttcacctattttcttctttatcagtgtctcaggagttctctctgctcagtgtatctgaagaaaatgatagaaagcctccaagtggtatctagatgaatgatgcaaacaactgacttagcaaccccaagacactgcacaggagagatccaagaccatgtatctacttaaaatgtaccttcagggatgcatgatgatatgcaaatacttttttttgctgagtttcaatattytctgtatcaaatatgttcagttttcaagtaaaaaaaataaaatctaaatgttgtcaggacagactgagcccagccgctaagaatcaaacttccattctcctcacctctcaccagctatgatgaatgttctgcaagccacgtgacaccccgatcaacatttgcataatctttactatctttataattatagtatgagggggttatatataagctagacagtaatttaagagaactagaaagaacccagctctagtgattagcataaagaagtaatgactcaagagcacagagactggggat

SEQ ID NO: 80793 - DNA, 600 bp, Chicken  19866894373578_1
aacagaatgtgactgacctcttttttttccactggaacatcgttgatactggtgctttttttgcatattttacaaaggtttaaactttttaatataagctttcctcattaaaagcatagaccatctctttggccattcagggaaaaaaaatattaaaaagactaagagaagagaaatgtgcagatcgatattctgatgcgttacacacacatacagttgggaacagtaaggctgaccaaaataatgcactgagaaagatgggaaatgataatgaaaaacaagatacaagaaaaatgcgtyagctaaggtcttacttcaagacatgtatataataaactgcatttcaagggtttagtaaaacccaaaccaaaacctacaagtcaacttggcttttagaaacaaattgtttcagaagacttttagcattttctaagagcacttgttttaaactcaacagaaggcaagaacaaaaagaatactgataattttcagattaggtagagaatcagttgtttagaattttgattaagagactgcactatcccttagaattttctttaaaacacaactgtatcaacacttgtgcagaattcatgggtt

SEQ ID NO: 80794 - DNA, 600 bp, Chicken  19866894373583_1
tatttactaggaccacctggttctcttctacaaagctactttccatgtagtcagcctcagcctgtcctggtgtgcgtgtttttccatctgaagttggattttgcatttgcttttcttgaactttgtgattcagtcaatttctccagttccttgaggttcttttgcagaaggcttgacctccagcctcccagctactctgcccagtttgatatcatctacaaacatcctgagagtacagcttgttaatggagatgaaacagtattgattcttcagcagcaatgcttctaaccagctgctarttggactagtactgctagtcacagcaaaatgagtccagawgtccagccaaattaatgacaacatctccttaatttatctttaagatgctatggaagatggtttcagaagccttgcgaagttaaggtgaacatgcatctcacttctcctgttcactgtgttcttagctgagtagcagtcagcttaacctagcagtttacccttggtaaatccacactgactgttcccagtcacctttaagcttcttgtgcaatggtgtccagcatgttgtgctctctgcccatcttaggtgcagatgttca

SEQ ID NO: 80795 - DNA, 600 bp, Chicken  19866894373583_2
ttccatgtagtcagcctcagcctgtcctggtgtgcgtgtttttccatctgaagttggattttgcatttgcttttcttgaactttgtgattcagtcaatttctccagttccttgaggttcttttgcagaaggcttgacctccagcctcccagctactctgcccagtttgatatcatctacaaacatcctgagagtacagcttgttaatggagatgaaacagtattgattcttcagcagcaatgcttctaaccagctgctarttggactagtactgctagtcacagcaaaatgagtccagawgtccagccaaattaatgacaacatctccttaatttatctttaagatgctatggaagatggtttcagaagccttgcgaagttaaggtgaacatgcatctcacttctcctgttcactgtgttcttagctgagtagcagtcagcttaacctagcagtttacccttggtaaatccacactgactgttcccagtcacctttaagcttcttgtgcaatggtgtccagcatgttgtgctctctgcccatcttaggtgcagatgttcaacagcctggccctgtagttccttctgccttccctcctgaa

SEQ ID NO: 80796 - DNA, 600 bp, Chicken  19866894373583_3
gttaaggtgaacatgcatctcacttctcctgttcactgtgttcttagctgagtagcagtcagcttaacctagcagtttacccttggtaaatccacactgactgttcccagtcacctttaagcttcttgtgcaatggtgtccagcatgttgtgctctctgcccatcttaggtgcagatgttcaacagcctggccctgtagttccttctgccttccctcctgaagaaggtgccttttgtccagtgatcagcaaccttccccagctcttgtggcctttcagcaacaatgagaccatctgaatyagtgccctcatgttgatgcactttaygagctttggttttccagactccatccctgcatacccaggcattcttactgtatttttcaggcagccttgtcttcatccaccttctctttccttccttagtgcctgaactttgccactgcttccacaggggccttgtactatacttgctcagcattctgcacatcagaacagacagttctgctcacggaaggctgtccttgaagatcatcagcctttgttgatttgagtagtaattgtctgaaccacttcccacttctgaggggatatttccttt

SEQ ID NO: 80797 - DNA, 600 bp, Chicken  19866894373583_4
tcctgttcactgtgttcttagctgagtagcagtcagcttaacctagcagtttacccttggtaaatccacactgactgttcccagtcacctttaagcttcttgtgcaatggtgtccagcatgttgtgctctctgcccatcttaggtgcagatgttcaacagcctggccctgtagttccttctgccttccctcctgaagaaggtgccttttgtccagtgatcagcaaccttccccagctcttgtggcctttcagcaacaatgagaccatctgaatyagtgccctcatgttgatgcactttaygagctttggttttccagactccatccctgcatacccaggcattcttactgtatttttcaggcagccttgtcttcatccaccttctctttccttccttagtgcctgaactttgccactgcttccacaggggccttgtactatacttgctcagcattctgcacatcagaacagacagttctgctcacggaaggctgtccttgaagatcatcagcctttgttgatttgagtagtaattgtctgaaccacttcccacttctgaggggatatttcctttggtaaggatgwtatccttacagtggc

SEQ ID NO: 80798 - DNA, 600 bp, Chicken  19866894373583_5
gttgatgcactttaygagctttggttttccagactccatccctgcatacccaggcattcttactgtatttttcaggcagccttgtcttcatccaccttctctttccttccttagtgcctgaactttgccactgcttccacaggggccttgtactatacttgctcagcattctgcacatcagaacagacagttctgctcacggaaggctgtccttgaagatcatcagcctttgttgatttgagtagtaattgtctgaaccacttcccacttctgaggggatatttcctttggtaaggatgwtatccttacagtggctacatccagagatcgtgatctacttaaaattggctaggttaggaaacttctgaaaagctctggttgtgtttttcctctttgccattctctctrtcttcaagycttacaaacaaacagacaaaaaagctgaaagaaaaaggagtcagctgtgctccagaaatacttgtgtactcattgtactcatatggagtgttgttacaccaaacaaacyaggaagtagaaattgcccataagtgcatgtttttataatactaaatgagatcagtaagaacattgatttgttct

SEQ ID NO: 80799 - DNA, 600 bp, Chicken  19866894373583_6
ccttagtgcctgaactttgccactgcttccacaggggccttgtactatacttgctcagcattctgcacatcagaacagacagttctgctcacggaaggctgtccttgaagatcatcagcctttgttgatttgagtagtaattgtctgaaccacttcccacttctgaggggatatttcctttggtaaggatgwtatccttacagtggctacatccagagatcgtgatctacttaaaattggctaggttaggaaacttctgaaaagctctggttgtgtttttcctctttgccattctctctrtcttcaagycttacaaacaaacagacaaaaaagctgaaagaaaaaggagtcagctgtgctccagaaatacttgtgtactcattgtactcatatggagtgttgttacaccaaacaaacyaggaagtagaaattgcccataagtgcatgtttttataatactaaatgagatcagtaagaacattgatttgttcttactcacttcttaaaatctggaatgtgaaaacatttgctgttcgtgaagaatgggcttggaagtaagtctatatagcactgccagtacaattttgctaggaagtaggc

SEQ ID NO: 80800 - DNA, 599 bp, Chicken  19866894373583_7
ctgaactttgccactgcttccacaggggccttgtactatacttgctcagcattctgcacatcagaacagacagttctgctcacggaaggctgtccttgaagatcatcagcctttgttgatttgagtagtaattgtctgaaccacttcccacttctgaggggatatttcctttggtaaggatgwtatccttacagtggctacatccagagatcgtgatctacttaaaattggctaggttaggaaacttctgaaaagctctggttgtgtttttcctctttgccattctctctrtcttcaagycttacaaacaaacagacaaaaaagctgaaagaaaaaggagtcagctgtgctccagaaatacttgtgtactcattgtactcatatggagtgttgttacaccaaacaaacyaggaagtagaaattgcccataagtgcatgtttttataatactaaatgagatcagtaagaacattgatttgttcttactcacttcttaaaatctggaatgtgaaaacatttgctgttcgtgaagaatgggcttggaagtaagtctatatagcactgccagtacaattttgctaggaagtaggcatctcagt

SEQ ID NO: 80801 - DNA, 490 bp, Chicken  19866894373583_8
cctttgttgatttgagtagtaattgtctgaaccacttcccacttctgaggggatatttcctttggtaaggatgwtatccttacagtggctacatccagagatcgtgatctacttaaaattggctaggttaggaaacttctgaaaagctctggttgtgtttttcctctttgccattctctctrtcttcaagycttacaaacaaacagacaaaaaagctgaaagaaaaaggagtcagctgtgctccagaaatacttgtgtactcattgtactcatatggagtgttgttacaccaaacaaacyaggaagtagaaattgcccataagtgcatgtttttataatactaaatgagatcagtaagaacattgatttgttcttactcacttcttaaaatctggaatgtgaaaacatttgctgttcgtgaagaatgggcttggaagtaagtctatatagcactgccagtacaattttgctaggaagtaggcatctcagt

SEQ ID NO: 80802 - DNA, 516 bp, Chicken  19866894373585_1
cagcttgcaagactcaccactgttaaaccgttggataaagttgtcaagtagcactttttgtacctatatgtcgctggcaacctgatctcttccatactcatcctctttggagtccctgctgaggctgtctttcagggttgttgtttttttccagcatggcatttcatgccctggatagcactgagctctgtttcactgagcccaaggagctgttgctcgttctgttcttaacatacagctcctcgaagtgaatagtttgttctttgtcacttgatgaagtgagtccagtatctttaatarctcctttccatttttccttccagctgagtaatacagaacttgctttctgttttattgtcctgggataatccatagagatggatactgagcaataaaagtgcaggaggaagccaggatcatatgattgtgttggatgggagaaggtaagaatgttatattctgtcctatatctgaagtgcccgtttatgcacctaaccttgtgacagagtaaaaaca

SEQ ID NO: 80803 - DNA, 474 bp, Chicken  19866894373589_1
ccttagaacatgatggctacagcaaaagcaccacagaaaggggatgaaacttgtttgtatttagattggtttcaaacaacatctacttcctatgcacacagaagagaaaggatcacctccagtggactcagcagctattgccactctgctgctgtgaacaacttccaggatgctccaaagttaatccaaagttctctgttatttctaatcttccagctgatcagataaaatatgttatcagataaaatatattacattcatcagaattttttttttgccaggcatggctgaaatttctcytgactggaatctgatagctacaacctacccaaacaatgcaactctctgggttggcagtattcagtagttttacagtatttgattataattcttacaatattgcctatgttaaaaagacttaaatgggccataaaacccatctgatcttcatttcatttacctttttcttttata

SEQ ID NO: 80804 - DNA, 599 bp, Chicken  19866894373596_1
  misc_feature (1)..(125): n is any nucleotide
nnnnnnnnnnnnnnnnnnnnnnnnnnnnnnnnnnnnnnnnnnnnnnnnnnnnnnnnnnnnnnnnnnnnnnnnnnnnnnnnnnnnnnnnnnnnnnnnnnnnnnnnnnnnnnnnnnnnnnnnnnnnntcagaggagatacaggttcaagccattacagaaggtggcactggcagaataagctcataaatttacaaacactaagtcagcaacttcattgactaataggttagctcttccaaccttagcatggtccctaattacatttaaatcagcaaactcaattttgcctgggttggaggcwgagcacagtgatgtcattctcatgggctaccagctaccatttttaggaaggttacttagacacattccaattctcagagcaatggttattcggacattttgctttttggagtatatctgaagtttatcagctctcttctccatgtcagtaggcaggagagctgcccacgaartgaataataagcagtgaatgaaaataagygcagcaacacataagaacaacatgcacagatcactggtccttttcacacaaagctatctgaaaasttcttagaatgaatgtagatcaggctggagaat

SEQ ID NO: 80805 - DNA, 600 bp, Chicken  19866894373596_2
aataagctcataaatttacaaacactaagtcagcaacttcattgactaataggttagctcttccaaccttagcatggtccctaattacatttaaatcagcaaactcaattttgcctgggttggaggcwgagcacagtgatgtcattctcatgggctaccagctaccatttttaggaaggttacttagacacattccaattctcagagcaatggttattcggacattttgctttttggagtatatctgaagtttatcagctctcttctccatgtcagtaggcaggagagctgcccacgaartgaataataagcagtgaatgaaaataagygcagcaacacataagaacaacatgcacagatcactggtccttttcacacaaagctatctgaaaasttcttagaatgaatgtagatcaggctggagaataagcagaccaaaacctctttctgtctgaacttattacagcactcgcagcattttctctgtggcacacrgtgcttagtggcaaaactagattgcctgcacagtcgcagatgcaataactttgccaacaagaaatagaactgacaagaaamtaggcagcaagcaaagcctgcttc

SEQ ID NO: 80806 - DNA, 600 bp, Chicken  19866894373596_3
tcagcaacttcattgactaataggttagctcttccaaccttagcatggtccctaattacatttaaatcagcaaactcaattttgcctgggttggaggcwgagcacagtgatgtcattctcatgggctaccagctaccatttttaggaaggttacttagacacattccaattctcagagcaatggttattcggacattttgctttttggagtatatctgaagtttatcagctctcttctccatgtcagtaggcaggagagctgcccacgaartgaataataagcagtgaatgaaaataagygcagcaacacataagaacaacatgcacagatcactggtccttttcacacaaagctatctgaaaasttcttagaatgaatgtagatcaggctggagaataagcagaccaaaacctctttctgtctgaacttattacagcactcgcagcattttctctgtggcacacrgtgcttagtggcaaaactagattgcctgcacagtcgcagatgcaataactttgccaacaagaaatagaactgacaagaaamtaggcagcaagcaaagcctgcttcacaaggtcaaatattaaccgcagtttgat

SEQ ID NO: 80807 - DNA, 600 bp, Chicken  19866894373596_4
atcagcaaactcaattttgcctgggttggaggcwgagcacagtgatgtcattctcatgggctaccagctaccatttttaggaaggttacttagacacattccaattctcagagcaatggttattcggacattttgctttttggagtatatctgaagtttatcagctctcttctccatgtcagtaggcaggagagctgcccacgaartgaataataagcagtgaatgaaaataagygcagcaacacataagaacaacatgcacagatcactggtccttttcacacaaagctatctgaaaasttcttagaatgaatgtagatcaggctggagaataagcagaccaaaacctctttctgtctgaacttattacagcactcgcagcattttctctgtggcacacrgtgcttagtggcaaaactagattgcctgcacagtcgcagatgcaataactttgccaacaagaaatagaactgacaagaaamtaggcagcaagcaaagcctgcttcacaaggtcaaatattaaccgcagtttgatttacgatgcattactttctttcagtttccccactgaaaagaccagatgagaaagggcgattccaa

SEQ ID NO: 80808 - DNA, 600 bp, Chicken  19866894373596_5
caattctcagagcaatggttattcggacattttgctttttggagtatatctgaagtttatcagctctcttctccatgtcagtaggcaggagagctgcccacgaartgaataataagcagtgaatgaaaataagygcagcaacacataagaacaacatgcacagatcactggtccttttcacacaaagctatctgaaaasttcttagaatgaatgtagatcaggctggagaataagcagaccaaaacctctttctgtctgaacttattacagcactcgcagcattttctctgtggcacacrgtgcttagtggcaaaactagattgcctgcacagtcgcagatgcaataactttgccaacaagaaatagaactgacaagaaamtaggcagcaagcaaagcctgcttcacaaggtcaaatattaaccgcagtttgatttacgatgcattactttctttcagtttccccactgaaaagaccagatgagaaagggcgattccaattcagtcagatatcagagcctaaacaaatgatgaccatcaataaacaaccactgaacagtcccagtcatgaacctgtcatgatttcttccctagcaaggta

SEQ ID NO: 80809 - DNA, 590 bp, Chicken  19866894373596_6
taggcaggagagctgcccacgaartgaataataagcagtgaatgaaaataagygcagcaacacataagaacaacatgcacagatcactggtccttttcacacaaagctatctgaaaasttcttagaatgaatgtagatcaggctggagaataagcagaccaaaacctctttctgtctgaacttattacagcactcgcagcattttctctgtggcacacrgtgcttagtggcaaaactagattgcctgcacagtcgcagatgcaataactttgccaacaagaaatagaactgacaagaaamtaggcagcaagcaaagcctgcttcacaaggtcaaatattaaccgcagtttgatttacgatgcattactttctttcagtttccccactgaaaagaccagatgagaaagggcgattccaattcagtcagatatcagagcctaaacaaatgatgaccatcaataaacaaccactgaacagtcccagtcatgaacctgtcatgatttcttccctagcaaggtatcatccttcgttaaacaaaccctcaggagacaaacacttctaagtcaccactgcacgccgcagtgccagcc

SEQ ID NO: 80810 - DNA, 599 bp, Chicken  19866894373603_1
  misc_feature (1)..(26): n is any nucleotide
nnnnnnnnnnnnnnnnnnnnnnnnnntaaataggataaaatctcattaatgctaagtttaatagttttgtttattgtaataatgacagtatcccattttcaaattatggctgttacaaaagttgaagtggaaatatatgcttccacaagtgaaaaatagactttttatttgctgcctgaattttttgtaagtcattttcatcactgtgtgcttttttgtaataatagtcaattttacatcttagatttgctatatgtatagaagctacagaagttgtcacaggcaatatctgtttggaargcacrtgagctgggacagaaaaatagctgccagccatcagtgtgggtgcaaactccctcacagctctttctgggctggtcactaggaattcagctgaagtcatgaggcagctcacgaaggcttacttgcaaaaacaatagacaaaattgtggcttgtgtagtttgacgaactaccaatacatctttaaacattttatcacaggactttattcacagcatgccatgaattgctgacatcaggaggttacacaaggctctaatgataacaattgatttgatttttaatgtgactttccaaa

SEQ ID NO: 80811 - DNA, 599 bp, Chicken  19866894373603_2
  misc_feature (1)..(21): n is any nucleotide
nnnnnnnnnnnnnnnnnnnnntaaataggataaaatctcattaatgctaagtttaatagttttgtttattgtaataatgacagtatcccattttcaaattatggctgttacaaaagttgaagtggaaatatatgcttccacaagtgaaaaatagactttttatttgctgcctgaattttttgtaagtcattttcatcactgtgtgcttttttgtaataatagtcaattttacatcttagatttgctatatgtatagaagctacagaagttgtcacaggcaatatctgtttggaargcacrtgagctgggacagaaaaatagctgccagccatcagtgtgggtgcaaactccctcacagctctttctgggctggtcactaggaattcagctgaagtcatgaggcagctcacgaaggcttacttgcaaaaacaatagacaaaattgtggcttgtgtagtttgacgaactaccaatacatctttaaacattttatcacaggactttattcacagcatgccatgaattgctgacatcaggaggttacacaaggctctaatgataacaattgatttgatttttaatgtgactttccaaaaagta

SEQ ID NO: 80812 - DNA, 599 bp, Chicken  19866894373606_1
  misc_feature (1)..(68): n is any nucleotide
nnnnnnnnnnnnnnnnnnnnnnnnnnnnnnnnnnnnnnnnnnnnnnnnnnnnnnnnnnnnnnnnnnnnagaacacttatttgattttaaccgatgtgcttttggattctattgtgggagtctgtcagtaggctgtggggcctgtatatgctgctactccttatccctcctcaccactctggaaagagctacgttctgacttcattgcacctgtgcagctgtagcaatgctctgccagcaatgctaatgctcccttgtcagtttttaaacattatcccaagtagagagaattaataacaaratctgagtcatctctaaagtaacccaaatgcccctgtgtcctattccttcagtattatgtcatttttcagctcctgtccaggacaatgacaagggtctcttatactctcacagctgagaagtgtgtcagggcaggccacaccatttattcagactacccttttgcctttgtggccctaaacatttaaaaaccttcaggccagattttccagtccatgtcagctgctcagctggtacaaagtggatggattctggccagggctggcgagtggccacagctttcccctcatgcccatgcgg

SEQ ID NO: 80813 - DNA, 600 bp, Chicken  19866894373614_1
tgtgggtagagattgataagcatctgatgtgatcactggttctaagtgtagaccagagacatttctgctttcttgaaagaaagcttaaagaaataatattgatatctctatgtgctctactgggtggggctttgagcaacctgctctggaggaagatatccctgcctatagcaggcgctttgaaactaggtgatcttaaaggtccttccaacccagactattctaggataattgaagctgtttggtgtaaggtagtccttgctggaagatgacctgattagtctgcagttaagttaaacsatcagcttggagtattgtgtcagaattgggatctggctgaaaagaagggacggctggttttttkatatttatttttgacttggtactcagataaaaagtagctaaacgtgtggagaaggtactgctcaagaaagcgtgacagtggagggcggggaaaaaaaagagttttccttttttgaggtattcattgttcagctacccaatttggaggattcaggggactatttggtattgatgaaggaactgaagataagtgtagagagctctttttcctttattatcatttttgtaattgcattt

SEQ ID NO: 80814 - DNA, 600 bp, Chicken  19866894373614_2
ctgctttcttgaaagaaagcttaaagaaataatattgatatctctatgtgctctactgggtggggctttgagcaacctgctctggaggaagatatccctgcctatagcaggcgctttgaaactaggtgatcttaaaggtccttccaacccagactattctaggataattgaagctgtttggtgtaaggtagtccttgctggaagatgacctgattagtctgcagttaagttaaacsatcagcttggagtattgtgtcagaattgggatctggctgaaaagaagggacggctggttttttkatatttatttttgacttggtactcagataaaaagtagctaaacgtgtggagaaggtactgctcaagaaagcgtgacagtggagggcggggaaaaaaaagagttttccttttttgaggtattcattgttcagctacccaatttggaggattcaggggactatttggtattgatgaaggaactgaagataagtgtagagagctctttttcctttattatcatttttgtaattgcatttgtttctgcagtctttctgtacctcttggatccgtgaaaagaaagccaggaggcccttggctgct

SEQ ID NO: 80815 - DNA, 600 bp, Chicken  19866894373622_1
tcacttttccctcatttgctgctgcatttttgcttgacggtgaaatcttgacaaggtattgctgtggctttgtttcaatttagtatacacactgatcttgctataccacagctttggcagctactaaaatgtactctataccattatattcccagtgattttacagtcttcataacatttagatcttatcagccactgaatttcatcttcttagataagtgaaactttccatttcttcctgttctttactagcaaatgtttctttttatcatgattttcaagccttcatcttcagagaayttattctgaggtcagtgaatttgtcatctttcctgctacagagatgttcctgtgcattctaaaaagagtaccatatagttctcagaaaacacaacacactaaaccccatctaggagaatttctctgcaacatcattattttatgaaacttgttgcatgacatttactcaatcaaattattattgacctctcttactccattcctatcaagagtaaaatattaaagcagtgcaataaagtgaaaaataggcatcctgcattttaaaaacaaatggctaatctgccaataaaaatcaataaa

SEQ ID NO: 80816 - DNA, 600 bp, Chicken  19866894373624_1
atgattctatgattctatgtccttggaaaagtgtccatcctgagtcttctctcaatcatgaaactgagaagaatagcaaaatgtctgctgtttttttttgcttgtttgtttgttttttgagtggttcatggttatggtggattcatagatttgaactttagagatgaggaggagcaaagcaaatttcaactgatcctcccatcacacaggcaaagatccactcaacttttcaagctcaaggttagggaagttcagtaaagtcattggcttcacattgtttgccaacaaattgagtttgtrcatattttggtttccattatatccttagcatctattttagccatgaatgtgctttgcatgctagcggcattacagaaactgaactgttgatctttctatacccacttaagtaacaaactttaatgacttaataaactccgggtgcacgatgtgtgatcccgccatgtagcctggaggcataggggcttttgcttctgtgatttgttagggtagtcaagaggatgcatccaaagaatgtgcagtcagacctgtgtgaaactttgcaggccatcttacagacattcagatttcaggtaaact

SEQ ID NO: 80817 - DNA, 600 bp, Chicken  19866894373624_2
tttaatgacttaataaactccgggtgcacgatgtgtgatcccgccatgtagcctggaggcataggggcttttgcttctgtgatttgttagggtagtcaagaggatgcatccaaagaatgtgcagtcagacctgtgtgaaactttgcaggccatcttacagacattcagatttcaggtaaactttgtttttactgttcatgtgttcctgtgtgttcttgctcttactctgatattcactttgaaattcagttttgaacaaaatccaaacctcagactgaagctctgctgaaagcaccagtmtttgccatgtttctggtttgcaggcctaaataagctgaaagttggcaaatmcatcagcagaatgagcataactctcatgtagttcttgtgtggtgtggggtgtatccaccaatgcaccatgtgtgtaaatttcattttatccaagaaataaataagtatgactcagctctgtattgccattgcagaaacattaacagagattgctgaaatatttgggagtctttcagtatggtgcttccatacctgatggatattagaaaaaagcatcttataagtagataagagaaaggtagtacatta

SEQ ID NO: 80818 - DNA, 600 bp, Chicken  19866894373624_3
cctggaggcataggggcttttgcttctgtgatttgttagggtagtcaagaggatgcatccaaagaatgtgcagtcagacctgtgtgaaactttgcaggccatcttacagacattcagatttcaggtaaactttgtttttactgttcatgtgttcctgtgtgttcttgctcttactctgatattcactttgaaattcagttttgaacaaaatccaaacctcagactgaagctctgctgaaagcaccagtmtttgccatgtttctggtttgcaggcctaaataagctgaaagttggcaaatmcatcagcagaatgagcataactctcatgtagttcttgtgtggtgtggggtgtatccaccaatgcaccatgtgtgtaaatttcattttatccaagaaataaataagtatgactcagctctgtattgccattgcagaaacattaacagagattgctgaaatatttgggagtctttcagtatggtgcttccatacctgatggatattagaaaaaagcatcttataagtagataagagaaaggtagtacattaggaagtattcagtgggaagaaagaggggctgggtaaaaactctgagcttca

SEQ ID NO: 80819 - DNA, 600 bp, Chicken  19866894373624_4
ggttctgtgctcaggcattctaaaaaaatgcatctacattaatgaccttctagaagaggcagaggtaaacaattagtctagagaaatgatttgcagcctgtttcacatctttgcatacccattttaaagcatgcaaattctaaatgaaacatcgctagaatgactggtttgaatggatttatctaacttcatcaatttctgtaacttgttctagtagactgaatgggctagtattgttttttgtttgtttgttaaccttggctaattctttaagcttattcatgaaattttccctatatyatttctgtcttcaatttccatgatcttagtcttaataaaggtgactttaatggtagaatgtggtagaaacaacacaatagtcaatataaatctatttcagtgtaggtttagattttgatgtgtaatgtggtaactgaatgattctttatttcctctatgtatgatgtttttacagtgcactgtgctacagcatattgacagtggtcctactgcatctttgtatacatcttcaaaataaaataatgcattcaaggccactacaagagccatcataggctcttacgtgattcttgygtatag

SEQ ID NO: 80820 - DNA, 600 bp, Chicken  19866894373624_5
tatatyatttctgtcttcaatttccatgatcttagtcttaataaaggtgactttaatggtagaatgtggtagaaacaacacaatagtcaatataaatctatttcagtgtaggtttagattttgatgtgtaatgtggtaactgaatgattctttatttcctctatgtatgatgtttttacagtgcactgtgctacagcatattgacagtggtcctactgcatctttgtatacatcttcaaaataaaataatgcattcaaggccactacaagagccatcataggctcttacgtgattcttgygtatagtatgctcctatgcatatatcatgggatcagagtgtgaactcataactccttagtcattacagttgatagtcacaaaagaagggtgatagaatctttgattcctcttttttttttttttctttttttctctctaaagatcggaggatgattcccaaatatttatagctagccagcttttgcagatgctaggatcacagagtttactatcttttgactaaacaaattttctttgcctttagtttggttctgttcttttccctgtgactttttcaggtttgtgatgagattcattga

SEQ ID NO: 80821 - DNA, 600 bp, Chicken  19866894373624_6
gtttagattttgatgtgtaatgtggtaactgaatgattctttatttcctctatgtatgatgtttttacagtgcactgtgctacagcatattgacagtggtcctactgcatctttgtatacatcttcaaaataaaataatgcattcaaggccactacaagagccatcataggctcttacgtgattcttgygtatagtatgctcctatgcatatatcatgggatcagagtgtgaactcataactccttagtcattacagttgatagtcacaaaagaagggtgatagaatctttgattcctcytttttttttttttctttttttctctctaaagatcggaggatgattcccaaatatttatagctagccagcttttgcagatgctaggatcacagagtttactatcttttgactaaacaaattttctttgcctttagtttggttctgttcttttccctgtgactttttcaggtttgtgatgagattcattgagctggatggtctgagctgtttgctgaacttcctgaaaagcatggactatgagacctcagaaagccgtatacacacatccgttatagggtgtatcaaggcactgatgaacaa

SEQ ID NO: 80822 - DNA, 599 bp, Chicken  19866894373632_1
  misc_feature (1)..(144): n is any nucleotide
nnnnnnnnnnnnnnnnnnnnnnnnnnnnnnnnnnnnnnnnnnnnnnnnnnnnnnnnnnnnnnnnnnnnnnnnnnnnnnnnnnnnnnnnnnnnnnnnnnnnnnnnnnnnnnnnnnnnnnnnnnnnnnnnnnnnnnnnnnnnnnnnttaagataaatggattgttgaaacagcatatgacttcctagactgttactgctacaaccacatttagtgattggcaggtagaaactgaatgagaggtttgactgtatctcgcctaaatccattcgcactgttactttcctgttttccctgaatagyatcagttgtctctttaaaatttcaatccctgcagagtgcatgtgcaattctcaatttagaccgttctccagctgttttatatataaagccctgtgtgatttttaggagcattttactgctgttgctttgcagtgcctttcatcagcatggaatgagtacagaaataaattttgaaacaattagaagaaaaagaataaaagcctataaaatgagcagtgagcgacttggacggtgcatttaacttctgcagggctgtggtccgttgtgcccctttgttatccatctttcagactttgtca

SEQ ID NO: 80823 - DNA, 599 bp, Chicken  19866894373636_1
  misc_feature (1)..(63): n is any nucleotide
nnnnnnnnnnnnnnnnnnnnnnnnnnnnnnnnnnnnnnnnnnnnnnnnnnnnnnnnnnnnnnncaaaccaaaccaaaaaatgagttaaccaatcatctccagaaatttctctcaatcctgtaagaagcaacaatgggaaactgagcaacaaggaaattgctaaaagtcaaagagcagcaggagatcttggcactgtgtacgatctaacatccactcaaaaatatttaccactttgatgaaaacttaaacacacacaaaaaagcactgcttaactacatgaattttagaaatgaatgcttmatgcatgcccaacttycctttttctgagagcactgactgaaaagataccaaaaatagctttattgccacctgtcagaatagtggatcctygtcagacaggcttcattttaagtcaagctactaacacaggacttagagccctgatggatgacctccagctataagcaaataaaattctctcaaattcttccaactggatttctttcaggatttgacactgttgatcagcaaatacttcttccccatttccaggagattaatgggactggactgaaattgttctgcttctctcttcatac

SEQ ID NO: 80824 - DNA, 599 bp, Chicken  19866894373636_2
  misc_feature (1)..(47): n is any nucleotide
nnnnnnnnnnnnnnnnnnnnnnnnnnnnnnnnnnnnnnnnnnnnnnncaaaccaaaccaaaaaatgagttaaccaatcatctccagaaatttctctcaatcctgtaagaagcaacaatgggaaactgagcaacaaggaaattgctaaaagtcaaagagcagcaggagatcttggcactgtgtacgatctaacatccactcaaaaatatttaccactttgatgaaaacttaaacacacacaaaaaagcactgcttaactacatgaattttagaaatgaatgcttmatgcatgcccaacttycctttttctgagagcactgactgaaaagataccaaaaatagctttattgccacctgtcagaatagtggatcctygtcagacaggcttcattttaagtcaagctactaacacaggacttagagccctgatggatgacctccagctataagcaaataaaattctctcaaattcttccaactggatttctttcaggatttgacactgttgatcagcaaatacttcttccccatttccaggagattaatgggactggactgaaattgttctgcttctctcttcatacctaatacatrggaatt

SEQ ID NO: 80825 - DNA, 600 bp, Chicken  19866894373636_3
aatcatctccagaaatttctctcaatcctgtaagaagcaacaatgggaaactgagcaacaaggaaattgctaaaagtcaaagagcagcaggagatcttggcactgtgtacgatctaacatccactcaaaaatatttaccactttgatgaaaacttaaacacacacaaaaaagcactgcttaactacatgaattttagaaatgaatgcttmatgcatgcccaacttycctttttctgagagcactgactgaaaagataccaaaaatagctttattgccacctgtcagaatagtggatcctygtcagacaggcttcattttaagtcaagctactaacacaggacttagagccctgatggatgacctccagctataagcaaataaaattctctcaaattcttccaactggatttctttcaggatttgacactgttgatcagcaaatacttcttccccatttccaggagattaatgggactggactgaaattgttctgcttctctcttcatacctaatacatrggaattatgagcagctgctcctgtatgttcataaaatatcatctacatactgccatataggtcaaccatctctcaatcatt

SEQ ID NO: 80826 - DNA, 600 bp, Chicken  19866894373636_4
caacttycctttttctgagagcactgactgaaaagataccaaaaatagctttattgccacctgtcagaatagtggatcctygtcagacaggcttcattttaagtcaagctactaacacaggacttagagccctgatggatgacctccagctataagcaaataaaattctctcaaattcttccaactggatttctttcaggatttgacactgttgatcagcaaatacttcttccccatttccaggagattaatgggactggactgaaattgttctgcttctctcttcatacctaatacatrggaattatgagcagctgctcctgtatgttcataaaatatcatctacatactgccatataggtcaaccatctctcaatcattattaattacctctataaaatcttgagtgcacaattttgtaaaagtttggagaaggaaaaaaggtcttagtggatttagatctaaacagaaaacatccattagtgctggttttccctgtattagttttcttaaacatacaggagaaaaaaaaagccacaaatcttacatttccagaaattaataagtgatcatcctttgaagaagacttccagctctaag

SEQ ID NO: 80827 - DNA, 600 bp, Chicken  19866894373639_1
attcctctgggaacgggaagggtgaggacacagacagctgggcccccaaccagcttatgtgtgacacggccgcgtagcaagcctgcaggagatgtcagtgttctacgcttagctcagcagcacgaagccttcagctggctgcttgatggcaccaacgtgtctgagtgccgccccacacgagctgatagcagcaacagctttgggcttcgacgtgggcacttgctgaaggtcagccctgtaataagttgtgcaaatcccacacagaaggtgcttagaaatgctcacaaagccaggctgcarggcaggagtgggccattgatgagacctgcactgtgccacccacagcagcactgctggaacgagagcccagcaccagccctgacccaacaccggagcactgcagcacgaggctgagctggtctgacctcggccgcaaggagcagcactttggctctggaagggttctgctggttgaggaggaaaatctgtacacctcctcctgtggttaggaccaccagaatccagcttaagagtttggccctacgttttttagagaaaaaaccaatcacctgcataacagcccgaagcacgtggagataa

SEQ ID NO: 80828 - DNA, 485 bp, Chicken  19866894373648_1
gagacagagtatccttcgtctcctccatagatcgaccttccaagaacaaaaggtagtgtgtcataggtaatgtttgtaagagatggttcccaaagtataaagatgacggcaatactgagttcaaagaccagattaggcttgcagcctgtacttttatcatagcataagacttctctaacttgtctgggtcccttaggatcacttctcttccttcttggacactcagctgggtgttgtctgaaaaattcctcaggatgcacacaaataaatcatctttgtgacccaaaaaactgttaaatrtaatttatagcaaatctattctttctggttttgtttgccctaatagacagctaagcaccatgcagctgtttcctcccttccccatgcttccaaaaggaagaggaaaaaaaaagaaatagagctcgtaggttactcagtcataacttctgtttcctataaattaaccaaggtataaaaattaaact

SEQ ID NO: 80829 - DNA, 600 bp, Chicken  19866894373650_1
aacctactcaaaacagcaaccgtatggagagatgaaagtagtgcacaaaggactgagtatggacacgacttacatgtgcttgttggttgaagacatttacatttgggcagtttgtgacctttaagattttgctctgtcaatcaggcatgaacagagaagaacattcacatctgagcaccttaaagctcacccacccattggcctctgtgccaccagactccacctgggagcagaaacagatacatccaacttcaccaagtagggttattcggagcactttccatcccgccgtagtgtggwaagctgctatccaaggatgcgtttagcccagctctgaagggaactggggaacataagaaatgtgagcacttagctaagaactgagatttcttaatttcacctgtcgcttagaaagycrcattacattttcattacagttcatgtcttcttattaccaaatgcagtaccgggaggaaaagaatgccttttaaactctggcagtttggttttgtgggatattacatcttgcagcaaaacaactttttctttagtgactatgtctgtgctttttttgttgcagccaatgagacatggccagag

SEQ ID NO: 80830 - DNA, 600 bp, Chicken  19866894373650_2
acctttaagattttgctctgtcaatcaggcatgaacagagaagaacattcacatctgagcaccttaaagctcacccacccattggcctctgtgccaccagactccacctgggagcagaaacagatacatccaacttcaccaagtagggttattcggagcactttccatcccgccgtagtgtggwaagctgctatccaaggatgcgtttagcccagctctgaagggaactggggaacataagaaatgtgagcacttagctaagaactgagatttcttaatttcacctgtcgcttagaaagycrcattacattttcattacagttcatgtcttcttattaccaaatgcagtaccgggaggaaaagaatgccttttaaactctggcagtttggttttgtgggatattacatcttgcagcaaaacaactttttctttagtgactatgtctgtgctttttttgttgcagccaatgagacatggccagagaacccacttccccactcattcactgtgtcagaaacttgcggagaacaagcacagcaatcatggcacaaatgcaatagagatccttgcagatacatgacaccaagcatggtgcttgt

SEQ ID NO: 80831 - DNA, 600 bp, Chicken  19866894373650_3
ctttaagattttgctctgtcaatcaggcatgaacagagaagaacattcacatctgagcaccttaaagctcacccacccattggcctctgtgccaccagactccacctgggagcagaaacagatacatccaacttcaccaagtagggttattcggagcactttccatcccgccgtagtgtggwaagctgctatccaaggatgcgtttagcccagctctgaagggaactggggaacataagaaatgtgagcacttagctaagaactgagatttcttaatttcacctgtcgcttagaaagycrcattacattttcattacagttcatgtcttcttattaccaaatgcagtaccgggaggaaaagaatgccttttaaactctggcagtttggttttgtgggatattacatcttgcagcaaaacaactttttctttagtgactatgtctgtgctttttttgttgcagccaatgagacatggccagagaacccacttccccactcattcactgtgtcagaaacttgcggagaacaagcacagcaatcatggcacaaatgcaatagagatccttgcagatacatgacaccaagcatggtgcttgtgg

SEQ ID NO: 80832 - DNA, 600 bp, Chicken  19866894373657_1
ttcagtatcacttacatggcactcagaacactaaaagcagtccaacaatttgaggatttttaaagttgtgttttacagaagatttagagatagtttatggtttgaaggggagtgttaacctaataatgtgccttgtagctgcgagcaccttaactactaaattcacatggagcaaaaatgtcattgaaaccactaaaacactgttttctgctcactgctgacaagtatgcctgcagcaaacggtactgtaaggaacagactaagctgccccacagctcaggataccttcttagctggcaytgagtacattctgtcatgactgtgttctccttgctggcactctgtctaaaatcaagcagcattacctgttggagacatcaagttgtgaggttagcactttgcttctctatcgcatgtggtgcgaaaacatcccatttgcttccttcacaatcctactaagcttctctcaaaatcacttatctttctgtcttgatacttattcaacatcctcttcttttccagacagtaaacactacaacacacattatcttggctacttgaaatttcctgcataaagattatcagtttcaagtccttatc

SEQ ID NO: 80833 - DNA, 599 bp, Chicken  19866894373659_1
  misc_feature (1)..(142): n is any nucleotide
nnnnnnnnnnnnnnnnnnnnnnnnnnnnnnnnnnnnnnnnnnnnnnnnnnnnnnnnnnnnnnnnnnnnnnnnnnnnnnnnnnnnnnnnnnnnnnnnnnnnnnnnnnnnnnnnnnnnnnnnnnnnnnnnnnnnnnnnnnnnnntatcatagaaaaaatggatttggaaggaccttcagtaggccatttagaccttccctttccctgaaggcagaatcagttacacttaaaccaacataattctatctaatttcttcagaaaagatctaatttagcacttaactatccctgaatttatacastatatgaacctgccttgcagagccatgcccagactgctggtccaaccccaatgcccacagtttctttcmtttgtargagtcccaaatttaccaaataaagcatgtctttaaagagcctgcctacattaaacctctgtgagattctagctagcattaaatcttaagcatcgcaagaaggatcagtattcagtgacttacccaaccagtcaacggggagaagtgcaaagtcgagtggatggagcagcgtggagatttgggaacttttatatggtttcaaagccctgccttctggggatgag

SEQ ID NO: 80834 - DNA, 599 bp, Chicken  19866894373659_2
  misc_feature (1)..(73): n is any nucleotide
nnnnnnnnnnnnnnnnnnnnnnnnnnnnnnnnnnnnnnnnnnnnnnnnnnnnnnnnnnnnnnnnnnnnnnnnntatcatagaaaaaatggatttggaaggaccttcagtaggccatttagaccttccctttccctgaaggcagaatcagttacacttaaaccaacataattctatctaatttcttcagaaaagatctaatttagcacttaactatccctgaatttatacastatatgaacctgccttgcagagccatgcccagactgctggtccaaccccaatgcccacagtttctttcmtttgtargagtcccaaatttaccaaataaagcatgtctttaaagagcctgcctacattaaacctctgtgagattctagctagcattaaatcttaagcatcgcaagaaggatcagtattcagtgacttacccaaccagtcaacggggagaagtgcaaagtcgagtggatggagcagcgtggagatttgggaacttttatatggtttcaaagccctgccttctggggatgagtcctccaggtaatgagctcactctttcacaactgccgttgtgtgtttcctccacagccttgttttacac

SEQ ID NO: 80835 - DNA, 599 bp, Chicken  19866894373659_3
  misc_feature (1)..(66): n is any nucleotide
nnnnnnnnnnnnnnnnnnnnnnnnnnnnnnnnnnnnnnnnnnnnnnnnnnnnnnnnnnnnnnnnnntatcatagaaaaaatggatttggaaggaccttcagtaggccatttagaccttccctttccctgaaggcagaatcagttacacttaaaccaacataattctatctaatttcttcagaaaagatctaatttagcacttaactatccctgaatttatacastatatgaacctgccttgcagagccatgcccagactgctggtccaaccccaatgcccacagtttctttcmtttgtargagtcccaaatttaccaaataaagcatgtctttaaagagcctgcctacattaaacctctgtgagattctagctagcattaaatcttaagcatcgcaagaaggatcagtattcagtgacttacccaaccagtcaacggggagaagtgcaaagtcgagtggatggagcagcgtggagatttgggaacttttatatggtttcaaagccctgccttctggggatgagtcctccaggtaatgagctcactctttcacaactgccgttgtgtgtttcctccacagccttgttttacacgtaggca

SEQ ID NO: 80836 - DNA, 600 bp, Chicken  19866894373661_1
gcaaggggtgcggcggcggcagcacttaccctgggagggggtcggctgctggctgatgccttgccccagctggtccgtcagccagagctgcatgcggatgaagggctcccgtcccttctgtgtcagcttactccatggcttgggccgcgacagcatgtcactcacactgccctgggacaggcccagtacctgggtacggtgcaggcgttatgtgctaggctgctgcctggccatcgtctctgctgaacaggacgcgagcccggccgcgctggggcaagtcacaccccacggtatgcccayatcccttggtcccagtgcttggtgcaggtgctgggatcaccctcagggctacccactgggtatgggttgtggggacagcatgttccctgtgggcagtgccaccaaccaattggtggtggccaycaggagactgttgggttgggttgaacattgaggactctgaggggacccttggggcacagtgaagaccctggcaggaggtgctagaggacatcaacccgccctgggtgctgatgtggacagtcccaccccaccgaggggacaccagactccgttccccaggctggtaccttctctcca

SEQ ID NO: 80837 - DNA, 600 bp, Chicken  19866894373661_2
cagcttactccatggcttgggccgcgacagcatgtcactcacactgccctgggacaggcccagtacctgggtacggtgcaggcgttatgtgctaggctgctgcctggccatcgtctctgctgaacaggacgcgagcccggccgcgctggggcaagtcacaccccacggtatgcccayatcccttggtcccagtgcttggtgcaggtgctgggatcaccctcagggctacccactgggtatgggttgtggggacagcatgttccctgtgggcagtgccaccaaccaattggtggtggccaycaggagactgttgggttgggttgaacattgaggactctgaggggacccttggggcacagtgaagaccctggcaggaggtgctagaggacatcaacccgccctgggtgctgatgtggacagtcccaccccaccgaggggacaccagactccgttccccaggctggtaccttctctccaaagatcctctggcagatgccgttcttggccaacttctccttgacctgccgggtcagctccagtgtgtccacctccctgtacatgtacatctcatactgctctggtgtcagcggaggcacagtg

SEQ ID NO: 80838 - DNA, 599 bp, Chicken  19866894373664_1
  misc_feature (1)..(161): n is any nucleotide
nnnnnnnnnnnnnnnnnnnnnnnnnnnnnnnnnnnnnnnnnnnnnnnnnnnnnnnnnnnnnnnnnnnnnnnnnnnnnnnnnnnnnnnnnnnnnnnnnnnnnnnnnnnnnnnnnnnnnnnnnnnnnnnnnnnnnnnnnnnnnnnnnnnnnnnnnnnnnnnnntgttacatagagttgtattttaattaatggtgatagtcactaaaaaattacgatgattgctctggaaaactattatcacctatcaatttcttttcctccagagacaaaagaaagtacttgcaacaaaggtcaggacagyactgaaaagagtctgtgtccatcttctttctaccattatttcaggtatatatgcactctgataagatcccccatgagcattctcttccrtggactgcaatcccagcactcccagtcctcataggatatatgctagaatcccttgatcatgttagtggccctgtgctggactctttccagcatgcccatgtcttcttgtactgagaagccaagaaatgaacacagtactccaggtgtggtttcatcagtgctgagtgaaagggaaggaccatctctcttgacctgctgaggatattttgc

SEQ ID NO: 80839 - DNA, 599 bp, Chicken  19866894373664_2
  misc_feature (1)..(72): n is any nucleotide
nnnnnnnnnnnnnnnnnnnnnnnnnnnnnnnnnnnnnnnnnnnnnnnnnnnnnnnnnnnnnnnnnnnnnnnntgttacatagagttgtattttaattaatggtgatagtcactaaaaaattacgatgattgctctggaaaactattatcacctatcaatttcttttcctccagagacaaaagaaagtacttgcaacaaaggtcaggacagyactgaaaagagtctgtgtccatcttctttctaccattatttcaggtatatatgcactctgataagatcccccatgagcattctcttccrtggactgcaatcccagcactcccagtcctcataggatatatgctagaatcccttgatcatgttagtggccctgtgctggactctttccagcatgcccatgtcttcttgtactgagaagccaagaaatgaacacagtactccaggtgtggtttcatcagtgctgagtgaaagggaaggaccatctctcttgacctgctgaggatattttgcctaattcagccaagaataccattagccttcttatggactccagttcaactttgtgttcgacaggatgtctgggtcattttctgcagagt

SEQ ID NO: 80840 - DNA, 600 bp, Chicken  19866894373664_3
aagccaagaaatgaacacagtactccaggtgtggtttcatcagtgctgagtgaaagggaaggaccatctctcttgacctgctgaggatattttgcctaattcagccaagaataccattagccttcttatggactccagttcaactttgtgttcgacaggatgtctgggtcattttctgcagagttgctttccagctagatagtccccagtatttattgatgactggaattgttcctcaataacttgttttcccctatcaaagaacttcattctggtgattcagctactcttcttcctacwactcattcctaattcttcatttaacaccaccatttttcagcgaaactgtctgggatcatggcatcatagtatcatataatgatttgggttcaaagggaccacaaatatcatctaattccaagccccctgccatatacaaagacatcttccactagaccaggttgcccaaagccccattcaacttggccctgaataccttcagggatcagacatctacagattctctggacaacttggtttcagtgcctcatcaccctctgagtaaagaatatcttccttatatccaatctaaatctggcc

SEQ ID NO: 80841 - DNA, 600 bp, Chicken  19866894373672_1
aaaatactgtatttctgattccatagacagaactgaaaggtgacttgtgtgagttctgtggatgaatagatttgaagatgatgagatgacgaaagacaccaggagtgaggaagaagttgaaggtgacacagagtgacagcaatggaaatgatagagcgactttgaagcataaaatccaaaaagcactatgaagaaaggataagaaaataggctaaagcaaatattaggagaatgtcttactgtatatcaattacaaagacacagtaagctttatccacgtaacttctctttaaagggttyttcttaaatcatyatctttctgttgacgtgatattctaccagccaccagtgccctggcccagaaaacctgtgagagaggcaattgctctgtatttactaaacttggtagctctcttttatatggacttgtccatctccccacaatgcgcataaaatagaggaaaaaggtatcagtctgtggcttgtgcttcatgtgcaggttatccatagagacagtctgtttacatatgtttgcttattctttgtgaatgacctaagtatttagaagctttaacttgatcatttcattgataaagttaa

SEQ ID NO: 80842 - DNA, 600 bp, Chicken  19866894373672_2
tctgattccatagacagaactgaaaggtgacttgtgtgagttctgtggatgaatagatttgaagatgatgagatgacgaaagacaccaggagtgaggaagaagttgaaggtgacacagagtgacagcaatggaaatgatagagcgactttgaagcataaaatccaaaaagcactatgaagaaaggataagaaaataggctaaagcaaatattaggagaatgtcttactgtatatcaattacaaagacacagtaagctttatccacgtaacttctctttaaagggttyttcttaaatcatyatctttctgttgacgtgatattctaccagccaccagtgccctggcccagaaaacctgtgagagaggcaattgctctgtatttactaaacttggtagctctcttttatatggacttgtccatctccccacaatgcgcataaaatagaggaaaaaggtatcagtctgtggcttgtgcttcatgtgcaggttatccatagagacagtctgtttacatatgtttgcttattctttgtgaatgacctaagtatttagaagctttaacttgatcatttcattgataaagttaatagggttgcatag

SEQ ID NO: 80843 - DNA, 600 bp, Chicken  19866894373672_3
attctaccagccaccagtgccctggcccagaaaacctgtgagagaggcaattgctctgtatttactaaacttggtagctctcttttatatggacttgtccatctccccacaatgcgcataaaatagaggaaaaaggtatcagtctgtggcttgtgcttcatgtgcaggttatccatagagacagtctgtttacatatgtttgcttattctttgtgaatgacctaagtatttagaagctttaacttgatcatttcattgataaagttaatagggttgcatagtccttcagacaggcatgcrtcagcaaagtttgtacttgttctagtttgactgaaggcgtggggtagttgagtcaactcctggtgtgccyatatgaagctgatgaatgataccagaagattttgagtctttgtcctcaagttggtacttatttgtagtggaaattagttacatctgtttactgcatgagttctaggtgtgtttgattagcaacaaatggctgtgaagtacaaatgttttcagtactgtctgagattctggtgtggaatatattaggattggaaaagatgctgaatgcagcaataaaaaggggraaaattt

SEQ ID NO: 80844 - DNA, 600 bp, Chicken  19866894373672_4
ttggtagctctcttttatatggacttgtccatctccccacaatgcgcataaaatagaggaaaaaggtatcagtctgtggcttgtgcttcatgtgcaggttatccatagagacagtctgtttacatatgtttgcttattctttgtgaatgacctaagtatttagaagctttaacttgatcatttcattgataaagttaatagggttgcatagtccttcagacaggcatgcrtcagcaaagtttgtacttgttctagtttgactgaaggcgtggggtagttgagtcaactcctggtgtgccyatatgaagctgatgaatgataccagaagattttgagtctttgtcctcaagttggtacttatttgtagtggaaattagttacatctgtttactgcatgagttctaggtgtgtttgattagcaacaaatggctgtgaagtacaaatgttttcagtactgtctgagattctggtgtggaatatattaggattggaaaagatgctgaatgcagcaataaaaaggggraaaatttgtcctatataaaagattccttcaaagcattttctgaactcccttttgggactctgtgagtttatgtcaga

SEQ ID NO: 80845 - DNA, 597 bp, Chicken  19866894373672_5
gcatgcrtcagcaaagtttgtacttgttctagtttgactgaaggcgtggggtagttgagtcaactcctggtgtgccyatatgaagctgatgaatgataccagaagattttgagtctttgtcctcaagttggtacttatttgtagtggaaattagttacatctgtttactgcatgagttctaggtgtgtttgattagcaacaaatggctgtgaagtacaaatgttttcagtactgtctgagattctggtgtggaatatattaggattggaaaagatgctgaatgcagcaataaaaaggggraaaatttgtcctatataaaagattccttcaaagcattttctgaactcccttttgggactctgtgagtttatgtcagaggagctggtgatttcaacttgagtgattttttttttttttcaggtagggttaatgggagtaacaaagtgaagcgtttatttgtaatcagttttactttgctgtctgtctgtattgkggaagaagagttcagtctgtagcttcaggtgtgacagtggcctgatgtatcaagattgctgcaagtgagaatgcttccagcttctcgctcatgtgctggaatcc

SEQ ID NO: 80846 - DNA, 404 bp, Chicken  19866894373672_6
tagcaacaaatggctgtgaagtacaaatgttttcagtactgtctgagattctggtgtggaatatattaggattggaaaagatgctgaatgcagcaataaaaaggggraaaatttgtcctatataaaagattccttcaaagcattttctgaactcccttttgggactctgtgagtttatgtcagaggagctggtgatttcaacttgagtgattttttttttttttcaggtagggttaatgggagtaacaaagtgaagcgtttatttgtaatcagttttactttgctgtctgtctgtattgkggaagaagagttcagtctgtagcttcaggtgtgacagtggcctgatgtatcaagattgctgcaagtgagaatgcttccagcttctcgctcatgtgctggaatcc

SEQ ID NO: 80847 - DNA, 600 bp, Chicken  19866894373673_1
acatctggatcactgtgcccagttctgggctcctcttttcaagacaggcagggaacacatagagtccaagggaggactacaaagacgcttagggtcttggagcatctcacttacgaagaacggctgagagatctggggctgttccacctggagaagatcattgtcaatgcttaaaacagctaaagggcatgagtgaaacgtatggggccaggatcttttcagtgatgcccagcaacaggaaaagaggcaatgagcactacacttaagcagctctgttattctcctcttgcaaacatcgartcrtactcagtgatctggcaaaacatgacaacttattgctacattaatagtttcacttcttgcactgacatggagcaagtctggaaggccaatcattgactcttgttcttcagttttaatttcaggtttyggaatttcctatcaggagctaatgcaataaagcaagcaataaagccttggygttaggcctctcactaattctaaactgtgaaataaaagggaaaaactttaaaacatgatgcagtccatccaaaatctttcttacttaggatgtttgtattacaagttggccttagagaa

SEQ ID NO: 80848 - DNA, 600 bp, Chicken  19866894373673_2
tctggatcactgtgcccagttctgggctcctcttttcaagacaggcagggaacacatagagtccaagggaggactacaaagacgcttagggtcttggagcatctcacttacgaagaacggctgagagatctggggctgttccacctggagaagatcattgtcaatgcttaaaacagctaaagggcatgagtgaaacgtatggggccaggatcttttcagtgatgcccagcaacaggaaaagaggcaatgagcactacacttaagcagctctgttattctcctcttgcaaacatcgartcrtactcagtgatctggcaaaacatgacaacttattgctacattaatagtttcacttcttgcactgacatggagcaagtctggaaggccaatcattgactcttgttcttcagttttaatttcaggtttyggaatttcctatcaggagctaatgcaataaagcaagcaataaagccttggygttaggcctctcactaattctaaactgtgaaataaaagggaaaaactttaaaacatgatgcagtccatccaaaatctttcttacttaggatgtttgtattacaagttggccttagagaagaa

SEQ ID NO: 80849 - DNA, 600 bp, Chicken  19866894373673_3
atctggggctgttccacctggagaagatcattgtcaatgcttaaaacagctaaagggcatgagtgaaacgtatggggccaggatcttttcagtgatgcccagcaacaggaaaagaggcaatgagcactacacttaagcagctctgttattctcctcttgcaaacatcgartcrtactcagtgatctggcaaaacatgacaacttattgctacattaatagtttcacttcttgcactgacatggagcaagtctggaaggccaatcattgactcttgttcttcagttttaatttcaggtttyggaatttcctatcaggagctaatgcaataaagcaagcaataaagccttggygttaggcctctcactaattctaaactgtgaaataaaagggaaaaactttaaaacatgatgcagtccatccaaaatctttcttacttaggatgtttgtattacaagttggccttagagaagaatttttctgctcccattgacttttcagagttacattgttccacttatagctagcgatctctttcagacggaagctcacctttaacctgccataagcctataagccaatgggaagagggactgctggct

SEQ ID NO: 80850 - DNA, 600 bp, Chicken  19866894373673_4
aaagggcatgagtgaaacgtatggggccaggatcttttcagtgatgcccagcaacaggaaaagaggcaatgagcactacacttaagcagctctgttattctcctcttgcaaacatcgartcrtactcagtgatctggcaaaacatgacaacttattgctacattaatagtttcacttcttgcactgacatggagcaagtctggaaggccaatcattgactcttgttcttcagttttaatttcaggtttyggaatttcctatcaggagctaatgcaataaagcaagcaataaagccttggygttaggcctctcactaattctaaactgtgaaataaaagggaaaaactttaaaacatgatgcagtccatccaaaatctttcttacttaggatgtttgtattacaagttggccttagagaagaatttttctgctcccattgacttttcagagttacattgttccacttatagctagcgatctctttcagacggaagctcacctttaacctgccataagcctataagccaatgggaagagggactgctggcttggctctcctgccagccttctgacaaagatcacaaaatcaagtcagcgtaa

SEQ ID NO: 80851 - DNA, 600 bp, Chicken  19866894373674_1
aaatggtaaggaaacacatatctaatgaaaaaaaaaccaacaaaaaacacaaaaatctacaattacagaaaaagccccataaacttgccttaataaaatgtatctgccttttttttttattctcagcattgaatatccactaggaatctgagcctttttgaaaatgacctgtgttgtacaaataacaacaagccccatcaagctcatctttaaattcgacttgtaaataataatcttattattaaatcaaagttatgttttttatccatttagtttcttaataatttcattgcattcttycccccccccccttttttttaaatttaaaatgatgccgtatytrttagataaagaaccaaacaaattcatatatgcaaatatgtcacaaattcaacaaatactatagattatacaactgccacattatcacgtccataactttgaagcctttgctttggtacaaatgaactgatagcaggagaagttgtgtcaggttgtcattgactgctaagagtaagaataactgcataattgcacattttattctgtccagataaagatgtctttgaattatccattttttccagggtgtatttaaaa

SEQ ID NO: 80852 - DNA, 600 bp, Chicken  19866894373674_2
aaaaaacacaaaaatctacaattacagaaaaagccccataaacttgccttaataaaatgtatctgccttttttttttattctcagcattgaatatccactaggaatctgagcctttttgaaaatgacctgtgttgtacaaataacaacaagccccatcaagctcatctttaaattcgacttgtaaataataatcttattattaaatcaaagttatgttttttatccatttagtttcttaataatttcattgcattcttccccccccccccttttttttaaatttaaaatgatgccgtatytrttagataaagaaccaaacaaattcatatatgcaaatatgtcacaaattcaacaaatactatagattatacaactgccacattatcacgtccataactttgaagcctttgctttggtacaaatgaactgatagcaggagaagttgtgtcaggttgtcattgactgctaagagtaagaataactgcataattgcacattttattctgtccagataaagatgtctttgaattatccattttttccagggtgtatttaaaaagtgtaggaaggaaaatatgaaaatatactgccttttgaag

SEQ ID NO: 80853 - DNA, 600 bp, Chicken  19866894373674_3
aaaacacaaaaatctacaattacagaaaaagccccataaacttgccttaataaaatgtatctgccttttttttttattctcagcattgaatatccactaggaatctgagcctttttgaaaatgacctgtgttgtacaaataacaacaagccccatcaagctcatctttaaattcgacttgtaaataataatcttattattaaatcaaagttatgttttttatccatttagtttcttaataatttcattgcattcttccccccccccccttttttttaaatttaaaatgatgccgtatytrttagataaagaaccaaacaaattcatatatgcaaatatgtcacaaattcaacaaatactatagattatacaactgccacattatcacgtccataactttgaagcctttgctttggtacaaatgaactgatagcaggagaagttgtgtcaggttgtcattgactgctaagagtaagaataactgcataattgcacattttattctgtccagataaagatgtctttgaattatccattttttccagggtgtatttaaaaagtgtaggaaggaaaatatgaaaatatactgccttttgaagca

SEQ ID NO: 80854 - DNA, 600 bp, Chicken  19866894373675_1
tgctcatccagcaatacaaggtatattggaggaagagaaataatccctgatcgtatctgtaaatatctagcccagctgggctgcctactggagttacgacagtgctacattctgccaaaccagcataggtgaatgcagcttgtagtggatagttaatggaggatcaaagatttgtctgcaagaaagttactgcagctactgaaggtaaactacatagcacagggatcttccagtactccttgaagtattatattcacttaaagaatcggtgcaaaagaactaatttgctgcaaattcctkttctacctatcaccttcctcctgttcacagccttgaggttgaagagtctgtgccaaaatccattgaaatctttccaagggtagrctgggagtcctaggaatatttcctagtttacatgggacttttttcctcttttctgtatgcagctcatgaggtatatggctctcagctaagttgtgaaaatagcagactctgaagagcaaaaccagagagaacagactgggggcaggcaccctgtgaagtctgtgggagttttggaacacagacacgggttgagtccatccatataatttttatttt

SEQ ID NO: 80855 - DNA, 600 bp, Chicken  19866894373675_2
ctactggagttacgacagtgctacattctgccaaaccagcataggtgaatgcagcttgtagtggatagttaatggaggatcaaagatttgtctgcaagaaagttactgcagctactgaaggtaaactacatagcacagggatcttccagtactccttgaagtattatattcacttaaagaatcggtgcaaaagaactaatttgctgcaaattcctkttctacctatcaccttcctcctgttcacagccttgaggttgaagagtctgtgccaaaatccattgaaatctttccaagggtagrctgggagtcctaggaatatttcctagtttacatgggacttttttcctcttttctgtatgcagctcatgaggtatatggctctcagctaagttgtgaaaatagcagactctgaagagcaaaaccagagagaacagactgggggcaggcaccctgtgaagtctgtgggagttttggaacacagacacgggttgagtccatccatataatttttatttttgggtgacattcgtttttcagaatcttgaattgtgattaataattttgcacgagtgactttacaagcaattcggcctgaaaact

SEQ ID NO: 80856 - DNA, 600 bp, Chicken  19866894373675_3
gtatgcagctcatgaggtatatggctctcagctaagttgtgaaaatagcagactctgaagagcaaaaccagagagaacagactgggggcaggcaccctgtgaagtctgtgggagttttggaacacagacacgggttgagtccatccatataatttttatttttgggtgacattcgtttttcagaatcttgaattgtgattaataattttgcacgagtgactttacaagcaattcggcctgaaaactgtctccccaagtgaatgttttgaacatgccaggtgcaagaccgtgatgaaactrgtggagcatcttcaacaacaacaagttctatttgtacatttgcttgcttgtttttgctacaggtaattcagagcactcatcctgcaaggtgcagatcgaaattcacaaggagtgttattattactaatggacattttgaactgctgcagtgttgcttcgtttactctgctcacatatatttacaagaaacatctatttttacttcagtctcctcattacggcttccttgccattcacatgtacatgtgtaacaaaaatgactccttcatgtcccccgagtggtaccatatgctgacaaaa

SEQ ID NO: 80857 - DNA, 600 bp, Chicken  19866894373682_1
ggttgtgggtctcggggtgtttgtcctacttgctggcaccatcttcacgggtgcatagacaccaagtgacttccatggggatgaccgaccgggtggagtggcaaagccaaataactcatctttttgtgatgtatgcatgttgagagaaagcaggcaagcagtcaaagcagggcgaggtatttaagaagcagccatggttcatcggggcacaagcatgcagtgtaagtgttaaataaccttatgtcctagcacggacattgagcagcagcggttgggtcttcacggggtgctcagagcttrgttggggtcaggttttcgtgtgctgggggtctgtcctctcccctctgcaaagcgccccaaatgtgrctttcctcagggaataacaaacagcagcgcttgcgtaaagccctgatgtgctcgttctgaaaataatccttgtttataattcacgcttggcagtaaaagactgtaaattattaaggcaccaaatcctttgcagtgaagaagcggagataaacctcgtgtcagaaacaaattgctggggtggttgttctctttgctgcgttaggtacgtggaaatattatgagaaataaagcgtg

SEQ ID NO: 80858 - DNA, 600 bp, Chicken  19866894373682_2
tgacttccatggggatgaccgaccgggtggagtggcaaagccaaataactcatctttttgtgatgtatgcatgttgagagaaagcaggcaagcagtcaaagcagggcgaggtatttaagaagcagccatggttcatcggggcacaagcatgcagtgtaagtgttaaataaccttatgtcctagcacggacattgagcagcagcggttgggtcttcacggggtgctcagagcttrgttggggtcaggttttcgtgtgctgggggtctgtcctctcccctctgcaaagcgccccaaatgtgrctttcctcagggaataacaaacagcagcgcttgcgtaaagccctgatgtgctcgttctgaaaataatccttgtttataattcacgcttggcagtaaaagactgtaaattattaaggcaccaaatcctttgcagtgaagaagcggagataaacctcgtgtcagaaacaaattgctggggtggttgttctctttgctgcgttaggtacgtggaaatattatgagaaataaagcgtgtggggactgggaaggcactgctgactcaggtttgttcctctcttaaaacatcgactgcttggtctc

SEQ ID NO: 80859 - DNA, 600 bp, Chicken  19866894373682_3
aataatccttgtttataattcacgcttggcagtaaaagactgtaaattattaaggcaccaaatcctttgcagtgaagaagcggagataaacctcgtgtcagaaacaaattgctggggtggttgttctctttgctgcgttaggtacgtggaaatattatgagaaataaagcgtgtggggactgggaaggcactgctgactcaggtttgttcctctcttaaaacatcgactgcttggtctcgtagccttgtgaaggatgagcatccctggagtgcatatgtgggtgccaagaggatgtgtgsgtctccaaagcacgtgtgtgggtccataaagctcatgggtagctggtggtggccattgtgtcgtgggaaaggcatgcgggtctctcctgcccagctccatcaccccttggttcaagctgtttctgtgctcccagcatggagcacagatttgcagggagtttgggctgctgcagttgggacctgcaatgggaaatgcagggtgcttaaccccaaatgcagggagctcaaatctggtcggctgttgggggattttgtatcctctctccatgagctgcagtcctacccctgcaccatataggt

SEQ ID NO: 80860 - DNA, 600 bp, Chicken  19866894373686_1
ggaggtcctggtcaaggaagaaattagggaaacctgggtatctgtttggtgccttcccaaagaactgagctctgagttagttttgtttctctgaagaccttcctgggagctcaggtgctgtgggagccgatagttattccatcgtaggaattttgacttctgtttaatttaatttttgagaagctgtaacctgtggttaaaatggaaacaattaggagacaaaatgtttagctctaatagatttctgagatttgtttgactagatctgctgatactgccttggctgcttacatagcttcrtaaagacatctgtacctgttcttagtacttacctatgtgattttagtgtcttactgtagtataacagaccatctcctggtgggattttgctgctgagtcatctcctatcaggtgtttgaatgccacaggtggcctggtgtgataaatactgatgcagggaggggaattcacttagcacatggagctataaagagtaagcagggggaaaccctgcagtaagccatcgggggttcagcaggctcttggcaacactaaaagaagtctgtttacaaaaccttgccttagggagatttagtgcct

SEQ ID NO: 80861 - DNA, 600 bp, Chicken  19866894373688_1
cctgggaggccacagggagaagggaaaggaggaatgtcaggacatatggaaggtttgggtgaatgtagcaggttcttggggtttttcctcctactcttgatttcattaagtcatgggaacataggtacgacttatttagtcagactgagtagagcagacctttgtcagccacagggcagctgttaatagttctgtagctgcaaagctttcttaaaatgggtcacttgggtctccaggggtctcttgctgtttgggaacaggtcctcagtctgccttctgtggctgctgaagtagaactgkctgtgcagctttcttccccttgttgttgttgtgtctgtgctgttctrctttacaaatgccagcccttctgccttcccttcatttgtttagtcttctcatcctctttcttgcctcggtatgcaatgagagtgctgaacgtggcatttagctagctcagcagcctcctgcygggttggcagagcacctttgctttgagaagcatccaccaattcatctctactcccattccagcttttcacacctttcttcccatgttcacctcagaaaataccccctttaactttctttattctcttggcc

SEQ ID NO: 80862 - DNA, 600 bp, Chicken  19866894373688_2
ggaaggtttgggtgaatgtagcaggttcttggggtttttcctcctactcttgatttcattaagtcatgggaacataggtacgacttatttagtcagactgagtagagcagacctttgtcagccacagggcagctgttaatagttctgtagctgcaaagctttcttaaaatgggtcacttgggtctccaggggtctcttgctgtttgggaacaggtcctcagtctgccttctgtggctgctgaagtagaactgkctgtgcagctttcttccccttgttgttgttgtgtctgtgctgttctrctttacaaatgccagcccttctgccttcccttcatttgtttagtcttctcatcctctttcttgcctcggtatgcaatgagagtgctgaacgtggcatttagctagctcagcagcctcctgcygggttggcagagcacctttgctttgagaagcatccaccaattcatctctactcccattccagcttttcacacctttcttcccatgttcacctcagaaaataccccctttaactttctttattctcttggccaaacttattgtcctccctttcatatcatctcttttccagtggctctc

SEQ ID NO: 80863 - DNA, 600 bp, Chicken  19866894373688_3
cacagggcagctgttaatagttctgtagctgcaaagctttcttaaaatgggtcacttgggtctccaggggtctcttgctgtttgggaacaggtcctcagtctgccttctgtggctgctgaagtagaactgkctgtgcagctttcttccccttgttgttgttgtgtctgtgctgttctrctttacaaatgccagcccttctgccttcccttcatttgtttagtcttctcatcctctttcttgcctcggtatgcaatgagagtgctgaacgtggcatttagctagctcagcagcctcctgcygggttggcagagcacctttgctttgagaagcatccaccaattcatctctactcccattccagcttttcacacctttcttcccatgttcacctcagaaaataccccctttaactttctttattctcttggccaaacttattgtcctccctttcatatcatctcttttccagtggctctcctctctccctccaactgtggtcttaccaatgtcctccttgtgtgcagagtttggaatgcagctgagctactgcttcttgaaactctgaatacagagagatggccaagtcctcagcttcccta

SEQ ID NO: 80864 - DNA, 599 bp, Chicken  19866894373689_1
  misc_feature (1)..(5): n is any nucleotide
nnnnntcatatctgcacactcattgactaggaaatccacagaaaaagttttggatgaaaaaccaattcctcattctattaaatcctacctataattttgaaattctccatgaaactctgaggaatactcatatcatattctctcctagttgtctattttccagaatgaagaatttctcaaacataagccattccattacactgcttttcctcctttgggcttctcctacagtattcttttcagcatggatgagaatgtgcacacacaagaaagcagctcaaatcagtatcaaaaaatgayttaatcatctctcttttgttctgtattcctttccaaacattttgtttccatttttttttttttaagctggaaattttgcagaaatttgtattgctgccttaaaattctattgcaaagtattaatggtcaatttttatatgtgaaattatggttatgtttggcatgcacataggttcacatataatcctttgtccagtcatttttgatagctcatttactctgatatgaatttagaaatagtctccagtgattatggatttcaatgtcacagctgcctttttactcatattttgatgatg

SEQ ID NO: 80865 - DNA, 600 bp, Chicken  19866894373690_1
catgccactcacttggcatggatattttaaaataagtcaccttcttccataaaagatacaagtgatacaagacacaagtgaaggcactttagaaatatatgagaaatacaggctgcttggcaaactgatgttttcattcctaaagctaaaagactttgcatgatgaatttactaacatatttacatacttatactagacaggaagtaaagtcagaatgtttatcctgatgattaaagttgaatacaactgtgtgaaatatctttttcttacattattgtctgctgaggagtctttgagayatatcaccaggtagattcacggggccttgttgttcttacaacaattgatggggggcatcaaagtgactcagtccagctgtatcatttactattttctcaggttccagtactttctcccattttcgtatcaattcgtacgggaatatttccgaagtagttttgattatgtctgtctgaaatgtttttagttttctatcttctttaagtttcttgtgccagagatgaatgcaacatccaacgtgagggtagggcatacacttatagtaatttcctcgtgaaataaagagaagaaagcattca

SEQ ID NO: 80866 - DNA, 600 bp, Chicken  19866894373703_1
tcagtgactcgctgtcttcagcaactcagttagatagcaactcctgagcatgcaccttcttctatactgaaattcccaacaaaaataaaatcattaaaacataggatgtactcacaaatacagtcagtttagtaaatcgtttttccttacaagcaacctcaaaatacaagcacaaccttcaaaatacaagcttataatgtcaaataaaggtcacgattttattatttttaaactacctaagtaagagtcttaaaatgcatgaatggaaaagaacaagtaatcatattccagttttaagtrtgttgcaagtttgagatatggaaataccttaggaactaagaaatccatgtagtaaatgaccagccatcacattgcgtgcacagcagtagggagggagacctatgtaacttttaagataagtaaaatgctatctatggtagctacattcagaattgaaagccttgctgataatagactaccagcaattaatgcagttcacagcttcaccaggtggtaatccacatggcaaaccacatggtaatacacatggcaaccatgcccacggcatcatggttggaagtagatgacctttaaggtctt

SEQ ID NO: 80867 - DNA, 600 bp, Chicken  19866894373705_1
tatgggtcgagtatttgtgaaacacccagctgtagaaaaatcactttcttggagcagtcagacatggtgcttctttttcctttttctcttttcattttctcttccatttttctcttttcctttcctcttgaacaatagatagcatagcttcctaagtgcgaaagtagaaagagcgtttgtggtttctctcttcctgtgatattaaaatggaaggataaaactcagcaagattcaagatctgaaagtagaagtactggggtgtcttcctgttgctgccatagatttttcacatgagtagcrgttttcagaccatagaaatatgtcagagagtagaggcttctcaaaagaggtagctgggatgaaggtaggatttggtaaaagtctgttgcccaaaagaagcctggtctgtaagcctttctaagcaagtcctacctccccctccagtgtcttcgtccttgcactgtagtgccttaaaaagacacggttggagactgcgtcattgccgcataaataactgttgagtcagtagttaattggtgagcgctcttccttctcttcatgacttgatcaacagtgacattttcaatagggctgaggctt

SEQ ID NO: 80868 - DNA, 535 bp, Chicken  19866894373706_1
aaaaaatagcgggaaaagggagggaatcattctaaacttagagtatattttctacactcctgtaataaatatgatttaagttcttctttcagatgagtattctactacactgaaaaatggagatttctgccagcagtgaatatctagcataaatacccaaagactaaagttgccataggtgacagctgaaactttcctgcttatctgtgggaccagtatcatcatatccttaaccatgcttattctctcacactgacaagttgctgaatcaccacatagaaagagaaatggaggtggaartcatgcattrctcatctcccatctcattctccacccagaacgtaagtgatttgacaaactcagtttgacaggcatcctgtctggacaaagagctcatatattttctaacaggattcagctgctctcacaccataagctttgcaacaggaattacttcaaatattccccaggtagaaaagacaaaattgaactgaaagaagagaggaggattatttttgccaattttataataaat

SEQ ID NO: 80869 - DNA, 525 bp, Chicken  19866894373706_2
gggaaaagggagggaatcattctaaacttagagtatattttctacactcctgtaataaatatgatttaagttcttctttcagatgagtattctactacactgaaaaatggagatttctgccagcagtgaatatctagcataaatacccaaagactaaagttgccataggtgacagctgaaactttcctgcttatctgtgggaccagtatcatcatatccttaaccatgcttattctctcacactgacaagttgctgaatcaccacatagaaagagaaatggaggtggaartcatgcattrctcatctcccatctcattctccacccagaacgtaagtgatttgacaaactcagtttgacaggcatcctgtctggacaaagagctcatatattttctaacaggattcagctgctctcacaccataagctttgcaacaggaattacttcaaatattccccaggtagaaaagacaaaattgaactgaaagaagagaggaggattatttttgccaattttataataaat

SEQ ID NO: 80870 - DNA, 599 bp, Chicken  19866894373708_1
  misc_feature (1)..(82): n is any nucleotide
nnnnnnnnnnnnnnnnnnnnnnnnnnnnnnnnnnnnnnnnnnnnnnnnnnnnnnnnnnnnnnnnnnnnnnnnnnnnnnnnnnctgagtgagtttgccttgtagtcctccctagaagattccagagatctttgcctttgtaataggcagtttacatcatctaaagttgacatgattccaggatcaaggaagagggggaaagcaaacaagcaaacaaaccaagcaacctcctcaccaacaaatataccctagtataccattatgcctcctctgaaaggccacagagccttctgaaaaccctyggcttgataattaccaccctcattcactcccatgggcagaagcacaggaagaaacatagctgtctgccactagtaacagatttttgtgttgtgggccacagatactgtctcaggcaaggaaaggaattttgtaaactgcatctttgtgttggctccaagtttctccactccaacacaaccagaaagctttgtttactggaatctgtttcagtaccagactgcatggccagtgaagtgataagcaccaaaaacttcaggtcaaatcagtgccagaagcacaacaaacctcgytaggtcaa

SEQ ID NO: 80871 - DNA, 497 bp, Chicken  19866894373708_2
aaaaccctyggcttgataattaccaccctcattcactcccatgggcagaagcacaggaagaaacatagctgtctgccactagtaacagatttttgtgttgtgggccacagatactgtctcaggcaaggaaaggaattttgtaaactgcatctttgtgttggctccaagtttctccactccaacacaaccagaaagctttgtttactggaatctgtttcagtaccagactgcatggccagtgaagtgataagcaccaaaaacttcaggtcaaatcagtgccagaagcacaacaaacctcgytaggtcaaagaaacaagtcaaaatagagattcaaatgaagtctccaactaccaagtcccagaagacttaaatcacagaatcacaaaggctagaagggacctcaggagatcatctcatccaactccctgcacaggaacacccttagtttggttggtcagtatggcaaaccaccatgagccttttagtagaactctttt

SEQ ID NO: 80872 - DNA, 599 bp, Chicken  19866894373713_1
  misc_feature (1)..(19): n is any nucleotide
nnnnnnnnnnnnnnnnnnnctgcctactggctctaatcatctgagatgcatgaaaataacattttatcaactaatttttctccttttccatttggcaaacattgttttcttgtgtgtgtttcaagccaaactgaaaccaacacatctgtttcagtttaatatcttcagtttatttaacaaagtctgtgtagtatcttgatgtctttacagtggtgtttcctaaccagtaaaatcagtaaaaccagtaaaaccaaaacacctatggcactttagaattttactgattatatataataaagycttgattgtgtatttctgctaaaatacacctttaggtatgctagaccaactttcctgtttttgctagctcagaaacgtgtccttaattaactggatccagcagataggagcaaatctcagttcaaaaggggcattccttcatcttacaaatttccagtgatgtggtactctactcaaataacaaagactggatagcacttttagcatcctcttattccacaaatagctgcctctgaaaccaagaatccttcaagtgacatccatttgtgaacgtacctgaggacatgggagtagaagtt

SEQ ID NO: 80873 - DNA, 600 bp, Chicken  19866894373719_1
ataactgtacctagcttaggcaaactctatccctcgcctgcccgcacttgtctgtttgcctcggacatcatacagagacttaaaaagggaaccaccaagaagcactcacatctgtacaaccagacccagagtctagaatatgaaattgtaaataaaagatgcgcttttcacttacatacataatttcatacgttcgaagcagtgcagcattactgcaacatttgaagtcataaaacatcagcctctccccactctaaagcatgccaacgtccaaaccacgaactatcaaagatttgattytgacagtctagctgagtacaattaatgaaattgcaggtgaagacgtatttcaacatatcacttctgcttgggtaaacaagtgttatgtctgaaccttctactaaatctagactatcttctcacttgaggcaatatggagtagtaaggataatttttactacagattcttgtcttttgataaagctatccaacacagaaaggactcttatttcactgtcagattgccgcaggtgaaacagagctagcacgagagctagaagtctctgcattacaagaaaggttattcacagggatcgagag

SEQ ID NO: 80874 - DNA, 600 bp, Chicken  19866894373719_2
atatggagtagtaaggataatttttactacagattcttgtcttttgataaagctatccaacacagaaaggactcttatttcactgtcagattgccgcaggtgaaacagagctagcacgagagctagaagtctctgcattacaagaaaggttattcacagggatcgagaggatagtgaagcatattagttccgccaaaccaaaaggataaagttccaaacttccaagatttttattattttttaagtctgatatgaacccctccccttctattgttcctcccagctgcagtattccatacrcacacatacacacagctccccctactccagccccccccaaaaaacaggcagaaacatggaaaaatatacggctgatatttgtgttcttatttacagaagacacaaatggatttgtaactgaaaaagacaactataataataaaactaccagcatgtaaaagagcgttcaacttacgttttagcccccaacctgaaggtagctaatattgaaggcattgaatataaccgacgtacaagatatttatcatacaacatattttaattacatcaataattgaaatgcatcactttgttcatact

SEQ ID NO: 80875 - DNA, 600 bp, Chicken  19866894373727_1
acagcaaagagacaggtctcagcactccaaataattggctgaaaacaatagaagccaaacatttctcacactgctcaaaggaattaaggggtgtaaatagcatccctgcttcccagctgtgacctctgctatcaggatggtgatgccagctcatggtgctggctctccatgttgttcccaggatctaacagtgagggtttggttaaatgcattgctcccataggagctggagctccatgtggtgagcagcaatgggagcacaatgagggcagtgtgatgatgggcagcgtcctctgggtyggtgcctgtttgcctcctctgcagctgagagatgttttctttttcccaaggagtaaagagtgttcatgctcagaatgaagtggggagaaaaaaaagcttttttttttttttgtgcagcattacacaaaagtcagggaagcctctcgtagctgcagcctggcatcaatccattccctctgctctttggtctgccaaaaccagcatctctactcccttcagcaataaaatattctcttgcatctctgtcttgccatccccttgcctttcaacaattagttccctccttcaccttctatgctt

SEQ ID NO: 80876 - DNA, 599 bp, Chicken  19866894373730_1
  misc_feature (1)..(33): n is any nucleotide
nnnnnnnnnnnnnnnnnnnnnnnnnnnnnnnnntgcaaaggaataccaggcagaggctctggaggtgaattccactcagcagctaaacagagcagtgtgcaaataatactgagcagatgcagagtcctgatgatcagacaaacatcccataggagatgaactacagtgcctatcctaacccagcactttcttctaaaacctccttaacctatttcatctaccacctcagttcatcctcaaatgctccatattttcttttgatttttcaaagttgcaatgcctccacagaaaagctagcarggtcacttcaaacttttctgagtgccatccagaatatccctatttctcagaagttcttgcaaaggacggaaggayggaaggaaggacggaaggaaggaaggaagaccttcattgtggtggaaagtgggcttcccatctgcagcagagtgccagttgactgaaacacaaattgccttataagagattatgaaggtcagaggcagaagagaaaaaggagcagrtgggtgagtgatgaggtttcttggctttcactcttttcattaattctaaggattaatgtagttaaggtgaaagcaatg

SEQ ID NO: 80877 - DNA, 600 bp, Chicken  19866894373730_2
tcagcagctaaacagagcagtgtgcaaataatactgagcagatgcagagtcctgatgatcagacaaacatcccataggagatgaactacagtgcctatcctaacccagcactttcttctaaaacctccttaacctatttcatctaccacctcagttcatcctcaaatgctccatattttcttttgatttttcaaagttgcaatgcctccacagaaaagctagcarggtcacttcaaacttttctgagtgccatccagaatatccctatttctcagaagttcttgcaaaggacggaaggayggaaggaaggacggaaggaaggaaggaagaccttcattgtggtggaaagtgggcttcccatctgcagcagagtgccagttgactgaaacacaaattgccttataagagattatgaaggtcagaggcagaagagaaaaaggagcagrtgggtgagtgatgaggtttcttggctttcactcttttcattaattctaaggattaatgtagttaaggtgaaagcaatgtctgaagtctgcactgctgagccagctctggcaaggtacttcaaggagacactctgcaactgtgtcttatttgagt

SEQ ID NO: 80878 - DNA, 522 bp, Chicken  19866894373730_3
cacctcagttcatcctcaaatgctccatattttcttttgatttttcaaagttgcaatgcctccacagaaaagctagcarggtcacttcaaacttttctgagtgccatccagaatatccctatttctcagaagttcttgcaaaggacggaaggayggaaggaaggacggaaggaaggaaggaagaccttcattgtggtggaaagtgggcttcccatctgcagcagagtgccagttgactgaaacacaaattgccttataagagattatgaaggtcagaggcagaagagaaaaaggagcagrtgggtgagtgatgaggtttcttggctttcactcttttcattaattctaaggattaatgtagttaaggtgaaagcaatgtctgaagtctgcactgctgagccagctctggcaaggtacttcaaggagacactctgcaactgtgtcttatttgagtgcataagacatgcatacctctgcaaacaacttaatcatctgcatacactgcagttgaacaagtggcat

SEQ ID NO: 80879 - DNA, 600 bp, Chicken  19866894373732_1
ttttccttttcattacatggagactcttaatagagtatcattaattctccttgtgaaaagtcagcctacactgcaaagatgtctttcaatgagggaagtaaattcactgcaaaagcacagggtggagacagtgctatattagcattcagttgactatgcaataccttttttcatgaagaaaatccatattcttgtttatcacatatttttttctgaaccatgacaattactgtaaatgagtatgaagatgataacagagaaatcaaatgttctaaaatggcagttctcaggcaatttaarctgctcttttaaagagaaaagaatgtcagaatyctcgctgtgattataaaatcattctagacaacttttctttgttcttattttagaattgtctttcaaaagctgatttatgtcttcttaatctggttgctggtgttaggaagtccagttcataggaataagttcttttggctttggaagctttggtgcagctattttcaaggctgattattgtggattagaatagtgttaagctggtatatgtgttttttgattttggcatggattaatttactgtgtacttaaactagacaagatmat

SEQ ID NO: 80880 - DNA, 600 bp, Chicken  19866894373732_2
agtatcattaattctccttgtgaaaagtcagcctacactgcaaagatgtctttcaatgagggaagtaaattcactgcaaaagcacagggtggagacagtgctatattagcattcagttgactatgcaataccttttttcatgaagaaaatccatattcttgtttatcacatatttttttctgaaccatgacaattactgtaaatgagtatgaagatgataacagagaaatcaaatgttctaaaatggcagttctcaggcaatttaarctgctcttttaaagagaaaagaatgtcagaatyctcgctgtgattataaaatcattctagacaacttttctttgttcttattttagaattgtctttcaaaagctgatttatgtcttcttaatctggttgctggtgttaggaagtccagttcataggaataagttcttttggctttggaagctttggtgcagctattttcaaggctgattattgtggattagaatagtgttaagctggtatatgtgttttttgattttggcatggattaatttactgtgtacttaaactagacaagatmatttcatagggagtggattgatcacttttatcttt

SEQ ID NO: 80881 - DNA, 600 bp, Chicken  19866894373732_3
arctgctcttttaaagagaaaagaatgtcagaatyctcgctgtgattataaaatcattctagacaacttttctttgttcttattttagaattgtctttcaaaagctgatttatgtcttcttaatctggttgctggtgttaggaagtccagttcataggaataagttcttttggctttggaagctttggtgcagctattttcaaggctgattattgtggattagaatagtgttaagctggtatatgtgttttttgattttggcatggattaatttactgtgtacttaaactagacaagatmatttcatagggagtggattgatcacttttatctttctgtggtattctaaagttttattttaaaaactgtcctccagcacttttcatacatattcctttcaatagaaaggaaaggaattcaaaccactcttttattctttggctttatggatgttatgtattagtagtagttctcagtagaactccttttcaactccaaaactttgttcttcctgtagaagttatacaaataatacaatttaattataagctgtgaaacagtgtgtattattttgagaggaaactgcacagcaatgtacaa

SEQ ID NO: 80882 - DNA, 600 bp, Chicken  19866894373735_1
tagcgctccgctattgtattcatgtgttgctaagcttcccctgagatgtcctgaagtaggaaagatgataatcaagtttcacaaccagcactctacatcttctttctttccttctagtccgtgcttcctacctcaaatgggatgcacaggggtgggtgcttgggaggggcagagagggcaggtgcagctgatgcagtacttttgcacgtgcttgggatcacattgcagggagaggctgtgtcacacatgcccgtgggcctttccccatcacatggcaccaggcacgtgcactactgcagygtccctrcacagctgcgtccgcccctcctatgcatccctaggctcttttggtgtgcatcagccacagggaggaccacagaccccagctgatcagttaagaggcctgcgagcttgcagaggtttctccacaaggctggcatgcagattctcctactgtgcgcccagtcccattttaaacaaccctagcactgctcactaagggcatatctacagtttagtagatagtgctgctaaagatcttccctccccctactgtttggtcagaattatcctggaagcgtggagtcttgcgctgagact

SEQ ID NO: 80883 - DNA, 600 bp, Chicken  19866894373735_2
ccgctattgtattcatgtgttgctaagcttcccctgagatgtcctgaagtaggaaagatgataatcaagtttcacaaccagcactctacatcttctttctttccttctagtccgtgcttcctacctcaaatgggatgcacaggggtgggtgcttgggaggggcagagagggcaggtgcagctgatgcagtacttttgcacgtgcttgggatcacattgcagggagaggctgtgtcacacatgcccgtgggcctttccccatcacatggcaccaggcacgtgcactactgcagygtccctrcacagctgcgtccgcccctcctatgcatccctaggctcttttggtgtgcatcagccacagggaggaccacagaccccagctgatcagttaagaggcctgcgagcttgcagaggtttctccacaaggctggcatgcagattctcctactgtgcgcccagtcccattttaaacaaccctagcactgctcactaagggcatatctacagtttagtagatagtgctgctaaagatcttccctccccctactgtttggtcagaattatcctggaagcgtggagtcttgcgctgagactgcctgca

SEQ ID NO: 80884 - DNA, 600 bp, Chicken  19866894373736_1
atagctctctgcagtctgagtatggatcttagcaggcacaactcttacagtgatggtgagagggtggcaggcagagaaaagctgagcagtggcatgtgcattaaccagggagttcatgttacacttgtgtagaatttagctgagctgtactataaactttgtagaattcctctatggaaatgtctcagaagaataagaatccagactatcattggaaccatggttctatttttgtacctccattttgatagtctgtagaaaaaattgtaaggaagtatgtgtgagaagaatgagcatcayagcttctgttatccttctgttttagttctctaatgcttttcaatacttgggaatgcaaataaaagatagaccctggttaaccaaaaatgcagtatttggtttgtgacttacttaaaatacaaagtggtttccttctaaatgtcagcatttcagtgcactgaaggaacaacatgagataatttaacgcataagttttggtcactttagaaaagaagtggggaagatttggagaagaaatatcactagttttgggtcagggataagagctgcttggatctggttgttcttttgtttgttggt

SEQ ID NO: 80885 - DNA, 600 bp, Chicken  19866894373739_1
ccgtggtcggtccgtgcaaaaccagcaaaaaattgtacccgagattttccttctagttcagcagtttgtggttacaaacactcagcttccctaccggcctgaggtcaagaaagagggaagcatcaatatttagcatctccaaagcaactatttgtacctaatagttgcacagttttggaagttcctcctggaactccctttggcttcaaactcattaccaataaatgcttgctgcagtttaagcagtatgaggagcatttggctgttgcgcagaacaccccacagagctgtgatgctgasgctgggttctgcaggggctcctcaagctctctggggggatctgaaagcctctgaggccatcccatggyccagctttccatgagaggggcctcaggcccccagctgtgcactcagccccacagccatgccacatcccatgcratagctctgcaccagcagcatccagcctctgcattcattaaagcccaagtcttgaaaataaggatttatcagcttgactaagaatccatttcctcccaaatgcaatatttagatccattctcccagcaattatttaatagctggtctttatcacatgga

SEQ ID NO: 80886 - DNA, 600 bp, Chicken  19866894373739_2
tggttacaaacactcagcttccctaccggcctgaggtcaagaaagagggaagcatcaatatttagcatctccaaagcaactatttgtacctaatagttgcacagttttggaagttcctcctggaactccctttggcttcaaactcattaccaataaatgcttgctgcagtttaagcagtatgaggagcatttggctgttgcgcagaacaccccacagagctgtgatgctgasgctgggttctgcaggggctcctcaagctctctggggggatctgaaagcctctgaggccatcccatggyccagctttccatgagaggggcctcaggcccccagctgtgcactcagccccacagccatgccacatcccatgcratagctctgcaccagcagcatccagcctctgcattcattaaagcccaagtcttgaaaataaggatttatcagcttgactaagaatccatttcctcccaaatgcaatatttagatccattctcccagcaattatttaatagctggtctttatcacatggagcttctcagcttacactcctccagccctccagctccgttctgcaccraaactaccgttttcaggccga

SEQ ID NO: 80887 - DNA, 600 bp, Chicken  19866894373739_3
aagcaactatttgtacctaatagttgcacagttttggaagttcctcctggaactccctttggcttcaaactcattaccaataaatgcttgctgcagtttaagcagtatgaggagcatttggctgttgcgcagaacaccccacagagctgtgatgctgasgctgggttctgcaggggctcctcaagctctctggggggatctgaaagcctctgaggccatcccatggyccagctttccatgagaggggcctcaggcccccagctgtgcactcagccccacagccatgccacatcccatgcratagctctgcaccagcagcatccagcctctgcattcattaaagcccaagtcttgaaaataaggatttatcagcttgactaagaatccatttcctcccaaatgcaatatttagatccattctcccagcaattatttaatagctggtctttatcacatggagcttctcagcttacactcctccagccctccagctccgttctgcaccraaactaccgttttcaggccgagaataactgtgtgcataaggttgtgttcttttttccctttaaatcctacaatgtgactaatccagccaagagg

SEQ ID NO: 80888 - DNA, 600 bp, Chicken  19866894373739_4
cctctgaggccatcccatggyccagctttccatgagaggggcctcaggcccccagctgtgcactcagccccacagccatgccacatcccatgcratagctctgcaccagcagcatccagcctctgcattcattaaagcccaagtcttgaaaataaggatttatcagcttgactaagaatccatttcctcccaaatgcaatatttagatccattctcccagcaattatttaatagctggtctttatcacatggagcttctcagcttacactcctccagccctccagctccgttctgcaccraaactaccgttttcaggccgagaataactgtgtgcataaggttgtgttcttttttccctttaaatcctacaatgtgactaatccagccaagagggatgcatctcggaggatgtgtcagctgcggaaacaaaaaacagatgtgatttgaggagggtgcaggggagcctcgggatgctctcagcttgttgaacatccagtcacagtccgcctcccacccccagctgtggggggaggagggggtcagrttgggggatatcattccagccctggcagctggaagggtgagayagctgagggttt

SEQ ID NO: 80889 - DNA, 600 bp, Chicken  19866894373739_5
cacatggagcttctcagcttacactcctccagccctccagctccgttctgcaccraaactaccgttttcaggccgagaataactgtgtgcataaggttgtgttcttttttccctttaaatcctacaatgtgactaatccagccaagagggatgcatctcggaggatgtgtcagctgcggaaacaaaaaacagatgtgatttgaggagggtgcaggggagcctcgggatgctctcagcttgttgaacatccagtcacagtccgcctcccacccccagctgtggggggaggagggggtcagrttgggggatatcattccagccctggcagctggaagggtgagayagctgagggtttgccaagatgggcatatcaagtgcacratctgctccctgttccactctcttckcactttccataggatttagggctgcagggcaggggttctccttttgcctgtggtccagtgttgcgaagggaagaggtttggggccatttttgtttcctggaagatggtgttgctatgatgaaggagtgctgctggctgaggaacccaggctctgggccaacctctgacctatggggtcaggactgggggtggc

SEQ ID NO: 80890 - DNA, 600 bp, Chicken  19866894373739_6
cgttctgcaccraaactaccgttttcaggccgagaataactgtgtgcataaggttgtgttcttttttccctttaaatcctacaatgtgactaatccagccaagagggatgcatctcggaggatgtgtcagctgcggaaacaaaaaacagatgtgatttgaggagggtgcaggggagcctcgggatgctctcagcttgttgaacatccagtcacagtccgcctcccacccccagctgtggggggaggagggggtcagrttgggggatatcattccagccctggcagctggaagggtgagayagctgagggtttgccaagatgggcatatcaagtgcacratctgctccctgttccactctcttckcactttccataggatttagggctgcagggcaggggttctccttttgcctgtggtccagtgttgcgaagggaagaggtttggggccatttttgtttcctggaagatggtgttgctatgatgaaggagtgctgctggctgaggaacccaggctctgggccaacctctgacctatggggtcaggactgggggtggcaaaagggaaaagccatgtgcaagcagtgcacaagcaggagagc

SEQ ID NO: 80891 - DNA, 600 bp, Chicken  19866894373739_7
actgtgtgcataaggttgtgttcttttttccctttaaatcctacaatgtgactaatccagccaagagggatgcatctcggaggatgtgtcagctgcggaaacaaaaaacagatgtgatttgaggagggtgcaggggagcctcgggatgctctcagcttgttgaacatccagtcacagtccgcctcccacccccagctgtggggggaggagggggtcagrttgggggatatcattccagccctggcagctggaagggtgagayagctgagggtttgccaagatgggcatatcaagtgcacratctgctccctgttccactctcttckcactttccataggatttagggctgcagggcaggggttctccttttgcctgtggtccagtgttgcgaagggaagaggtttggggccatttttgtttcctggaagatggtgttgctatgatgaaggagtgctgctggctgaggaacccaggctctgggccaacctctgacctatggggtcaggactgggggtggcaaaagggaaaagccatgtgcaagcagtgcacaagcaggagagcacagaaagaaggcatgtcccctccgtgcactccctctg

SEQ ID NO: 80892 - DNA, 600 bp, Chicken  19866894373739_8
tttccctttaaatcctacaatgtgactaatccagccaagagggatgcatctcggaggatgtgtcagctgcggaaacaaaaaacagatgtgatttgaggagggtgcaggggagcctcgggatgctctcagcttgttgaacatccagtcacagtccgcctcccacccccagctgtggggggaggagggggtcagrttgggggatatcattccagccctggcagctggaagggtgagayagctgagggtttgccaagatgggcatatcaagtgcacratctgctccctgttccactctcttckcactttccataggatttagggctgcagggcaggggttctccttttgcctgtggtccagtgttgcgaagggaagaggtttggggccatttttgtttcctggaagatggtgttgctatgatgaaggagtgctgctggctgaggaacccaggctctgggccaacctctgacctatggggtcaggactgggggtggcaaaagggaaaagccatgtgcaagcagtgcacaagcaggagagcacagaaagaaggcatgtcccctccgtgcactccctctggcatgcagtgggtttcatttacttgg

SEQ ID NO: 80893 - DNA, 599 bp, Chicken  19866894373740_1
  misc_feature (1)..(29): n is any nucleotide
nnnnnnnnnnnnnnnnnnnnnnnnnnnnntgtgagtacctgtattcaattatgacgttttttaatttccttttcaggaaaagtgcaaaatgtttcaaattcctgttcaaaatcttgataatatcaggaaggctcgcaaaagggtgaaaggcattcttgtggaacttgggcttgacagctgcagggaattgttgaaggtaaagtatttcaagtaatgtgaaatggtcttgaagaaaacctttaaaaatactttgtttattgtatacatgatgttcttctggcctagatctttttgatgagrtaaagaggagaaaattgcatcttcagttgaaggattatttaagtctgagtgcctatatgctagaagtagaacttagttttttagtacatgatgttgaaagaagcttcatttctcagcaaaatatgttacagatggtgctgtgtgttctctgctagtaataatttcaccaaaaagaaactgyatgactttasgaaaaatgctactgactaatgaaatgctgtctgtctattacgtagtaacatttttgtctttttcaaatcacagaggaagactcgatatatgggagcttaattgctttg

SEQ ID NO: 80894 - DNA, 600 bp, Chicken  19866894373740_2
agggaattgttgaaggtaaagtatttcaagtaatgtgaaatggtcttgaagaaaacctttaaaaatactttgtttattgtatacatgatgttcttctggcctagatctttttgatgagrtaaagaggagaaaattgcatcttcagttgaaggattatttaagtctgagtgcctatatgctagaagtagaacttagttttttagtacatgatgttgaaagaagcttcatttctcagcaaaatatgttacagatggtgctgtgtgttctctgctagtaataatttcaccaaaaagaaactgyatgactttasgaaaaatgctactgactaatgaaatgctgtctgtctattacgtagtaacatttttgtctttttcaaatcacagaggaagactcgatatatgggagcttaattgctttgaataggttcaagaggaaatgtctgaaggatatacaaataaatgtaacttctaaaaatcagcaagccatatatccaaatcttttacaggcttttaaaacttgtctccaggaaaaaataccaaacttgacttactgagtcatgggttcagttctgtatctttaaaagcatatgcaagtatgctg

SEQ ID NO: 80895 - DNA, 600 bp, Chicken  19866894373740_3
tgaaggtaaagtatttcaagtaatgtgaaatggtcttgaagaaaacctttaaaaatactttgtttattgtatacatgatgttcttctggcctagatctttttgatgagrtaaagaggagaaaattgcatcttcagttgaaggattatttaagtctgagtgcctatatgctagaagtagaacttagttttttagtacatgatgttgaaagaagcttcatttctcagcaaaatatgttacagatggtgctgtgtgttctctgctagtaataatttcaccaaaaagaaactgyatgactttasgaaaaatgctactgactaatgaaatgctgtctgtctattacgtagtaacatttttgtctttttcaaatcacagaggaagactcgatatatgggagcttaattgctttgaataggttcaagaggaaatgtctgaaggatatacaaataaatgtaacttctaaaaatcagcaagccatatatccaaatcttttacaggcttttaaaacttgtctccaggaaaaaataccaaacttgacttactgagtcatgggttcagttctgtatctttaaaagcatatgcaagtatgctgaggcaaagtg

SEQ ID NO: 80896 - DNA, 600 bp, Chicken  19866894373753_1
gcagcattttggaggatataaaggtataaaaggacagagcatcactttgggagctcaaggtccttttatctctgcccaacctgaagtctgaatgcctaaggacggatgtctgctgctccatgggaaggctcacatggactgcactgggacagcagtaggagctttgcctcaggtgatgtcattagcatgacacattttcatctggggctagaagtttgctcttacaaagtcatttcaaaggcaaagaggagtaaactgactgattaaaagtgtattatttgtactgggtcattttgcttygcactgcagctggcacagtttccacctgcaacttagagygacatgagaaagtcaacagcaaataattcaatagctacctttggttgcaacttcctgatatcaatttgtgccacagccttaaagttaagtaaatctacttcattacagaaygtacttcagacataaagacataaattcagcataagtcattgtgctgtgctgcactgtgaatatccacttaagcsggaattcaaatcaacactgtttagctaatagactgtcacaattttgagagagttgcttcatatagaggggaaatta

SEQ ID NO: 80897 - DNA, 600 bp, Chicken  19866894373753_2
catcactttgggagctcaaggtccttttatctctgcccaacctgaagtctgaatgcctaaggacggatgtctgctgctccatgggaaggctcacatggactgcactgggacagcagtaggagctttgcctcaggtgatgtcattagcatgacacattttcatctggggctagaagtttgctcttacaaagtcatttcaaaggcaaagaggagtaaactgactgattaaaagtgtattatttgtactgggtcattttgcttygcactgcagctggcacagtttccacctgcaacttagagygacatgagaaagtcaacagcaaataattcaatagctacctttggttgcaacttcctgatatcaatttgtgccacagccttaaagttaagtaaatctacttcattacagaaygtacttcagacataaagacataaattcagcataagtcattgtgctgtgctgcactgtgaatatccacttaagcsggaattcaaatcaacactgtttagctaatagactgtcacaattttgagagagttgcttcatatagaggggaaattaattagacaattcatgaaaggtgttttaacagtaggcaag

SEQ ID NO: 80898 - DNA, 600 bp, Chicken  19866894373753_3
agcagtaggagctttgcctcaggtgatgtcattagcatgacacattttcatctggggctagaagtttgctcttacaaagtcatttcaaaggcaaagaggagtaaactgactgattaaaagtgtattatttgtactgggtcattttgcttygcactgcagctggcacagtttccacctgcaacttagagygacatgagaaagtcaacagcaaataattcaatagctacctttggttgcaacttcctgatatcaatttgtgccacagccttaaagttaagtaaatctacttcattacagaaygtacttcagacataaagacataaattcagcataagtcattgtgctgtgctgcactgtgaatatccacttaagcsggaattcaaatcaacactgtttagctaatagactgtcacaattttgagagagttgcttcatatagaggggaaattaattagacaattcatgaaaggtgttttaacagtaggcaagctaaggatcttgataaaatgtaattaccccgtatttgcagcatactcttcagtgtaaaataccttgtcagacttgatcacaaagctatgaagctctgaaaaatgtgatcgg

SEQ ID NO: 80899 - DNA, 600 bp, Chicken  19866894373753_4
caaagtcatttcaaaggcaaagaggagtaaactgactgattaaaagtgtattatttgtactgggtcattttgcttygcactgcagctggcacagtttccacctgcaacttagagygacatgagaaagtcaacagcaaataattcaatagctacctttggttgcaacttcctgatatcaatttgtgccacagccttaaagttaagtaaatctacttcattacagaaygtacttcagacataaagacataaattcagcataagtcattgtgctgtgctgcactgtgaatatccacttaagcsggaattcaaatcaacactgtttagctaatagactgtcacaattttgagagagttgcttcatatagaggggaaattaattagacaattcatgaaaggtgttttaacagtaggcaagctaaggatcttgataaaatgtaattaccccgtatttgcagcatactcttcagtgtaaaataccttgtcagacttgatcacaaagctatgaagctctgaaaaatgtgatcggaaacacaacacagagacaatacttgtacagatgctttttmagttcagtaatgtatgactgacttgagtattatt

SEQ ID NO: 80900 - DNA, 600 bp, Chicken  19866894373753_5
gtgctgtgctgcactgtgaatatccacttaagcsggaattcaaatcaacactgtttagctaatagactgtcacaattttgagagagttgcttcatatagaggggaaattaattagacaattcatgaaaggtgttttaacagtaggcaagctaaggatcttgataaaatgtaattaccccgtatttgcagcatactcttcagtgtaaaataccttgtcagacttgatcacaaagctatgaagctctgaaaaatgtgatcggaaacacaacacagagacaatacttgtacagatgctttttmagttcagtaatgtatgactgacttgagtattattactcatcctaggggaaggaaagtcttcatgaactgaaccatgccatcaggatcwtttttttttcttttttttccctgtttagaaatatgatttaagttggaaaacgctttagatgaaaacacagttatggctgtacgtatgtatcactttcttctgttagcagtaagacctgcctgagtgtcagagaacctgattagacagtatcagcggagtgcgggtttgagtgtggtgctgcaacaagaactgaatcctgttattgttttctc

SEQ ID NO: 80901 - DNA, 600 bp, Chicken  19866894373753_6
gcttcatatagaggggaaattaattagacaattcatgaaaggtgttttaacagtaggcaagctaaggatcttgataaaatgtaattaccccgtatttgcagcatactcttcagtgtaaaataccttgtcagacttgatcacaaagctatgaagctctgaaaaatgtgatcggaaacacaacacagagacaatacttgtacagatgctttttmagttcagtaatgtatgactgacttgagtattattactcatcctaggggaaggaaagtcttcatgaactgaaccatgccatcaggatcwtttttttttcttttttttccctgtttagaaatatgatttaagttggaaaacgctttagatgaaaacacagttatggctgtacgtatgtatcactttcttctgttagcagtaagacctgcctgagtgtcagagaacctgattagacagtatcagcggagtgcgggtttgagtgtggtgctgcaacaagaactgaatcctgttattgttttctctgtgacatacaaaaaatccctctcatgcagcrtgttgaaaagtgccttgtagttaactggctatggtaaatagtacagatcagcagca

SEQ ID NO: 80902 - DNA, 600 bp, Chicken  19866894373753_7
ttactcatcctaggggaaggaaagtcttcatgaactgaaccatgccatcaggatcwtttttttttcttttttttccctgtttagaaatatgatttaagttggaaaacgctttagatgaaaacacagttatggctgtacgtatgtatcactttcttctgttagcagtaagacctgcctgagtgtcagagaacctgattagacagtatcagcggagtgcgggtttgagtgtggtgctgcaacaagaactgaatcctgttattgttttctctgtgacatacaaaaaatccctctcatgcagcrtgttgaaaagtgccttgtagttaactggctatggtaaatagtacagatcagcagcagtttacttctgctgaactggacctgaacactgagaaacgtttatgtcgtaaggccatgtcctttgtgcatactggcgatgtagttataaaccttggttctgacctatgctcctaagtgatcctggaaatttgactctgagttgtcacatttagacagtgtttgaatattgcaagcaagtgcagctgtttcaccaggatagtgtgccaggtttgttctgggtatttggaattgctgctttttttg

SEQ ID NO: 80903 - DNA, 600 bp, Chicken  19866894373755_1
aaacagcaacttatacctggggcaaagaaaatagatgggtactgtctatggtagctgacttggcaaaaccgtatcgtttttgttgtacttaactttctcctttggaacacttcttcatcctttccggctcctttcattcagcactggagttttgctcacccgttacatcttatttagcaatggagttcctgttgccaaaatggtactgagaatgttgatcagtaaacctttttcaagtcctgatacacatcagaaagaccagatttctacagtattccgagtggactcaaaaagtgtgargcctaagacttacagtaaacctgtttgagttgcctacttgtttatcttggtgatagagagaaaaacygtactgacagaaagctggattcggatgcatcagttacctcttcttaacttctgagcaatgatgtggggagcttgctttgcctgttaatataagacatgcctgagattgcaccgcatcagctgaagaccatactcagaagatggaaacaaaacattgcataaactttccactgttccaagctaagctacaatgtcaatgaccaacctccaaaatatacaggaagttcttttttc

SEQ ID NO: 80904 - DNA, 600 bp, Chicken  19866894373755_2
accgtatcgtttttgttgtacttaactttctcctttggaacacttcttcatcctttccggctcctttcattcagcactggagttttgctcacccgttacatcttatttagcaatggagttcctgttgccaaaatggtactgagaatgttgatcagtaaacctttttcaagtcctgatacacatcagaaagaccagatttctacagtattccgagtggactcaaaaagtgtgargcctaagacttacagtaaacctgtttgagttgcctacttgtttatcttggtgatagagagaaaaacygtactgacagaaagctggattcggatgcatcagttacctcttcttaacttctgagcaatgatgtggggagcttgctttgcctgttaatataagacatgcctgagattgcaccgcatcagctgaagaccatactcagaagatggaaacaaaacattgcataaactttccactgttccaagctaagctacaatgtcaatgaccaacctccaaaatatacaggaagttcttttttctttacttttctttttttctggggatgatctcagcaaaaattcagggttacttacaatggaaaaataa

SEQ ID NO: 80905 - DNA, 600 bp, Chicken  19866894373755_3
aatatacaggaagttcttttttctttacttttctttttttctggggatgatctcagcaaaaattcagggttacttacaatggaaaaataatgctgtctctaaaacagcacaagctttgactccataaggactactaacactatgctgtccttctacatctctcaaacacagtattagccacatctggcactgcttacagaaatgggggatttagctgaggttcagatagcttctgtctagttccaagcaagattaagctacaaagggtttcacaagaaagtcattagcaaaaatgacttygtgtctcactgttgactacactgctcattcggtttgttgacayctgccaaaaatgctcttgccattactactggagtggttggaagaacattagttctctcatctgaaaactgatcacttcttgtccagcctttcagctaccaggaaataaagcagcagatcattagtggatctgaccaagtggatagccttgcaaatggcagagccatctgggagaataccaaatggcagaactcaaagacaacttgaattaagtgtcagctgttcctcaagagaaattctgaggtatgaggctttaaa

SEQ ID NO: 80906 - DNA, 600 bp, Chicken  19866894373755_4
gggatgatctcagcaaaaattcagggttacttacaatggaaaaataatgctgtctctaaaacagcacaagctttgactccataaggactactaacactatgctgtccttctacatctctcaaacacagtattagccacatctggcactgcttacagaaatgggggatttagctgaggttcagatagcttctgtctagttccaagcaagattaagctacaaagggtttcacaagaaagtcattagcaaaaatgacttygtgtctcactgttgactacactgctcattcggtttgttgacayctgccaaaaatgctcttgccattactactggagtggttggaagaacattagttctctcatctgaaaactgatcacttcttgtccagcctttcagctaccaggaaataaagcagcagatcattagtggatctgaccaagtggatagccttgcaaatggcagagccatctgggagaataccaaatggcagaactcaaagacaacttgaattaagtgtcagctgttcctcaagagaaattctgaggtatgaggctttaaagaaatgtcttcagattcagatgaaagaaataaagaaatctgat

SEQ ID NO: 80907 - DNA, 600 bp, Chicken  19866894373760_1
tacttaggtaaatggtttagtgggtgtcgttgtgataggctgatgattggactagatgatctcagaactattttccaaccttaacgaacctatgagcctatgattctatgatttgtgtcaatacgtctcagcctcaccatagcaaagggctggtaaaacagcactgagtttccctgttggcttcacaaagaggagatctggcaacgtatcatccacagaatagatctgttcaaatggaactaccctgacaaatagtatcctttctaaaatttaaattattctctcctccctgctcaatcstaccagttacagagccaaattcatagctgtgctttccctttgtttcttctgtttatttaatttgatttaatttaatcaaccatttgttttgaagctgcctgtatgaatttgcttaaatgtgctgagtgctactttggaaatagaaatctgttgttcttgttgtctgttttttattcctaatttgcacttcttctaatgaagtgtatgatccagagtttagaagatgctttcctgtttgttgtaaatataccatccagtcttctctgagcaacccgatgtagctatagatgtttctgttca

SEQ ID NO: 80908 - DNA, 600 bp, Chicken  19866894373761_1
cagaggaacatgaaaagtagcagaaatagtgggcatgaaatgatatattaattggcaacatgatccagaaaaaaaaaaaaaaatagatgaagactgcctgtgtagctgcattaagcctccagtaaattggtgatggtctctttatacagctctatgagagcagttaccgaaatactgcctttatttcaggagatctctttaatttgaacaaactaaacaaactgaaaaggagttcagaaaacaatcaaaaaaaacaccacaaaacaacaaaagcaactgtgaagaaagattgctccagcrtcgaaggtgtcaaagactgtgtgagatttaatggtgctgcccagcggtataggaggkctctcaagatcctgcctaacttactgaggccagatcccatctgatgtggggcatgactcctgcactgggttataaaagctaagggagagtggaggccaggatctgaggttttctaccctagtaagtcctcagcaattctctgaagactgggaagtactttgaagtttatgaaaggaaggcctgaggaccaagaaaagaaataaatacaataaagaaaaaaacccaagaatgttcagaagccat

SEQ ID NO: 80909 - DNA, 600 bp, Chicken  19866894373761_2
acatgatccagaaaaaaaaaaaaaaatagatgaagactgcctgtgtagctgcattaagcctccagtaaattggtgatggtctctttatacagctctatgagagcagttaccgaaatactgcctttatttcaggagatctctttaatttgaacaaactaaacaaactgaaaaggagttcagaaaacaatcaaaaaaaacaccacaaaacaacaaaagcaactgtgaagaaagattgctccagcrtcgaaggtgtcaaagactgtgtgagatttaatggtgctgcccagcggtataggaggkctctcaagatcctgcctaacttactgaggccagatcccatctgatgtggggcatgactcctgcactgggttataaaagctaagggagagtggaggccaggatctgaggttttctaccctagtaagtcctcagcaattctctgaagactgggaagtactttgaagtttatgaaaggaaggcctgaggaccaagaaaagaaataaatacaataaagaaaaaaacccaagaatgttcagaagccatatctcagacttaatatattatatacataagacaactcacagctggagatttccaaac

SEQ ID NO: 80910 - DNA, 600 bp, Chicken  19866894373770_1
gggaacatatagctagttagaagactttttttttttaattggaataaaaattattacatgcacaatgattaaaaaagcagaattttaaaacaggttgcacatttgtttagtggtctttgtttgactctttctctagtgctgcataatagattgtgatgatcttattcctctacagtgtaatctttgttatttctgggtcatcagactgctacattattgttcagattgatttgggtgtttctttctctcttccccaattttttaatgacctattctgtacctaccagcagctcttacaargcattcatatttctttcccaargtgacatattctgccccttcacaaattaattggctaaatatttatccacgctgttgtttaaagaaagggtctctgtgcatagaagatccagacaacaatagtaacagagagcagcaatgaatttttgaaggtattgcagtgatgtattgacttgttaacctgtatgctccgcctcagaattttgttcaggaagttatgcaaggtccatttgtctgtctcyctgcatgtatctgcgtttctattatgtatatgtgtacacatgtagagtttccattaat

SEQ ID NO: 80911 - DNA, 600 bp, Chicken  19866894373770_2
gactttttttttttaattggaataaaaattattacatgcacaatgattaaaaaagcagaattttaaaacaggttgcacatttgtttagtggtctttgtttgactctttctctagtgctgcataatagattgtgatgatcttattcctctacagtgtaatctttgttatttctgggtcatcagactgctacattattgttcagattgatttgggtgtttctttctctcttccccaattttttaatgacctattctgtacctaccagcagctcttacaargcattcatatttctttcccaargtgacatattctgccccttcacaaattaattggctaaatatttatccacgctgttgtttaaagaaagggtctctgtgcatagaagatccagacaacaatagtaacagagagcagcaatgaatttttgaaggtattgcagtgatgtattgacttgttaacctgtatgctccgcctcagaattttgttcaggaagttatgcaaggtccatttgtctgtctcyctgcatgtatctgcgtttctattatgtatatgtgtacacatgtagagtttccattaattggtgacattaaaggtccatta

SEQ ID NO: 80912 - DNA, 600 bp, Chicken  19866894373770_3
ttctctcttccccaattttttaatgacctattctgtacctaccagcagctcttacaargcattcatatttctttcccaargtgacatattctgccccttcacaaattaattggctaaatatttatccacgctgttgtttaaagaaagggtctctgtgcatagaagatccagacaacaatagtaacagagagcagcaatgaatttttgaaggtattgcagtgatgtattgacttgttaacctgtatgctccgcctcagaattttgttcaggaagttatgcaaggtccatttgtctgtctcyctgcatgtatctgcgtttctattatgtatatgtgtacacatgtagagtttccattaattggtgacattaaaggtccattaacccccattctgctgcctcataagttcaggaagtattgctttcaaaactgttattaacctgatgaagtcagaaaaatcacatccttctaaaatcaaagactttccatgtcagtaatattcattagtagtattattcatcaatcgaaacttattctcaggctatattcatgcactttctgcaggtctgtaattactagttgacatacctattctacacaga

SEQ ID NO: 80913 - DNA, 600 bp, Chicken  19866894373773_1
gatctgcaatcagtggaggtacagaatttgttaatgaatcaatataattgcattgttatattttctgaaactggatgtgatttaaatacttttaaaaaccttaaagatattttctgacagtctaaaggttgggggggggaaaaaaggtaccaggtggtgtttggttgtaactgaccaacatgaagttttttccattgcctgctttcaaaaacttccccgtttttctaaactggtagaacaaggaagccagaggaaaagaggcagataaatgtggttgaattggttgaaaagatatttttsaagatcacggtgtaaatatgtttgaaaagaagtctttaaatctatcagcagaattacttcctttgatttgcttcccctacctcccataatgcatgcataataatattttgggctatttcaaattgcatggttaagaacttaagtagatggcttacttgcaatggggaaggactaaataccagctagctggtggtgttttggttcattttatttttgaccaaaccatgttctaaactattaaagcatttctaggagtggaacagtaaagtcatgattatctgtaagttgttttttaaggtg

SEQ ID NO: 80914 - DNA, 600 bp, Chicken  19866894373773_2
tttctaggagtggaacagtaaagtcatgattatctgtaagttgttttttaaggtgaaatacttttttgctattttttaatcttgtaggcaaaacttacatttttcagcagggttctcaattctgaaatcatgaagcagtaagtcagagacaaaggtgtcatatcttttttttaatgtaatttcagacgtatccttagtacagttgaaaagagcagacagaagtataaaccggcttccctcactgttgagtttgtccctttcttttatcgtaagtattatcaacagcatgtttgaaaatgrtcatctttggaggagtgaagttggcaattctaaattccattccccaaagaatgtgtgataaatgtaaaagcaacttactgctttctgaggctgcatgtattgagttgatttgcttgctttctgctctgagtgtcaccatcttgccaaccttacttgtctgtgaaagcctggctgttttttctcctttcagatttttttttcagtgtttactgtaacttaagattgaatctgtgaattttcagcttcttcatttatgttgatacatatggattgcacataagatccttgtaacaactgtag

SEQ ID NO: 80915 - DNA, 599 bp, Chicken  19866894373786_1
  misc_feature (1)..(211): n is any nucleotide
nnnnnnnnnnnnnnnnnnnnnnnnnnnnnnnnnnnnnnnnnnnnnnnnnnnnnnnnnnnnnnnnnnnnnnnnnnnnnnnnnnnnnnnnnnnnnnnnnnnnnnnnnnnnnnnnnnnnnnnnnnnnnnnnnnnnnnnnnnnnnnnnnnnnnnnnnnnnnnnnnnnnnnnnnnnnnnnnnnnnnnnnnnnnnnnnnnnnnnnnnnnnnnnnnnntcaatactgaaacactattccaaacatggaaagttaccactcctgctggcttgcagggaaagctgctgactccgagttgcttcataccratgtaaaactacagtgaaggatgcacagatatactgggatttgacattaggatttcttttagacaagaagtgttatacctcaktgtgatttaggaaaataaaggtcatttgtgaacgctcgggctatttgtcaggagagtaaaagaacaggttttagtttaggccttccaaaagcagttaattcatggtgctcagaggactgcctccagcagttcaatccaagcacacacatgctccctcaataaatggctgttttggataaacatgctacttaagggaaaaatatttcatctacattt

SEQ ID NO: 80916 - DNA, 599 bp, Chicken  19866894373786_2
  misc_feature (1)..(128): n is any nucleotide
nnnnnnnnnnnnnnnnnnnnnnnnnnnnnnnnnnnnnnnnnnnnnnnnnnnnnnnnnnnnnnnnnnnnnnnnnnnnnnnnnnnnnnnnnnnnnnnnnnnnnnnnnnnnnnnnnnnnnnnnnnnnnnnntcaatactgaaacactattccaaacatggaaagttaccactcctgctggcttgcagggaaagctgctgactccgagttgcttcataccratgtaaaactacagtgaaggatgcacagatatactgggatttgacattaggatttcttttagacaagaagtgttatacctcaktgtgatttaggaaaataaaggtcatttgtgaacgctcgggctatttgtcaggagagtaaaagaacaggttttagtttaggccttccaaaagcagttaattcatggtgctcagaggactgcctccagcagttcaatccaagcacacacatgctccctcaataaatggctgttttggataaacatgctacttaagggaaaaatatttcatctacatttagtccataccaaggaagccttctgaacacagagaggtaaaattttcttagatttctcctaacacttccccggatcacattgta

SEQ ID NO: 80917 - DNA, 600 bp, Chicken  19866894373790_1
tatggggtgagacaaggacaggaagatcactcaccaattaccgccacaggcaaaccagtctttatgttgggagattaatgtaatgtagtgccaaccagtaacagactagaacagtgagaactaaaagcaaactaaaaacacattatcacagaatcacattctccccatccaccctctctcttagtcatgtttcaacatcctggtggtattctccctctactgctgacatttaaaaagactaatcctaaatagtggttttgccttaaaagttctcagcttttgtgtttctgtctctcagtkctaaaacttaatggaaaatttgtttgttaggtaatttacattaatcactaatatattattgcatttatgttttcattaaacaggaacaaactactctgcaacaacagagtagtaaaaggataatgttgttgccaagagaattttgcttttggtatcgaatacaaaataggttatcctataggacacttaataaccacatctaagtatccaaaaagatggaaactacccacagatcaaagtaataaattaaacaattatttctgatctttttagttattgtaagggtaggttgaaatggtt

SEQ ID NO: 80918 - DNA, 600 bp, Chicken  19866894373791_1
caaagttggagaattatgtggcttgctttgaatcaccatcacaggttacccttcgggtacaaagagcacggaaacactgagttcaacacgtgaacaagcttgcctacatctacaagctagatgaactgaactagtggaatatcctacttatacttgcaagttaaaactttgttactttgtactgattttatacagagttacaacagtttgtcttaccgctttagttttaaccaggaaagctcctggaccctatgcaaaaggatatcctctgtctgctcaattctgcaattaaatggcaaygttctgtaacatcgtaaaagacagtttcaagagataattcaaagacygtcctggtgatattaaccaggaagactgaagtcaaaaaatgttttgttgccattgtatgtgttctttctttgttcctttgtttaattgttaattcacattagacttactgctctggcagtcaaacttcacctgttatcaactttgtgaaccagttcagtgaaagcccttgtgggggactctggcatgtaaatagaatctgtactcctaatgtaacagtaaattggcataatggtcacactctatactgttttt

SEQ ID NO: 80919 - DNA, 600 bp, Chicken  19866894373791_2
acccttcgggtacaaagagcacggaaacactgagttcaacacgtgaacaagcttgcctacatctacaagctagatgaactgaactagtggaatatcctacttatacttgcaagttaaaactttgttactttgtactgattttatacagagttacaacagtttgtcttaccgctttagttttaaccaggaaagctcctggaccctatgcaaaaggatatcctctgtctgctcaattctgcaattaaatggcaaygttctgtaacatcgtaaaagacagtttcaagagataattcaaagacygtcctggtgatattaaccaggaagactgaagtcaaaaaatgttttgttgccattgtatgtgttctttctttgttcctttgtttaattgttaattcacattagacttactgctctggcagtcaaacttcacctgttatcaactttgtgaaccagttcagtgaaagcccttgtgggggactctggcatgtaaatagaatctgtactcctaatgtaacagtaaattggcataatggtcacactctatactgttttttcaccccacattagaagtttgttttctcttggacaccattttgcctc

SEQ ID NO: 80920 - DNA, 600 bp, Chicken  19866894373791_3
ttaattgttaattcacattagacttactgctctggcagtcaaacttcacctgttatcaactttgtgaaccagttcagtgaaagcccttgtgggggactctggcatgtaaatagaatctgtactcctaatgtaacagtaaattggcataatggtcacactctatactgttttttcaccccacattagaagtttgttttctcttggacaccattttgcctctctgtgaagcatgctcatgacaggcactatgtgggactcacaataagctctgtaacagagacattttgaagtagagagatmttaatcactttcccagtacaaatggccatacctcagtttccagctttgccagtatagcagactccaaaaacaaataaaaaaaaaagctaactgttataaataggccatgttgaaaaaagagaatgattactttccagcctccatatatatgacccagtacacagcagaagttgctaaatatggagaagagttgcaatcagaaagacttatcatccagttatgagccaaacactgttatcctacatcttcatcaatgacatgaatgaagaaatagagtacaacctcaacaagtttgctaga

SEQ ID NO: 80921 - DNA, 600 bp, Chicken  19866894373791_4
gtgaaagcccttgtgggggactctggcatgtaaatagaatctgtactcctaatgtaacagtaaattggcataatggtcacactctatactgttttttcaccccacattagaagtttgttttctcttggacaccattttgcctctctgtgaagcatgctcatgacaggcactatgtgggactcacaataagctctgtaacagagacattttgaagtagagagatmttaatcactttcccagtacaaatggccatacctcagtttccagctttgccagtatagcagactccaaaaacaaatmaaaaaaaaagctaactgttataaataggccatgttgaaaaaagagaatgattactttccagcctccatatatatgacccagtacacagcagaagttgctaaatatggagaagagttgcaatcagaaagacttatcatccagttatgagccaaacactgttatcctacatcttcatcaatgacatgaatgaagaaatagagtacaacctcaacaagtttgctagatgatacaaagttaggaggagtgggtgatgcaccagaaagttgtgctgccattcagtgagactgagacaggctggag

SEQ ID NO: 80922 - DNA, 600 bp, Chicken  19866894373811_1
tgatgtgacaaacgacggtcatcatttctgagctttatctggtgtctgggtcattaaacactgaaaagtgggttttcaggtatttttaaggcgactcctagagagatatttaggaaggctgtaggcagccttccagctgcatggcctggctgctggcaagaaataggctgccatgatcctgtgcatgtagctgggaagattgagtgtgttgtgctcctctggttggccacagatctggcagacctcaagtggtctcttttttgcagaaagagtggtcagtttgaagctttaagagatgarcttggacaaagatcccctgtgrtggaagcccctgagatgatgaggagcagccaggtgcccgggccccatctcatyctgtcccattgctgctcttgctacatttattcatgygcaggccagcgctgccatggccacatctcttgtctgcgacagctgcacagcatctgggaaatgagaataaagctgggaagagttactgggttttgagtggccaggcgttgggcaaggattgacacgtttgcagggaagcagctgagagatgggagagggccagccagggctcggagcaatggttttggg

SEQ ID NO: 80923 - DNA, 600 bp, Chicken  19866894373811_2
catttctgagctttatctggtgtctgggtcattaaacactgaaaagtgggttttcaggtatttttaaggcgactcctagagagatatttaggaaggctgtaggcagccttccagctgcatggcctggctgctggcaagaaataggctgccatgatcctgtgcatgtagctgggaagattgagtgtgttgtgctcctctggttggccacagatctggcagacctcaagtggtctcttttttgcagaaagagtggtcagtttgaagctttaagagatgarcttggacaaagatcccctgtgrtggaagcccctgagatgatgaggagcagccaggtgcccgggccccatctcatyctgtcccattgctgctcttgctacatttattcatgygcaggccagcgctgccatggccacatctcttgtctgcgacagctgcacagcatctgggaaatgagaataaagctgggaagagttactgggttttgagtggccaggcgttgggcaaggattgacacgtttgcagggaagcagctgagagatgggagagggccagccagggctcggagcaatggttttgggtggtgagcgacagtctggagaa

SEQ ID NO: 80924 - DNA, 600 bp, Chicken  19866894373811_3
tcaggtatttttaaggcgactcctagagagatatttaggaaggctgtaggcagccttccagctgcatggcctggctgctggcaagaaataggctgccatgatcctgtgcatgtagctgggaagattgagtgtgttgtgctcctctggttggccacagatctggcagacctcaagtggtctcttttttgcagaaagagtggtcagtttgaagctttaagagatgarcttggacaaagatcccctgtgrtggaagcccctgagatgatgaggagcagccaggtgcccgggccccatctcatyctgtcccattgctgctcttgctacatttattcatgygcaggccagcgctgccatggccacatctcttgtctgcgacagctgcacagcatctgggaaatgagaataaagctgggaagagttactgggttttgagtggccaggcgttgggcaaggattgacacgtttgcagggaagcagctgagagatgggagagggccagccagggctcggagcaatggttttgggtggtgagcgacagtctggagaagagagtaaggagctgaatgagaaggggaatatgtgtggccttgaatcatgttt

SEQ ID NO: 80925 - DNA, 600 bp, Chicken  19866894373811_4
aggaaggctgtaggcagccttccagctgcatggcctggctgctggcaagaaataggctgccatgatcctgtgcatgtagctgggaagattgagtgtgttgtgctcctctggttggccacagatctggcagacctcaagtggtctcttttttgcagaaagagtggtcagtttgaagctttaagagatgarcttggacaaagatcccctgtgrtggaagcccctgagatgatgaggagcagccaggtgcccgggccccatctcatyctgtcccattgctgctcttgctacatttattcatgygcaggccagcgctgccatggccacatctcttgtctgcgacagctgcacagcatctgggaaatgagaataaagctgggaagagttactgggttttgagtggccaggcgttgggcaaggattgacacgtttgcagggaagcagctgagagatgggagagggccagccagggctcggagcaatggttttgggtggtgagcgacagtctggagaagagagtaaggagctgaatgagaaggggaatatgtgtggccttgaatcatgttttctgaagcactctgtcattatagcattcttgcagta

SEQ ID NO: 80926 - DNA, 600 bp, Chicken  19866894373822_1
ccacatcccctctctcccagtccatgactcactacttccccactgcctcctgagccaaagagttcacggtgacccttcagcatacacacaagttccaaagccagagaccaaacccagcacgtgggggtcctgctcagaaacaaaaccaccccacagcacccgcagcccagcctcctttgcacacagcacagaggaacacagcaaagcccatctcctgtagctactgctcctggtcactgctcagtgtgcaccagcccacctcatgcctgccacagtgggcagatgctgatcgacgcagcrctcagagcatttacaactccagagatgttcgtgtggccttctggaatgcttcctttctgcagcgcttctgctgggtcttgtcaagwgctctgttcccttctggatttaagcarcctggtgtgaaatggcgccatgcgtggattcacagcattttgcaaagaatrtctgtgccattacagtacgatcaaaatgccttactccaaggaggccagtacacttcagttctgcctacagaaaggtggcaggactgtctggttgcagaccctttggctggcacaaagacctttgacatttcatgag

SEQ ID NO: 80927 - DNA, 600 bp, Chicken  19866894373822_2
cacaagttccaaagccagagaccaaacccagcacgtgggggtcctgctcagaaacaaaaccaccccacagcacccgcagcccagcctcctttgcacacagcacagaggaacacagcaaagcccatctcctgtagctactgctcctggtcactgctcagtgtgcaccagcccacctcatgcctgccacagtgggcagatgctgatcgacgcagcrctcagagcatttacaactccagagatgttcgtgtggccttctggaatgcttcctttctgcagcgcttctgctgggtcttgtcaagwgctctgttcccttctggatttaagcarcctggtgtgaaatggcgccatgcgtggattcacagcattttgcaaagaatrtctgtgccattacagtacgatcaaaatgccttactccaaggaggccagtacacttcagttctgcctacagaaaggtggcaggactgtctggttgcagaccctttggctggcacaaagacctttgacatttcatgagcagagataagtacatcacagcgccaggatcttgtgagaggcagaaatcccactccttgatttgcatcccattacacacaggcagcc

SEQ ID NO: 80928 - DNA, 600 bp, Chicken  19866894373822_3
ccagcacgtgggggtcctgctcagaaacaaaaccaccccacagcacccgcagcccagcctcctttgcacacagcacagaggaacacagcaaagcccatctcctgtagctactgctcctggtcactgctcagtgtgcaccagcccacctcatgcctgccacagtgggcagatgctgatcgacgcagcrctcagagcatttacaactccagagatgttcgtgtggccttctggaatgcttcctttctgcagcgcttctgctgggtcttgtcaagwgctctgttcccttctggatttaagcarcctggtgtgaaatggcgccatgcgtggattcacagcattttgcaaagaatrtctgtgccattacagtacgatcaaaatgccttactccaaggaggccagtacacttcagttctgcctacagaaaggtggcaggactgtctggttgcagaccctttggctggcacaaagacctttgacatttcatgagcagagataagtacatcacagcgccaggatcttgtgagaggcagaaatcccactccttgatttgcatcccattacacacaggcagccagaagcctgtaacctccacgatctcct

SEQ ID NO: 80929 - DNA, 600 bp, Chicken  19866894373822_4
gcccagcctcctttgcacacagcacagaggaacacagcaaagcccatctcctgtagctactgctcctggtcactgctcagtgtgcaccagcccacctcatgcctgccacagtgggcagatgctgatcgacgcagcrctcagagcatttacaactccagagatgttcgtgtggccttctggaatgcttcctttctgcagcgcttctgctgggtcttgtcaagwgctctgttcccttctggatttaagcarcctggtgtgaaatggcgccatgcgtggattcacagcattttgcaaagaatrtctgtgccattacagtacgatcaaaatgccttactccaaggaggccagtacacttcagttctgcctacagaaaggtggcaggactgtctggttgcagaccctttggctggcacaaagacctttgacatttcatgagcagagataagtacatcacagcgccaggatcttgtgagaggcagaaatcccactccttgatttgcatcccattacacacaggcagccagaagcctgtaacctccacgatctcctcatttgtttattttgggtaactggaaccagtttatttctgtgccaaccatc

SEQ ID NO: 80930 - DNA, 600 bp, Chicken  19866894373824_1
cagccatcatgttagttgctttttaagtatttgcttactagaaaatgtaatatcttgaaatccttgtactcaaatttattcctgtgttttagttataggcaagagattgtggggaaattccaaaattaatcctttcttgtttttttttatttattttattttattttattttattttattttatttcaaacagtccttcatcactagtgctttccaagtatttgcatgtgaaaataacagaaagaaaagcacaagacagacctggatgtttctatctaaattagagaaaaaaattaaaaygagtcctgcctcayttaaaaacaaagtaagcatcataaaatatattagtttcagaattaacacccacattttaatgtgcattacaagacaaataaggttgtagcagaattaaatccaagattttattttggtaatgctatggaacctgatcacagcaatgctgtaactatgcaaacaaattgtgactaagttctaagcatgctaaatgaaggttcaatgtggtttacactgaaactttaaattcagtaagggctgggtgtgcccagtcatgattccaaaaagaaatttgcaggaaaatca

SEQ ID NO: 80931 - DNA, 600 bp, Chicken  19866894373824_2
gttgctttttaagtatttgcttactagaaaatgtaatatcttgaaatccttgtactcaaatttattcctgtgttttagttataggcaagagattgtggggaaattccaaaattaatcctttcttgtttttttttatttattttattttattttattttattttattttatttcaaacagtccttcatcactagtgctttccaagtatttgcatgtgaaaataacagaaagaaaagcacaagacagacctggatgtttctatctaaattagagaaaaaaattaaaaygagtcctgcctcayttaaaaacaaagtaagcatcataaaatatattagtttcagaattaacacccacattttaatgtgcattacaagacaaataaggttgtagcagaattaaatccaagattttattttggtaatgctatggaacctgatcacagcaatgctgtaactatgcaaacaaattgtgactaagttctaagcatgctaaatgaaggttcaatgtggtttacactgaaactttaaattcagtaagggctgggtgtgcccagtcatgattccaaaaagaaatttgcaggaaaatcaactggtttggaaat

SEQ ID NO: 80932 - DNA, 600 bp, Chicken  19866894373826_1
aaagtccctgggctcacagtgccaagggaagcataggtttagccaagcctgtgttagtcacaagggaggtatttctaaaactttcagtacttacagatgctttaagttaaaagctttaaagcattactactgttatcatgggtggtattattacacttatttaaagtgtacctagttcactagcagctgacactggttagaactgttaatgtaaatcccacttacggatttagccccactgcattgctcagagcactgttctttaatactacctggagccttgtgccatgttctcatgargcagttgtacatttttgctccctcacaattgcctttctgtcttcttgtgatccctcgacagtggaacactccagcatcattatctagggtcctatgtagcgtttattgtcccagttcagcagctgagccctgagactcagatacagccatccccttccagccatgcagacaccactgagtacttactaataagaaacttccatgactcaggattcagtttcagaagcctaaaaagcctcaggcctacacatttatgtcatgaaacttcaaatccagtatgtgcaagggaacaagggtttg

SEQ ID NO: 80933 - DNA, 600 bp, Chicken  19866894373833_1
aactgtttcctgtattgacatcaccttttgctgtgcttcacccaggcgctgtgcagataaggtgcaggggcagctggacaaaggtctgctctcctcctgcagctcctgacagcttaacactttgcacaccgcggtgagcattgcaggacctgcccatcaccacagccatgggtcgggggtggggggggcatccagcacagcaagggaccatctggtgcccctaaatgatggtggcactgcctggacccaaccaggagccccctccagtgtcatctgctcctgggatcccaaagcatcctrtgtccccttggtgggcttcagagagggggaagacagcagaggtggactcaggtccatagctctcagcacacagctgatgctcaggggatgttgcttcagcagtatctcagtaaggatctcccttcgtccctggagagcaggagtagctgcacgactcatagagaacagtttggtcactgggatgccttttacttccttccccttccctcactccctggcctctgcttgctgcagggaatgacgtgtcctctggttgcccacaggagcctgtcctctgcatgcagccatcctgtgcctcat

SEQ ID NO: 80934 - DNA, 600 bp, Chicken  19866894373833_2
ccatgggtgaagcaagcaggactgcagctgtgatcgcaggagctgctgagcagccaaagggagctgtcacggcatcagcccacagcattgcttcacactgcgctgcacagaggttgccccagctgctccgggagcagaagcccaggaaaatcccttttcatcagaaacaaagaaaagcagagctgccaccagcccgggcggggcctctgatgggcccgggccctcctgcacaaaagcagaagtgggcatcagctgtggcagtgcaaccacacagcccatctccggcagcgtggagacacrgggatcatctgaccggtgagcgtcacccattgccgggctgatgggcacatggggasgaggaggacagacggatctggggcaacagacaccrcagagtcctcctgcaagggcaaaggtgaagcagctcaacaaaaaggctgcaaacagggaccaggagaaggcaggagagagctgctctgggggagtgccatccaccaaaaggagagctgcctgcaggccagtggctcaggtgcctctcccacctccccacccctccctgtgcctgcctgccctgtgggggaaaggcagagtttctggcca

SEQ ID NO: 80935 - DNA, 600 bp, Chicken  19866894373833_3
aagggagctgtcacggcatcagcccacagcattgcttcacactgcgctgcacagaggttgccccagctgctccgggagcagaagcccaggaaaatcccttttcatcagaaacaaagaaaagcagagctgccaccagcccgggcggggcctctgatgggcccgggccctcctgcacaaaagcagaagtgggcatcagctgtggcagtgcaaccacacagcccatctccggcagcgtggagacacrgggatcatctgaccggtgagcgtcacccattgccgggctgatgggcacatggggasgaggaggacagacggatctggggcaacagacaccrcagagtcctcctgcaagggcaaaggtgaagcagctcaacaaaaaggctgcaaacagggaccaggagaaggcaggagagagctgctctgggggagtgccatccaccaaaaggagagctgcctgcaggccagtggctcaggtgcctctcccacctccccacccctccctgtgcctgcctgccctgtgggggaaaggcagagtttctggccagacaggtcccgaaattacacctgggaaagaggaggagagtttgtcctgctgagcgc

SEQ ID NO: 80936 - DNA, 600 bp, Chicken  19866894373833_4
ttcacactgcgctgcacagaggttgccccagctgctccgggagcagaagcccaggaaaatcccttttcatcagaaacaaagaaaagcagagctgccaccagcccgggcggggcctctgatgggcccgggccctcctgcacaaaagcagaagtgggcatcagctgtggcagtgcaaccacacagcccatctccggcagcgtggagacacrgggatcatctgaccggtgagcgtcacccattgccgggctgatgggcacatggggasgaggaggacagacggatctggggcaacagacaccrcagagtcctcctgcaagggcaaaggtgaagcagctcaacaaaaaggctgcaaacagggaccaggagaaggcaggagagagctgctctgggggagtgccatccaccaaaaggagagctgcctgcaggccagtggctcaggtgcctctcccacctccccacccctccctgtgcctgcctgccctgtgggggaaaggcagagtttctggccagacaggtcccgaaattacacctgggaaagaggaggagagtttgtcctgctgagcgcagcgatctcttaaatcccataaggggcatctgcag

SEQ ID NO: 80937 - DNA, 600 bp, Chicken  19866894373834_1
tgttgaggaggagaggaaacttaatcagcttttattgttttatacaactttgcattgtgtgcagttgtttctttctattcttgatgagttggaaaggcctcagagtagatatatatatatagaacaaaggcaaactagcatagcaagtataagaaactataagggttggttaagaattactaaactaaagcttaaagcattgatgctagttttctatttgtcatttttaaatgctgattgttcaacaattgagtaaatgaagggaggaagaaagagttgcaaattgttacatgatggctygatttcaccattctctgttggattttgtaggaaaacttgaatccattagtagtattgaacctctttaaaagaatcccagcagaagatatccctctgcttctaatgaacccagaagcaggtaagccttcagatttgattctcacacgactccttgtgcctccactgtgtatcagaccctctgtcgtgagtgacttgaagtctggcaccaatgaagatgacttgacaatgaaactgacagagatcattttcctcaatgatgtaataaaaaaggtgagtcatccttcaagctctctgtgactg

SEQ ID NO: 80938 - DNA, 600 bp, Chicken  19866894373834_2
gaacctctttaaaagaatcccagcagaagatatccctctgcttctaatgaacccagaagcaggtaagccttcagatttgattctcacacgactccttgtgcctccactgtgtatcagaccctctgtcgtgagtgacttgaagtctggcaccaatgaagatgacttgacaatgaaactgacagagatcattttcctcaatgatgtaataaaaaaggtgagtcatccttcaagctctctgtgactgttaccttgaaaatgtttagcactggctatagcaagtggttttatatgtattgctgytcccagtctagcagagagtctgtactgcactgtggtgtttggagttctattgaaagaaattaagttgtttcaagtagagctagctttctggctgcttgtgatataggatgtactaaaaatgtactggagacctgggcaagacttttcattttagttctagtctgtgaattcttctgtgtttggttgtgggggtgtgtgggaactgttgagtcatggcctgaaccactgatttgatcacatggggaaaggaccaggtcagctgtgtgagcacaggtgaaggcagttcagatgtgtgactgg

SEQ ID NO: 80939 - DNA, 600 bp, Chicken  19866894373835_1
gcttttctaatagaggcttggttggcctggctgctttggtccttgtgcaattccttggcatggagctcttgcagcttgagcctccctgggcttgctcctgcagagaaatgttttcacactccttggatccagcctcagtttttttatctgctctgtgcaccgaagataattgtgtgccactccctgaaatgtggaggtgaagtgattcaaagccaggtctcagcaggtgctggccacctcctgtttgctttctggtggcactgaggttccatgggggagtctgcagttcctgtaatcccwgccccaagcaggaaagctgccctagagctgcagtgtgggagggatcggtgtcccctttcccacaaaaagggattttgttctatcagtcccatgggacttttctcctgtggaagcactgtggggagggtctggccagcccattcctgtggggtaccacagttgaggcaacgtgcccaggctatcccctatgttacacccaggaaggctggagatgccatgtccctgctggcccaagagctttcaagaaaaggygggtttatattcacagcagcttgtttgattagctctccttacatcacc

SEQ ID NO: 80940 - DNA, 527 bp, Chicken  19866894373835_2
tggtggcactgaggttccatgggggagtctgcagttcctgtaatcccwgccccaagcaggaaagctgccctagagctgcagtgtgggagggatcggtgtcccctttcccacaaaaagggattttgttctatcagtcccatgggacttttctcctgtggaagcactgtggggagggtctggccagcccattcctgtggggtaccacagttgaggcaacgtgcccaggctatcccctatgttacacccaggaaggctggagatgccatgtccctgctggcccaagagctttcaagaaaaggygggtttatattcacagcagcttgtttgattagctctccttacatcaccytctgagggatgatgcaggggtgatgtgacagcatggattgcatcactgcaatgggcttgggctgggtgctggtagtggcaccagcaggtgggatggctgcagtgatggtttctgagcagtggctccctgttgggtttggggcactattttgtcctgcctcacttttttccccccaagt

SEQ ID NO: 80941 - DNA, 478 bp, Chicken  19866894373835_3
ccccaagcaggaaagctgccctagagctgcagtgtgggagggatcggtgtcccctttcccacaaaaagggattttgttctatcagtcccatgggacttttctcctgtggaagcactgtggggagggtctggccagcccattcctgtggggtaccacagttgaggcaacgtgcccaggctatcccctatgttacacccaggaaggctggagatgccatgtccctgctggcccaagagctttcaagaaaaggygggtttatattcacagcagcttgtttgattagctctccttacatcaccytctgagggatgatgcaggggtgatgtgacagcatggattgcatcactgcaatgggcttgggctgggtgctggtagtggcaccagcaggtgggatggctgcagtgatggtttctgagcagtggctccctgttgggtttggggcactattttgtcctgcctcacttttttccccccaagt

SEQ ID NO: 80942 - DNA, 599 bp, Chicken  19866894373836_1
tgactttattatccagatacacgtaaggccaatggataggcctgaatgtcgctgctgagtttaaaataccaatataccccatgaagactctgcaggcacatcccataacaagcttgggattgcttctcctgccttgcaagaagctccctgtggcacaaccatacctcctgaactcctgggtggtgaagaaatctgcttcaaaggtggaaaatgatttgtgaatcctaatggcaacgtggggggtgacatgagagtttattctttgctcccagtgctgggtagactttgctggagccatgyggggacaacaaccctcattcctcacatgttctgtttttttttttcctttcactcctcccaaaaattagtgaaatcctcttttttttctttttcctttccccctatccaaagcaatacaatacagagctgaaaggcaccttgagaaaggtcttccaatctggcttgcaaaggttttcttggaattaagaaataagcataagaacaaccaaattaaaaagaggacaatttagaagagtgtcctagatgctttctgcccaccaatgctgaggaacactgccaaagcaaattctgtctatcca

SEQ ID NO: 80943 - DNA, 600 bp, Chicken  19866894373840_1
taaactgtgatggggtcagtgcagtcactgctgtattccaaaagagtttgtagtcacaacttgcctgcatttaaaggcagactgacaggatgaaacctagtcaatggcatagatgaggagaaacacagattagcagaatttatgacttttaattcgagcaatagaatcacagaatcacaaaatggtttgagttgaaagggaacttaaagatcacccacctggttccaactcctgtgccaggggcagggctgccacccagcagctcagactgcccagggtcccatccaatctggccctcarcactccagggatggggcacccacagcttctctgggcagctgtgccagggcctcaccaccctcataatgaagaatatcttcctaatgtctaatccaaacctatcttctactagcttaaagccattaactcttgtcctgtcactgtactccctagtgaagagtccctacctatctttcctgtaggccccctttaaatactggaagagcacccatttgtcatgtgttacaaaacatgaatttatgtgttgctaatctacctagcatggctcccattsgaccacgcttatcaactttgcaagca

SEQ ID NO: 80944 - DNA, 428 bp, Chicken  19866894373840_2
agggtcccatccaatctggccctcarcactccagggatggggcacccacagcttctctgggcagctgtgccagggcctcaccaccctcataatgaagaatatcttcctaatgtctaatccaaacctatcttctactagcttaaagccattaactcttgtcctgtcactgtactccctagtgaagagtccctacctatctttcctgtaggccccctttaaatactggaagagcacccatttgtcatgtgttacaaaacatgaatttatgtgttgctaatctacctagcatggctcccattsgaccacgcttatcaactttgcaagcacatgtatcactttgaagtataccttataaaaatcttgcttctgcaaaaaaaaataccaaaaaaaacccaagctatgtatttacatatctctttgcaaacatg

SEQ ID NO: 80945 - DNA, 600 bp, Chicken  19866894373843_1
aactacaactaccaaaaatctctgatgactaatgcttcctggctgtacttcatgctggcttgaaaagaacaagactacattttgtctaagcctgcactaatgttatataaaaggttatggaaaaggctgtgtaggtctgtccgcaaacatccatcatttgcatatgcttgtggtgtttttactagcggctttgggaagagctaatctaacgcttaattaaatcatttagctttatttgatgcatactttttttttctagctgatggtatttttttgtgcagggatttgctgcagtcccaraagaagaatgaataatgtttcctcctttgaccacagagtgatctgatcgtgcatgctgtcggtagatattgcttctgactagcttccagggaggaaaaacatccaatgtccactctgtcatgctagtgggtgagcatgtggtggtcagctgggattcctgggttctttccttactccatcgctgagtcaaactgtgacagtggtcaggttacgtagccatttattaaaacgaagatgataatatgtaaacctccaaattagtatgaaggtcatttccgtgacctccatagctttaaggag

SEQ ID NO: 80946 - DNA, 600 bp, Chicken  19866894373849_1
tccaacccattgataacaatattaaatagtaaaaggccaagaactagatccttgcagacctcagacatcagtaagaaagcagtgtttaatcaatatgaactgttccactgattttctatcatctggtttcttaatcaaaatgtcttgtactaaaccaaacaatttacagaaatggaaatggtaaattgcactatcagtgttatcaatgaaacttgtaaaaagccaggctgcctagtatttttctcaatcaacgtcacattaatttgataagtacatatttatactaagaatgccaaaccrgctagatgctgagcattcaggagttcacatacaaaattcagcacgacaaccatgctcaatcatcattagaactttcaggcaaamagaagacatagacatcaatcatccgacagtccttctgaagtatatcactttcccctattagtctcaagtcatgttgtgactaacacatagagagttattaacctcaacttaaagaagaggaagataataaaattactacagataattcaactaatttttgtgtgtatttactaattcaaagaaatataccttaaaggagatatacgtggtaatttc

SEQ ID NO: 80947 - DNA, 600 bp, Chicken  19866894373849_2
tttaatcaatatgaactgttccactgattttctatcatctggtttcttaatcaaaatgtcttgtactaaaccaaacaatttacagaaatggaaatggtaaattgcactatcagtgttatcaatgaaacttgtaaaaagccaggctgcctagtatttttctcaatcaacgtcacattaatttgataagtacatatttatactaagaatgccaaaccrgctagatgctgagcattcaggagttcacatacaaaattcagcacgacaaccatgctcaatcatcattagaactttcaggcaaamagaagacatagacatcaatcatccgacagtccttctgaagtatatcactttcccctattagtctcaagtcatgttgtgactaacacatagagagttattaacctcaacttaaagaagaggaagataataaaattactacagataattcaactaatttttgtgtgtatttactaattcaaagaaatataccttaaaggagatatacgtggtaatttcttccaaaaatgatacttcttgcaccttaggaaaatgccatcaccctcaagattatatactgtttaaattttggatagtgatgac

SEQ ID NO: 80948 - DNA, 599 bp, Chicken  19866894373855_1
  misc_feature (1)..(72): n is any nucleotide
nnnnnnnnnnnnnnnnnnnnnnnnnnnnnnnnnnnnnnnnnnnnnnnnnnnnnnnnnnnnnnnnnnnnnnnncataaatttttcatattgaaagctgtcgtgtggcactttatcatcttatctttagataaggttaccagactggtgcattttcatgcaaaggtgtattaaaagggcattcttttcccttcaagtatttcctttcaactgttgactggaatagtaaaaaagttgaagtggaaacttaactgacatttccccatttcaacaaatttcatttaagtcatcttgaaactgcasttttttcatcttttagctcgtgaggttgaatcagccaagatttctccagatccaagactgggtccaaaaaatctggagaaatacacagtagccaagtcttatttttttaaactgagacaggggaggtttaggttagatattaggarsaagtttttcacacagtgggtggtgacgccctggaacaggttgcccaaggaggctgtggatgccccatccctggaggcattcaaggccaggctggatgtggttctgggcagactggtctagtggttggcaaccctgcacatagcaggggagtt

SEQ ID NO: 80949 - DNA, 600 bp, Chicken  19866894373855_2
gcattttcatgcaaaggtgtattaaaagggcattcttttcccttcaagtatttcctttcaactgttgactggaatagtaaaaaagttgaagtggaaacttaactgacatttccccatttcaacaaatttcatttaagtcatcttgaaactgcasttttttcatcttttagctcgtgaggttgaatcagccaagatttctccagatccaagactgggtccaaaaaatctggagaaatacacagtagccaagtcttatttttttaaactgagacaggggaggtttaggttagatattaggarsaagtttttcacacagtgggtggtgacgccctggaacaggttgcccaaggaggctgtggatgccccatccctggaggcattcaaggccaggctggatgtggttctgggcagactggtctagtggttggcaaccctgcacatagcaggggagttgaaactcgatgatcattgtggtccttttyaacccaggccattctatgattctattcaacatagtatttaataagaaatgtgtggcttatgtgtgacctagggcataaatcgatgctctcctcaaagtgcgcgtatctaacgcaaggt

SEQ ID NO: 80950 - DNA, 600 bp, Chicken  19866894373855_3
cattttcatgcaaaggtgtattaaaagggcattcttttcccttcaagtatttcctttcaactgttgactggaatagtaaaaaagttgaagtggaaacttaactgacatttccccatttcaacaaatttcatttaagtcatcttgaaactgcasttttttcatcttttagctcgtgaggttgaatcagccaagatttctccagatccaagactgggtccaaaaaatctggagaaatacacagtagccaagtcttatttttttaaactgagacaggggaggtttaggttagatattaggarsaagtttttcacacagtgggtggtgacgccctggaacaggttgcccaaggaggctgtggatgccccatccctggaggcattcaaggccaggctggatgtggttctgggcagactggtctagtggttggcaaccctgcacatagcaggggagttgaaactcgatgatcattgtggtccttttyaacccaggccattctatgattctattcaacatagtatttaataagaaatgtgtggcttatgtgtgacctagggcataaatcgatgctctcctcaaagtgcgcgtatctaacgcaaggtg

SEQ ID NO: 80951 - DNA, 600 bp, Chicken  19866894373855_4
aatcagccaagatttctccagatccaagactgggtccaaaaaatctggagaaatacacagtagccaagtcttatttttttaaactgagacaggggaggtttaggttagatattaggarsaagtttttcacacagtgggtggtgacgccctggaacaggttgcccaaggaggctgtggatgccccatccctggaggcattcaaggccaggctggatgtggttctgggcagactggtctagtggttggcaaccctgcacatagcaggggagttgaaactcgatgatcattgtggtccttttyaacccaggccattctatgattctattcaacatagtatttaataagaaatgtgtggcttatgtgtgacctagggcataaatcgatgctctcctcaaagtgcgcgtatctaacgcaaggtggtatgctgtgatagaaaaaaaatgatgcagcacaaactcttctccttccagtagtcacaaacctgtatagtatacattaatttgacaaaaaataaacatcccataacagatgattacatatagaggagttcctcattgatcaacctcaccctggacagcagaacctttaaaacacgcagct

SEQ ID NO: 80952 - DNA, 600 bp, Chicken  19866894373856_1
accctccagcataacagctctcctttggagaagaaaacaatcactgcccaatcgtttgtgctttgttttttcttcatttagttttatttatgtctttgctttaattttttggaagtggaggggaaggcagaaagggacaggggagggagtcttttctatctgtaagtctacacggagctttgggatgctatagaatgaatggtgctacatataaaagcttgatattatgaaaacactaacattaaatcctaaagaaataccttaagatttataagacttctaaactactactcatggggyacaaccagagacctttagatgacttgcccactactactgctaccaaatattctacaagacaagactgctactgattgcatataaaacagcaagatctaaaagctttatagcagccagctctcttatcacaatcctccatggactaaacacctgtttatactggcaacaaatgaaaaaagcacatctctcctgtttagtaggtccatgcattactactgtgcataagaaacccgcatacaattttcctcaagattctcaaatttagctgagaagggaatagcttttccatccttgaaaaaa

SEQ ID NO: 80953 - DNA, 584 bp, Chicken  19866894373856_2
tctaaaagctttatagcagccagctctcttatcacaatcctccatggactaaacacctgtttatactggcaacaaatgaaaaaagcacatctctcctgtttagtaggtccatgcattactactgtgcataagaaacccgcatacaattttcctcaagattctcaaatttagctgagaagggaatagcttttccatccttgaaaaaactgtgcaatttcaaatagggacagtatcagcactatgctggtacaacatacctaagcaaacagataaatcaacagcattgacaccaacagttaraggattccactttgaatgtaggacacaagcttcaaattcctatactaaacaatttggaagaagtttctcacatgttgtatgcttccccatgcacactgagtctcttggtcactcctgttaagccagacaggaaaaacaagtgagtagtaaaggttttcatcggttgcaaaggaagctgagaaacaagtcttaagattgaaatcaggtagaataagaatttgttcagatcagaaaacttacaagtgagttctcccatctttaattacactgattttttttttttt

SEQ ID NO: 80954 - DNA, 600 bp, Chicken  19866894373859_1
actaacaacggtacaggaagcctgagcaggggctgaagttacaacgggagagagctgctgatggaatcacagcactttgcccttctccagggatggtggcagccactgctggccattgtcagcttcagtttagagaggtttcagagcgagcaccaccaaccgtaatgtactaaactgcctggagaagtcctcgggctgaggacagctgggtagtaaagtcttaatgtcacaggatggattgtttctcatagtttgtttgaattatgtcacacataattacaataaaaataatttagcagrctgggagtggggggttagggcacagcactttgcggctgcaggcaacgcctgcagagaacgtagatgtggccatacgctatgtttgcttcgtacctgcgtgtgtgacagtcgtagcggacgacagagaggacagatcaaatttaccaatagaatattttatttgaatcttcaaaggactgtggggaaaaaaaagaataaaaatcagaaacaactgaaaagcgtgatttttacactttagctccatcccctgaaccgaagtaattaggaggaacgatagtggcgcaccatctggaccagctc

SEQ ID NO: 80955 - DNA, 600 bp, Chicken  19866894373863_1
cgttgggtgatccacactcacacagcaatctgtgccctggggccatcacagctgcccacagcccctacctcaaggtgtgccacgtccagattcctccagctccaataattcttaccatatacagatgtccatatacatttttaattaaaacgctccttcacatacacaatcatatactgaatgatcaagaacagtaataatagatatatatttggagcagaagtagcaaaacaagctgctctgccagtgccacccacagactggacatgaactaaggggagtttgacagtttcggagcasgcagggaatgctcttggcctgaaaatggggcagccatgcagcacagtgctatggaaggtacagtcaatgcaacacacgtgagaaacacaggtttgtcaaaaggtccttttgcaaagaaagactcttgagacctaaggcccgtcctcagcatcagcagagaccttaacttcattaacgtttgacctcaccgaagcggaaaaagagaacgatgctggaaagacaagttatatgcaaacaccaactgatggattttggccacagagctccatttctctccgcacaccagggaggatgctgaat

SEQ ID NO: 80956 - DNA, 599 bp, Chicken  19866894373866_1
  misc_feature (1)..(113): n is any nucleotide
nnnnnnnnnnnnnnnnnnnnnnnnnnnnnnnnnnnnnnnnnnnnnnnnnnnnnnnnnnnnnnnnnnnnnnnnnnnnnnnnnnnnnnnnnnnnnnnnnnnnnnnnnnnnnnnnnctcaccacctgcagctccatcacattcattaatttctaattaatacgtataatttgcaagcagttgttctatcctctttttgcatgcggatcataaagtcccagctaccttagtgctatgcacagagcacaagggcatactgaaaagagatcctgccaacgagccaaatcccttttgataaatacastaactggagccaatagatatggaaggtactcgtttcatagaaatggtccatagggaacagcatgtgtttgtacttgagatagtttttgtattgcctgccatactatcaggagtgttttgagttaggtggacattttaaagttcttctggtgaatgtaggttacagaacaatattggaacaataagcaaatgtaatagagtatttccaagcctgaaaccttcttggatatccttattcatgcaaagcaaataatagattcctttttgacaatttctcatgctctggataaacatgtactg

SEQ ID NO: 80957 - DNA, 599 bp, Chicken  19866894373869_1
  misc_feature (1)..(51): n is any nucleotide
nnnnnnnnnnnnnnnnnnnnnnnnnnnnnnnnnnnnnnnnnnnnnnnnnnncccctcagtacaacatctaaatggttcttgaacaccctccaaggttggtgactccaccacttccctgggcagcccgttccaatgcctgaccactctttctgagaagttgttattcctaatgtctaacccaaatctgtcctggtgcaacttgaggccatccccttcagtcctatcattagtcacacaggagaagaggctgacccccattttgctgcagcctcccttcaggtagttgcagagagcaatgtkgtctccccaggggctcmtccagactgaacaatcccagttccctcagccactcctcataagaggaaacaaatccattgcagcagattttctaaatgttcyttcccattgctgtgcctccagaagtcatcaacacatttcttaccgacttactatttttcatagaggttggggggtaaacggacagtgacagtctcaatgtactggtcaaaggcaaatgagtttttgtgtgcttacacaagtcttatttatcatagcgaaatatttgtttagggcatgaatcaggtgttcacttctaccag

SEQ ID NO: 80958 - DNA, 599 bp, Chicken  19866894373869_2
  misc_feature (1)..(34): n is any nucleotide
nnnnnnnnnnnnnnnnnnnnnnnnnnnnnnnnnncccctcagtacaacatctaaatggttcttgaacaccctccaaggttggtgactccaccacttccctgggcagcccgttccaatgcctgaccactctttctgagaagttgttattcctaatgtctaacccaaatctgtcctggtgcaacttgaggccatccccttcagtcctatcattagtcacacaggagaagaggctgacccccattttgctgcagcctcccttcaggtagttgcagagagcaatgtkgtctccccaggggctcmtccagactgaacaatcccagttccctcagccactcctcataagaggaaacaaatccattgcagcagattttctaaatgttcyttcccattgctgtgcctccagaagtcatcaacacatttcttaccgacttactatttttcatagaggttggggggtaaacggacagtgacagtctcaatgtactggtcaaaggcaaatgagtttttgtgtgcttacacaagtcttatttatcatagcgaaatatttgtttagggcatgaatcaggtgttcacttctaccaggaaatgtattttgaaaa

SEQ ID NO: 80959 - DNA, 600 bp, Chicken  19866894373869_3
tgactccaccacttccctgggcagcccgttccaatgcctgaccactctttctgagaagttgttattcctaatgtctaacccaaatctgtcctggtgcaacttgaggccatccccttcagtcctatcattagtcacacaggagaagaggctgacccccattttgctgcagcctcccttcaggtagttgcagagagcaatgtkgtctccccaggggctcmtccagactgaacaatcccagttccctcagccactcctcataagaggaaacaaatccattgcagcagattttctaaatgttcyttcccattgctgtgcctccagaagtcatcaacacatttcttaccgacttactatttttcatagaggttggggggtaaacggacagtgacagtctcaatgtactggtcaaaggcaaatgagtttttgtgtgcttacacaagtcttatttatcatagcgaaatatttgtttagggcatgaatcaggtgttcacttctaccaggaaatgtattttgaaaacataaaccagagttttgaaatctgattttctgtgaatctgagttttagctgaagctggggaaagagcacagaagccttttatg

SEQ ID NO: 80960 - DNA, 599 bp, Chicken  19866894373871_1
  misc_feature (1)..(188): n is any nucleotide
nnnnnnnnnnnnnnnnnnnnnnnnnnnnnnnnnnnnnnnnnnnnnnnnnnnnnnnnnnnnnnnnnnnnnnnnnnnnnnnnnnnnnnnnnnnnnnnnnnnnnnnnnnnnnnnnnnnnnnnnnnnnnnnnnnnnnnnnnnnnnnnnnnnnnnnnnnnnnnnnnnnnnnnnnnnnnnnnnnnnnnnnnnnnatcttttctgccgggagggaggcgatcccttccgatcctctggaactgatgtgagaacacgtctgctctgagtcacccaaggaaggacggtctcatcctgcagtcccacgcrtgactttaagggaccttgtcatgaaggactcagaacttcaccttcctgtagccctgctggaaagaaggtgcagtcctttcattttatcacacgcagaactcacactcctgtcacacacacatgggtggtgtgggagtgggtcatggctgccccataccaggatgtggggtcctgccctcctctttaggcgttgttttgggtcctcagctgcagtttgggtcctgtgctaagtacagcttgggactgaggtggtgaactgggcattgtgttggtttgtctgtggcttgtactctgtgaaa

SEQ ID NO: 80961 - DNA, 599 bp, Chicken  19866894373881_1
  misc_feature (1)..(86): n is any nucleotide
nnnnnnnnnnnnnnnnnnnnnnnnnnnnnnnnnnnnnnnnnnnnnnnnnnnnnnnnnnnnnnnnnnnnnnnnnnnnnnnnnnnnnntctgtatgtagatttcagaacgtgtttcttactcatgggattcatatatcttattcaacccacacaagcaaacatgtattaactttttttccagagtgaaatgcaaattgcatttcatacataatacaaattccctgagtatacacaaatttattgcacaggacatttgtgtttcaatctcatcatgtgaaaacacagagagtggtttgcaagrgtgtgcttttgttcctttctaaccagctagttcactcctaggagatgctgatgaaatatatttttattgatcagcttcatgcttcatctaacacactagagtgtctggtgcctgtaattgaataatcaatttcttgcttccttaataaattaatttattaaatgcaaaatatgtacagctgatatttcaaggagctaatttgcaatctaagaccacgacgggattctttaagtagctgatctctgtgtttcaaaagcctagacaatatagtaatacagagagtagccaacgaagtaata

SEQ ID NO: 80962 - DNA, 449 bp, Chicken  19866894373881_2
tgaataatcaatttcttgcttccttaataaattaatttattaaatgcaaaatatgtacagctgatatttcaaggagctaatttgcaatctaagaccacgacgggattctttaagtagctgatctctgtgtttcaaaagcctagacaatatagtaatacagagagtagccaacgaagtaataaaatattttaaacataattgtatgaatttagataacatagttttagtatctgcctcagaaaacagcctgaaagaaacacagtcactgatagggaatgtaatttttttttcatctaattwtttttgtttcaacgtgtctgtttgaaatgtcttttctgcattctccgaagtgttagcagttttattcttaaccataaatagcagaataaaaggataatacattactcgctacataatgaaagtaaacacaactgttatcatcatcacct

SEQ ID NO: 80963 - DNA, 600 bp, Chicken  19866894373882_1
agagttcagatgatattatgaaattatctcagtgacaacgtctacataaaatactctaaaataaaagtggtcctggtcaagtcgtaatagttcaagattacctgtgaagaaacatctcccattctaacttcaatataattacttctagattttctgttttcaccagatatagaaacttttcaatgctgaaataccattattcaaatctgctggcaaaaatcagccaggcttcattatatatctatttgtaccacctgagattctgaccagaggtattttcctacctatgagtaggaaacraagcagtaggagagtttgaaagctagagaatcctaaaatcatacaaagaatacgttyatagaataggaaccacatggaatggacccacaaagatcactgagctcctcactgaccacccacatctacaccctaagcatctgagcattgtccaagtgctgcctgagctctggcagctctgggctgtgcccactgccctgagcagtctgttccacrcccaccatcctctggggcagatctatttcctaacacccacctgatcctcccggtgtccagaacaaaaggtgtgctaaatgttcctat

SEQ ID NO: 80964 - DNA, 600 bp, Chicken  19866894373882_2
aaaataaaagtggtcctggtcaagtcgtaatagttcaagattacctgtgaagaaacatctcccattctaacttcaatataattacttctagattttctgttttcaccagatatagaaacttttcaatgctgaaataccattattcaaatctgctggcaaaaatcagccaggcttcattatatatctatttgtaccacctgagattctgaccagaggtattttcctacctatgagtaggaaacraagcagtaggagagtttgaaagctagagaatcctaaaatcatacaaagaatacgttyatagaataggaaccacatggaatggacccacaaagatcactgagctcctcactgaccacccacatctacaccctaagcatctgagcattgtccaagtgctgcctgagctctggcagctctgggctgtgcccactgccctgagcagtctgttccacrcccaccatcctctggggcagatctatttcctaacacccacctgatcctcccggtgtccagaacaaaaggtgtgctaaatgttcctatggacagaacctcttgarttttgaacagctttataacatggggaagagtgaagcagga

SEQ ID NO: 80965 - DNA, 600 bp, Chicken  19866894373882_3
caaaaatcagccaggcttcattatatatctatttgtaccacctgagattctgaccagaggtattttcctacctatgagtaggaaacraagcagtaggagagtttgaaagctagagaatcctaaaatcatacaaagaatacgttyatagaataggaaccacatggaatggacccacaaagatcactgagctcctcactgaccacccacatctacaccctaagcatctgagcattgtccaagtgctgcctgagctctggcagctctgggctgtgcccactgccctgagcagtctgttccacrcccaccatcctctggggcagatctatttcctaacacccacctgatcctcccggtgtccagaacaaaaggtgtgctaaatgttcctatggacagaacctcttgarttttgaacagctttataacatggggaagagtgaagcaggactgctcacacttgyagcaatgcactttggttactgctagtttagctataaaagaaagaatagtgagtggaaatatgagcagatgtttgaaaagcttttaatgcaaaatatgataaaacaatgctttccataattggagcacagttgtaggttggga

SEQ ID NO: 80966 - DNA, 600 bp, Chicken  19866894373882_4
gaaagctagagaatcctaaaatcatacaaagaatacgttyatagaataggaaccacatggaatggacccacaaagatcactgagctcctcactgaccacccacatctacaccctaagcatctgagcattgtccaagtgctgcctgagctctggcagctctgggctgtgcccactgccctgagcagtctgttccacrcccaccatcctctggggcagatctatttcctaacacccacctgatcctcccggtgtccagaacaaaaggtgtgctaaatgttcctatggacagaacctcttgarttttgaacagctttataacatggggaagagtgaagcaggactgctcacacttgyagcaatgcactttggttactgctagtttagctataaaagaaagaatagtgagtggaaatatgagcagatgtttgaaaagcttttaatgcaaaatatgataaaacaatgctttccataattggagcacagttgtaggttgggatgtaggtgtaaatgctgcacctgttgtggagctggaaatcttcattctgcaatggcaaaatttccctccttgcttatggactcagtgaatcataagaaatcaga

SEQ ID NO: 80967 - DNA, 588 bp, Chicken  19866894373882_5
acatggaatggacccacaaagatcactgagctcctcactgaccacccacatctacaccctaagcatctgagcattgtccaagtgctgcctgagctctggcagctctgggctgtgcccactgccctgagcagtctgttccacrcccaccatcctctggggcagatctatttcctaacacccacctgatcctcccggtgtccagaacaaaaggtgtgctaaatgttcctatggacagaacctcttgarttttgaacagctttataacatggggaagagtgaagcaggactgctcacacttgyagcaatgcactttggttactgctagtttagctataaaagaaagaatagtgagtggaaatatgagcagatgtttgaaaagcttttaatgcaaaatatgataaaacaatgctttccataattggagcacagttgtaggttgggatgtaggtgtaaatgctgcacctgttgtggagctggaaatcttcattctgcaatggcaaaatttccctccttgcttatggactcagtgaatcataagaaatcagattttcaactgaatagaaacactattgttcattctgcatccaa

SEQ ID NO: 80968 - DNA, 600 bp, Chicken  19866894373888_1
agtggcagtcagcccttaaatgtggtctagcagaggtagagccaggctctacccctcctggtcacacaggtgaattgctttcacctgtgctcccatggctgactcagtccttgcctcaggtgatcaatcagtggttcaggcagtgactcaacagttcccatatgacatctctgatcatgacatctttgctaaagtacccccaccctttagaacacagaacaagcctcagggctgcctttcccaaaccacagtatattcttctcccctctgaggcagaacattatcacatatcttcagcaygagccctgacagtagcagcagccctttgtgatggaggaggtttcagcttacgtttagtctgcacttcagatttaatcggaggtacctggtggcacttgaactccatgtctggaaaccttcctactttcatggcaacaagggaaggggcaaggacacagccatgtctctcctaagcaacgcttgctattaaacagctacgagacaggaagtttaggaaggggaggcgatgaggagaaaagaaccacgtacaaacaaaaggtgcgtgctgacgttaatctccattaataaagcctttataga

SEQ ID NO: 80969 - DNA, 599 bp, Chicken  19866894373890_1
  misc_feature (1)..(165): n is any nucleotide
nnnnnnnnnnnnnnnnnnnnnnnnnnnnnnnnnnnnnnnnnnnnnnnnnnnnnnnnnnnnnnnnnnnnnnnnnnnnnnnnnnnnnnnnnnnnnnnnnnnnnnnnnnnnnnnnnnnnnnnnnnnnnnnnnnnnnnnnnnnnnnnnnnnnnnnnnnnnnnnnnnnnnacacattcagtatttaaataaaagggaagatatgaaaacatatggaggtgaaaaaaattatggtttctgtttgtattgcaacaaagcaagatttgctggcttgatgtctgtttgctttgttactgatgctggggrtgtggaagggtgtgtgtgctgatggagtaggggaagctgacaggacgaagggaaagtagcacagamctgaggtttaggagaaacagtcacaaaaaaagaaaactatgtggttttctctgctgtttaaacacctctagaagagagccaataactgttgtcaagatgcacgctgagcattctgagaatttttagatatctaaggaagtagtaatttcaaacttctattggaaaacacagactatttaagctaatcaaacattccctctactgttttgaagtgataaaatctaccttggcaa

SEQ ID NO: 80970 - DNA, 599 bp, Chicken  19866894373890_2
  misc_feature (1)..(99): n is any nucleotide
nnnnnnnnnnnnnnnnnnnnnnnnnnnnnnnnnnnnnnnnnnnnnnnnnnnnnnnnnnnnnnnnnnnnnnnnnnnnnnnnnnnnnnnnnnnnnnnnnnnacacattcagtatttaaataaaagggaagatatgaaaacatatggaggtgaaaaaaattatggtttctgtttgtattgcaacaaagcaagatttgctggcttgatgtctgtttgctttgttactgatgctggggrtgtggaagggtgtgtgtgctgatggagtaggggaagctgacaggacgaagggaaagtagcacagamctgaggtttaggagaaacagtcacaaaaaaagaaaactatgtggttttctctgctgtttaaacacctctagaagagagccaataactgttgtcaagatgcacgctgagcattctgagaatttttagatatctaaggaagtagtaatttcaaacttctattggaaaacacagactatttaagctaatcaaacattccctctactgttttgaagtgataaaatctaccttggcaaattcaagtttgctcaagattttttttctccatgtcatctattagaaaaataacacaaagagtgtta

SEQ ID NO: 80971 - DNA, 572 bp, Chicken  19866894373890_3
agaatttttagatatctaaggaagtagtaatttcaaacttctattggaaaacacagactatttaagctaatcaaacattccctctactgttttgaagtgataaaatctaccttggcaaattcaagtttgctcaagattttttttctccatgtcatctattagaaaaataacacaaagagtgttagataagtaggcaaatagcatcagacatatctgacacctcaggtatcgaacaaagttttctcaccaacgtgaaggtgcatatacttcatctcagcatgctttttgtttatttttcayctgggagattttaggcttgctctgtctttccctactctagtttcaargggaaacacatatgaaaattacaatttttaaattgaaccagaggaaattattggcaatttgtggcctcttaatacatcactgacccataaggaaaatgtatttatgaacaggctttgtctacaccaggcttattatactattggcttattataacattctcaccctacattgtatctcaatagcttttggttaaaataaatttattctattacgtgctacagttt

SEQ ID NO: 80972 - DNA, 525 bp, Chicken  19866894373890_4
aaaacacagactatttaagctaatcaaacattccctctactgttttgaagtgataaaatctaccttggcaaattcaagtttgctcaagattttttttctccatgtcatctattagaaaaataacacaaagagtgttagataagtaggcaaatagcatcagacatatctgacacctcaggtatcgaacaaagttttctcaccaacgtgaaggtgcatatacttcatctcagcatgctttttgtttatttttcayctgggagattttaggcttgctctgtctttccctactctagtttcaargggaaacacatatgaaaattacaatttttaaattgaaccagaggaaattattggcaatttgtggcctcttaatacatcactgacccataaggaaaatgtatttatgaacaggctttgtctacaccaggcttattatactattggcttattataacattctcaccctacattgtatctcaatagcttttggttaaaataaatttattctattacgtgctacagttt

SEQ ID NO: 80973 - DNA, 600 bp, Chicken  19866894373900_1
cccagcccctgataattacacaacaggccctgtgtgagattacaaacttgtttgatccagaaaggcaaaggggagcgcggacagctgtgatgcagggagatgtgatggccccagcatccacccctccaaattttggagcttaatttctgagatccccagctgcagtctgggcggcaggatgaagctcccacacctgcctcgcgcagggtgccgcaggccccgctcccgctggcgtggctgcaatgagaggaacggtgcctgctggattgctcccactgcagctgcccaggctgaggccckaggtgaacaaagcacttaagcacgtgcttaaatttaagcgcatgagcaaacaatcccagggcaaatacttacacgctcgaatgctttgccaggtaggtgctgttctcggccgctcacacctggcgggaggtggtgccattttttacatggccaccrctctgactgcatccaggtgagaaagggaactttccactggctgcgggccaacgggcacttcaggtatgtgtcaggtctttaaaaaaaaaaaaaaaaagaaagaatttttaatcttatctgtctcattatcaccctgacatttgc

SEQ ID NO: 80974 - DNA, 600 bp, Chicken  19866894373900_2
cagctgcagtctgggcggcaggatgaagctcccacacctgcctcgcgcagggtgccgcaggccccgctcccgctggcgtggctgcaatgagaggaacggtgcctgctggattgctcccactgcagctgcccaggctgaggccckaggtgaacaaagcacttaagcacgtgcttaaatttaagcgcatgagcaaacaatcccagggcaaatacttacacgctcgaatgctttgccaggtaggtgctgttctcggccgctcacacctggcgggaggtggtgccattttttacatggccaccrctctgactgcatccaggtgagaaagggaactttccactggctgcgggccaacgggcacttcaggtatgtgtcaggtctttaaaaaaaaaaaaaaaaagaaagaatttttaatcttatctgtctcattatcaccctgacatttgctttggcttcaagtttaattacctcttgaattgaacaaaggttcagatagggctgagataataagaagtcagtgaagctgatgtatataggaaacagggcctcaccaaaggtgttagtccgtgcaggctgacccccagttatgagaaagacaagctg

SEQ ID NO: 80975 - DNA, 599 bp, Chicken  19866894373901_1
  misc_feature (1)..(35): n is any nucleotide
nnnnnnnnnnnnnnnnnnnnnnnnnnnnnnnnnnnattttgttccatctttgaacttgatgagagcgcacccaatccttccttcaggtcattggtaaggatgttaaatagtacaggtagctggacagacctgtagagtactcaacttgctataagcctctgcctacagcatgtatgtccaacttgcagaccgcaggccacatgcagcctggccaagcatgtcctgcagctgcccctgccctgcaccatcatgacaatggctcttcccatcaagcatcctggcccagcccaaggtgcacaytcatcactcagcaacaaccaaataccagagtacaattggcactgtctgggctgaaattaggacacagggaaagtgcacygcaaagctacctcaggttatactgaaggtgacagaaaatatcttttgataaaattgtgtgcttttcaaagtaaattgaaggactttatttatttatttatttaattgcagatgtcaataaaatgctcagagatatgatactgtccagctattactttatcaaagagaggttactggttttcaacaaactgtaaaaatatttatgcatttttgtatgtatg

SEQ ID NO: 80976 - DNA, 600 bp, Chicken  19866894373901_2
ccttcaggtcattggtaaggatgttaaatagtacaggtagctggacagacctgtagagtactcaacttgctataagcctctgcctacagcatgtatgtccaacttgcagaccgcaggccacatgcagcctggccaagcatgtcctgcagctgcccctgccctgcaccatcatgacaatggctcttcccatcaagcatcctggcccagcccaaggtgcacaytcatcactcagcaacaaccaaataccagagtacaattggcactgtctgggctgaaattaggacacagggaaagtgcacygcaaagctacctcaggttatactgaaggtgacagaaaatatcttttgataaaattgtgtgcttttcaaagtaaattgaaggactttatttatttatttatttaattgcagatgtcaataaaatgctcagagatatgatactgtccagctattactttatcaaagagaggttactggttttcaacaaactgtaaaaatatttatgcatttttgtatgtatgggtgtacgaaaacagaaatataaatgagcctagtaatatgcataaccctgtacaaatacacacagacctcattgcatgca

SEQ ID NO: 80977 - DNA, 600 bp, Chicken  19866894373905_1
gctgattgctacaaaacaaacttaatacataggtatgggtattgttaaattctcaaactaagtaatctaatgtaaagcaaaataaataaataaaatacataaaggagaaattaccataggttacagaaaacatttgtttctctaacctaatgtttgtagagtcttggagatatccctggttttcacttgataaagaatggtttttaatgtgcttgctttgtgaagttgacagaaacatcctcccggtatgcaagaaagatttctggtaccacagccctgcaggaggcactgaaggagaarcagcaacatattgaacagctcctggcagaaagggacctggagagggcagaagttgcaaaagcaaccagtcacgtgggggaaatagagcaggaattagcacttgttcgagatggacacgaccgggtaagagcagtgctgctgttcttaaaacagagactgtaaaacaattgacttaattcccaaatcaccttttctaattgaaaagatccgagagtgagagctagtgttgtaaacccatgagatcttttgtgtgggagctgtggcttggtaagagccaatctataccatttaacaaatgtt

SEQ ID NO: 80978 - DNA, 600 bp, Chicken  19866894373907_1
ttcacagttaatattttatgaatgagagttgctagattttgggaatcaatatgacaaaattagagttattctggatatactatagacatagaacaaaaaagatctaggtataatatctgattgtgattaaatttggcaacatttaaacattcttataaaccataaattggaaaccttctgataaataagtgtgaatcatttttcagtgagagttagatacataatacttataaactccttctttaatgtgtaggagacaattaattgaacacaatggtagatctgtcctacatttaacaygaactactgacaaatgagtgcagaatacaattaagattgtctctctctgtaggaagactgctctgaattcaaatcaacctttgctgggggacagctgacaggtacactggggtcacatcaccttgtcagtccatactcattaagggacatttcacaggttaggtttcacagaaagaattttctcaaaagctacatgataaaaagtcagcagatacagaagaaaatatatatgatactgacccactttactatagacaatactcccagttatacataatactaccaaattgctgaagtatc

SEQ ID NO: 80979 - DNA, 600 bp, Chicken  19866894373909_1
tgagtcagttggtaattgcatatgggcaaatctgctaatggaaaggaatcttgaaagaataacagactgaatcttttagaaaccctcccgatactgaactagtgaggtacaacctaatgtgaaaaggaaaactagtgatgaaacggatgatttgctctagatgtaaaatcacattcaagcagtcataatcaggcagagatactgacataagcaattttaaaattgccgtagaaaagtatcttcattctcattctcccagctactggatctaatagaaatctgaaaagcaaaaagttaaawaaaacttggtagcaaatcaagtcaaaaagtcaatgagaaacgtttgtgttcaaattctaatgcctgccatgtaagacctttagggaaagaaagcacaagagctcctacttaaagtgagttatgcactttcaaacctctgtctcaatcactcctttcaacaaaatcttctatatatacaccttgcaaagttgagtgtttttctccacagcctgtwgagagggattgtttaaaatatgaagtgctaagtcagatactcagatgtgttttgtcttcagctctgcttggcttaattggagcgag

SEQ ID NO: 80980 - DNA, 600 bp, Chicken  19866894373909_2
ttttaaaattgccgtagaaaagtatcttcattctcattctcccagctactggatctaatagaaatctgaaaagcaaaaagttaaawaaaacttggtagcaaatcaagtcaaaaagtcaatgagaaacgtttgtgttcaaattctaatgcctgccatgtaagacctttagggaaagaaagcacaagagctcctacttaaagtgagttatgcactttcaaacctctgtctcaatcactcctttcaacaaaatcttctatatatacaccttgcaaagttgagtgtttttctccacagcctgtwgagagggattgtttaaaatatgaagtgctaagtcagatactcagatgtgttttgtcttcagctctgcttggcttaattggagcgaggtaccattttttcccctataatcccttgagcaaatccaagtggaaaacatctcttgtgctttaaatacgtcttgagggttcaaactgtgaaatgaaagcaattgtacattttttattaaaaaaaaaaaaagaccagataagagcagattaactaaatgaaggagggaaattgtttcttagcaatgtcttataggaaagactgtttccttccctc

SEQ ID NO: 80981 - DNA, 600 bp, Chicken  19866894373915_1
atgggcttatatattatattatggtgggatggattgcagtggttaattctaaggctgggctgatctggggtctgttgctagtctgggtcatctcagtgcattgaattgatttagtattttaaataacataaatccccccacccctccaaacccagaacctgaaaatttcagcttggaatagaatcatagaatatcccaagttggacgggaccatttgcttttgtcaatgtgctcaggacagacagagttattctgcatttgccctgtataaactgatgaactagacttacaaccttactmtgatagatgaaagggagagaaaacactgagtgtcaaatgcattctctgcactgtcccagtgttaaatttagtccttacaaaggtctcatatagaatctctttattttgagcttggaggaatgccttgagtgcatgctacagcatacatgcaagcttaggatctttgtaggtggtgtggacagtgggactgagagttcctgcagcaattctgcagatgacaccaagctgagtgatgcagttgacacaccagagggatgggacctggactggtttgagaggtgggcccatgccaacctcatg

SEQ ID NO: 80982 - DNA, 600 bp, Chicken  19866894373917_1
tgagcccagaaagccaagccttgttgcagggctgctcaaatacagctggatttccttattagagggaagactttactatgtttattcagcattccaatagcaggctgtatatcttgatggtgcctaaaaacttccttcctcatcccttggttctgctcctggctgctccttccttcccccaggaaactcctctctggcttggagctccttagggagagcagtgctgtgagtgctgccctgcagcccgcgtgcaagaagggactgcattgccggtgggatccaaagtagaagcatgcagargaaacaaagacctgtttacatcaagctttgataagagctgacctttgagtttttctggcacagtggcattccagaaacggcgtctggtcaagggcagacgtgaagcatttgcygtgctgtgtcctgcccgtggagcagggattgcatccttccagcacaactcagggtgtcctcctggagcgctcccagagctgctgcctgggaaggtgctgccactcaggcagatgagcaggccgtcgtgtaatgcataaacaaagcagggaggtatttgttacgcctttttttgggaagccctgccag

SEQ ID NO: 80983 - DNA, 600 bp, Chicken  19866894373917_2
ttgatggtgcctaaaaacttccttcctcatcccttggttctgctcctggctgctccttccttcccccaggaaactcctctctggcttggagctccttagggagagcagtgctgtgagtgctgccctgcagcccgcgtgcaagaagggactgcattgccggtgggatccaaagtagaagcatgcagargaaacaaagacctgtttacatcaagctttgataagagctgacctttgagtttttctggcacagtggcattccagaaacggcgtctggtcaagggcagacgtgaagcatttgcygtgctgtgtcctgcccgtggagcagggattgcatccttccagcacaactcagggtgtcctcctggagcgctcccagagctgctgcctgggaaggtgctgccactcaggcagatgagcaggccgtcgtgtaatgcataaacaaagcagggaggtatttgttacgcctttttttgggaagccctgccagccctgggcttggtttaacgaggcactctggagtctcacgcagctaatgcagaaagcaagggcgcgcgggttgggttgctttgcagtgcatttacactgaggtggatggaggac

SEQ ID NO: 80984 - DNA, 600 bp, Chicken  19866894373917_3
ttttgggaagccctgccagccctgggcttggtttaacgaggcactctggagtctcacgcagctaatgcagaaagcaagggcgcgcgggttgggttgctttgcagtgcatttacactgaggtggatggaggaccaccacatggtttcgtttgctcccggattagtgatacacaaccacgtgtgtctgcagcagctgccttcctcgggctgctttctttgtgttgcgtttggccgcggatgagtttcatcagaactctgcagctgtttctggctgatgagttacctgcattgggcagccctrcggtcagcagctgggaagtgataggtgagttacctttgcaatctgcaacttcgggctgaaattcacaggaaatattcctgaaaagggtgatagaaagcaatactggatgggaacttcacttatttagttcagacctcttacctggtgcttgcatcgagctgcccagggcgagctgagggtttccctgaccaattcccagcagctcctgcaggctcaggcagtgccctgggtgcatcctggtggttgcaatgcctgcagtcaggatgctggagcacgctttgtaatgatcccgtgccgtgg

SEQ ID NO: 80985 - DNA, 600 bp, Chicken  19866894373917_4
agctgggaagtgataggtgagttacctttgcaatctgcaacttcgggctgaaattcacaggaaatattcctgaaaagggtgatagaaagcaatactggatgggaacttcacttatttagttcagacctcttacctggtgcttgcatcgagctgcccagggcgagctgagggtttccctgaccaattcccagcagctcctgcaggctcaggcagtgccctgggtgcatcctggtggttgcaatgcctgcagtcaggatgctggagcacgctttgtaatgatcccgtgccgtggtgggaaayccgagcaccttctgcactgcagcgttgcagtgaatcactgcacagttgctgtgctggctcctccctgtgctgcatggctggatggggattgctgggcttggaggagtaacgaaggcgttgtgctcataggtgcagcactcgggtcagggccctgcattggggcatggcacccattaggggctgtttgaggaggggctgtttgaggggagactgtggtcggggcatcagttggctgagcaatcagaattctcgagttctgttttttctcccttccttttgttttccacgtgtgagtgcgat

SEQ ID NO: 80986 - DNA, 599 bp, Chicken  19866894373920_1
  misc_feature (1)..(67): n is any nucleotide
nnnnnnnnnnnnnnnnnnnnnnnnnnnnnnnnnnnnnnnnnnnnnnnnnnnnnnnnnnnnnnnnnnnatacatggttctgttcctaagtttttctctgactcattgtctgatatttgtaattcaactcccacagtcacccacgtataaagtgtgtataatcactgggaagttatgaggattaactgattctatgttgatgtaaggctttatttatgatcctcagataaaaactgctttagaaaggcagaatattatcacaaattgaatttattctagtgtcatcatcaattacttttgtkatgggtctgccagcacttctgacaaacctccccacagaaataagctttgcagaatacatatttacagctccatattatccaaactgctgatctacctagttacctaatgcaacatgtaagaccatgaataaatactggcatgatttgctaacacaaatcctaacacaaagcttttagkgagtataggttacctgtgcttcagagcagagccactggaagtctcaaatatagatggaaaaaaaactacagagtgctgatatttgtgcttcacaccacagaccatgcagctcctttggggt

SEQ ID NO: 80987 - DNA, 600 bp, Chicken  19866894373920_2
attaactgattctatgttgatgtaaggctttatttatgatcctcagataaaaactgctttagaaaggcagaatattatcacaaattgaatttattctagtgtcatcatcaattacttttgtkatgggtctgccagcacttctgacaaacctccccacagaaataagctttgcagaatacatatttacagctccatattatccaaactgctgatctacctagttacctaatgcaacatgtaagaccatgaataaatactggcatgatttgctaacacaaatcctaacacaaagcttttagkgagtataggttacctgtgcttcagagcagagccactggaagtctcaaatatagatggaaaaaaaactacagagtgctgatatttgtgcttcacaccacagaccatgcagctcctttggggtgctcacacctctacttacagacaagttgacaacggggcaacaaggagctttgacaaagggcaaatggactttaaggccagagacaggacgttaaattctgcttcactctgaacaaagattaacctgttagctacagaagaggtaacacttatttggcttagctcatgtgagataacatc

SEQ ID NO: 80988 - DNA, 599 bp, Chicken  19866894373922_1
  misc_feature (1)..(189): n is any nucleotide
nnnnnnnnnnnnnnnnnnnnnnnnnnnnnnnnnnnnnnnnnnnnnnnnnnnnnnnnnnnnnnnnnnnnnnnnnnnnnnnnnnnnnnnnnnnnnnnnnnnnnnnnnnnnnnnnnnnnnnnnnnnnnnnnnnnnnnnnnnnnnnnnnnnnnnnnnnnnnnnnnnnnnnnnnnnnnnnnnnnnnnnnnnnnntggggcagggagatgtgtcttctcgcagcagggatgatggttatggagctaccccacaacagagcttctataagagaagtagcacccattgcttctttcagtttgggattycctgcaccaccgtttcctttgcagcatctctttgctccttttgtggtgttgacattatcatacagtattatatacatcatgcaaagctgacctttaggtcaaaaggagcaaagaaggaggggtgtttgaagggatgtygtttgtcttcccaagcagctgctgtgcatgaagagcactgctctcagggagtggttggacatgtgctgccagtgcacagtagtgaatgaattccctattttgctttacttgaaygcgcggcttttgctttacctcttgaatagtctatctcgatctgtcag

SEQ ID NO: 80989 - DNA, 599 bp, Chicken  19866894373922_2
  misc_feature (1)..(51): n is any nucleotide
nnnnnnnnnnnnnnnnnnnnnnnnnnnnnnnnnnnnnnnnnnnnnnnnnnntggggcagggagatgtgtcttctcgcagcagggatgatggttatggagctaccccacaacagagcttctataagagaagtagcacccattgcttctttcagtttgggattycctgcaccaccgtttcctttgcagcatctctttgctccttttgtggtgttgacattatcatacagtattatatacatcatgcaaagctgacctttaggtcaaaaggagcaaagaaggaggggtgtttgaagggatgtygtttgtcttcccaagcagctgctgtgcatgaagagcactgctctcagggagtggttggacatgtgctgccagtgcacagtagtgaatgaattccctattttgctttacttgaaygcgcggcttttgctttacctcttgaatagtctatctcgatctgtcagttttctcacttcttacctttctgatcctctccccaatcctgcctggggagagtgagtttgctgctgtgtggtgctgagctgcctaccagggttgacccacaatgggtcgtaggtggaatacgacttgtggagcctgga

SEQ ID NO: 80990 - DNA, 600 bp, Chicken  19866894373922_3
gcttctataagagaagtagcacccattgcttctttcagtttgggattycctgcaccaccgtttcctttgcagcatctctttgctccttttgtggtgttgacattatcatacagtattatatacatcatgcaaagctgacctttaggtcaaaaggagcaaagaaggaggggtgtttgaagggatgtygtttgtcttcccaagcagctgctgtgcatgaagagcactgctctcagggagtggttggacatgtgctgccagtgcacagtagtgaatgaattccctattttgctttacttgaaygcgcggcttttgctttacctcttgaatagtctatctcgatctgtcagttttctcacttcttacctttctgatcctctccccaatcctgcctggggagagtgagtttgctgctgtgtggtgctgagctgcctaccagggttgacccacaatgggtcgtaggtggaatacgacttgtggagcctggaacagcctccaggtattgggcttggttcttggaagcatccttcagtctgggaacctgcaccccagctcgtccttttatcacgtcttttctcaggcagctctcattaacggcgtaat

SEQ ID NO: 80991 - DNA, 600 bp, Chicken  19866894373931_1
tttgagaaggtctcactttatcaccaactgaaaaataaataaataaataaataaagatcccaattctcaatggcttggtcacataaggaagtgacataagtcccagctgttcttgagaagaggccatggactgaaacaactgaagaactggagttggagaactctgaagggacatggtgagaactagtgacactcagattaagatgtggcatttggcactggagttctgtttcctattaatttaccagcatgtccagcagacagttacaaataaatgatgctgaagtgacagcatatccrtacwccaggcttacccttagctaacccagtgatgagagyttcagactagctgaaaaaaacaaactataggcatatcctaaagatcttattgcacacattttccagcctagtacagattacagagctcagctgacaaaaatatgtttctctacatggatagagtattagactcaaaagctctagttaattttccactgattcctgtcttgatgctaacgtaaaaatcaaggcatatttttaagatcaaatgagaccactatatattttttttttcacaaatctgttcaataaacacttgga

SEQ ID NO: 80992 - DNA, 600 bp, Chicken  19866894373931_2
agaaggtctcactttatcaccaactgaaaaataaataaataaataaataaagatcccaattctcaatggcttggtcacataaggaagtgacataagtcccagctgttcttgagaagaggccatggactgaaacaactgaagaactggagttggagaactctgaagggacatggtgagaactagtgacactcagattaagatgtggcatttggcactggagttctgtttcctattaatttaccagcatgtccagcagacagttacaaataaatgatgctgaagtgacagcatatccrtacwccaggcttacccttagctaacccagtgatgagagyttcagactagctgaaaaaaacaaactataggcatatcctaaagatcttattgcacacattttccagcctagtacagattacagagctcagctgacaaaaatatgtttctctacatggatagagtattagactcaaaagctctagttaattttccactgattcctgtcttgatgctaacgtaaaaatcaaggcatatttttaagatcaaatgagaccactatatattttttttttcacaaatctgttcaataaacacttggaaacc

SEQ ID NO: 80993 - DNA, 600 bp, Chicken  19866894373931_3
taaataaataaataaagatcccaattctcaatggcttggtcacataaggaagtgacataagtcccagctgttcttgagaagaggccatggactgaaacaactgaagaactggagttggagaactctgaagggacatggtgagaactagtgacactcagattaagatgtggcatttggcactggagttctgtttcctattaatttaccagcatgtccagcagacagttacaaataaatgatgctgaagtgacagcatatccrtacwccaggcttacccttagctaacccagtgatgagagyttcagactagctgaaaaaaacaaactataggcatatcctaaagatcttattgcacacattttccagcctagtacagattacagagctcagctgacaaaaatatgtttctctacatggatagagtattagactcaaaagctctagttaattttccactgattcctgtcttgatgctaacgtaaaaatcaaggcatatttttaagatcaaatgagaccactatatattttttttttcacaaatctgttcaataaacacttggaaaccaccttaaatgctgtaaatctcctgaagatgagctt

SEQ ID NO: 80994 - DNA, 600 bp, Chicken  19866894373936_1
cgttaatataaattgcccagtaataaatcagagtttttacagtgttattcttttaatctataaggtaagggacttccttacttaaggtactcttaaggtaccatcccagtagtcagtcaggtttaaataactagagagctggaatatttcttgatatatttgagcacgagagttccttagagagaaaaaaagataaaacagatatttgaaacattaagttgtgtgggttatttttgtcacttttccatcaaatattcttactttccaaatataatgaaccatataatacagaaatgagawgttgaggtgagaaaaatagaacratttcttttagaactgatcagcagcttgtagtagaagagctcccttctgatgtgtaattgcaagaaaggacaaatagcaattactcttactggtttaactataattagtccttcctgaatgtttttgtttttattttacttagatagtaaattcaaattttataatatactgaggaacttaacaaaatcataacaagaaatactgtaattagcaaggaacttcctaagcttatcactccaaacatgatctcaaataacctgtctggattagcaaaat

SEQ ID NO: 80995 - DNA, 600 bp, Chicken  19866894373936_2
taaatcagagtttttacagtgttattcttttaatctataaggtaagggacttccttacttaaggtactcttaaggtaccatcccagtagtcagtcaggtttaaataactagagagctggaatatttcttgatatatttgagcacgagagttccttagagagaaaaaaagataaaacagatatttgaaacattaagttgtgtgggttatttttgtcacttttccatcaaatattcttactttccaaatataatgaaccatataatacagaaatgagawgttgaggtgagaaaaatagaacratttcttttagaactgatcagcagcttgtagtagaagagctcccttctgatgtgtaattgcaagaaaggacaaatagcaattactcttactggtttaactataattagtccttcctgaatgtttttgtttttattttacttagatagtaaattcaaattttataatatactgaggaacttaacaaaatcataacaagaaatactgtaattagcaaggaacttcctaagcttatcactccaaacatgatctcaaataacctgtctggattagcaaaatactgtactcattctttgtcatat

SEQ ID NO: 80996 - DNA, 600 bp, Chicken  19866894373946_1
ttgttgcttttatttccctgcagattggaggagaagttgtgcaacaggctggagattttctgttaaggagcagagcaggtgacagcggtatcctgttatggcccttatctctgagcaaggggactcacagccccgagaggcaaagcctcatcgaggttgtggtggctgctccgggtgaagatgaaagcagctctgtaagatgcaggctgagaaactcagcttgagtttcctcattacagtgcagagaggaagaagcacagaggtaggaagatcacacgcacactcatacaaaagtgcctwcttacacgtgctaagcttgatgctcgtaccaaatattatggtgtccaaacagatcccaatacaattatccttgtttttattattattaattcagaaaaggtggctcttcatgtacacagaggggaaatctgcctgcctcacttttgcagacgagttttactgcagatgttttctgtacatccgataccacatcacagcacaggagctcacttgcggtactttattttcctcttccaagcaatctcttcaaagaatttgttttcatgctgaggagacacctggtgatgttagaaggctttg

SEQ ID NO: 80997 - DNA, 599 bp, Chicken  19866894373953_1
  misc_feature (1)..(49): n is any nucleotide
nnnnnnnnnnnnnnnnnnnnnnnnnnnnnnnnnnnnnnnnnnnnnnnnnttgctttagaagttgtttcctttgtgcatctgtacatacttcacagcatgcacaggtgagtggctcgctaatctacataatgctttgggttgtattgctataactgtactgcatagctctgctcagagaaaatatatttttaaatctgttttatctttcactgaagtctacactttgttgaactggaattatggcagtaataatgacatgtcaagctgtaaatatatatatatatatattgagatgatcastgccttatgaaattcatagcagtaatcctagtacaataatcaggaaaacaacacataactagatatattttttattaatatcatgtgttatattttgaacagtgttttattctgttgaaaccattctgctcttaacaaatacatgcaattgtaaaataaaaatcttttcattggaaaattctaccatgcatttacaaaagagtaaacagtgtttatgtatgcacatgagagacaaggagaaggagctggacagagtatgtgaatagttcccagatctattttttatgaaacataatata

SEQ ID NO: 80998 - DNA, 600 bp, Chicken  19866894373959_1
ggactgctgtacagcttcaggaagaacaccaagagatgagcctcaaagtgaggctgacactgtaacagttttgatgaatggagataattaagctaaacatgacttgaagtgtagggagtatgaaattgctctgaatgaagccttcagcttaggtggttgctctgtacacctgtgacttgctgcttatgctatgcattagtgtctgtgcggctggaggaagaaaactgatggtaaggtgaatgtgttgcatatgaactgctggctaacacataatcaagttttaaatgttataaataaagmttatcccaagggaaagctggaattttctgagatgaggaaaatttgtggaaagacacattctgtagtgaggagtgacaagccttcctactgatagaaatgaacctgagcacctgtcactggaaaaagtgtctcaaggatgacagtgaacaagttcttaatctactcttcctgcagccagctgtgaaagacttggaatgggaagggcacatgtggggagagccatgccctggtagttgtgttgctttctgaatgcatgtgcccttcaggcttgttaaccacactgtgctgctattgcactgc

SEQ ID NO: 80999 - DNA, 600 bp, Chicken  19866894373959_2
gaattttctgagatgaggaaaatttgtggaaagacacattctgtagtgaggagtgacaagccttcctactgatagaaatgaacctgagcacctgtcactggaaaaagtgtctcaaggatgacagtgaacaagttcttaatctactcttcctgcagccagctgtgaaagacttggaatgggaagggcacatgtggggagagccatgccctggtagttgtgttgctttctgaatgcatgtgcccttcaggcttgttaaccacactgtgctgctattgcactgctctgccttcagtgtgttcmamacccatcacctgctgggaggtaccatgtgcacacagggttttctagaagcctaaacgatttagtgtcttcgtgcatcttggagttgttttttgccttcctggaaatgaagccagcgaagacctcatgtgagtgagcagcctttctcctagaaggtgcagatcatttgcaaacagtctgttggaagtccttcaaggaatttgtaggtagtaatgatcagtttcagtgctgggaaatcagagttttgtttcattttgttgtttttttttttgctttttaatttcctttttaagaaaggag

SEQ ID NO: 81000 - DNA, 600 bp, Chicken  19866894373959_3
attttctgagatgaggaaaatttgtggaaagacacattctgtagtgaggagtgacaagccttcctactgatagaaatgaacctgagcacctgtcactggaaaaagtgtctcaaggatgacagtgaacaagttcttaatctactcttcctgcagccagctgtgaaagacttggaatgggaagggcacatgtggggagagccatgccctggtagttgtgttgctttctgaatgcatgtgcccttcaggcttgttaaccacactgtgctgctattgcactgctctgccttcagtgtgttcmamacccatcacctgctgggaggtaccatgtgcacacagggttttctagaagcctaaacgatttagtgtcttcgtgcatcttggagttgttttttgccttcctggaaatgaagccagcgaagacctcatgtgagtgagcagcctttctcctagaaggtgcagatcatttgcaaacagtctgttggaagtccttcaaggaatttgtaggtagtaatgatcagtttcagtgctgggaaatcagagttttgtttcattttgttgtttttttttttgctttttaatttcctttttaagaaaggagga

SEQ ID NO: 81001 - DNA, 600 bp, Chicken  19866894373970_1
atgcattagtaatggccactgatccgctggcgctgatggcatttcttccagagggaggaacaattgggaccgtaactggagctggagtggggcaggtggaggggctcaggtgtcccccgcagcccttggggtcacctgtctcaatgcccacgtggagatgcacgtccctgggtcggtggtgtgggtattgctgctggggtggcatccggatgggtgcgaggtccttcgggtgcttttgggatggggagagtttctgggtgctcgtggaggtgtgaggtcccagaatctgctgtgacatcrggacaaagtgtggaggaatggtacccagagacccactgggatggggcacgtgtcacatggggatggtacctacagacccattgggacaaaayccacattatatggggaaagcttccaaagtgctgtgaaatggcacctgaagcctccatagaaaagacacctgaaaccccatggagatggcacccagagttccatagggaaaaaaccccagactccatggtgctggcacccaaagctccatagagaagtgacccaaaaccccatggagatgacatccagagccaaatagaagacacccca

SEQ ID NO: 81002 - DNA, 600 bp, Chicken  19866894373970_2
caggtggaggggctcaggtgtcccccgcagcccttggggtcacctgtctcaatgcccacgtggagatgcacgtccctgggtcggtggtgtgggtattgctgctggggtggcatccggatgggtgcgaggtccttcgggtgcttttgggatggggagagtttctgggtgctcgtggaggtgtgaggtcccagaatctgctgtgacatcrggacaaagtgtggaggaatggtacccagagacccactgggatggggcacgtgtcacatggggatggtacctacagacccattgggacaaaayccacattatatggggaaagcttccaaagtgctgtgaaatggcacctgaagcctccatagaaaagacacctgaaaccccatggagatggcacccagagttccatagggaaaaaaccccagactccatggtgctggcacccaaagctccatagagaagtgacccaaaaccccatggagatgacatccagagccaaatagaagacaccccaaacccccatgggcatggcacccaaagctccgtggagaaggcaaccaaaaccccatggagatggcatccggagccaaacagaagataccccaa

SEQ ID NO: 81003 - DNA, 600 bp, Chicken  19866894373980_1
gggagagagcccatctgaggttgtgtctgtcctgagagcgccatggcaggcaatccctgcagccttcagacccaaacgagccagcagatcctggtttgtacaccaatgtgcacaggaatagaatgacgattcatgcaggggagcaggatattagatataaataagaagtctttcttttgctaaaaatatgaattcttccccctgtgaacagacaggcaataaaggtgccatctcccccctgtacgcacacccacaggaccaagggttcacctccttccacgagacagagcacacagcagygtgtccccagagggctttcaggagacacgagcatccttgcagtaggagtgctgagccctaccagggaggggcagctgcttcccaaacctcccctcactgctccacatagggcttcctgcccaagctgcacctgctccttggatcaccctcagcaaatcaagctgagtgctgaaggggaaggctgaatccccatggagtygcatctcacaatatgactgaaaaccccatattttagggcaaaagcctcctccttccccttcacagagccttctagtaacctggctgagctctatacatata

SEQ ID NO: 81004 - DNA, 600 bp, Chicken  19866894373980_2
ccctgtgaacagacaggcaataaaggtgccatctcccccctgtacgcacacccacaggaccaagggttcacctccttccacgagacagagcacacagcagygtgtccccagagggctttcaggagacacgagcatccttgcagtaggagtgctgagccctaccagggaggggcagctgcttcccaaacctcccctcactgctccacatagggcttcctgcccaagctgcacctgctccttggatcaccctcagcaaatcaagctgagtgctgaaggggaaggctgaatccccatggagtygcatctcacaatatgactgaaaaccccatattttagggcaaaagcctcctccttccccttcacagagccttctagtaacctggctgagctctatacatatatatatatatatatatgtaaagcttagtgccatccttggcaacayatagcagcagagagcccagcccagcccattttctccccatggagatcagccggtggcacttgcggtacttttgattttctctagaaacctgtctcttcaggatttcttttctatttttttttttttttttttgaagtcaaagtctgtttcccgtt

SEQ ID NO: 81005 - DNA, 559 bp, Chicken  19866894373980_3
ggagtgctgagccctaccagggaggggcagctgcttcccaaacctcccctcactgctccacatagggcttcctgcccaagctgcacctgctccttggatcaccctcagcaaatcaagctgagtgctgaaggggaaggctgaatccccatggagtygcatctcacaatatgactgaaaaccccatattttagggcaaaagcctcctccttccccttcacagagccttctagtaacctggctgagctctatacatatatatatatatatatatgtaaagcttagtgccatccttggcaacayatagcagcagagagcccagcccagcccattttctccccatggagatcagccggtggcacttgcggtacttttgattttctctagaaacctgtctcttcaggatttcttttctatttttttttttttttttttgaagtcaaagtctgtttcccgtttggtaggtgacctgtttaatgttttccctgtgtctgggaactccttagtgtaattagcgacctttgaactccacaactaatcctgagctattttggattcctta

SEQ ID NO: 81006 - DNA, 600 bp, Chicken  19866894373981_1
cagcgtgtgcctcatgcggcggtagcgctgcctgcaggagggcactccatcatcccatgccccccaccgcccccccaccccactgacccatagctccacctggccaggtagccgcgcgcccggctctgcagcaggacgatttttcgacgcagggagcggaagcgtttcttgatgaagaaggtgcgggcgtagcgctgcagtgtgagcgcagccaggtggtgggcacgggcccgcttgctctccagtgcctggtacagctgctccttcaggaagagcttgggggagcacaccatgagcccycatggtacatcacttgtacccaaacacctcaaattctccagcagccccttgcgggacagtaccttggtgacgccgacgtagtacatgctggggttgacagggcagaggttcctcagcatctccacacagttggccccattggggacaacgttggaccacatgtcgaccaggcagcggtacctgggagagcccacagcactgtcaccagcactgccaccacgtgggacttctccccccatgttggcatgggccctccccattgcctgggatagcaacttctcctggctctttgaacccaag

SEQ ID NO: 81007 - DNA, 600 bp, Chicken  19866894373981_2
gcaacttctcctggctctttgaacccaagttggggggctctcagctccctactgtgggttccccagagctggcagtgctcgacccacagccaccaccctgcacacccccggcacctgtcaatgaagacgagaaaagggatgcggatggggaagccctccttgcggatgcggatggtctccaagatgcccgagtaacgcagctggctgctgaccacatcggcctcgaagagccctggctcctggggggacaaggagtgaagccttggtggccacgtgggcagattctcaccagcgaggggsaaggagacacgaggacccacgtggcaccacgcacccaccrcgctcaccttcttgttgttgggtttgaggcagcgcacaaagaaggggttgcacctatgttggagagacaccatcaagggacaggggacaragccggcctggccaccagggacttgggtccaactgtccccctccctccagcagtgtcrtgtgtgccctgctcgtgccaacctctccatcttctccaccaagtccaggagagactgctggaaccgtgcagccacagtgggagccttgtaacgccgcgtcctggtgctgctc

SEQ ID NO: 81008 - DNA, 600 bp, Chicken  19866894373981_3
tcagctccctactgtgggttccccagagctggcagtgctcgacccacagccaccaccctgcacacccccggcacctgtcaatgaagacgagaaaagggatgcggatggggaagccctccttgcggatgcggatggtctccaagatgcccgagtaacgcagctggctgctgaccacatcggcctcgaagagccctggctcctggggggacaaggagtgaagccttggtggccacgtgggcagattctcaccagcgaggggsaaggagacacgaggacccacgtggcaccacgcacccaccrcgctcaccttcttgttgttgggtttgaggcagcgcacaaagaaggggttgcacctatgttggagagacaccatcaagggacaggggacaragccggcctggccaccagggacttgggtccaactgtccccctccctccagcagtgtcrtgtgtgccctgctcgtgccaacctctccatcttctccaccaagtccaggagagactgctggaaccgtgcagccacagtgggagccttgtaacgccgcgtcctggtgctgctcctcctgaccaggctcctctgccgggccagcacctgggcat

SEQ ID NO: 81009 - DNA, 600 bp, Chicken  19866894373981_4
gaaaagggatgcggatggggaagccctccttgcggatgcggatggtctccaagatgcccgagtaacgcagctggctgctgaccacatcggcctcgaagagccctggctcctggggggacaaggagtgaagccttggtggccacgtgggcagattctcaccagcgaggggsaaggagacacgaggacccacgtggcaccacgcacccaccrcgctcaccttcttgttgttgggtttgaggcagcgcacaaagaaggggttgcacctatgttggagagacaccatcaagggacaggggacaragccggcctggccaccagggacttgggtccaactgtccccctccctccagcagtgtcrtgtgtgccctgctcgtgccaacctctccatcttctccaccaagtccaggagagactgctggaaccgtgcagccacagtgggagccttgtaacgccgcgtcctggtgctgctcctcctgaccaggctcctctgccgggccagcacctgggcatggccgaagaacaggttggccaccaccttggagggacaggaagggttatggagcaggaagatggccccggtggccacccaagagcagtctg

SEQ ID NO: 81010 - DNA, 600 bp, Chicken  19866894373981_5
cgagtaacgcagctggctgctgaccacatcggcctcgaagagccctggctcctggggggacaaggagtgaagccttggtggccacgtgggcagattctcaccagcgaggggsaaggagacacgaggacccacgtggcaccacgcacccaccrcgctcaccttcttgttgttgggtttgaggcagcgcacaaagaaggggttgcacctatgttggagagacaccatcaagggacaggggacaragccggcctggccaccagggacttgggtccaactgtccccctccctccagcagtgtcrtgtgtgccctgctcgtgccaacctctccatcttctccaccaagtccaggagagactgctggaaccgtgcagccacagtgggagccttgtaacgccgcgtcctggtgctgctcctcctgaccaggctcctctgccgggccagcacctgggcatggccgaagaacaggttggccaccaccttggagggacaggaagggttatggagcaggaagatggccccggtggccacccaagagcagtctgtgtgacacgaagttgggggagccctatgggaaaagggaatggggtggcaccatcttct

SEQ ID NO: 81011 - DNA, 600 bp, Chicken  19866894373995_1
atcccaccttgcagccctcagaagcacaggatgaagatgcagggcagcatcctacaccaacaactgactcatctctctcgctgcctgcatccctgtcacagcaaagcagcacgaggctgactgacgcaggcacctctgggaactttcttagctaccactcccaaagttcttgcaaataacacgcagagacaagcatttctgacaaggatgcttaaaggagcagtgccttcatgacagacaccagagcagcacaggtccctcccggatgagttgttgggcccttggttcaattaaagcaartatggagcttttgctggtgttagcagcagtagtttcaccctttgtggcagctcacagcaagatgaccacgagtccaataacttgcagctgtaccagagtaagggctgctaaaatacataaggagggagtttttgccaktccaactcaaacatctttatttctgcactgttaccttgcccgtcctcacggaggacagagtgcaggagggaggtaaactttgccagacaagctttggttacattcagggggctaagaatgcagaccatgaggagtcactcccattattttccccaaaatttc

SEQ ID NO: 81012 - DNA, 573 bp, Chicken  19866894373995_2
ggaactttcttagctaccactcccaaagttcttgcaaataacacgcagagacaagcatttctgacaaggatgcttaaaggagcagtgccttcatgacagacaccagagcagcacaggtccctcccggatgagttgttgggcccttggttcaattaaagcaartatggagcttttgctggtgttagcagcagtagtttcaccctttgtggcagctcacagcaagatgaccacgagtccaataacttgcagctgtaccagagtaagggctgctaaaatacataaggagggagtttttgccaktccaactcaaacatctttatttctgcactgttaccttgcccgtcctcacggaggacagagtgcaggagggaggtaaactttgccagacaagctttggttacattcagggggctaagaatgcagaccatgaggagtcactcccattattttccccaaaatttcatgtggaaagtccaaggagtctctgctaagctgttgcaactctcaatttaaaactggacacttacttttgggtcaacagacctactttgtagttaggagagtgcacaggag

SEQ ID NO: 81013 - DNA, 600 bp, Chicken  19866894373997_1
acagtgcatacagctgagacgcctagttaaggggaagctaaaggagatacctccgaatcaggtcgtgcagcctgattccctgcttacctcatgtcaaaagtcccccctccaatcatagctgtaatggaaaagaagagcaaaagttgctgtttttataaatagggccagaacgtttctgggccacgctgcctttttgggtggcttcctcctctgtgctgggcaaaccaaagggaggtctgaggaatgcttcccaagataaatggtgtggctcaggcaacagtggtggaggctttgtgggcrcatgaaaagagagatatgaaggtaacatctctgtttctgctgcctcttgggacacgctttttggatagcagctgcaggtcattaaacgtgtcagctgaggcctctcaagactccagggagaggaggaagtgcaccatctcttgccttgtctcttcctaagcagcagataatagaaatagtgcaaaatgtattattgtacagcatgaaataataatttattatttattattagtggaattccattaattactgcaaattcaccttgcccttgggaaattatcccatgacttttaaagtggt

SEQ ID NO: 81014 - DNA, 600 bp, Chicken  19866894374001_1
accgggctggaattcctgcccagagctgcaaggaatggagggctgcggattgcgctgcacgtgtctgggtttggagggaaggcaggcagagaagaccagcagtttgctgagcagccaaccctctcagagctggtggcactgcaggacctcccggtgccttcaggtaagcacatggcagggcagcaggctgctgcggttcctgttgctggtggttggcatgcagggcaggctcctcgtgcctgcagcactgctgttgggttcagacagcaacacgcaaagggatttctttttttaaggcartgatcagaaagctgggaaacggaccttaagccttgccgagggctgtgcttacgctgtccctttcttctaagggctgttgacctggtgatgactcaaagctgcctgcatttgccgtgggagctcaggagctctcacatcctcaaggaagaaagggacggttccagcagctgaagttgagctaacttacagcgttacagctctaagagattgaattaaccaytggactgcagctggatgctgggatcrgtgtgtctgtgctgggactccccagctagcgctctgcctcacacaggatgtgac

SEQ ID NO: 81015 - DNA, 600 bp, Chicken  19866894374001_2
cagggcaggctcctcgtgcctgcagcactgctgttgggttcagacagcaacacgcaaagggatttctttttttaaggcartgatcagaaagctgggaaacggaccttaagccttgccgagggctgtgcttacgctgtccctttcttctaagggctgttgacctggtgatgactcaaagctgcctgcatttgccgtgggagctcaggagctctcacatcctcaaggaagaaagggacggttccagcagctgaagttgagctaacttacagcgttacagctctaagagattgaattaaccaytggactgcagctggatgctgggatcrgtgtgtctgtgctgggactccccagctagcgctctgcctcacacaggatgtgacagaggatttcaggtggctcatggcaggtggaagctacctggggcactcagaacagtgcctcctcctcagagatgtgcacagtggggaggtgcaacccccagagccagttctgtgctttccttggcacgctgacactcacattagctggttcaacaccgctttgggatgtttggtttaataaaagggggattatcttccaagcctgcctcctcgagggagg

SEQ ID NO: 81016 - DNA, 600 bp, Chicken  19866894374001_3
actgctgttgggttcagacagcaacacgcaaagggatttctttttttaaggcartgatcagaaagctgggaaacggaccttaagccttgccgagggctgtgcttacgctgtccctttcttctaagggctgttgacctggtgatgactcaaagctgcctgcatttgccgtgggagctcaggagctctcacatcctcaaggaagaaagggacggttccagcagctgaagttgagctaacttacagcgttacagctctaagagattgaattaaccaytggactgcagctggatgctgggatcrgtgtgtctgtgctgggactccccagctagcgctctgcctcacacaggatgtgacagaggatttcaggtggctcatggcaggtggaagctacctggggcactcagaacagtgcctcctcctcagagatgtgcacagtggggaggtgcaacccccagagccagttctgtgctttccttggcacgctgacactcacattagctggttcaacaccgctttgggatgtttggtttaataaaagggggattatcttccaagcctgcctcctcgagggagggagaggaggaccagcagaggcagctc

SEQ ID NO: 81017 - DNA, 599 bp, Chicken  19866894374008_1
  misc_feature (1)..(12): n is any nucleotide
nnnnnnnnnnnntttgggcccttggagtacactacatctaagaactttctatagcgtggagcctgggataggtcattcctcagcctttctatttgtttttaccaggctcagtagagagggatcactctcagaccccggatgcatcttagcacccgctgggcacaacggtgaatggagaagggggaaggaagaaaccagccttagtattggccaagctccagcatgatgcctagatttatcctcatgttcaggaaggcaaataaagagcaaaagacaaacaggcaccttgatttaccagcragattaagagcacgytggcagagcgagaacatctttataaaaaatgaaagaagrgcaggcgggtggaaggagcagtgaagatgaagctccacgagttatctggggcatgtaagaaaaccatcagcccagcaaaaatgtgagaggagagcacaggaggtggaaacagtgggaaaaaacaaggcgttatgttttattaattataccattttacatttaagcagcgtctccttacaaagaagatggatagtgacacacatgsctgtgtgtacaatctgaccactaaattcaccctaaatctg

SEQ ID NO: 81018 - DNA, 600 bp, Chicken  19866894374008_2
gggcccttggagtacactacatctaagaactttctatagcgtggagcctgggataggtcattcctcagcctttctatttgtttttaccaggctcagtagagagggatcactctcagaccccggatgcatcttagcacccgctgggcacaacggtgaatggagaagggggaaggaagaaaccagccttagtattggccaagctccagcatgatgcctagatttatcctcatgttcaggaaggcaaataaagagcaaaagacaaacaggcaccttgatttaccagcragattaagagcacgytggcagagcgagaacatctttataaaaaatgaaagaagrgcaggcgggtggaaggagcagtgaagatgaagctccacgagttatctggggcatgtaagaaaaccatcagcccagcaaaaatgtgagaggagagcacaggaggtggaaacagtgggaaaaaacaaggcgttatgttttattaattataccattttacatttaagcagcgtctccttacaaagaagatggatagtgacacacatgsctgtgtgtacaatctgaccactaaattcaccctaaatctggcgaggaggagggacc

SEQ ID NO: 81019 - DNA, 600 bp, Chicken  19866894374008_3
cgtggagcctgggataggtcattcctcagcctttctatttgtttttaccaggctcagtagagagggatcactctcagaccccggatgcatcttagcacccgctgggcacaacggtgaatggagaagggggaaggaagaaaccagccttagtattggccaagctccagcatgatgcctagatttatcctcatgttcaggaaggcaaataaagagcaaaagacaaacaggcaccttgatttaccagcragattaagagcacgytggcagagcgagaacatctttataaaaaatgaaagaagrgcaggcgggtggaaggagcagtgaagatgaagctccacgagttatctggggcatgtaagaaaaccatcagcccagcaaaaatgtgagaggagagcacaggaggtggaaacagtgggaaaaaacaaggcgttatgttttattaattataccattttacatttaagcagcgtctccttacaaagaagatggatagtgacacacatgsctgtgtgtacaatctgaccactaaattcaccctaaatctggcgaggaggagggaccagaaggcaggtgacaaactcgggccatggagaatgcctt

SEQ ID NO: 81020 - DNA, 600 bp, Chicken  19866894374008_4
ataaagagcaaaagacaaacaggcaccttgatttaccagcragattaagagcacgytggcagagcgagaacatctttataaaaaatgaaagaagrgcaggcgggtggaaggagcagtgaagatgaagctccacgagttatctggggcatgtaagaaaaccatcagcccagcaaaaatgtgagaggagagcacaggaggtggaaacagtgggaaaaaacaaggcgttatgttttattaattataccattttacatttaagcagcgtctccttacaaagaagatggatagtgacacacatgsctgtgtgtacaatctgaccactaaattcaccctaaatctggcgaggaggagggaccagaaggcaggtgacaaactcgggccatggagaatgccttgtgctagttcttgtccgtatatcctaaagacaccctcaggttctcaccatgccctgcagctgcaaccccatggcacaagtcaggcaacaagaaaagcttgtctaaattcacctgggaggcccacggtgtgttaagattcaaagttcaccctcccatgtagcaaggctggtcacatctggtggatgacgagatactgatgaaagag

SEQ ID NO: 81021 - DNA, 599 bp, Chicken  19866894374010_1
  misc_feature (1)..(158): n is any nucleotide
nnnnnnnnnnnnnnnnnnnnnnnnnnnnnnnnnnnnnnnnnnnnnnnnnnnnnnnnnnnnnnnnnnnnnnnnnnnnnnnnnnnnnnnnnnnnnnnnnnnnnnnnnnnnnnnnnnnnnnnnnnnnnnnnnnnnnnnnnnnnnnnnnnnnnnnnnnnnnntctccatcacagtccacagggctctgaacatcacacagagatcaagaagtaaaagcctgtgataaacgtcctttaccttcatccccagagctggggggaaactgaggcagggaggaggcctggcagccatttacaaaacccsttagaaacgtgcctgagaaccagagacaggcaaaacaggtcccctaagctctaggctgcccatcttccttggtaatccatgacacatgccaccagcttaggaayaaggraacagaagaggggaaactcatcaaacgcaaaccattcacaggcatcacagaacagacactcaatccagaagggtccatacaayttcccctctccacagtgcaaatcaccactcaaccctaagacaccccttgaggcctgcggtagaaagcacaacccatcacactgtaccacagggcagcctttctgccc

SEQ ID NO: 81022 - DNA, 599 bp, Chicken  19866894374010_2
  misc_feature (1)..(54): n is any nucleotide
nnnnnnnnnnnnnnnnnnnnnnnnnnnnnnnnnnnnnnnnnnnnnnnnnnnnnntctccatcacagtccacagggctctgaacatcacacagagatcaagaagtaaaagcctgtgataaacgtcctttaccttcatccccagagctggggggaaactgaggcagggaggaggcctggcagccatttacaaaacccsttagaaacgtgcctgagaaccagagacaggcaaaacaggtcccctaagctctaggctgcccatcttccttggtaatccatgacacatgccaccagcttaggaayaaggraacagaagaggggaaactcatcaaacgcaaaccattcacaggcatcacagaacagacactcaatccagaagggtccatacaayttcccctctccacagtgcaaatcaccactcaaccctaagacaccccttgaggcctgcggtagaaagcacaacccatcacactgtaccacagggcagcctttctgccccctggatggacaccaaacatcccctgctcttctgcagcaccttgctggggctcttgagatgccatatctgttttctgcccaagagcaaggagcccagcagacac

SEQ ID NO: 81023 - DNA, 599 bp, Chicken  19866894374010_3
  misc_feature (1)..(49): n is any nucleotide
nnnnnnnnnnnnnnnnnnnnnnnnnnnnnnnnnnnnnnnnnnnnnnnnntctccatcacagtccacagggctctgaacatcacacagagatcaagaagtaaaagcctgtgataaacgtcctttaccttcatccccagagctggggggaaactgaggcagggaggaggcctggcagccatttacaaaacccsttagaaacgtgcctgagaaccagagacaggcaaaacaggtcccctaagctctaggctgcccatcttccttggtaatccatgacacatgccaccagcttaggaayaaggraacagaagaggggaaactcatcaaacgcaaaccattcacaggcatcacagaacagacactcaatccagaagggtccatacaayttcccctctccacagtgcaaatcaccactcaaccctaagacaccccttgaggcctgcggtagaaagcacaacccatcacactgtaccacagggcagcctttctgccccctggatggacaccaaacatcccctgctcttctgcagcaccttgctggggctcttgagatgccatatctgttttctgcccaagagcaaggagcccagcagacactggta

SEQ ID NO: 81024 - DNA, 600 bp, Chicken  19866894374010_4
acagagatcaagaagtaaaagcctgtgataaacgtcctttaccttcatccccagagctggggggaaactgaggcagggaggaggcctggcagccatttacaaaacccsttagaaacgtgcctgagaaccagagacaggcaaaacaggtcccctaagctctaggctgcccatcttccttggtaatccatgacacatgccaccagcttaggaayaaggraacagaagaggggaaactcatcaaacgcaaaccattcacaggcatcacagaacagacactcaatccagaagggtccatacaayttcccctctccacagtgcaaatcaccactcaaccctaagacaccccttgaggcctgcggtagaaagcacaacccatcacactgtaccacagggcagcctttctgccccctggatggacaccaaacatcccctgctcttctgcagcaccttgctggggctcttgagatgccatatctgttttctgcccaagagcaaggagcccagcagacactggtacattctcactactaccaaatgcatcacttcagactggacagaagaaagatgtgagcgtatggcctgataaggaaagcatgggag

SEQ ID NO: 81025 - DNA, 600 bp, Chicken  19866894374010_5
gatggacaccaaacatcccctgctcttctgcagcaccttgctggggctcttgagatgccatatctgttttctgcccaagagcaaggagcccagcagacactggtacattctcactactaccaaatgcatcacttcagactggacagaagaaagatgtgagcgtatggcctgataaggaaagcatgggagcatagtttgggtgagcatcattgtccatacaggaatagaagggtgaggaaattgactgattgcccacacaggctgggcaccagggcaggggtgacatctgtccgacagacracgtttccactgggatcatgcctgcagggtacactttccagaatggcctgatacacatcctcttcctttcaagggaacggtttggggaagctgtggctgcacgaccacatgcaaggagaaaatcagctctgtggactctgcagttatcacagacagtcatctccagaggtgctggcacctttcacttcttggcagcwmtgctacactgggcacaatactctggctcctaggcagacaaaggacattcagacctgagacttgagctgagcctgggaaaaggacattgctatcacaatcccc

SEQ ID NO: 81026 - DNA, 600 bp, Chicken  19866894374010_6
gggtgagcatcattgtccatacaggaatagaagggtgaggaaattgactgattgcccacacaggctgggcaccagggcaggggtgacatctgtccgacagacracgtttccactgggatcatgcctgcagggtacactttccagaatggcctgatacacatcctcttcctttcaagggaacggtttggggaagctgtggctgcacgaccacatgcaaggagaaaatcagctctgtggactctgcagttatcacagacagtcatctccagaggtgctggcacctttcacttcttggcagcwmtgctacactgggcacaatactctggctcctaggcagacaaaggacattcagacctgagacttgagctgagcctgggaaaaggacattgctatcacaatccccctagaccctggcaaaacccaggttgcttgctgcaggtgctcaaaatgctgtttgccacctccctagctttaccctgggccttgtgatatttggtgcctctcttcaagcttcagcacctagaggcgtgagattttaggagataattcagagggggaggtattgaaggcagagatttagtcattcttcagctgaagaaa

SEQ ID NO: 81027 - DNA, 600 bp, Chicken  19866894374010_7
ggtgagcatcattgtccatacaggaatagaagggtgaggaaattgactgattgcccacacaggctgggcaccagggcaggggtgacatctgtccgacagacracgtttccactgggatcatgcctgcagggtacactttccagaatggcctgatacacatcctcttcctttcaagggaacggtttggggaagctgtggctgcacgaccacatgcaaggagaaaatcagctctgtggactctgcagttatcacagacagtcatctccagaggtgctggcacctttcacttcttggcagcwmtgctacactgggcacaatactctggctcctaggcagacaaaggacattcagacctgagacttgagctgagcctgggaaaaggacattgctatcacaatccccctagaccctggcaaaacccaggttgcttgctgcaggtgctcaaaatgctgtttgccacctccctagctttaccctgggccttgtgatatttggtgcctctcttcaagcttcagcacctagaggcgtgagattttaggagataattcagagggggaggtattgaaggcagagatttagtcattcttcagctgaagaaat

SEQ ID NO: 81028 - DNA, 600 bp, Chicken  19866894374014_1
tcaccaaagtgtcttactctctgtcctcttctttattgcagccctgatgatattggtacctgttggtatatcctgttgtctggctcagtcttcattaaagaatctatgtttcttccaaggagcaggtatgtcaactgtggatgcactacatttaagcacaactgatgagttggttgccttttaattcttaattaagtttgattcttaacaaaagtgcagaagtacacacacaaacacgcctttccttcctttactaactggggcatttatttgatgcctgcagctagacttgaaagcccytcattatgtgcactgtacaaamaccaaaagcgtcatgaaaagacaatttaaaaataccccccttcaactcaacaaatagaatgaagtactgagtagactgttcctatgagtaatcaaatattaaatcataggaggtactagagcttttatgatgctttcctgagactttgcacaagtcctcagtgtgtgttttggcatatgcttatatcatgttacttccagttttgttacctctgtttaaggttatctttcatgtaagtgaatttgcaataagaatgatgttttagataggaaaaatgt

SEQ ID NO: 81029 - DNA, 578 bp, Chicken  19866894374014_2
gtcctcttctttattgcagccctgatgatattggtacctgttggtatatcctgttgtctggctcagtcttcattaaagaatctatgtttcttccaaggagcaggtatgtcaactgtggatgcactacatttaagcacaactgatgagttggttgccttttaattcttaattaagtttgattcttaacaaaagtgcagaagtacacacacaaacacgcctttccttcctttactaactggggcatttatttgatgcctgcagctagacttgaaagcccytcattatgtgcactgtacaaamaccaaaagcgtcatgaaaagacaatttaaaaataccccccttcaactcaacaaatagaatgaagtactgagtagactgttcctatgagtaatcaaatattaaatcataggaggtactagagcttttatgatgctttcctgagactttgcacaagtcctcagtgtgtgttttggcatatgcttatatcatgttacttccagttttgttacctctgtttaaggttatctttcatgtaagtgaatttgcaataagaatgatgttttagataggaaaaatgt

SEQ ID NO: 81030 - DNA, 599 bp, Chicken  19866894374027_1
  misc_feature (1)..(26): n is any nucleotide
nnnnnnnnnnnnnnnnnnnnnnnnnntgtttcatcaggcagctcacatgtattcaattgttccacagaacgtgtgtgtgactgttccatcatgaattgattctttacataatccgaagtctgtcaattttacatgacctgaaattaaataaataatatgtaagacagacaaataccagaattctgacatttgtataaacataaaaaaatatgtatttttaacattaatatgcaataactctgaactacctccagttgcagttaatggtctgacaaagcagtacagttaataagacaaaamaacataattatatacaaagactgaagttgtttcatctcacgtgaaaatactggatggtacagattgccagactaatccctgtcatgtagcaatgcagcaatgcaatccggaatcactgctactgtcagacaaagcgtcagcagctagataagtcatttcagctgcaggctggaatcttacctaacttgtccctaattaatgccttgttaccccattactgaaatgtcactgatgctgtcacacagatacttaaagtatccgtgtgaagacacacatttaagtatttcacaatgatccag

SEQ ID NO: 81031 - DNA, 600 bp, Chicken  19866894374045_1
ctacctttcctcataggagaggtgctccagtcatctgatcatcttagtggccctcctctggacccattccaggagtccttcatctttcttgatgggggggtctggacacagtgctccaggtgggacctaacaagagctgagtagaggaggacaatcacttccctctccctgctggcccccccttttttaatgcagcccagaacatagttggccttccaggctgcaggtgcacactgctggctcatgtccagcttctcatccatcagaacccccaagtccttctctgcagggctgctcccraagagttcttctgccagtctgtataaatacctgggactgcaccagccaaattcaataccttgcacttggcctagttgaacctcattacgttctcatgggcccacttctccagcctgtctaggtccgtctggatggctttccttccctccagtgcatcagctgcaccactcagcttggtgtcacctgcaaacttgcttaaggtgcactcaatgccatcgtctgtgtcactgatgaagatgttgaagagcaccagacccaagactgaccactgggagacaccacttgtgaccagcctccacc

SEQ ID NO: 81032 - DNA, 599 bp, Chicken  19866894374055_1
  misc_feature (1)..(145): n is any nucleotide
nnnnnnnnnnnnnnnnnnnnnnnnnnnnnnnnnnnnnnnnnnnnnnnnnnnnnnnnnnnnnnnnnnnnnnnnnnnnnnnnnnnnnnnnnnnnnnnnnnnnnnnnnnnnnnnnnnnnnnnnnnnnnnnnnnnnnnnnnnnnnnnnngggcgaggcgatacatggcaggtgaggctaggcggggcggggtgaggggaagcgagacggggcgaggcgaagcggggcgatgtgaaatggggtggggcggggcagggcggggcgaggctaggcgagatcgagcgaggcgaggcggggctaggccrggccttgcggggccaggtggggcaaggcaaggcgtggtgccaggatatggggcgaggcgaggtgaggcagggcgagacggggcgaggttggatgaggcggggtggggcgaggcggggcgaggcgaggtgtggcaggcgaggcgtcgtggggcggtktgagggcaagcgaggcagggcgaggccaggtgaggcggggcgtggcggggcgaggcgtggcaggcagggctgggcgggtcgcggcgtggcactgcgagacggggcgaggctaggcgtgacggggcaaggcggggcgaggcggg

SEQ ID NO: 81033 - DNA, 600 bp, Chicken  19866894374055_2
tacatggcaggtgaggctaggcggggcggggtgaggggaagcgagacggggcgaggcgaagcggggcgatgtgaaatggggtggggcggggcagggcggggcgaggctaggcgagatcgagcgaggcgaggcggggctaggccrggccttgcggggccaggtggggcaaggcaaggcgtggtgccaggatatggggcgaggcgaggtgaggcagggcgagacggggcgaggttggatgaggcggggtggggcgaggcggggcgaggcgaggtgtggcaggcgaggcgtcgtggggcggtktgagggcaagcgaggcagggcgaggccaggtgaggcggggcgtggcggggcgaggcgtggcaggcagggctgggcgggtcgcggcgtggcactgcgagacggggcgaggctaggcgtgacggggcaaggcggggcgaggcggggcaaggcggggtggcgagagtagtggcagggcgtggcagggtgaggcttggcgtggcagggtgaggcgaggcgatgtggggcgaggcaaggcaaggcgaggcaaggcgaggcgggacgaggctcggcgtggtggggtgaggcaaagcgaggcagggc

SEQ ID NO: 81034 - DNA, 600 bp, Chicken  19866894374064_1
tgcctggttttattcagagatgcaaacagtgccgaggagagctgggggaacatctcctagcaaagaaagaacaggagctgtttagttcagcaagaggtttgcaatgctgctccaggaccagttagcttgagctgcagccaggcagggaacagcacagctctgagctcacagtcactaaggcaggttcacattcctcacccagccaggtccatgcctgcaggaaaaggacatgttaggcttggaaagatgccctacaacacacagggcaggggaggttggcttaaactctgccattctggrcctccagcagtgctgcagctcccattgccagcactccccactaaagcctrcccttcgtgcatgcttacagcatagggaacccaatgcacacaccwcactcascattgccagcactcagatgatggtatactgtcgttgcttttaagtactcacctgactttggaagcagctgagagctcagcacrttttaagcttcttcccacttgctgtgcagctggcagcacttctgccctctgagatctgtgcttccccaccaaggccctgcctcagrgatttgcccactgtcactcctatacccag

SEQ ID NO: 81035 - DNA, 600 bp, Chicken  19866894374064_2
catctcctagcaaagaaagaacaggagctgtttagttcagcaagaggtttgcaatgctgctccaggaccagttagcttgagctgcagccaggcagggaacagcacagctctgagctcacagtcactaaggcaggttcacattcctcacccagccaggtccatgcctgcaggaaaaggacatgttaggcttggaaagatgccctacaacacacagggcaggggaggttggcttaaactctgccattctggrcctccagcagtgctgcagctcccattgccagcactccccactaaagcctrcccttcgtgcatgcttacagcatagggaacccaatgcacacaccwcactcascattgccagcactcagatgatggtatactgtcgttgcttttaagtactcacctgactttggaagcagctgagagctcagcacrttttaagcttcttcccacttgctgtgcagctggcagcacttctgccctctgagatctgtgcttccccaccaaggccctgcctcagrgatttgcccactgtcactcctatacccagaatagagctataccactcgaaacccactttcatccctatctaccttagtg

SEQ ID NO: 81036 - DNA, 600 bp, Chicken  19866894374064_3
ggtttgcaatgctgctccaggaccagttagcttgagctgcagccaggcagggaacagcacagctctgagctcacagtcactaaggcaggttcacattcctcacccagccaggtccatgcctgcaggaaaaggacatgttaggcttggaaagatgccctacaacacacagggcaggggaggttggcttaaactctgccattctggrcctccagcagtgctgcagctcccattgccagcactccccactaaagcctrcccttcgtgcatgcttacagcatagggaacccaatgcacacaccwcactcascattgccagcactcagatgatggtatactgtcgttgcttttaagtactcacctgactttggaagcagctgagagctcagcacrttttaagcttcttcccacttgctgtgcagctggcagcacttctgccctctgagatctgtgcttccccaccaaggccctgcctcagrgatttgcccactgtcactcctatacccagaatagagctataccactcgaaacccactttcatccctatctaccttagtgaaaaaagcragcataaggatgatagagaagtcaaacccacagcac

SEQ ID NO: 81037 - DNA, 600 bp, Chicken  19866894374064_4
aatgctgctccaggaccagttagcttgagctgcagccaggcagggaacagcacagctctgagctcacagtcactaaggcaggttcacattcctcacccagccaggtccatgcctgcaggaaaaggacatgttaggcttggaaagatgccctacaacacacagggcaggggaggttggcttaaactctgccattctggrcctccagcagtgctgcagctcccattgccagcactccccactaaagcctrcccttcgtgcatgcttacagcatagggaacccaatgcacacaccwcactcascattgccagcactcagatgatggtatactgtcgttgcttttaagtactcacctgactttggaagcagctgagagctcagcacrttttaagcttcttcccacttgctgtgcagctggcagcacttctgccctctgagatctgtgcttccccaccaaggccctgcctcagrgatttgcccactgtcactcctatacccagaatagagctataccactcgaaacccactttcatccctatctaccttagtgaaaaaagcragcataaggatgatagagaagtcaaacccacagcaccaacaaa

SEQ ID NO: 81038 - DNA, 600 bp, Chicken  19866894374064_5
tcacattcctcacccagccaggtccatgcctgcaggaaaaggacatgttaggcttggaaagatgccctacaacacacagggcaggggaggttggcttaaactctgccattctggrcctccagcagtgctgcagctcccattgccagcactccccactaaagcctrcccttcgtgcatgcttacagcatagggaacccaatgcacacaccwcactcascattgccagcactcagatgatggtatactgtcgttgcttttaagtactcacctgactttggaagcagctgagagctcagcacrttttaagcttcttcccacttgctgtgcagctggcagcacttctgccctctgagatctgtgcttccccaccaaggccctgcctcagrgatttgcccactgtcactcctatacccagaatagagctataccactcgaaacccactttcatccctatctaccttagtgaaaaaagcragcataaggatgatagagaagtcaaacccacagcaccaacaaaccgcatcccacagggagcacatcgggatgctggttgctacattgcacgtggcagaagaatccacagcgaggccgtcagatccg

SEQ ID NO: 81039 - DNA, 600 bp, Chicken  19866894374064_6
gaggttggcttaaactctgccattctggrcctccagcagtgctgcagctcccattgccagcactccccactaaagcctrcccttcgtgcatgcttacagcatagggaacccaatgcacacaccwcactcascattgccagcactcagatgatggtatactgtcgttgcttttaagtactcacctgactttggaagcagctgagagctcagcacrttttaagcttcttcccacttgctgtgcagctggcagcacttctgccctctgagatctgtgcttccccaccaaggccctgcctcagrgatttgcccactgtcactcctatacccagaatagagctataccactcgaaacccactttcatccctatctaccttagtgaaaaaagcragcataaggatgatagagaagtcaaacccacagcaccaacaaaccgcatcccacagggagcacatcgggatgctggttgctacattgcacgtggcagaagaatccacagcgaggccgtcagatccgggctcagcattggaggagagagcagtgcagcgctgcgccgacaacagcactgctgcaaagagcaatgctaccctctggtgctgccg

SEQ ID NO: 81040 - DNA, 600 bp, Chicken  19866894374064_7
catgcttacagcatagggaacccaatgcacacaccwcactcascattgccagcactcagatgatggtatactgtcgttgcttttaagtactcacctgactttggaagcagctgagagctcagcacrttttaagcttcttcccacttgctgtgcagctggcagcacttctgccctctgagatctgtgcttccccaccaaggccctgcctcagrgatttgcccactgtcactcctatacccagaatagagctataccactcgaaacccactttcatccctatctaccttagtgaaaaaagcragcataaggatgatagagaagtcaaacccacagcaccaacaaaccgcatcccacagggagcacatcgggatgctggttgctacattgcacgtggcagaagaatccacagcgaggccgtcagatccgggctcagcattggaggagagagcagtgcagcgctgcgccgacaacagcactgctgcaaagagcaatgctaccctctggtgctgccggggggaacagccgctcygcctgctgctctccaggggggcagcaaagtgggggttactgcaaagtgctgcttccccaaaggtctgcaca

SEQ ID NO: 81041 - DNA, 432 bp, Chicken  19866894374064_8
tcctatacccagaatagagctataccactcgaaacccactttcatccctatctaccttagtgaaaaaagcragcataaggatgatagagaagtcaaacccacagcaccaacaaaccgcatcccacagggagcacatcgggatgctggttgctacattgcacgtggcagaagaatccacagcgaggccgtcagatccgggctcagcattggaggagagagcagtgcagcgctgcgccgacaacagcactgctgcaaagagcaatgctaccctctggtgctgccggggggaacagccgctcygcctgctgctctccaggggggcagcaaagtgggggttactgcaaagtgctgcttccccaaaggtctgcacattgcggctttgttgaaggtaaaatagcagcaccttaggctactgacaaatggatggatgga

SEQ ID NO: 81042 - DNA, 599 bp, Chicken  19866894374074_1
  misc_feature (1)..(135): n is any nucleotide
nnnnnnnnnnnnnnnnnnnnnnnnnnnnnnnnnnnnnnnnnnnnnnnnnnnnnnnnnnnnnnnnnnnnnnnnnnnnnnnnnnnnnnnnnnnnnnnnnnnnnnnnnnnnnnnnnnnnnnnnnnnnnnnnnnnnnnnctcccttccctagcctgcctttgtaggagaggttctccagccctctgattatctttgtggccctcctctgaagccattccagcagctccacatccctcctatactggggctccaggcctgggcacagttctccagctggggcctcacaagagcagagtggagaargggataatcacctcccttgccctgctggccacccytcatctgatgctgcccaaggttctgctggccttctgggctgcaagagcacactgctggctcatgtccagctttttgtccattgggaccctcaagttcttctctgcagggctgctctcaatgagttctcctctcagtctgttctcatatctgggattgcttcgacccaagtgcagcaccttgcgcttggatttaaacatggamggtgggcagtctgacttgacatgctgaagtgatggctggataattaagkacttacgtaaaga

SEQ ID NO: 81043 - DNA, 599 bp, Chicken  19866894374074_2
  misc_feature (1)..(100): n is any nucleotide
nnnnnnnnnnnnnnnnnnnnnnnnnnnnnnnnnnnnnnnnnnnnnnnnnnnnnnnnnnnnnnnnnnnnnnnnnnnnnnnnnnnnnnnnnnnnnnnnnnnnctcccttccctagcctgcctttgtaggagaggttctccagccctctgattatctttgtggccctcctctgaagccattccagcagctccacatccctcctatactggggctccaggcctgggcacagttctccagctggggcctcacaagagcagagtggagaargggataatcacctcccttgccctgctggccacccytcatctgatgctgcccaaggttctgctggccttctgggctgcaagagcacactgctggctcatgtccagctttttgtccattgggaccctcaagttcttctctgcagggctgctctcaatgagttctcctctcagtctgttctcatatctgggattgcttcgacccaagtgcagcaccttgcgcttggatttaaacatggamggtgggcagtctgacttgacatgctgaagtgatggctggataattaagkacttacgtaaagacaacaaaatttactagtagtaaaaggcaygtgtgt

SEQ ID NO: 81044 - DNA, 570 bp, Chicken  19866894374074_3
actggggctccaggcctgggcacagttctccagctggggcctcacaagagcagagtggagaargggataatcacctcccttgccctgctggccacccytcatctgatgctgcccaaggttctgctggccttctgggctgcaagagcacactgctggctcatgtccagctttttgtccattgggaccctcaagttcttctctgcagggctgctctcaatgagttctcctctcagtctgttctcatatctgggattgcttcgacccaagtgcagcaccttgcgcttggatttaaacatggamggtgggcagtctgacttgacatgctgaagtgatggctggataattaagkacttacgtaaagacaacaaaatttactagtagtaaaaggcaygtgtgttaaaatcatctttaattgtgaagttcatgaagtggtgggacttcaatattgctgtttcttgaaactgaaagtactttatggataacttttataaaacagcaacaaagaaacaactgaaccattccttttcagctggacccatttcgaatcactttcataacacgtaagaagtg

SEQ ID NO: 81045 - DNA, 521 bp, Chicken  19866894374074_4
gcagagtggagaargggataatcacctcccttgccctgctggccacccytcatctgatgctgcccaaggttctgctggccttctgggctgcaagagcacactgctggctcatgtccagctttttgtccattgggaccctcaagttcttctctgcagggctgctctcaatgagttctcctctcagtctgttctcatatctgggattgcttcgacccaagtgcagcaccttgcgcttggatttaaacatggamggtgggcagtctgacttgacatgctgaagtgatggctggataattaagkacttacgtaaagacaacaaaatttactagtagtaaaaggcaygtgtgttaaaatcatctttaattgtgaagttcatgaagtggtgggacttcaatattgctgtttcttgaaactgaaagtactttatggataacttttataaaacagcaacaaagaaacaactgaaccattccttttcagctggacccatttcgaatcactttcataacacgtaagaagtg

SEQ ID NO: 81046 - DNA, 479 bp, Chicken  19866894374074_5
ccacccytcatctgatgctgcccaaggttctgctggccttctgggctgcaagagcacactgctggctcatgtccagctttttgtccattgggaccctcaagttcttctctgcagggctgctctcaatgagttctcctctcagtctgttctcatatctgggattgcttcgacccaagtgcagcaccttgcgcttggatttaaacatggamggtgggcagtctgacttgacatgctgaagtgatggctggataattaagkacttacgtaaagacaacaaaatttactagtagtaaaaggcaygtgtgttaaaatcatctttaattgtgaagttcatgaagtggtgggacttcaatattgctgtttcttgaaactgaaagtactttatggataacttttataaaacagcaacaaagaaacaactgaaccattccttttcagctggacccatttcgaatcactttcataacacgtaagaagtg

SEQ ID NO: 81047 - DNA, 600 bp, Chicken  19866894374092_1
aggagaccgttgcggtcttcagtacttaaaaggagcttataatcaggagggagactgacttcttacatgggcagataggacaagggggaatgtttttaaactaaaaaaaggaagatgtagatcagatgttatgaggaaatttgtcactgagaggatggtgagactgcctggagaggtaggggttgcctcatccctggtggtgttcaaggccaggctgcatggggccctgggcagtcatccaaccaaagccattctgtgacacttacttagctttatgtcggtatcctgagctcatagcayatagatgcttcaagcacagcgtcctgctgctgtaagatttttttttgctgtttttattttttttataagaraaattctgtacaatatgtkcaagagtaacaaattggaaaataatgatgaaygttaatgccttttctgaaagaatgtrttttagatcatggtcctgaacttcagctccatcttattaataatatgttcttcattagttaaaaaaacaaaaacaacaacaaaaacttcatacctattatcactggtatgtagagagaattttaagaatgttcatttgttcagaaagaattg

SEQ ID NO: 81048 - DNA, 600 bp, Chicken  19866894374092_2
ataatcaggagggagactgacttcttacatgggcagataggacaagggggaatgtttttaaactaaaaaaaggaagatgtagatcagatgttatgaggaaatttgtcactgagaggatggtgagactgcctggagaggtaggggttgcctcatccctggtggtgttcaaggccaggctgcatggggccctgggcagtcatccaaccaaagccattctgtgacacttacttagctttatgtcggtatcctgagctcatagcayatagatgcttcaagcacagcgtcctgctgctgtaagayttttttttgctgtttttattttttttataagaraaattctgtacaatatgtkcaagagtaacaaattggaaaataatgatgaaygttaatgccttttctgaaagaatgtrttttagatcatggtcctgaacttcagctccatcttattaataatatgttcttcattagttaaaaaaacaaaaacaacaacaaaaacttcatacctattatcactggtatgtagagagaattttaagaatgttcatttgttcagaaagaattgtgatttttggttgctgaaggtatttattagcaaattct

SEQ ID NO: 81049 - DNA, 600 bp, Chicken  19866894374092_3
acttcttacatgggcagataggacaagggggaatgtttttaaactaaaaaaaggaagatgtagatcagatgttatgaggaaatttgtcactgagaggatggtgagactgcctggagaggtaggggttgcctcatccctggtggtgttcaaggccaggctgcatggggccctgggcagtcatccaaccaaagccattctgtgacacttacttagctttatgtcggtatcctgagctcatagcayatagatgcttcaagcacagcgtcctgctgctgtaagatttttttttgctgtttttaytttttttataagaraaattctgtacaatatgtkcaagagtaacaaattggaaaataatgatgaaygttaatgccttttctgaaagaatgtrttttagatcatggtcctgaacttcagctccatcttattaataatatgttcttcattagttaaaaaaacaaaaacaacaacaaaaacttcatacctattatcactggtatgtagagagaattttaagaatgttcatttgttcagaaagaattgtgatttttggttgctgaaggtatttattagcaaattcttctagtctacacagtaaca

SEQ ID NO: 81050 - DNA, 600 bp, Chicken  19866894374092_4
cagataggacaagggggaatgtttttaaactaaaaaaaggaagatgtagatcagatgttatgaggaaatttgtcactgagaggatggtgagactgcctggagaggtaggggttgcctcatccctggtggtgttcaaggccaggctgcatggggccctgggcagtcatccaaccaaagccattctgtgacacttacttagctttatgtcggtatcctgagctcatagcayatagatgcttcaagcacagcgtcctgctgctgtaagatttttttttgctgtttttattttttttataagaraaattctgtacaatatgtkcaagagtaacaaattggaaaataatgatgaaygttaatgccttttctgaaagaatgtrttttagatcatggtcctgaacttcagctccatcttattaataatatgttcttcattagttaaaaaaacaaaaacaacaacaaaaacttcatacctattatcactggtatgtagagagaattttaagaatgttcatttgttcagaaagaattgtgatttttggttgctgaaggtatttattagcaaattcttctagtctacacagtaacaatcagttacattaa

SEQ ID NO: 81051 - DNA, 600 bp, Chicken  19866894374092_5
tgtttttaaactaaaaaaaggaagatgtagatcagatgttatgaggaaatttgtcactgagaggatggtgagactgcctggagaggtaggggttgcctcatccctggtggtgttcaaggccaggctgcatggggccctgggcagtcatccaaccaaagccattctgtgacacttacttagctttatgtcggtatcctgagctcatagcayatagatgcttcaagcacagcgtcctgctgctgtaagatttttttttgctgtttttattttttttataagaraaattctgtacaatatgtkcaagagtaacaaattggaaaataatgatgaaygttaatgccttttctgaaagaatgtrttttagatcatggtcctgaacttcagctccatcttattaataatatgttcttcattagttaaaaaaacaaaaacaacaacaaaaacttcatacctattatcactggtatgtagagagaattttaagaatgttcatttgttcagaaagaattgtgatttttggttgctgaaggtatttattagcaaattcttctagtctacacagtaacaatcagttacattaaaagttgtattaaaagacgt

SEQ ID NO: 81052 - DNA, 600 bp, Chicken  19866894374092_6
cagatgttatgaggaaatttgtcactgagaggatggtgagactgcctggagaggtaggggttgcctcatccctggtggtgttcaaggccaggctgcatggggccctgggcagtcatccaaccaaagccattctgtgacacttacttagctttatgtcggtatcctgagctcatagcayatagatgcttcaagcacagcgtcctgctgctgtaagatttttttttgctgtttttattttttttataagaraaattctgtacaatatgtkcaagagtaacaaattggaaaataatgatgaaygttaatgccttttctgaaagaatgtrttttagatcatggtcctgaacttcagctccatcttattaataatatgttcttcattagttaaaaaaacaaaaacaacaacaaaaacttcatacctattatcactggtatgtagagagaattttaagaatgttcatttgttcagaaagaattgtgatttttggttgctgaaggtatttattagcaaattcttctagtctacacagtaacaatcagttacattaaaagttgtattaaaagacgttccataagttctgaaatttctccaagtaaaaa

SEQ ID NO: 81053 - DNA, 600 bp, Chicken  19866894374092_7
gagaggatggtgagactgcctggagaggtaggggttgcctcatccctggtggtgttcaaggccaggctgcatggggccctgggcagtcatccaaccaaagccattctgtgacacttacttagctttatgtcggtatcctgagctcatagcayatagatgcttcaagcacagcgtcctgctgctgtaagatttttttttgctgtttttattttttttataagaraaattctgtacaatatgtkcaagagtaacaaattggaaaataatgatgaaygttaatgccttttctgaaagaatgtrttttagatcatggtcctgaacttcagctccatcttattaataatatgttcttcattagttaaaaaaacaaaaacaacaacaaaaacttcatacctattatcactggtatgtagagagaattttaagaatgttcatttgttcagaaagaattgtgatttttggttgctgaaggtatttattagcaaattcttctagtctacacagtaacaatcagttacattaaaagttgtattaaaagacgttccataagttctgaaatttctccaagtaaaaagcctttgtgttatttttcataacgtt

SEQ ID NO: 81054 - DNA, 600 bp, Chicken  19866894374094_1
cccacatcaccccagcagtaggagcactacgtcaccaaaggagagggaataaggaaagcccttggagcaggtgacatctgctccaggaagagcagagggcaccgggcatgggcagcaatgggaagggctcactggaggtatgtgggatctccacatccatcccacggggccgcttgcacctggggctgattgtggaggctccagggagcagtgtgacccgaggctgtgccactgggcagctgggcaggaggctcaagcagggcggggaggatggcagtccctgctagaatgtgagaaatygctctgaggagcggcactcagggaagagaggggcaagttaaaggctgcaataatttcaaaaatgactgtgtccagatatgtcttttttttctgggaatttgggtctttgaggagacctcaaagtagaaacactgccagctccaaaaagagtaacaaagccaagaacttaagaggctcctcttttgcaaacacagctaatagcgaggaagtggagagcagaaragtgagctgctaagcttccactgacatttgactgccctgtgcttcgttcataccagtgagcagaagtgtttaaaaatg

SEQ ID NO: 81055 - DNA, 600 bp, Chicken  19866894374094_2
gctgtgccactgggcagctgggcaggaggctcaagcagggcggggaggatggcagtccctgctagaatgtgagaaatygctctgaggagcggcactcagggaagagaggggcaagttaaaggctgcaataatttcaaaaatgactgtgtccagatatgtcttttttttctgggaatttgggtctttgaggagacctcaaagtagaaacactgccagctccaaaaagagtaacaaagccaagaacttaagaggctcctcttttgcaaacacagctaatagcgaggaagtggagagcagaaragtgagctgctaagcttccactgacatttgactgccctgtgcttcgttcataccagtgagcagaagtgtttaaaaatgaatgtgtgacattctacaacccgcaccttgaaaaaatagcacacaaatccccagcactagcaaggaactttgcttacacggcttccgcagataagaaaataaaacaaaataaaagggagaaaaacagattactgtaagtaggagcttcggttttctctttttcctcttaaatgaaagggaaaaaaaaaatcctaacaactaaatcattttgcaaagaggttt

SEQ ID NO: 81056 - DNA, 599 bp, Chicken  19866894374096_1
  misc_feature (1)..(30): n is any nucleotide
nnnnnnnnnnnnnnnnnnnnnnnnnnnnnncctgcagcctttgcagcactttgtggccggtgcctcagcacaccatctcatccctgcctgccacaggcacatatcagaccaggcagctgaacacagacaacctgccactgctacatgccactcagaagtggtgaacacaccatacaccatttacttcatacagtttgggtatgcttgcaccaagcatttccaaggcacaggagtcatccccccaagggtcagaagtcacccctgttaatcccaagattccactgctgtctcaagaacaasaaaacttgctgggaaaatctctycccttcagatgctggtccccacatagtaacagaataacgtgttgctacaactcatattcagctagaactgggctatttagaaccttgcactctttcacagagaatcagacyacgtcaccagtaggtcaccacctgaaacccagttcaggtcacacaggagtaaccttaatttacatttgagcagtactctataatctaaaaggcattttctgtgctttaagaagtattattgcctccatttctcatatgaagaacaggaagtggagtattaaagta

SEQ ID NO: 81057 - DNA, 599 bp, Chicken  19866894374096_2
  misc_feature (1)..(7): n is any nucleotide
nnnnnnncctgcagcctttgcagcactttgtggccggtgcctcagcacaccatctcatccctgcctgccacaggcacatatcagaccaggcagctgaacacagacaacctgccactgctacatgccactcagaagtggtgaacacaccatacaccatttacttcatacagtttgggtatgcttgcaccaagcatttccaaggcacaggagtcatccccccaagggtcagaagtcacccctgttaatcccaagattccactgctgtctcaagaacaasaaaacttgctgggaaaatctctycccttcagatgctggtccccacatagtaacagaataacgtgttgctacaactcatattcagctagaactgggctatttagaaccttgcactctttcacagagaatcagacyacgtcaccagtaggtcaccacctgaaacccagttcaggtcacacaggagtaaccttaatttacatttgagcagtactctataatctaaaaggcattttctgtgctttaagaagtattattgcctccatttctcatatgaagaacaggaagtggagtattaaagtagcttgcctgatgtcactcagtaa

SEQ ID NO: 81058 - DNA, 600 bp, Chicken  19866894374096_3
ccactgctacatgccactcagaagtggtgaacacaccatacaccatttacttcatacagtttgggtatgcttgcaccaagcatttccaaggcacaggagtcatccccccaagggtcagaagtcacccctgttaatcccaagattccactgctgtctcaagaacaasaaaacttgctgggaaaatctctycccttcagatgctggtccccacatagtaacagaataacgtgttgctacaactcatattcagctagaactgggctatttagaaccttgcactctttcacagagaatcagacyacgtcaccagtaggtcaccacctgaaacccagttcaggtcacacaggagtaaccttaatttacatttgagcagtactctataatctaaaaggcattttctgtgctttaagaagtattattgcctccatttctcatatgaagaacaggaagtggagtattaaagtagcttgcctgatgtcactcagtaaatctracctgtttttacccattgttacctacaacgagcagcacaggtagccaggaattcacagcattatcataaagcaacaaagaatttagtattatcaggagaatttgact

SEQ ID NO: 81059 - DNA, 478 bp, Chicken  19866894374096_4
tcagatgctggtccccacatagtaacagaataacgtgttgctacaactcatattcagctagaactgggctatttagaaccttgcactctttcacagagaatcagacyacgtcaccagtaggtcaccacctgaaacccagttcaggtcacacaggagtaaccttaatttacatttgagcagtactctataatctaaaaggcattttctgtgctttaagaagtattattgcctccatttctcatatgaagaacaggaagtggagtattaaagtagcttgcctgatgtcactcagtaaatctracctgtttttacccattgttacctacaacgagcagcacaggtagccaggaattcacagcattatcataaagcaacaaagaatttagtattatcaggagaatttgactctcacactactaacagatacaaaaaagtcacaaaaatccaccctataaagctgaccacaacctagtaaaca

SEQ ID NO: 81060 - DNA, 600 bp, Chicken  19866894374097_1
agaatagtttttctctaggacatcacagactgttcccgcaaacaacacagtataaatctcttcccctctgtactgtgctgcctaccacaaagagcactgctttgcttagcaaaagcccccagtcatggcctcagcctcctctgagctctacaagagcaagtccagtgattagagcagtgggctgaggacgcttcaagccttatgcttgtcatcctcacccactgaaaccttccttttatactcatcagtgtttcctgtaagattttagacactaaaacaatcccattccttcccctcctwaccamtctccaaggccattttgaaaaaaaagtgtttcaaaataactgcctcacctctattaagtcttcaagttaattggaggaattrtatttggctgaaaatctggacttgcttattagtttaagtaaccagtaattataactattccattcaaatgtcttgaaaacatttaccactggtattgcttttgtaagcacggtgattaaaactgtagtgtgcaaacagtattgcacagcgtgaggggaccaacagagagtcctcctggtaacatggtctggacaaacaacagctgatatgatg

SEQ ID NO: 81061 - DNA, 600 bp, Chicken  19866894374097_2
agtttttctctaggacatcacagactgttcccgcaaacaacacagtataaatctcttcccctctgtactgtgctgcctaccacaaagagcactgctttgcttagcaaaagcccccagtcatggcctcagcctcctctgagctctacaagagcaagtccagtgattagagcagtgggctgaggacgcttcaagccttatgcttgtcatcctcacccactgaaaccttccttttatactcatcagtgtttcctgtaagattttagacactaaaacaatcccattccttcccctcctwaccamtctccaaggccattttgaaaaaaaagtgtttcaaaataactgcctcacctctattaagtcttcaagttaattggaggaattrtatttggctgaaaatctggacttgcttattagtttaagtaaccagtaattataactattccattcaaatgtcttgaaaacatttaccactggtattgcttttgtaagcacggtgattaaaactgtagtgtgcaaacagtattgcacagcgtgaggggaccaacagagagtcctcctggtaacatggtctggacaaacaacagctgatatgatgagaac

SEQ ID NO: 81062 - DNA, 570 bp, Chicken  19866894374097_3
caaagagcactgctttgcttagcaaaagcccccagtcatggcctcagcctcctctgagctctacaagagcaagtccagtgattagagcagtgggctgaggacgcttcaagccttatgcttgtcatcctcacccactgaaaccttccttttatactcatcagtgtttcctgtaagattttagacactaaaacaatcccattccttcccctcctwaccamtctccaaggccattttgaaaaaaaagtgtttcaaaataactgcctcacctctattaagtcttcaagttaattggaggaattrtatttggctgaaaatctggacttgcttattagtttaagtaaccagtaattataactattccattcaaatgtcttgaaaacatttaccactggtattgcttttgtaagcacggtgattaaaactgtagtgtgcaaacagtattgcacagcgtgaggggaccaacagagagtcctcctggtaacatggtctggacaaacaacagctgatatgatgagaacatgagtgcagccatgcatgtgaacagaacagccaatatgaactgttctgggg

SEQ ID NO: 81063 - DNA, 600 bp, Chicken  19866894374098_1
tctggatggactcaagagtctatagctgaaccgtaatgtctatctttttttctgctaaaattgaagggcctgttctaataagaaccaattagaaaaagaagtattctttggcaacggttgttaaaatcacttttgcatgtcatgtaccaacagggacacaattccactgagtggtcctcccatctatttatattctgtgcttccacacaaaatgtctctaatttcactattacaggcaatgactatcctatggaattttattccccagcagcaccagacaaagaaaaccttacctaaacraagatttgcaaaaatgactcttcagtacaaacactgtcatgccatacttcatatttagaagttgatagagtataaatgatttttgctctttggagaattctacaatggagttactgcttgacaaagcctgttgcaacagcatctgttctctagtgagcatatcttagagagccaatgacagctttctcattagtgctttgtctcaagagaaacatgtaactaaattcttgaaacctaaaatttttgccatcgtgaaatgtaggacagaattctccattcaaaagaaaatgcagttctttc

SEQ ID NO: 81064 - DNA, 600 bp, Chicken  19866894374099_1
cctcatttctgccttatttgacattgatattttacacgtggggttgatgtttgggaaagctgcagtgggacatttccagtttgcaggtggcgtcgatgtatgcgtctgtaaggctcatggtgctgcttcccacgcagctcaccttgcaatctgtcacagccgtgcagccaccaccgcccgtgctgtagctgcacacacgcggagcccttccttgccttgcagcagccgcccttcaggcgctctgtgtgcagagatgtgggctttgtggaggcagacccacatcctgccctgctgtgcacrcagcacccggcctgcaggagacaaacatggccgttgtcgggtggctsctggtgctgcagcgggggaaggatgcyctgctaagctccaaaggagcaacaagggaaaggtgtgtagcaggaccactgccagcactcctggttcacattccctctgaaacattcaggggcaccagagaaggatcccaccctcctgcagaagccttggagctcctcctgatcagcagatggctgcacacagcctggcgggcaaacggcccgatgctgctcagcatctcccagtaagctgaagagctttcgttgt

SEQ ID NO: 81065 - DNA, 600 bp, Chicken  19866894374099_2
tgtttgggaaagctgcagtgggacatttccagtttgcaggtggcgtcgatgtatgcgtctgtaaggctcatggtgctgcttcccacgcagctcaccttgcaatctgtcacagccgtgcagccaccaccgcccgtgctgtagctgcacacacgcggagcccttccttgccttgcagcagccgcccttcaggcgctctgtgtgcagagatgtgggctttgtggaggcagacccacatcctgccctgctgtgcacrcagcacccggcctgcaggagacaaacatggccgttgtcgggtggctsctggtgctgcagcgggggaaggatgcyctgctaagctccaaaggagcaacaagggaaaggtgtgtagcaggaccactgccagcactcctggttcacattccctctgaaacattcaggggcaccagagaaggatcccaccctcctgcagaagccttggagctcctcctgatcagcagatggctgcacacagcctggcgggcaaacggcccgatgctgctcagcatctcccagtaagctgaagagctttcgttgttcccagtaacccacccagtcactgctcctgtgccgagtgggtagaaa

SEQ ID NO: 81066 - DNA, 600 bp, Chicken  19866894374099_3
tccagtttgcaggtggcgtcgatgtatgcgtctgtaaggctcatggtgctgcttcccacgcagctcaccttgcaatctgtcacagccgtgcagccaccaccgcccgtgctgtagctgcacacacgcggagcccttccttgccttgcagcagccgcccttcaggcgctctgtgtgcagagatgtgggctttgtggaggcagacccacatcctgccctgctgtgcacrcagcacccggcctgcaggagacaaacatggccgttgtcgggtggctsctggtgctgcagcgggggaaggatgcyctgctaagctccaaaggagcaacaagggaaaggtgtgtagcaggaccactgccagcactcctggttcacattccctctgaaacattcaggggcaccagagaaggatcccaccctcctgcagaagccttggagctcctcctgatcagcagatggctgcacacagcctggcgggcaaacggcccgatgctgctcagcatctcccagtaagctgaagagctttcgttgttcccagtaacccacccagtcactgctcctgtgccgagtgggtagaaacgacacctgctttggcattgtaactcc

SEQ ID NO: 81067 - DNA, 600 bp, Chicken  19866894374106_1
catctgagtgaatttaaccttgtaattccagagagaagcctgaagatgcccgaagttcagaacaccccgagacaataaagtggttcagtggggaagagcagcatgtatagagagactgaattcatccctcctctctgaaccaccttggggctgtcattcacattcaaacaaactcttcttcctcattaaaaaatgaacggattcatacatggctcagcgtgccactgtctagagaagaccatgagcacatgcagtacctgtgaacatgtatacaagcctaatgaaatcatttaatcaacrggatcgcaaacaggcttaaaagtttgtatgcgtcacctgattaggactaagggaatgggcccttgaggaaaccagatggggatatgattagttttattaagtgttgatccagctgctgtatttatattccccttatttatatgagcaatatttgtccgagcatctgaatacaaaataggaaacttcatttgctgcaggcaccgtcgctacctaagtttgattaagatggaagtaaaaattgagttgtaacaataatggagcgctggctggtgggaccagacaatatcacctgttcgctgg

SEQ ID NO: 81068 - DNA, 600 bp, Chicken  19866894374111_1
tgtgcacctgcacaaactggcatagtgccacggatcagagggcagagcgaagagccttgcactttgcatgtgtggcgtgaaaggagaactccatgctgctggatgagcccctggttctgaaggctttgctgggcccctgctttgcagaggggcttccttcagagccctctcactcacgctgcagccctgctctgtcccactgcctgctggagagtggtgtttcaacatggagcttttaggtggtgctctcttatagtctgtgttggtgctggatctccagaaaaacactccacgcgaagyagctggactccaagaacctaaggagatggatggataaaagctgttgctctagggaagagcttaagtgggctgagccaggttgtgtttgtgtctctgcttcctccatgaaggagaagagctgaggtgtaggttagaactgtgaagggataacagtctggaggttatgaaatcattctcctgaccccttcctctgtgttggtgacgaagaagggctgggagagagctgatcactgaatygggtctgtttttggaaaagtctttaggaagtctccaggagctctcagtgatccaattgtccac

SEQ ID NO: 81069 - DNA, 600 bp, Chicken  19866894374111_2
aggtggtgctctcttatagtctgtgttggtgctggatctccagaaaaacactccacgcgaagyagctggactccaagaacctaaggagatggatggataaaagctgttgctctagggaagagcttaagtgggctgagccaggttgtgtttgtgtctctgcttcctccatgaaggagaagagctgaggtgtaggttagaactgtgaagggataacagtctggaggttatgaaatcattctcctgaccccttcctctgtgttggtgacgaagaagggctgggagagagctgatcactgaatygggtctgtttttggaaaagtctttaggaagtctccaggagctctcagtgatccaattgtccaccagcttattcccacctctctccttttggtgtctgtggagcttggttgattcatgccagctgagaacttcacctaaatggaagcacccaggtgatagagggaggttgataaagcccataggctcgcaagtgtgtgatgtggacctcagtggcctaaacgttacccagagtgctaatttgcttccagaatcagcacatcttttagctgtgtgcctgtgctgagatgcagtcaggtagca

SEQ ID NO: 81070 - DNA, 599 bp, Chicken  19866894374116_1
  misc_feature (1)..(7): n is any nucleotide
nnnnnnncccaatgctgatttctgattagcccaattgcgcgcaataaacccatccaactagaaagaacaacattcaagaatattgtgttaaaaagcaaagaatagaagcaggtgtcacatgctgctgtactgcgaggttccatgaccatcatgcaatccagctatgcttaactataaggaagcctgttagcagatccttgtctcactcttcccacccccaccccctgctgcattctagattctggaagactttaaacacgttcaattctcgttatttaaacaaacaaaaaagcacaaacraataaacaaatgctacaactgacattttaaaaggcacatctgaaatycaccaagcattgctctggtgggtgcactgtgcacacctgccaacaccagcacacctccaatgcacgagcacggggcaatgcccacccggggacagtcagcaccacagcccccacaaggacgtatttcacattgctacaaagcaacacacgtaacacaataaacttcagctcctcctgcagagtataattcccatgcaagatagattctaaactccaacgcacgtcaatgggatcacagcaacccacactacc

SEQ ID NO: 81071 - DNA, 600 bp, Chicken  19866894374116_2
acccatccaactagaaagaacaacattcaagaatattgtgttaaaaagcaaagaatagaagcaggtgtcacatgctgctgtactgcgaggttccatgaccatcatgcaatccagctatgcttaactataaggaagcctgttagcagatccttgtctcactcttcccacccccaccccctgctgcattctagattctggaagactttaaacacgttcaattctcgttatttaaacaaacaaaaaagcacaaacraataaacaaatgctacaactgacattttaaaaggcacatctgaaatycaccaagcattgctctggtgggtgcactgtgcacacctgccaacaccagcacacctccaatgcacgagcacggggcaatgcccacccggggacagtcagcaccacagcccccacaaggacgtatttcacattgctacaaagcaacacacgtaacacaataaacttcagctcctcctgcagagtataattcccatgcaagatagattctaaactccaacgcacgtcaatgggatcacagcaacccacactacccccaaagtatttccaaactcacgtcaacataccaaatccgttacgcca

SEQ ID NO: 81072 - DNA, 600 bp, Chicken  19866894374118_1
tctgtctacaactcacaccagctcaggttggatattaggaaaaaaatattctctgcaagtgtggtgatgcagtggcacagctgctcagggaggtggggcagtccccatcctggaggtgttcaggtgccgtagagatgtggcactgagggatgtggtcagtgggcatggtggggtgggttggggatcagggagcccttttccaacctgaatgattctgtcattctgtgactgtgaaatcaaatcgcagagccagaagcagttcttcctcatcagcccatgatgtgttgggttgagttgctragggaacggtataaatgtctttggaagtaaaagttcttttgtttaaggggcatgattttttgccagtgacttcaygtctgcccttctcaggacacgttgatgccaacaagcaaacstccacatttgtggtatttgtaattgttcttttcaaagcattaactatattgcttcagtcctattttcttcacactgccataaaccagcagttcattgtacactgcattgaacacagagttcagatgtctgcaataatgtgaaattgcttagcagtcagattaccttcagagtgaataaaaaccc

SEQ ID NO: 81073 - DNA, 600 bp, Chicken  19866894374118_2
cacagctgctcagggaggtggggcagtccccatcctggaggtgttcaggtgccgtagagatgtggcactgagggatgtggtcagtgggcatggtggggtgggttggggatcagggagcccttttccaacctgaatgattctgtcattctgtgactgtgaaatcaaatcgcagagccagaagcagttcttcctcatcagcccatgatgtgttgggttgagttgctragggaacggtataaatgtctttggaagtaaaagttcttttgtttaaggggcatgattttttgccagtgacttcaygtctgcccttctcaggacacgttgatgccaacaagcaaacstccacatttgtggtatttgtaattgttcttttcaaagcattaactatattgcttcagtcctattttcttcacactgccataaaccagcagttcattgtacactgcattgaacacagagttcagatgtctgcaataatgtgaaattgcttagcagtcagattaccttcagagtgaataaaaacccagttttcttttatggctcttccaaagattgctcttctcttgcagctgttgatgagattcgcccttccttgctctg

SEQ ID NO: 81074 - DNA, 600 bp, Chicken  19866894374118_3
tgttcaggtgccgtagagatgtggcactgagggatgtggtcagtgggcatggtggggtgggttggggatcagggagcccttttccaacctgaatgattctgtcattctgtgactgtgaaatcaaatcgcagagccagaagcagttcttcctcatcagcccatgatgtgttgggttgagttgctragggaacggtataaatgtctttggaagtaaaagttcttttgtttaaggggcatgattttttgccagtgacttcaygtctgcccttctcaggacacgttgatgccaacaagcaaacstccacatttgtggtatttgtaattgttcttttcaaagcattaactatattgcttcagtcctattttcttcacactgccataaaccagcagttcattgtacactgcattgaacacagagttcagatgtctgcaataatgtgaaattgcttagcagtcagattaccttcagagtgaataaaaacccagttttcttttatggctcttccaaagattgctcttctcttgcagctgttgatgagattcgcccttccttgctctgtccttaaccatgcgtgcaaaagccttatgcatcactttgtt

SEQ ID NO: 81075 - DNA, 600 bp, Chicken  19866894374129_1
gtaatttgttgcacaatatgtaacaaaactgaagaaatgtttaataaatattgtacttattggaagtaatatcaaactgtatggtgataaatattgtcttaatttgtattggctaagggggaaatcaggcttgcattgtgcacaaacatatctttgtgcagccatggctctcagaccctgtagtagagcagagaccttccctgcaaccaccatagtgactgtgccccaaaggcctgagctgtcgcggtgctgaaggcacacacactgtaccaggaacgccccggtgttggtggaggcgtygtgcactctgaatgtactgcagttccctaacttagtctcagaacttaatttatttctcaaggactccacgtagggcatctgtctgctttgtgtgaggggagaggaacagtgtttccctaacgtgagtgacttcagcgtaaccttgaggtggtataactttctaccagtatattatgtcttttctatatactgttaattccatcctcttttaattaatactcttcttcacgcaacggcttagtttctcttctgttatgtgtagaggcaccagaaggacgcagtggggacagggcagcccca

SEQ ID NO: 81076 - DNA, 600 bp, Chicken  19866894374136_1
tggaataggtgcagagttacagtctctgcttcttgcagtttttaaatgaatcttaacccccctactatctcacagactatttaagaatgaggtacttgacatttctcagctggccatggggagccctcattggtaccagcagagccactggggatctactggtggcttggggaactgctcacaccagatcctttcccagaagggtcgtattctattcctgtaagcatggcctcctgcaggtttggagaggcattggcacaggttgcccaaggaggtggtggagtcaccatccctggaagygttcaagaaaagggtgcatgtggcactgagggacgtggttagtgggcatggtggggatgggttgatagttggactgggtgatcttagtggtcttttccaaccttaatgattctatctttctatgattccactcttagaaacatcagctttatacgtagatctttatccactataggagataaagatccgtaacatgaatctccaccagggtctgtgatattgggacaagaagcaggcaatctcattgtatcagtgtgaggcagcatatggacacattttcttcgcgagggagtcatttgc

SEQ ID NO: 81077 - DNA, 600 bp, Chicken  19866894374136_2
ttctggtgcagttgagaagtagaagtctatccatatgtatgacactggagtcagctccaacaagatctctgcataacataccatgaggctgacctctccctcacctcctgtactgcattctaggcaaattcctatgggtatcctccatgtaaatacagaaaaccggagacatggaaccactgtgacattttctctttctcctgtgtcattcctcacttcccagctgacataaatgtggaagcaggaagccaagctagagccatcagaaccgtggaaaacatttggaagcgtgagttttgrtgtagtatttaaagttgttcaaggtacatttgcaggcaggtagacagggtagtctactatgattagattggtagatttcctatgtgacaggtaatgtaaaactatctctgaagayggtgtttcatggggatgcagcataattggaagatactattttggggaacttagtcttgactatgttctccttagagccatataaactaacagcactcyctgtggtctctactgctgttaggatgcagctattttttctgcctgagcttttcagatccatgtgccaaagcagtgtgaatgtggtgc

SEQ ID NO: 81078 - DNA, 600 bp, Chicken  19866894374136_3
cattctaggcaaattcctatgggtatcctccatgtaaatacagaaaaccggagacatggaaccactgtgacattttctctttctcctgtgtcattcctcacttcccagctgacataaatgtggaagcaggaagccaagctagagccatcagaaccgtggaaaacatttggaagcgtgagttttgrtgtagtatttaaagttgttcaaggtacatttgcaggcaggtagacagggtagtctactatgattagattggtagatttcctatgtgacaggtaatgtaaaactatctctgaagayggtgtttcatggggatgcagcataattggaagatactattttggggaacttagtcttgactatgttctccttagagccatataaactaacagcactcyctgtggtctctactgctgttaggatgcagctattttttctgcctgagcttttcagatccatgtgccaaagcagtgtgaatgtggtgcagttgtatttttatagtatgagtctgaagagatgtgctatttgcctcagaatgcaatatgaggacatggggaaaacggaagacccagagctgctacacaggtggctgggatagtg

SEQ ID NO: 81079 - DNA, 600 bp, Chicken  19866894374136_4
cacttcccagctgacataaatgtggaagcaggaagccaagctagagccatcagaaccgtggaaaacatttggaagcgtgagttttgrtgtagtatttaaagttgttcaaggtacatttgcaggcaggtagacagggtagtctactatgattagattggtagatttcctatgtgacaggtaatgtaaaactatctctgaagayggtgtttcatggggatgcagcataattggaagatactattttggggaacttagtcttgactatgttctccttagagccatataaactaacagcactcyctgtggtctctactgctgttaggatgcagctattttttctgcctgagcttttcagatccatgtgccaaagcagtgtgaatgtggtgcagttgtatttttatagtatgagtctgaagagatgtgctatttgcctcagaatgcaatatgaggacatggggaaaacggaagacccagagctgctacacaggtggctgggatagtgttggatgaccagctgggtggagggacacaaacctccatattgcactgggtcctgaaagaggttaattccctaagctcctgttggaatttgcttacaag

SEQ ID NO: 81080 - DNA, 599 bp, Chicken  19866894374147_1
  misc_feature (1)..(164): n is any nucleotide
nnnnnnnnnnnnnnnnnnnnnnnnnnnnnnnnnnnnnnnnnnnnnnnnnnnnnnnnnnnnnnnnnnnnnnnnnnnnnnnnnnnnnnnnnnnnnnnnnnnnnnnnnnnnnnnnnnnnnnnnnnnnnnnnnnnnnnnnnnnnnnnnnnnnnnnnnnnnnnnnnnnnttaacgacgcactgattctatggtttctctctctgtgtctcacagatggacgttgagagcatctattcggagccgagtgagttcagtgtccgcccccccgcgttcccataggaaaggcagaggtgttccctatccwtcgccccttcctgggaggtgtatccatatgggttcaatgtggggtgaggtccattgagtcctccctgtgtgggagtcacaagaagggacaaagtgactcctgttaaacatttcctacccccatccttgccaatcatgacaattaagcacagggagtttagcagctggggggccagcagaggcaacgcagcgctgcccccatcacaccgccccattccccccccagaacacgcgatcctcaggcggtggctgctgctctccgacccggaggacttcacggcgggggcaaaggggtacctg

SEQ ID NO: 81081 - DNA, 600 bp, Chicken  19866894374156_1
acggaggctcgccggtcccggatcccctccgccccctcggtgccgcccggcccgtccaaggggcccgcgaggaccggcacagccctccctgcggcggttaccggccgctgccagcggggcccgcagaaagcgcccgcaccaacgcccgcaccctgcgagctccgcgctcccgccgacgccccgcacctcctcagccgggcagcgccgcccccgccggcggcggaaacgcgtccatcacacggcggaaggggcggggccggcggcggagacccgcgtgcgggcgggcggaagtggcggtgkggagcagargtgcttccggtagagcgggaggcgtttgtgcggcgagcggcggcggcgggggagagcacggagagccgcaaccatggtgagccgcgcgggcgctgcgggggggcctggcctggttgagccgctgcctccggtaacgcgcggtgtaacggcggtctcttgcagacggtgggaaagagcagcaagatgctgcagcacatcgactaccgcatgcggtgcatcctgcaggacggccgcgtcttcatcggcaccttcaaggccttcgataagcacatgaacctcatcctctgcgac

SEQ ID NO: 81082 - DNA, 600 bp, Chicken  19866894374156_2
cgccggtcccggatcccctccgccccctcggtgccgcccggcccgtccaaggggcccgcgaggaccggcacagccctccctgcggcggttaccggccgctgccagcggggcccgcagaaagcgcccgcaccaacgcccgcaccctgcgagctccgcgctcccgccgacgccccgcacctcctcagccgggcagcgccgcccccgccggcggcggaaacgcgtccatcacacggcggaaggggcggggccggcggcggagacccgcgtgcgggcgggcggaagtggcggtgkggagcagargtgcttccggtagagcgggaggcgtttgtgcggcgagcggcggcggcgggggagagcacggagagccgcaaccatggtgagccgcgcgggcgctgcgggggggcctggcctggttgagccgctgcctccggtaacgcgcggtgtaacggcggtctcttgcagacggtgggaaagagcagcaagatgctgcagcacatcgactaccgcatgcggtgcatcctgcaggacggccgcgtcttcatcggcaccttcaaggccttcgataagcacatgaacctcatcctctgcgactgcgacgag

SEQ ID NO: 81083 - DNA, 600 bp, Chicken  19866894374158_1
atgagtgctctgcaccttctagagacccagagggccttttgtgggatattgttaccttaagcagacctgataaggggcatgcataggtgaaagttttgcctcgcgttcatttggctaccaaatattgaaagcttccagatggttgtgctttgccgagttttttgttgttgttgttgtttctttactttttgtttgcttgcttgcaaatgacaaaaggattcttttgagaatttagggcaataaacagacctatagcttagctcagagaaggtgacttataaactcttgcaggtgctcagyaacttgcagaacaaatgtgcaagcccagcactgtgataaacattagcatagaaaagcagctatttggatttaggttttgaagatttcaagcactaccactggagcatggattgtgatgtgacctacgtgttgagatgagacatagtccctgacacttttgaacacttgactgggaactctgtagctgatgcacaagattaaaacagtttactttgctgtgcctgagccatccccacagcagctgggcaggggccatggcagtgcttgaaggacagatcagtcccctaccgacgtggtacc

SEQ ID NO: 81084 - DNA, 599 bp, Chicken  19866894374159_1
  misc_feature (1)..(176): n is any nucleotide
nnnnnnnnnnnnnnnnnnnnnnnnnnnnnnnnnnnnnnnnnnnnnnnnnnnnnnnnnnnnnnnnnnnnnnnnnnnnnnnnnnnnnnnnnnnnnnnnnnnnnnnnnnnnnnnnnnnnnnnnnnnnnnnnnnnnnnnnnnnnnnnnnnnnnnnnnnnnnnnnnnnnnnnnnnnnnnnnctgggaacctgcagagctgctgggggcaaacccgcacggaatatcatcccataagggctgcagcgttcccaacatctgagctcctcctggcatccctttactggcccaaaatagggggaaaccycatcggtaattcagcaaarccctgagtccaggttctggggcaaccccagtgcggccacagagccgtgctgggcaccagcggcgcagaaagggtttctcccacgtcccgcgataggcctgtagcatctggcggtcccccaaatacagaagggaaacagctattcagcacttcttgtgcctgattgctattaacagctccaccattcctatccctcggtggaccggtactactgctgggcagctgcttctttttagaaagttaaacagttccgctgtcctctgtggcaccgcggtgtcccc

SEQ ID NO: 81085 - DNA, 599 bp, Chicken  19866894374159_2
  misc_feature (1)..(157): n is any nucleotide
nnnnnnnnnnnnnnnnnnnnnnnnnnnnnnnnnnnnnnnnnnnnnnnnnnnnnnnnnnnnnnnnnnnnnnnnnnnnnnnnnnnnnnnnnnnnnnnnnnnnnnnnnnnnnnnnnnnnnnnnnnnnnnnnnnnnnnnnnnnnnnnnnnnnnnnnnnnnnctgggaacctgcagagctgctgggggcaaacccgcacggaatatcatcccataagggctgcagcgttcccaacatctgagctcctcctggcatccctttactggcccaaaatagggggaaaccycatcggtaattcagcaaarccctgagtccaggttctggggcaaccccagtgcggccacagagccgtgctgggcaccagcggcgcagaaagggtttctcccacgtcccgcgataggcctgtagcatctggcggtcccccaaatacagaagggaaacagctattcagcacttcttgtgcctgattgctattaacagctccaccattcctatccctcggtggaccggtactactgctgggcagctgcttctttttagaaagttaaacagttccgctgtcctctgtggcaccgcggtgtcccctaatccccgttctccatca

SEQ ID NO: 81086 - DNA, 600 bp, Chicken  19866894374159_3
ataggcctgtagcatctggcggtcccccaaatacagaagggaaacagctattcagcacttcttgtgcctgattgctattaacagctccaccattcctatccctcggtggaccggtactactgctgggcagctgcttctttttagaaagttaaacagttccgctgtcctctgtggcaccgcggtgtcccctaatccccgttctccatcacctgtttgtcaccggttatttctacctggggccatactgatgtatggcacagatgtggttggcaaacccttgggatggccacggagcccctyggggatggcatcctcagccccatccaggctctccaaggcagcactggggtgccagagctggatggtacagtggcatggatctgagcgttgcggcctgggtcctgttagagcatcccaaaccccatacggggatggaacccaactggaaaatgcctgcaggcaggactgtgccctgacgccgcagcaatgggctctggcagctcggggtctgctcggtgccgcgagatctggatcgcccttgtgtccctcagagccacccggagggggacgtgggctgtgtcctgagccccatgggccacc

SEQ ID NO: 81087 - DNA, 600 bp, Chicken  19866894374167_1
tatataggagcatgaacaccatgcagaaattcatgaaactttattgtgcttaaggttaaacatgagaagcacgccagtatctgaggatatatctggcgcatttttgtttctttccaaattctaagtctgataccctactgtgttaacagtgcgagttgccattcagtctcaactgaactgccagagctgtgagataataacagcaggaaattcttgaaggataatttcaagatggtagctgcaactggacttctcttaactgattacagtaatcattatattgttaagcatacttagagraaaactaaattgcacttgattattttttcaaaatagcagtgaaaaaaaccatcttatcttgctttgctaccatgccatccccaatacgttcactcttgaactcattctgtttatagcttgcaagggacaaggtttatttgaactggttatgttttgagttcatgtgggtttctgcctttgactgcagaatgtactccacaagttctcgtgtcactctgcctagctattctttttgttgccgtgccagcgtttatcaccactcacttctggatagtgttaatgatgcagtcacttcctgtc

SEQ ID NO: 81088 - DNA, 599 bp, Chicken  19866894374202_1
  misc_feature (1)..(37): n is any nucleotide
nnnnnnnnnnnnnnnnnnnnnnnnnnnnnnnnnnnnncctgaagagttggctgctattttgcagtctcaattcagaaccagtgataagcgctgcacctctttgtttcctttagacagtctgtccccgactggtttcccaatttactatcatctggctttacaattttaaccctttattttattttaaacactgttaatacaaataacgtgcttattgtttcagtcaaaaccttttttttccttagaatctttttgctgaaatgatagaaggcaaagcagtgaaatggcacagtataagcrttcaaaatcgttctgtgagttttccttttgtacttctgctgttgtttctatggagtagtcactgttgctatgtattttttctctttgtttctgccagaacatgactggctgggtcaacatgctcatagtagtagtagagaatagcataattgctgcttgattagaagaggtattttagaaacagctttgtgtgttggaaaaatycctataatgtttcaatttttctagcaatggcaaaatcatragtaattaaccaaacaaggcacagttaattctaatgaggtgcactagggagaaag

SEQ ID NO: 81089 - DNA, 600 bp, Chicken  19866894374202_2
aacgtgcttattgtttcagtcaaaaccttttttttccttagaatctttttgctgaaatgatagaaggcaaagcagtgaaatggcacagtataagcrttcaaaatcgttctgtgagttttccttttgtacttctgctgttgtttctatggagtagtcactgttgctatgtattttttctctttgtttctgccagaacatgactggctgggtcaacatgctcatagtagtagtagagaatagcataattgctgcttgattagaagaggtattttagaaacagctttgtgtgttggaaaaatycctataatgtttcaatttttctagcaatggcaaaatcatragtaattaaccaaacaaggcacagttaattctaatgaggtgcactagggagaaaggaggaggaagttgtaaatstaagcaatattcaatattgcagtgtcctgaactttgctactaaacaatgtgakcttatgtgtgtcaatctaatatgtctagagcaatgaagcagtgatcctttaaccattttaatcaatactatgcagtcaggcaggttaagtagtaacctgccacagctgactagactaaacttaaaggaacctc

SEQ ID NO: 81090 - DNA, 600 bp, Chicken  19866894374202_3
gaatctttttgctgaaatgatagaaggcaaagcagtgaaatggcacagtataagcrttcaaaatcgttctgtgagttttccttttgtacttctgctgttgtttctatggagtagtcactgttgctatgtattttttctctttgtttctgccagaacatgactggctgggtcaacatgctcatagtagtagtagagaatagcataattgctgcttgattagaagaggtattttagaaacagctttgtgtgttggaaaaatycctataatgtttcaatttttctagcaatggcaaaatcatragtaattaaccaaacaaggcacagttaattctaatgaggtgcactagggagaaaggaggaggaagttgtaaatstaagcaatattcaatattgcagtgtcctgaactttgctactaaacaatgtgakcttatgtgtgtcaatctaatatgtctagagcaatgaagcagtgatcctttaaccattttaatcaatactatgcagtcaggcaggttaagtagtaacctgccacagctgactagactaaacttaaaggaacctctatcaggctgtattctcacaggtgaactcaaatggatgct

SEQ ID NO: 81091 - DNA, 600 bp, Chicken  19866894374202_4
gttttccttttgtacttctgctgttgtttctatggagtagtcactgttgctatgtattttttctctttgtttctgccagaacatgactggctgggtcaacatgctcatagtagtagtagagaatagcataattgctgcttgattagaagaggtattttagaaacagctttgtgtgttggaaaaatycctataatgtttcaatttttctagcaatggcaaaatcatragtaattaaccaaacaaggcacagttaattctaatgaggtgcactagggagaaaggaggaggaagttgtaaatstaagcaatattcaatattgcagtgtcctgaactttgctactaaacaatgtgakcttatgtgtgtcaatctaatatgtctagagcaatgaagcagtgatcctttaaccattttaatcaatactatgcagtcaggcaggttaagtagtaacctgccacagctgactagactaaacttaaaggaacctctatcaggctgtattctcacaggtgaactcaaatggatgctttcacctaaaggacatgcagatgcccagcagcaagctactgggaaatgttttgagcctagcaagttttaagagc

SEQ ID NO: 81092 - DNA, 598 bp, Chicken  19866894374202_5
gtattttttctctttgtttctgccagaacatgactggctgggtcaacatgctcatagtagtagtagagaatagcataattgctgcttgattagaagaggtattttagaaacagctttgtgtgttggaaaaatycctataatgtttcaatttttctagcaatggcaaaatcatragtaattaaccaaacaaggcacagttaattctaatgaggtgcactagggagaaaggaggaggaagttgtaaatstaagcaatattcaatattgcagtgtcctgaactttgctactaaacaatgtgakcttatgtgtgtcaatctaatatgtctagagcaatgaagcagtgatcctttaaccattttaatcaatactatgcagtcaggcaggttaagtagtaacctgccacagctgactagactaaacttaaaggaacctctatcaggctgtattctcacaggtgaactcaaatggatgctttcacctaaaggacatgcagatgcccagcagcaagctactgggaaatgttttgagcctagcaagttttaagagctaatgagttgtttttcacagaactgagataaaagaaataaagaacatacca

SEQ ID NO: 81093 - DNA, 599 bp, Chicken  19866894374222_1
  misc_feature (1)..(172): n is any nucleotide
nnnnnnnnnnnnnnnnnnnnnnnnnnnnnnnnnnnnnnnnnnnnnnnnnnnnnnnnnnnnnnnnnnnnnnnnnnnnnnnnnnnnnnnnnnnnnnnnnnnnnnnnnnnnnnnnnnnnnnnnnnnnnnnnnnnnnnnnnnnnnnnnnnnnnnnnnnnnnnnnnnnnnnnnnnnntttaaaattagcatgccagtcaccaaaaataataacagttcttcagtacatgatgctatttctgattagcgtggcctgagttagcttaaaacaatgcatgtagaaaggtaaaaggtctgcagtctctyctgcttctgtataaatgataacacatccatggaactcattagctgccatggtaaggtatgtctgattggaagtgatttaaagttgcttgatcaagtcctcaatcagaaaggagattttattagattcaatcttattaagtacctccaatctacatttcttataggctagaaatatatccatagaagctgtgtattttcaaattcagttgatataacagttagacatccatgaagcctttggcacagcactgtctgacattctgatgaaaatgtgttacataaaatcaatttagcacatc

SEQ ID NO: 81094 - DNA, 599 bp, Chicken  19866894374225_1
  misc_feature (1)..(28): n is any nucleotide
nnnnnnnnnnnnnnnnnnnnnnnnnnnntaccacactcagactgccacatcccacagccatgttaaaccctgtctcctccccaagtcatgctcctggctcttcttccctgtagacataggaatcctgctggggaggagcagggtggtgccacgtggctctgtaagcaagatgaaggcccatgctcctcctcctcctcccctcatctaggcagctcttagcctaggaagcactgagtgctcctggggacaggccacctgctgcatgtccccaccatgtccccatctgatgtgatatgtacygcaggactgaccccactctgcatcactgtgttgccattgctacagcaargagcaacatccatgtccccttgggaccctcccccggggagcattaacaacacaacacagagaaatcttttcacytgtctgcagtttattggtaatgaaagaactcaggggaaggggtgttggtagaaagcagcaaggcagtaaaattccggtagcagaaggattgcaaaagggctatgcacgtgtcagctgtgaaggagaagagcaaaacaaatctataaaatatgaaagctgccgaatcctctggagag

SEQ ID NO: 81095 - DNA, 600 bp, Chicken  19866894374225_2
tcccacagccatgttaaaccctgtctcctccccaagtcatgctcctggctcttcttccctgtagacataggaatcctgctggggaggagcagggtggtgccacgtggctctgtaagcaagatgaaggcccatgctcctcctcctcctcccctcatctaggcagctcttagcctaggaagcactgagtgctcctggggacaggccacctgctgcatgtccccaccatgtccccatctgatgtgatatgtacygcaggactgaccccactctgcatcactgtgttgccattgctacagcaargagcaacatccatgtccccttgggaccctcccccggggagcattaacaacacaacacagagaaatcttttcacytgtctgcagtttattggtaatgaaagaactcaggggaaggggtgttggtagaaagcagcaaggcagtaaaattccggtagcagaaggattgcaaaagggctatgcacgtgtcagctgtgaaggagaagagcaaaacaaatctataaaatatgaaagctgccgaatcctctggagagctgcttctcactcctaagcctgacaatggggcattgccacttttcttctg

SEQ ID NO: 81096 - DNA, 600 bp, Chicken  19866894374225_3
cctgctggggaggagcagggtggtgccacgtggctctgtaagcaagatgaaggcccatgctcctcctcctcctcccctcatctaggcagctcttagcctaggaagcactgagtgctcctggggacaggccacctgctgcatgtccccaccatgtccccatctgatgtgatatgtacygcaggactgaccccactctgcatcactgtgttgccattgctacagcaargagcaacatccatgtccccttgggaccctcccccggggagcattaacaacacaacacagagaaatcttttcacytgtctgcagtttattggtaatgaaagaactcaggggaaggggtgttggtagaaagcagcaaggcagtaaaattccggtagcagaaggattgcaaaagggctatgcacgtgtcagctgtgaaggagaagagcaaaacaaatctataaaatatgaaagctgccgaatcctctggagagctgcttctcactcctaagcctgacaatggggcattgccacttttcttctgcttccatgaatacagctgaaacaagcatgtgggcaacatgcaggacgcgcgggaagcgcaaaggagaacatggc

SEQ ID NO: 81097 - DNA, 600 bp, Chicken  19866894374225_4
gttggtagaaagcagcaaggcagtaaaattccggtagcagaaggattgcaaaagggctatgcacgtgtcagctgtgaaggagaagagcaaaacaaatctataaaatatgaaagctgccgaatcctctggagagctgcttctcactcctaagcctgacaatggggcattgccacttttcttctgcttccatgaatacagctgaaacaagcatgtgggcaacatgcaggacgcgcgggaagcgcaaaggagaacatggccattgaaaaagagacctcagaaggaaaaggaaagagcagatcygctcacgcttctgctcagccagcctggcacgagggagggagggatcttggatgaactctccggtgatgggtaaccccgagggagatatttcctagtggggccataaatgtttcatccctgaagactggtggagtggggagaggagcagctgtgccaagagggtggtgttctgctgctgtttgcctccagggaggaggcggaatgcttcatttctttgcaggattctgggtctgggtgcgaggggatgtgccgcaggctggaggcgggcgatgcttctttccttggcagtactgagtttgg

SEQ ID NO: 81098 - DNA, 600 bp, Chicken  19866894374234_1
ggtacttatcaagacagatcaggatctccaaaacaagagcaccaattaggtcactcagaaagtaatgtctcctacttatctctatagaagctacaatagctaaaacagcaaaataacactgtttgatagagcaacttttcagctacaaagcactatttttcaacacagccaccacatatactttcacttctcagtgacaagaggagactgaatttaggtgcacatcatagcagtgattcaggcagttcactttggagtgccctatcaattcagtggaatatattagaatcgtagaataasccacgttggaatggacccacaacaattatcaaatccaactatggtttccacacaggaccacccaacattcaaactttacgcctaagagcactgtccaaacacttcttaatttccaacagcctggtgctgtgatcacttttctggagagatattgtctgtatctgacaatcttcatagtactattctttttatcaactgcttttaagacttgttctgacctcagtttaaggggatgctagagattcagctgccacaaagaatagctttaacgtaggaagattttcaagtctttagacttac

SEQ ID NO: 81099 - DNA, 600 bp, Chicken  19866894374237_1
aaggaaaagaccacgtctgaaagagactgatagcttttcatcttgatcctcaggacttgtttttatttaatttatttcttagcatatttgcttagatatctcaaagtctgaaaaaattcccagtacttaattccttgattaaatataccgtgaaggtgaaatcatattcgttttagcttaaacagcaggtaaatttacccatttgaggtcattgtctttttgaaaacaaaaattaaaggaataactatcaattatgtttaatacaaatctgattcatgattaagatgtgaaaggtggtckttttacgtattttggactgttcaagtagcttgtgagagaatatgattttaaatcaaagtagtttacatgtctttcagaaaaaaaacaaaacaaaacaaaaattagtgaaacagagctataaagacaagcaaaaagaaactacacaaaagacagaaggactactaaagcaacacaaccgtaatatataagataactagcactgtgtgaaatagtggctataaaaaagcaatacactccatattacagaaggtacacaatcttataaaaaatgctgcagacccaaatactgttagcagtttt

SEQ ID NO: 81100 - DNA, 600 bp, Chicken  19866894374239_1
ttaaattgtcactttttaatgtaaaaatttaattaatccctagattcatttcagttgatgttgcagggccatttcgctacatctcagaaggcacttaattggaattgaaggctcaggattacaaacacaacatttatcccttgccaaaaccgacgaagctttctggataggaccaggaagccacagctgaactggaggattggctgtgcgaatgtagctaaaggcagtactgaccctacgcacattactgccctgatggaaaaggcagcagagagttaatggaactggatgtgcattaakttttttttttaagattatacactatgatgagattctttcatcagtttctatgggtcacagcagctggtaggaaccttaacagtgtcattccattataaggctattatcgatccaaaatctaatttgaagatcaatttggattggaatcagaacccaatacgacaatgatttcagaacagataagaggtaatttactcctctgggtgccagaaatcaatttttggttttctgagctaatccagctgccaaaaaaagaaaaaaagaaagaaaaaaaaagaaaaaaaaaagaaatagtaaaag

SEQ ID NO: 81101 - DNA, 599 bp, Chicken  19866894374246_1
  misc_feature (1)..(246): n is any nucleotide
nnnnnnnnnnnnnnnnnnnnnnnnnnnnnnnnnnnnnnnnnnnnnnnnnnnnnnnnnnnnnnnnnnnnnnnnnnnnnnnnnnnnnnnnnnnnnnnnnnnnnnnnnnnnnnnnnnnnnnnnnnnnnnnnnnnnnnnnnnnnnnnnnnnnnnnnnnnnnnnnnnnnnnnnnnnnnnnnnnnnnnnnnnnnnnnnnnnnnnnnnnnnnnnnnnnnnnnnnnnnnnnnnnnnnnnnnnnnnnnnnnnnnnttttgaagggatttgaccaaaatgcgcttgtttattttcacagcccacggggcrcatttctgtgtgggacatccccagtcccctgcgctggggaaggggaggtggaggcagagcgtcctccacgacaccgaccccatggactggttgaacaccaagcaacggctgktgtggtggctggctcactgctgacactgatggctgtctgtgggaccagccatggcgagcggggctccgtgcgggcggaggagggccgaggcgagggagatggcgggcggcaatggcctgcgtcctgccgttgccatgggggcagccacggggatggctgctgcggagccacgcgcgggcgggaagga

SEQ ID NO: 81102 - DNA, 599 bp, Chicken  19866894374246_2
  misc_feature (1)..(134): n is any nucleotide
nnnnnnnnnnnnnnnnnnnnnnnnnnnnnnnnnnnnnnnnnnnnnnnnnnnnnnnnnnnnnnnnnnnnnnnnnnnnnnnnnnnnnnnnnnnnnnnnnnnnnnnnnnnnnnnnnnnnnnnnnnnnnnnnnnnnnnttttgaagggatttgaccaaaatgcgcttgtttattttcacagcccacggggcrcatttctgtgtgggacatccccagtcccctgcgctggggaaggggaggtggaggcagagcgtcctccacgacaccgaccccatggactggttgaacaccaagcaacggctgktgtggtggctggctcactgctgacactgatggctgtctgtgggaccagccatggcgagcggggctccgtgcgggcggaggagggccgaggcgagggagatggcgggcggcaatggcctgcgtcctgccgttgccatgggggcagccacggggatggctgctgcggagccacgcgcgggcgggaaggaagtggagaacaattgggcagaagaaggccggcaggctcagccccggcggtgctgctcggcacgtccctctgcagcccccacagcggccatggcttcccygcggcctagctct

SEQ ID NO: 81103 - DNA, 459 bp, Chicken  19866894374246_3
caagcaacggctgktgtggtggctggctcactgctgacactgatggctgtctgtgggaccagccatggcgagcggggctccgtgcgggcggaggagggccgaggcgagggagatggcgggcggcaatggcctgcgtcctgccgttgccatgggggcagccacggggatggctgctgcggagccacgcgcgggcgggaaggaagtggagaacaattgggcagaagaaggccggcaggctcagccccggcggtgctgctcggcacgtccctctgcagcccccacagcggccatggcttcccygcggcctagctctaagcgctgcccctccaaagcctggtgctgccgggggactggcggccatttgatgcccctggttgctgagggcaggtttgaggctgtcccgcagagcgtggtggggctctcctgctaggaagtttgcatctgcaggccgtggttttg

SEQ ID NO: 81104 - DNA, 600 bp, Chicken  19866894374252_1
tgtccaacaccaccttctgcctctcctgttggaccttctcctgcagggaaattcagcgcatgggtgtagaaacaccgcaacaaggctgatttattgggatgactttgggtgcagcgcagccataaattccagagagcatcgcagagtgatgagtaacattcattaattttgctattccttggctggcagagggcatttcccaggggctgtgatctttgtacccaaaatgctgcagacctttggccatcagggtgtgatacatagggatgactcaggaagggaaagcacagtgccatcacygcgcaggtacaaacacttacgaggaattccaggcttttcccttcctcagcytctttcagcccctgcagcttttccttcttttccttcaggatctgcacgtgagcctggattttctcctggatggagaagaaacagtttttggtgcatttcagtccagccctctcccttatgtgatattctgggctgattttcaggatctctatggtggtctgggaatgaaatcttgaagaacatcaggatgaccaacaatggaagaagatggagagccctaaagtggagactgtccatcctccaacccac

SEQ ID NO: 81105 - DNA, 600 bp, Chicken  19866894374252_2
ttcagcgcatgggtgtagaaacaccgcaacaaggctgatttattgggatgactttgggtgcagcgcagccataaattccagagagcatcgcagagtgatgagtaacattcattaattttgctattccttggctggcagagggcatttcccaggggctgtgatctttgtacccaaaatgctgcagacctttggccatcagggtgtgatacatagggatgactcaggaagggaaagcacagtgccatcacygcgcaggtacaaacacttacgaggaattccaggcttttcccttcctcagcytctttcagcccctgcagcttttccttcttttccttcaggatctgcacgtgagcctggattttctcctggatggagaagaaacagtttttggtgcatttcagtccagccctctcccttatgtgatattctgggctgattttcaggatctctatggtggtctgggaatgaaatcttgaagaacatcaggatgaccaacaatggaagaagatggagagccctaaagtggagactgtccatcctccaacccacaaaacacattgaaaaaggatgacggaaacccaactgtggcagcaaagcaac

SEQ ID NO: 81106 - DNA, 448 bp, Chicken  19866894374253_1
cattagaaaaatgtagataagcattaccacagatagcacagacagatgtagataagaatgctgtaactcaatgtccagcataaaccttgagagagtacaaaagggcagatataaatagttgcatggcaggtaaatggggactgaatttgaggttcctggggaaatccacaagcaagagagatgtttgagagcttggtgaaataacagcttagtgatttatacacagagagcagagacaaatggaacttgtcttctgaccagatcaggccacaaaacacagcaaatcaaaaggaagcacamtgaaaggcagatcagatggcagtccaacaaaagtaattatacggaaagaaaaaataacaggattgacaaaagacaccaagctaaagtacggagagtgggatatgtaacaaacaaaacaagcaaaaaaaaaaaaaaaacaaacaaatca

SEQ ID NO: 81107 - DNA, 600 bp, Chicken  19866894374258_1
tgatatattcaatgagataatgacttattggctgttatgaacagtacacagttggttccccatttgatcagtataagttcaaatattttgatgttacagggcttgtagaaggaagtgactattttcatttgtacataaaaaggggaaaaggagggtggaaaaagagaataacttgtttcaaattaaaattacaggatagggtgttaaaatttgatggtaagagtgagccaaagattgcagagagtaatccttagctactgttttggaggattatgaaaagaaagcatagctcagagacaytttgaatcataccttgtatgatctgtttttcttagagaagacagagaggtaattgtccctctctgaagctggcatgatggacccaaattggctgttgatgtgaggtagtgagagatgtacaggatttcagtctgtatttcttaacgctctaagttaatcttttatttttatagtatcttaactgtgtgtttaaaaaaaaaaaagcaaacaaaaacactttagttgcaagttttagattagagttctgaggttacagtgtgataggtcagaggttgctatgttttatgcagaaaaaaatta

SEQ ID NO: 81108 - DNA, 599 bp, Chicken  19866894374261_1
  misc_feature (1)..(130): n is any nucleotide
nnnnnnnnnnnnnnnnnnnnnnnnnnnnnnnnnnnnnnnnnnnnnnnnnnnnnnnnnnnnnnnnnnnnnnnnnnnnnnnnnnnnnnnnnnnnnnnnnnnnnnnnnnnnnnnnnnnnnnnnnnnnnnnnnncttaattttaggaaagaaacaaacttgaaagtgagctgaaaatgccttttacttacagttgttcacaagtagtctactaaaacagcttgaaatttctagccaccacagcagggatttccagtttaaaagcctccctcaccaaaaggtagcccaagattcagttgtcttaygtgaatccagatcttacaggaaagttctaaatagccaccacctcccctaaaataatcagcaattgcttgcatgttccccacttcctttaagagcagaggttaatgaactggaagggaacggtgcctccaaatgactgataaacctccggatgacctgagctgggtgactcatgttgttctccaaatgagcacttaaaacatttgtctgaaagcagtgctyagatgcggggagaggtcctctggtgcctccagccagggaaaagttcaccttgcaarcactgtaaactggaatcggagaa

SEQ ID NO: 81109 - DNA, 600 bp, Chicken  19866894374261_2
aatttctagccaccacagcagggatttccagtttaaaagcctccctcaccaaaaggtagcccaagattcagttgtcttaygtgaatccagatcttacaggaaagttctaaatagccaccacctcccctaaaataatcagcaattgcttgcatgttccccacttcctttaagagcagaggttaatgaactggaagggaacggtgcctccaaatgactgataaacctccggatgacctgagctgggtgactcatgttgttctccaaatgagcacttaaaacatttgtctgaaagcagtgctyagatgcggggagaggtcctctggtgcctccagccagggaaaagttcaccttgcaarcactgtaaactggaatcggagaaagtttaaagagcagacgttaatataatgtaatggtgctaaataattaaaggctgttcttgtgcaggaggtctggaaaatctttattacagacttggatgtgcattttaatgcttctggtgggctgtgtattaacacatgctttagcattatctggtaaaaatgcaagctagctgttaggttgctaatgtgtgcctgggcatgcttccctcccaccagcgtg

SEQ ID NO: 81110 - DNA, 600 bp, Chicken  19866894374261_3
tagcccaagattcagttgtcttaygtgaatccagatcttacaggaaagttctaaatagccaccacctcccctaaaataatcagcaattgcttgcatgttccccacttcctttaagagcagaggttaatgaactggaagggaacggtgcctccaaatgactgataaacctccggatgacctgagctgggtgactcatgttgttctccaaatgagcacttaaaacatttgtctgaaagcagtgctyagatgcggggagaggtcctctggtgcctccagccagggaaaagttcaccttgcaarcactgtaaactggaatcggagaaagtttaaagagcagacgttaatataatgtaatggtgctaaataattaaaggctgttcttgtgcaggaggtctggaaaatctttattacagacttggatgtgcattttaatgcttctggtgggctgtgtattaacacatgctttagcattatctggtaaaaatgcaagctagctgttaggttgctaatgtgtgcctgggcatgcttccctcccaccagcgtgtttgtcaggggctcaatcactgctcaaaagacagcaggtgactaaagatgttaaaa

SEQ ID NO: 81111 - DNA, 600 bp, Chicken  19866894374283_1
taaaataggaactgttaatagaggtactgctgtgatattccagtcactgcttccaattatgatggaattgtatatttaagaacacatgcgtgttaattacacaccatttgagctcttctggaatagagcaaaaatggcatgagctttaaataagcttcctctatagccagtcatatttctcctgtgccattggcatgaaggtgtgggtgtccatataaagctctgatgtgcagctgtagtatgacacccagaattaatttagaataaatattatgcctttctgccccacttacaagtggytcaaatatcagtgacagcttctacacagtatgataaattactagcccagtaacttcaaggtatttgatggtatgaaacctgcagtgctattccaatacattccaacagcccgtttctgagtgcagcatcacaaaatagatttaccaacatttagtagcrtaatgagtacagaaaagtctcaggactcttctggttctaacagtaacacagaaccgatggctaggacrgagaacagcattttgttttaaaacagattagtgwtacatgaatamtgatgtttacacaacatcatttagctta

SEQ ID NO: 81112 - DNA, 600 bp, Chicken  19866894374283_2
tctatagccagtcatatttctcctgtgccattggcatgaaggtgtgggtgtccatataaagctctgatgtgcagctgtagtatgacacccagaattaatttagaataaatattatgcctttctgccccacttacaagtggytcaaatatcagtgacagcttctacacagtatgataaattactagcccagtaacttcaaggtatttgatggtatgaaacctgcagtgctattccaatacattccaacagcccgtttctgagtgcagcatcacaaaatagatttaccaacatttagtagcrtaatgagtacagaaaagtctcaggactcttctggttctaacagtaacacagaaccgatggctaggacrgagaacagcattttgttttaaaacagattagtgwtacatgaatamtgatgtttacacaacatcatttagcttatcctgcatagcactgcatagcagtggtgctgttcagtctgcccatcgtgggcctgttgtgttttgtctgtagttcaagctgttaggagcccagtggtgtgttgggttgctccttaaaatatacttcttcagtttatcagtgctgaatttcttatcaaat

SEQ ID NO: 81113 - DNA, 600 bp, Chicken  19866894374283_3
gtgcagctgtagtatgacacccagaattaatttagaataaatattatgcctttctgccccacttacaagtggytcaaatatcagtgacagcttctacacagtatgataaattactagcccagtaacttcaaggtatttgatggtatgaaacctgcagtgctattccaatacattccaacagcccgtttctgagtgcagcatcacaaaatagatttaccaacatttagtagcrtaatgagtacagaaaagtctcaggactcttctggttctaacagtaacacagaaccgatggctaggacrgagaacagcattttgttttaaaacagattagtgwtacatgaatamtgatgtttacacaacatcatttagcttatcctgcatagcactgcatagcagtggtgctgttcagtctgcccatcgtgggcctgttgtgttttgtctgtagttcaagctgttaggagcccagtggtgtgttgggttgctccttaaaatatacttcttcagtttatcagtgctgaatttcttatcaaatcattctgataatccaccttgatctgtcaaaccttcccagcctcacttaacccagtaggtttgtctttc

SEQ ID NO: 81114 - DNA, 600 bp, Chicken  19866894374283_4
gaataaatattatgcctttctgccccacttacaagtggytcaaatatcagtgacagcttctacacagtatgataaattactagcccagtaacttcaaggtatttgatggtatgaaacctgcagtgctattccaatacattccaacagcccgtttctgagtgcagcatcacaaaatagatttaccaacatttagtagcrtaatgagtacagaaaagtctcaggactcttctggttctaacagtaacacagaaccgatggctaggacrgagaacagcattttgttttaaaacagattagtgwtacatgaatamtgatgtttacacaacatcatttagcttatcctgcatagcactgcatagcagtggtgctgttcagtctgcccatcgtgggcctgttgtgttttgtctgtagttcaagctgttaggagcccagtggtgtgttgggttgctccttaaaatatacttcttcagtttatcagtgctgaatttcttatcaaatcattctgataatccaccttgatctgtcaaaccttcccagcctcacttaacccagtaggtttgtctttcacatgttctgccaagctaatggaacattccttta

SEQ ID NO: 81115 - DNA, 600 bp, Chicken  19866894374283_5
atgcctttctgccccacttacaagtggytcaaatatcagtgacagcttctacacagtatgataaattactagcccagtaacttcaaggtatttgatggtatgaaacctgcagtgctattccaatacattccaacagcccgtttctgagtgcagcatcacaaaatagatttaccaacatttagtagcrtaatgagtacagaaaagtctcaggactcttctggttctaacagtaacacagaaccgatggctaggacrgagaacagcattttgttttaaaacagattagtgwtacatgaatamtgatgtttacacaacatcatttagcttatcctgcatagcactgcatagcagtggtgctgttcagtctgcccatcgtgggcctgttgtgttttgtctgtagttcaagctgttaggagcccagtggtgtgttgggttgctccttaaaatatacttcttcagtttatcagtgctgaatttcttatcaaatcattctgataatccaccttgatctgtcaaaccttcccagcctcacttaacccagtaggtttgtctttcacatgttctgccaagctaatggaacattcctttactgatactgtt

SEQ ID NO: 81116 - DNA, 600 bp, Chicken  19866894374283_6
cagcataacttaagtgttttggtcaaactccaacctggatgtgcctcttgtttagcaatatggaacaaactttaagtcttgctgttagaatttataagccaccaccgcaaaaactcttcactgagcttataagttttacttaagttagttctgcccaaaaaaggcctctcctatgttatgtgtgtggcacatctcttatgtaaagttctataggagacagtagagagcttctgataaaacattttcaagtggatgaagtcaagcgcttactgcacagaatgattaatttgcatcattacmaatmgcaagtcagatttgtccactgctgcttctgaaagggcatggagttgctgcattctttgaacgtgtgttgtgtgaaggtaggtctaacagtctgtattgcgtgttggcctaagccagccattgacctgggttcagcaatgccatttggggcagcagaaagcttgtgctgaagctagtagcaagctgaacactcactttgctctttaatgacagataccttacacaatcgttctaaaagatttcaacagacttgagctatgggggcatgacctgcccagcgtatttaggacttctccc

SEQ ID NO: 81117 - DNA, 600 bp, Chicken  19866894374283_7
ataacttaagtgttttggtcaaactccaacctggatgtgcctcttgtttagcaatatggaacaaactttaagtcttgctgttagaatttataagccaccaccgcaaaaactcttcactgagcttataagttttacttaagttagttctgcccaaaaaaggcctctcctatgttatgtgtgtggcacatctcttatgtaaagttctataggagacagtagagagcttctgataaaacattttcaagtggatgaagtcaagcgcttactgcacagaatgattaatttgcatcattacmaatmgcaagtcagatttgtccactgctgcttctgaaagggcatggagttgctgcattctttgaacgtgtgttgtgtgaaggtaggtctaacagtctgtattgcgtgttggcctaagccagccattgacctgggttcagcaatgccatttggggcagcagaaagcttgtgctgaagctagtagcaagctgaacactcactttgctctttaatgacagataccttacacaatcgttctaaaagatttcaacagacttgagctatgggggcatgacctgcccagcgtatttaggacttctcccttcg

SEQ ID NO: 81118 - DNA, 599 bp, Chicken  19866894374285_1
  misc_feature (1)..(67): n is any nucleotide
nnnnnnnnnnnnnnnnnnnnnnnnnnnnnnnnnnnnnnnnnnnnnnnnnnnnnnnnnnnnnnnnnnntgtcacattgcttctttttccacaggtcaggggatctcctccattgcagactcttttctaatataatttaaacgcatccaaaacccttagctgctgcttctttacttatttttattacacctatgaaggtgcacatatataggtatgtgccataatgctcttcagcaaattaagtgctggtcatttactatatatttgctaaatatatacacaattagacacaaattgtagcratttatttcctcaagtaaagcagtacatgaaaaaaatgttactctggtcttcttccagatgctaaagaacacaaccctttcatcattctccattttccatgtatacaacagtacaaggaaagaagtttaattgtaaagatttaagcctatgcattaaaaaaagatctaacatttaatttgcattattaggtacatgcatcacactgagaaatttatatatacactaagcatcatagattcagctgcaaaatgaagacaagaacatttagatatgagtgcactatagttatattccagaa

SEQ ID NO: 81119 - DNA, 600 bp, Chicken  19866894374287_1
tcactattagtagtccagtccaactgtatctacttaatcttcaggtaaaggatagcaataaatatttctataaatacatcaacagcaagaggagggccaaggagaatctccatcccttgctggatgctgaggggaaggtagtgaccaaggatcaggatgaggctgaggtgcttaatgccttctttgcctcagtctttaatagtaagacttgttaatccctggaaacacagccccttgctccggtagatagggatggggaacagaacaggcctgcatagtccacaatgttttggacctgcwctgaaagctggatgctcacaagtccacagggccagatggatggcaccctagagtgctgagggagttggcagatgtggctctccatcatcctktggcagtcctggcgaaccaggtgtgtcccggcagattggagactggcagatgtgacacccatcttcaaaaagggccagaaaggtgatcctggtagatacagacctatcagtctcaccttggtgccagggaaggttatggaacggataatctcaggaccagttaaaggtcaaccaggagatcaggcccagtcagcaaacctgatttcat

SEQ ID NO: 81120 - DNA, 600 bp, Chicken  19866894374287_2
agggccaaggagaatctccatcccttgctggatgctgaggggaaggtagtgaccaaggatcaggatgaggctgaggtgcttaatgccttctttgcctcagtctttaatagtaagacttgttaatccctggaaacacagccccttgctccggtagatagggatggggaacagaacaggcctgcatagtccacaatgttttggacctgcwctgaaagctggatgctcacaagtccacagggccagatggatggcaccctagagtgctgagggagttggcagatgtggctctccatcatcctktggcagtcctggcgaaccaggtgtgtcccggcagattggagactggcagatgtgacacccatcttcaaaaagggccagaaaggtgatcctggtagatacagacctatcagtctcaccttggtgccagggaaggttatggaacggataatctcaggaccagttaaaggtcaaccaggagatcaggcccagtcagcaaacctgatttcattccatgacaaggtgacccatttagtggatgaaggtaaggctgttgatgtggtctaccgggacttcagtaaaggctttgacactgtcctgcac

SEQ ID NO: 81121 - DNA, 600 bp, Chicken  19866894374300_1
cagcttgcaatgaattaaaagacacgggcactggagaccgatttttaatacaaagtcttgacacagagacgaccccgaccgacaacacagaaaatgttggcatagcaactttgggcattttcatgcaaattggctcctatatagatgatacgaatgcaatgttttccttcaactaatcatcataaaattagtttcactatatttaaatgcttctacttaatgcattatatccatatgcatgaaattgcctcagctaatgcagtacataaaatgccaaagatacaatgaatagccaaattrcaaacagttatgttatctcccataaaaactccttttttgttattgaacgtgggggccccaaaggcatctatcacaaattgctattaatgcacatccaacacgtccgcgcatgtacccacacacaaaacacctacrtttaagtaacaatgaagttgttacgcaacctaaactcaagccaagctctttgctcattgccacctccattggacgtagatgcgctcctgagtgcgctactccgtagcttcgtatgggagctwgacccgatgtcatgttgttgcatacacagatggataagctaca

SEQ ID NO: 81122 - DNA, 600 bp, Chicken  19866894374300_2
cctatatagatgatacgaatgcaatgttttccttcaactaatcatcataaaattagtttcactatatttaaatgcttctacttaatgcattatatccatatgcatgaaattgcctcagctaatgcagtacataaaatgccaaagatacaatgaatagccaaattrcaaacagttatgttatctcccataaaaactccttttttgttattgaacgtgggggccccaaaggcatctatcacaaattgctattaatgcacatccaacacgtccgcgcatgtacccacacacaaaacacctacrtttaagtaacaatgaagttgttacgcaacctaaactcaagccaagctctttgctcattgccacctccattggacgtagatgcgctcctgagtgcgctactccgtagcttcgtatgggagctwgacccgatgtcatgttgttgcatacacagatggataagctacaaggaaataccatttcgcatgagtctgcccacstgccagggacctgggacctcacctcactgcttcttgtaacgccccggtctgctaagaggagagggagggaagaccgctgcccctctgaatttccttgctttgc

SEQ ID NO: 81123 - DNA, 600 bp, Chicken  19866894374300_3
tgcagtacataaaatgccaaagatacaatgaatagccaaattrcaaacagttatgttatctcccataaaaactccttttttgttattgaacgtgggggccccaaaggcatctatcacaaattgctattaatgcacatccaacacgtccgcgcatgtacccacacacaaaacacctacrtttaagtaacaatgaagttgttacgcaacctaaactcaagccaagctctttgctcattgccacctccattggacgtagatgcgctcctgagtgcgctactccgtagcttcgtatgggagctwgacccgatgtcatgttgttgcatacacagatggataagctacaaggaaataccatttcgcatgagtctgcccacstgccagggacctgggacctcacctcactgcttcttgtaacgccccggtctgctaagaggagagggagggaagaccgctgcccctctgaatttccttgctttgcatggctttgtgccaaaccccactcctgttggwtttctgcttgaatatttaaaagatattagaaataatggaaaataatggtctgtaaaatacaaatagtcctcgtgaaccttctcttccact

SEQ ID NO: 81124 - DNA, 600 bp, Chicken  19866894374300_4
ttttttgttattgaacgtgggggccccaaaggcatctatcacaaattgctattaatgcacatccaacacgtccgcgcatgtacccacacacaaaacacctacrtttaagtaacaatgaagttgttacgcaacctaaactcaagccaagctctttgctcattgccacctccattggacgtagatgcgctcctgagtgcgctactccgtagcttcgtatgggagctwgacccgatgtcatgttgttgcatacacagatggataagctacaaggaaataccatttcgcatgagtctgcccacstgccagggacctgggacctcacctcactgcttcttgtaacgccccggtctgctaagaggagagggagggaagaccgctgcccctctgaatttccttgctttgcatggctttgtgccaaaccccactcctgttggwtttctgcttgaatatttaaaagatattagaaataatggaaaataatggtctgtaaaatacaaatagtcctcgtgaaccttctcttccactgggggccagacacctcccgtgcctctgcctgcacaccaagttccctgagcgtgccctgatgtcagaacaactcag

SEQ ID NO: 81125 - DNA, 552 bp, Chicken  19866894374300_5
aactcaagccaagctctttgctcattgccacctccattggacgtagatgcgctcctgagtgcgctactccgtagcttcgtatgggagctwgacccgatgtcatgttgttgcatacacagatggataagctacaaggaaataccatttcgcatgagtctgcccacstgccagggacctgggacctcacctcactgcttcttgtaacgccccggtctgctaagaggagagggagggaagaccgctgcccctctgaatttccttgctttgcatggctttgtgccaaaccccactcctgttggwtttctgcttgaatatttaaaagatattagaaataatggaaaataatggtctgtaaaatacaaatagtcctcgtgaaccttctcttccactgggggccagacacctcccgtgcctctgcctgcacaccaagttccctgagcgtgccctgatgtcagaacaactcagtttgcattaaaagcctcaaccaacaaattgccaaagtcagtgaaattgagtttttggactttgaactcactaaaagaatcatagaat

SEQ ID NO: 81126 - DNA, 600 bp, Chicken  19866894374302_1
tgttcttttagctcagggtcatggtgccaaaggagacaacatctacgagtttcagattgagttcctagaaccggtcgagcctaaagtaggtatttctttttcttctaacttgtgcagagaaaaagatgttgggttgtttgtttgcttgtttgtttgagaagcgtgaaaggagaatggctgtgcatgaagtccacaatgtgctgctgggttttcctggtgactgactgctaaatgccacccacagcagtcctgggttgctgtgctcagccaccatcctgccttaatgcagctcatcacacygggtgagcctcgatagaaacagggccttaaacatagcatagctgttatccagtagttacagtttttatagggatttaaagcagcaagatattgggagatgcttgcaatagtttgtctgatgcagctatgccttggagaggagggggaacatcatggtacaaagtgtcagtgtggctgcttttacagcccagcaaaataaattcatgagaactggtgtttctggcttgtacaaattccttgggttgccagtacggacacattgcaggtcctattgcaaaacattgttttaattgctgttgc

SEQ ID NO: 81127 - DNA, 600 bp, Chicken  19866894374302_2
ggctctgctcccagcagaggatttgtgctgcttactcctgcagtcacaccaggagccatggtttggctctgctgctttggcaaggaggctggagggtggccatcagtgagggacagagcctgtgccgtaaattacagctgcagccttcagatgtcctaggagcacagagccagtcttgacagagaggagtgctgggggaacatgcagttacaaatgcaggtcatggctgttcctctcaccagagcaggttttgtgtgggattccctgttttggagacgtacctgtgactgacgctagccktatttttactgctggatagagaaagtgggtggctcacagcatgaaacacgggaatgcctaaagccacattctgtaggttttgtgtgggattgctagcsccaggggctgtgctaactgtctgtggtaggaatagtgctatgcagtgcaggcaggccatccagctggtcatcaaatcacaaatcccatagccatctttgtcgccatcttcacctttcccttggtttccatggcatgtcttgggcagcagagagatgcctgtgctgcagcaatccatgtcacctctgctttgttggtggggaa

SEQ ID NO: 81128 - DNA, 600 bp, Chicken  19866894374302_3
gccatcagtgagggacagagcctgtgccgtaaattacagctgcagccttcagatgtcctaggagcacagagccagtcttgacagagaggagtgctgggggaacatgcagttacaaatgcaggtcatggctgttcctctcaccagagcaggttttgtgtgggattccctgttttggagacgtacctgtgactgacgctagccktatttttactgctggatagagaaagtgggtggctcacagcatgaaacacgggaatgcctaaagccacattctgtaggttttgtgtgggattgctagcsccaggggctgtgctaactgtctgtggtaggaatagtgctatgcagtgcaggcaggccatccagctggtcatcaaatcacaaatcccatagccatctttgtcgccatcttcacctttcccttggtttccatggcatgtcttgggcagcagagagatgcctgtgctgcagcaatccatgtcacctctgctttgttggtggggaaagctcaggtctcagctcagtcttggagcttgtttcttagggctcttgttgacgtgtactcttgtgtctatccccagcccgtgtgcagggtgactcaaa

SEQ ID NO: 81129 - DNA, 599 bp, Chicken  19866894374304_1
  misc_feature (1)..(3): n is any nucleotide
nnnataactttttccacttgtgctggaatggctgctgctttctcatgcatcacttctgggcttcttagcagcagaatagtaatgcagtagggaagtacccttattgcagtctgccatggagatatctgttgataacatctaccccttagctttctcttcacaatgactaaaacttgtgcatgtttggacaaagagaagatttcagatttcaagactactatctccagcctttctgcattcatttacctacatctgttggcagcctgccctcagtacagctttcctctcctttcctgctcytgtttttctcacatccttcttattsgaaagcaccaygtggccacagcactggggggagaactgattccccacctttgtcctttcatatctgttgaatgtgacacatccccaaacagccctgaggattgatttagctacagatcctctctctcaggccagcagaggcaaacatctggaggggagagtggaacatggtccacagaaatctcttttaattcttgtgtatgtgaaaggcttaaaaatgactggttgcactagctgtcaatggtatggagtgaagtgaatccgttcttcagtaa

SEQ ID NO: 81130 - DNA, 600 bp, Chicken  19866894374304_2
gaatggctgctgctttctcatgcatcacttctgggcttcttagcagcagaatagtaatgcagtagggaagtacccttattgcagtctgccatggagatatctgttgataacatctaccccttagctttctcttcacaatgactaaaacttgtgcatgtttggacaaagagaagatttcagatttcaagactactatctccagcctttctgcattcatttacctacatctgttggcagcctgccctcagtacagctttcctctcctttcctgctcytgtttttctcacatccttcttattsgaaagcaccaygtggccacagcactggggggagaactgattccccacctttgtcctttcatatctgttgaatgtgacacatccccaaacagccctgaggattgatttagctacagatcctctctctcaggccagcagaggcaaacatctggaggggagagtggaacatggtccacagaaatctcttttaattcttgtgtatgtgaaaggcttaaaaatgactggttgcactagctgtcaatggtatggagtgaagtgaatccgttcttcagtaagcttgatgctcctacagcatgcactt

SEQ ID NO: 81131 - DNA, 600 bp, Chicken  19866894374304_3
gctttctcatgcatcacttctgggcttcttagcagcagaatagtaatgcagtagggaagtacccttattgcagtctgccatggagatatctgttgataacatctaccccttagctttctcttcacaatgactaaaacttgtgcatgtttggacaaagagaagatttcagatttcaagactactatctccagcctttctgcattcatttacctacatctgttggcagcctgccctcagtacagctttcctctcctttcctgctcytgtttttctcacatccttcttattsgaaagcaccaygtggccacagcactggggggagaactgattccccacctttgtcctttcatatctgttgaatgtgacacatccccaaacagccctgaggattgatttagctacagatcctctctctcaggccagcagaggcaaacatctggaggggagagtggaacatggtccacagaaatctcttttaattcttgtgtatgtgaaaggcttaaaaatgactggttgcactagctgtcaatggtatggagtgaagtgaatccgttcttcagtaagcttgatgctcctacagcatgcactttccagagagag

SEQ ID NO: 81132 - DNA, 599 bp, Chicken  19866894374311_1
  misc_feature (1)..(215): n is any nucleotide
nnnnnnnnnnnnnnnnnnnnnnnnnnnnnnnnnnnnnnnnnnnnnnnnnnnnnnnnnnnnnnnnnnnnnnnnnnnnnnnnnnnnnnnnnnnnnnnnnnnnnnnnnnnnnnnnnnnnnnnnnnnnnnnnnnnnnnnnnnnnnnnnnnnnnnnnnnnnnnnnnnnnnnnnnnnnnnnnnnnnnnnnnnnnnnnnnnnnnnnnnnnnnnnnnnnnnnngaatttctctttttttcttcactaacattacttcatgcactgccatcgctttgtaacaagctaaagtctagcaggtgggaagttytgagaacttcatgtgttgggcaagagatggtagagagaatatttgctattggctttaggagtgcccacacaccactttgtcagtggatagaggtaattttcatcatagaagcttgtatgattacaagcattacagagaatcttgtatgattattcaacctcactgcagccttccagtacctaaagggagcctacaaactggagagtcaactctttacaagggtagataattgcaggacaaggggaaatgattttaagttgagggagggaagatttaggttggatatcagggagaagttc

SEQ ID NO: 81133 - DNA, 600 bp, Chicken  19866894374311_2
tgctattggctttaggagtgcccacacaccactttgtcagtggatagaggtaattttcatcatagaagcttgtatgattacaagcattacagagaatcttgtatgattattcaacctcactgcagccttccagtacctaaagggagcctacaaactggagagtcaactctttacaagggtagataattgcaggacaaggggaaatgattttaagttgagggagggaagatttaggttggatatcagggagaagttctttaccaagagagtgatgaggtgctggaacaagctgtccagagrtgttgtggatgccccgtccctggaggtgttcaatgccaggttggatggggccctgggcagtccagtctagtattagatatggagattggcagccctgcctgaggcagggaggttggagcttgatgaatcttgacgtcccttccaacctgagccattctatgaatctgtgattctatgattctatgattctgtgatgctgtgttttggatttttagtgaaaatcctgatgataacacatgagtgattgcagagcagtgtttacacagcaccaagagcttttctgcctcttgtgctcttttt

SEQ ID NO: 81134 - DNA, 600 bp, Chicken  19866894374318_1
gatgtgggctggatgcatgccccgtgctctcttgagtgctgcagagtgatgcatatgtcctggggctcatcctgcctcccgagcagaggtcagtgcttctgctgctatgggaaggcggcaatccccagctcgccagctgtgctatagaccaccctgctacaggtaaccactctgctataggcaatcaccctgctataggtgaccaccctgctacaggtgagtgcactgctgcaggggaccgcactgctgcaggggaccaccctgctataggcaaccgctctgcaacaaggagctgggagraaccgaggggttttacttgatgtcacacgagcagtgctgctggatgaacgctcctcgctgttactgccgggcactaaatcccctctcctagttaacattcagcgagcagggctctcttctgcctgacactgctgttctttaattagagattgacaggctgattagcactctgggctacagaaagatcaaaaaaaaaaaaaaaaaaggaaagcgagagaaatgttgtctttttcatcaggctccttttttgataccttctgttgctgggaaaaaaaaataaaggaggaaaataaaaaagga

SEQ ID NO: 81135 - DNA, 599 bp, Chicken  19866894374321_1
  misc_feature (1)..(69): n is any nucleotide
nnnnnnnnnnnnnnnnnnnnnnnnnnnnnnnnnnnnnnnnnnnnnnnnnnnnnnnnnnnnnnnnnnnnncctgttaactgcaataaaaattgtgatcatgttggcaggcctgacactctccagtttggatcttatggccaggttccacagtgatccaaggtctgactgagccttcctttgccatcatgcttaaatcatctcccttcgaaagagactcagatacctaataataaaagcagtctgatgattattatctttttcactttagataaagaacactaatcctccttcttctaactrgcttcttttcataaagtttgctaattacctgcataaatacatgtgagacattgatttaagctaactagtcaatggtttcaaaagctaccagaggaatttatattctagtgacaaacactcagccaagtactgagggacaagaaattagtctcattagcatcaacactagttaacaactgcttgtctcaaaacaggaaactgccaaatttaattgtttaaatttcaagagtctgattcagataagctattttctrcagctactaaatgactgcaaaagtatttttgctggtttgcaagtg

SEQ ID NO: 81136 - DNA, 600 bp, Chicken  19866894374321_2
ctttttcactttagataaagaacactaatcctccttcttctaactrgcttcttttcataaagtttgctaattacctgcataaatacatgtgagacattgatttaagctaactagtcaatggtttcaaaagctaccagaggaatttatattctagtgacaaacactcagccaagtactgagggacaagaaattagtctcattagcatcaacactagttaacaactgcttgtctcaaaacaggaaactgccaaatttaattgtttaaatttcaagagtctgattcagataagctattttctrcagctactaaatgactgcaaaagtatttttgctggtttgcaagtgagacatttcaatatcctggaatcaggttggactgtaaaaaaacaatagacttgcatcaagtaacagagatcatgaagcagtttatttctaatgattaagtcataaaaagttcatgggagcatattaagctttcaagccagtcaaaatgctttctttgccaatagaaagtacatgcttagaaatactatgagcaaagtagatctgtgaatactggtatataatgggacttcattctttacactcagaaaaccactt

SEQ ID NO: 81137 - DNA, 599 bp, Chicken  19866894374322_1
  misc_feature (1)..(68): n is any nucleotide
nnnnnnnnnnnnnnnnnnnnnnnnnnnnnnnnnnnnnnnnnnnnnnnnnnnnnnnnnnnnnnnnnnnngtgccccaaagcatgccaccggctgccctacagccctgtgggtgcttcggggtgctgctggaggacagcattggcatcagctgtcacgtctgactccagttgtggctctccatgtctcggctcctgatgcactgccctttagtcctttcccttgtccctctgcttctcctgtgctggcagctgtgctacctggtgtgtctccatccaatgcttccacttctgtcctaccccrtcccccattggaggggtctgtgccacaccagtgccctcccaatggtctgctttgttcactgcattcaggaaaatagagcaggcagagatgggttcttgtaagtgagcggtgttgtattactacacataaatgtcatgttaatggaacgttataacccaaagaagctcatagatcactctaaccattttaggcatatgttatgcttctgccacctgctctctacccatttgtttgcatttggtatgggaaggctgctgtctgcagggccaggagagcactggtgagagtgggcaggtgtt

SEQ ID NO: 81138 - DNA, 413 bp, Chicken  19866894374322_2
tattactacacataaatgtcatgttaatggaacgttataacccaaagaagctcatagatcactctaaccattttaggcatatgttatgcttctgccacctgctctctacccatttgtttgcatttggtatgggaaggctgctgtctgcagggccaggagagcactggtgagagtgggcaggtgttgaggacacaaggaagccatgggcagctcctcctacagagccccatctaccttcccaccagtacagagaattggctaagcatgcaggagctctactctgggtgctgatgggaaacwctgacctacctgtgccagctcagtgtctcctggggatctggtgctgctgaagcccttggtgccatggctctggattgtgccatgtaatgtggtcgaacaatgggcctttaaat

SEQ ID NO: 81139 - DNA, 600 bp, Chicken  19866894374323_1
ctgcagtctgtctgagtctgaaattttatattatctccccttccccctagtgctctgcaataaaacctttcatttaacttatagctgtgcaggctttgcttctgtatttgtaagctgtttttcaagtccctgtcactttttcttttggggtagtatgcaaattcatgttgtgcaactgatctgtgactcatccttcatttgcaaaatgtctctgggtgggccctgctggcctgcagttaactgtctctgctacactggcacattttgtgctctgctttgtctaatttgtggctttttccrgtgattagattccacatttaattatatcagccctttcagttttcaagaactacagccctgacaccattcactgtagtctgtgattgtatactgtttcagttaactttttctcagcctccatagcaaaaaaaccaactctcttaatatttatacttctttacttaatcaatatttactttcaaagctatagaatggcagacacaaagtaaacaaaagtcttgttatattgatttcattagcagatcagtctagtataaggctgagacaacttgctacttacttttatatgaattcctaatg

SEQ ID NO: 81140 - DNA, 563 bp, Chicken  19866894374324_1
ctgaaaaacaaattggacaagcattaagaagtataagtaaagcaatttagttatacagtggcggaatgatatgtctcagagctgaggagtgaagaacctaattctgagcatcttagtcaaatcaaggattgcagtaaagttcacaaaggatttagtatctaatcatgaaatccagtcatgatttttttgatatgttatctcagaattttgcttatataataacatggtaacagatttgtctgttgtatgtcctggaagactagtgacaggcaaagcttcatgcatgatttggaaatatgraaaaaaaaaaaaaaaatgttgtcattgtttctgacatcccgtcagttgctctgtaaataagcaacttttctttagctgctgggacacagcattcaagcaaaccagaatggaacatgatgaatagaactaagatactaagatgatctcattgctgcacctctttacatttgtaggtacaagtagatccactgtattggttaggtaagtttatgtttggttggcatattaaagtgtaaaggaaaaccgcagggcctttcaacatt

SEQ ID NO: 81141 - DNA, 600 bp, Chicken  19866894374329_1
tctgattggatttatatgggcatatctctgagaatacatctcctgcataggtctgaactacattccctgttttccatatacttgcataaatctagatggttcagttctgtgttttgtaatacttccatacttttgaagatagcggtttttcctcacaaagtactgcctgttcccctgtacacaaatgcacgcgcacacaatgtgtgctcattcagaaagaattttgaacaacgcacatttgaaaacattggttgacaaactctttccttgctgcttccctccagaagtggctggtattasgatrcttttcttggttaattttcagttggatgagacaggacactagcttcagactccagcaagaacctctctttgcttttctctcagctcttaacaagctcctctcacgtttgcagtcaatagcayaggcatggtttcatgtgatcgagcactcatccctaaacctcctccgcagagagacaggacttatggacaagatattcatcataagaaagcagacatattttgtggtcttgagatattttttttggagtgggagaatgctgatggttcttcggcatagcttttgctttagttttt

SEQ ID NO: 81142 - DNA, 600 bp, Chicken  19866894374329_2
attggatttatatgggcatatctctgagaatacatctcctgcataggtctgaactacattccctgttttccatatacttgcataaatctagatggttcagttctgtgttttgtaatacttccatacttttgaagatagcggtttttcctcacaaagtactgcctgttcccctgtacacaaatgcacgcgcacacaatgtgtgctcattcagaaagaattttgaacaacgcacatttgaaaacattggttgacaaactctttccttgctgcttccctccagaagtggctggtattasgatrcttttcttggttaattttcagttggatgagacaggacactagcttcagactccagcaagaacctctctttgcttttctctcagctcttaacaagctcctctcacgtttgcagtcaatagcayaggcatggtttcatgtgatcgagcactcatccctaaacctcctccgcagagagacaggacttatggacaagatattcatcataagaaagcagacatattttgtggtcttgagatattttttttggagtgggagaatgctgatggttcttcggcatagcttttgctttagtttttactt

SEQ ID NO: 81143 - DNA, 600 bp, Chicken  19866894374329_3
atacttttgaagatagcggtttttcctcacaaagtactgcctgttcccctgtacacaaatgcacgcgcacacaatgtgtgctcattcagaaagaattttgaacaacgcacatttgaaaacattggttgacaaactctttccttgctgcttccctccagaagtggctggtattasgatrcttttcttggttaattttcagttggatgagacaggacactagcttcagactccagcaagaacctctctttgcttttctctcagctcttaacaagctcctctcacgtttgcagtcaatagcayaggcatggtttcatgtgatcgagcactcatccctaaacctcctccgcagagagacaggacttatggacaagatattcatcataagaaagcagacatattttgtggtcttgagatattttttttggagtgggagaatgctgatggttcttcggcatagcttttgctttagtttttacttcacgtagactcttaacattttccagaccatttctaagaaaagccaatgtcaattatagattactgttaagcatgaaatagcatcgcataaatttgggcagtattcattacaccaaaacaagt

SEQ ID NO: 81144 - DNA, 600 bp, Chicken  19866894374340_1
aaggaggaggaattggtattcacagcaatcaggcaaagaggaaatgaatattcagccctccacggatgagcaaaaatgccagaggttgggatgggtgagagagcaggaatgaggagtcacatctttggcagggggactggaagagaagcacagcaggaagacccctgggcgctcccaaggtgccagaggcagggaagaaatgggaaccacatgtggaggcagccagctgctcttctgctgctggaaaacaacgcagggtgagcaggggtgagcagcaagggcttgagagagcaaacgggrgaccagtcaggtcttggctaagccacagacytgcagagtggagacaagcctatgtggagcactgcgacaagcaccagcatggggtgtgatcccctgagccaagcccatctgcagctcaccagcaccctctcagtggattttgttaatctagctgaaaaaaaaaccaacaatcaaacaacaacttccactgatgtagtgagctgaactgtctccctgcagggtctgacaggcggagtgggacagcagtctgcagctcagctgtctcacggactgtggctgtgagatcgaagcggcggcagc

SEQ ID NO: 81145 - DNA, 585 bp, Chicken  19866894374340_2
ggcaaagaggaaatgaatattcagccctccacggatgagcaaaaatgccagaggttgggatgggtgagagagcaggaatgaggagtcacatctttggcagggggactggaagagaagcacagcaggaagacccctgggcgctcccaaggtgccagaggcagggaagaaatgggaaccacatgtggaggcagccagctgctcttctgctgctggaaaacaacgcagggtgagcaggggtgagcagcaagggcttgagagagcaaacgggrgaccagtcaggtcttggctaagccacagacytgcagagtggagacaagcctatgtggagcactgcgacaagcaccagcatggggtgtgatcccctgagccaagcccatctgcagctcaccagcaccctctcagtggattttgttaatctagctgaaaaaaaaaccaacaatcaaacaacaacttccactgatgtagtgagctgaactgtctccctgcagggtctgacaggcggagtgggacagcagtctgcagctcagctgtctcacggactgtggctgtgagatcgaagcggcggcagcttgtgctttggagcag

SEQ ID NO: 81146 - DNA, 600 bp, Chicken  19866894374345_1
tgaaaatttggggatcaatgagtgtttaagcccacattttttattctattatatatgtgtaacatacaacatttttattctgagagcactcatgagaatttatagctttttcgaacagacacaagatgtctgttgtttcctttatgaatacttgtttcaaactcagaagtaatcttttcctactattggcttcacatcgtagtcttggacttttcttctatttcaagaaaatatattatgtacttaaaattttgcacacaaataatacatacttcccagatactgactatttttttttgkaaaattcatgtttaagattattaatggtacagtaatttgaagcagattaatcagagaaggaaactattattgatgcggagggctggttccaagacattcaacttactgcttcagttttattatctctctgaaatctgtatgtttattcatttctttttcatgctgaatatcccaagcattcccatactcaacccaaaaaaagcccacgtacagctgcatgtgtctctgggattgtgatagtaaagtttcagctgctgtcaatctggtgttgcagaaacaaggcagcaaatatcctaggag

SEQ ID NO: 81147 - DNA, 599 bp, Chicken  19866894374346_1
  misc_feature (1)..(40): n is any nucleotide
nnnnnnnnnnnnnnnnnnnnnnnnnnnnnnnnnnnnnnnntggatgtggctgctaaacttaaagcagcagctgatgcagaacaggccccagtgtgccctacggtttcctgggatggagcttttagttgtttggatgggtggaaggtggcagtggggtcggtttaaccgttaagtaccatttgtaaaactgctgctgacagcgttcgtcggctaaaagaaacctgcttactgatttttgatgctttccgtgaagctatgcaggcatgaaaacagcacaggaatgttcccgaagtgagatgygtattgttggtgtacgaggcttggtttgcttgtaggatttacaaaacaaagctcttgctgccaccaggacgctctctcctcagtcagcrggcagctcagcagaagcaagggagggggctgcacagagcagtgtggggctctgaaggtgggagtggagttggcagccccatgggacacactggctaatgagacagggcactgagaggaggtgcatcctctgtaggtctgctctccaacccacattcttagaagcagctcttcctcctggatatgtcgttctccatcgttagcaactcctt

SEQ ID NO: 81148 - DNA, 600 bp, Chicken  19866894374346_2
agtgtgccctacggtttcctgggatggagcttttagttgtttggatgggtggaaggtggcagtggggtcggtttaaccgttaagtaccatttgtaaaactgctgctgacagcgttcgtcggctaaaagaaacctgcttactgatttttgatgctttccgtgaagctatgcaggcatgaaaacagcacaggaatgttcccgaagtgagatgygtattgttggtgtacgaggcttggtttgcttgtaggatttacaaaacaaagctcttgctgccaccaggacgctctctcctcagtcagcrggcagctcagcagaagcaagggagggggctgcacagagcagtgtggggctctgaaggtgggagtggagttggcagccccatgggacacactggctaatgagacagggcactgagaggaggtgcatcctctgtaggtctgctctccaacccacattcttagaagcagctcttcctcctggatatgtcgttctccatcgttagcaactcctttctgctcttttcctacagcaggcttcagggctgaagtacgcagctgtgcccagctggggaacctgaaaaagaacaagctgcctgatgtat

SEQ ID NO: 81149 - DNA, 454 bp, Chicken  19866894374349_1
  misc_feature (1)..(59): n is any nucleotide
nnnnnnnnnnnnnnnnnnnnnnnnnnnnnnnnnnnnnnnnnnnnnnnnnnnnnnnnnnncgaagctgcggcccctcgaagccgcccggcctctctccttcccctttttccttatgtcagagttatttttccgcacgcttttgagacgtcgccaacccccaaaccccgctctggggcggctccgaggcccggacagagctccgaggacacctcggtggggcgggagcggcgcaaggtcaccaacagcgcccaaagagagcgggaacaatagattcattggaaacaatattttacagacgtrccgcgatcaatagggaccgcagcattacgccgtgccaatctgttaatgctcctaatggtctcctcgtcccgtttgcgcgctacgcggagtcgatggagtaaagcgattattacggagccactcgcagcatctttggggatgggggggggggggg

SEQ ID NO: 81150 - DNA, 599 bp, Chicken  19866894374356_1
  misc_feature (1)..(167): n is any nucleotide
nnnnnnnnnnnnnnnnnnnnnnnnnnnnnnnnnnnnnnnnnnnnnnnnnnnnnnnnnnnnnnnnnnnnnnnnnnnnnnnnnnnnnnnnnnnnnnnnnnnnnnnnnnnnnnnnnnnnnnnnnnnnnnnnnnnnnnnnnnnnnnnnnnnnnnnnnnnnnnnnnnnnnnntcttgtgtttttaaaagcgtatttttgattttagctacatagaaaggacatgttttatcactgtcattgtgtatcagtcaaactttaatactgctacaagtggatttatggtatgacattatacccctggacrtgatatattctccagacatgatttgcagaagtaatctgttgcagttcaatcagtgcaacctaagtcaattagtcatcatacaactacatattcaggactataataaattactagggaagtcattaaaaagtaggaaataaaaagagtcagtgttgagagacttaycactgttctttgtatctcattcttggacttgtgtttcctggaaatctttcctcaaggagaagcaagatgcaaacgtctttaagatacaacagtgctcagttaaaggaagattttcaaaagcaggcaactttctg

SEQ ID NO: 81151 - DNA, 599 bp, Chicken  19866894374356_2
  misc_feature (1)..(2): n is any nucleotide
nntcttgtgtttttaaaagcgtatttttgattttagctacatagaaaggacatgttttatcactgtcattgtgtatcagtcaaactttaatactgctacaagtggatttatggtatgacattatacccctggacrtgatatattctccagacatgatttgcagaagtaatctgttgcagttcaatcagtgcaacctaagtcaattagtcatcatacaactacatattcaggactataataaattactagggaagtcattaaaaagtaggaaataaaaagagtcagtgttgagagacttaycactgttctttgtatctcattcttggacttgtgtttcctggaaatctttcctcaaggagaagcaagatgcaaacgtctttaagatacaacagtgctcagttaaaggaagattttcaaaagcaggcaactttctgtgcatagatctgtgctcatatatagaaaaagttgaaatttgtgaaagcctggatatagcagcttgctaatggttgcatgtggatyggttccacataagacaacagtaaacactgaaatttgattctgttcaaacataggcttgagatctctgcctggattcacag

SEQ ID NO: 81152 - DNA, 600 bp, Chicken  19866894374356_3
tacatattcaggactataataaattactagggaagtcattaaaaagtaggaaataaaaagagtcagtgttgagagacttaycactgttctttgtatctcattcttggacttgtgtttcctggaaatctttcctcaaggagaagcaagatgcaaacgtctttaagatacaacagtgctcagttaaaggaagattttcaaaagcaggcaactttctgtgcatagatctgtgctcatatatagaaaaagttgaaatttgtgaaagcctggatatagcagcttgctaatggttgcatgtggatyggttccacataagacaacagtaaacactgaaatttgattctgttcaaacataggcttgagatctctgcctggattcacagcacttgcacgactgcttcagtttgacctgatgtgttttccccacgcagacctcagcatagtctcatagagggttactaaaattcctggagcaattttatttaacatttccctcaaattaaagttattcaaagatgtaaaagaaaacagaagaaaaagaatctgtttacaagtttgaattttacagagagctcatataaaagcaccatttctggggggtta

SEQ ID NO: 81153 - DNA, 600 bp, Chicken  19866894374369_1
tgtaattttcctgtattttaggatattggtaatttgttgaactcctgattgtttgctttgctttgttgatttctagatattgccttgcaagacctaggaagtcagaaaatattaacatatgcaattcttacaagatctagttcaaagcttagaaactgactttgaagctgcattggtattcccttcttcacattaaaaagtgtatattttgactttgtagatgacctagtaatttatgtgttcctcagccacacagcagatcttgttatttttttattcatatacggctttagctctccrtgatttttcctgacttttttactttgtgtatcaatagcagcagataatgaaatcaacgtgatgaattttccttttgcctctttgggtgatttagactttcctgtaaatcattcttgctttgatacatgcaatatttattctttcagatatatgcaaatataatcagtagtataatcaatctaacgcatgggttattctacatttgacttcttgtaatacagtacattaacgtgtagtaataacatcaaaaccttgactgccatacatgattaaatagtaaaataattaatatcttatagt

SEQ ID NO: 81154 - DNA, 599 bp, Chicken  19866894374374_1
  misc_feature (1)..(160): n is any nucleotide
nnnnnnnnnnnnnnnnnnnnnnnnnnnnnnnnnnnnnnnnnnnnnnnnnnnnnnnnnnnnnnnnnnnnnnnnnnnnnnnnnnnnnnnnnnnnnnnnnnnnnnnnnnnnnnnnnnnnnnnnnnnnnnnnnnnnnnnnnnnnnnnnnnnnnnnnnnnnnnnnatcgtaatcctcacaagcagcactggcaatgaggcacagcttggctcgttcagtaaattgcagagcaaagagaaaaacaaggcaaggcttttttatttttttcttttctgaggcaataaattgtgagggagcagcctgcraagctgcagcagccgcgttccctgggctccttaaaagggagattttagtccgggacagaagggagacagcaaagccgtaaacacccttgcaggaatgtggctgctgagaaatgaggctcccgcagcagtggggggagcagagccgtgccgggtgccttggccatccccacatctggtggtccycagggagctctgacccagtgctgtgtccctgcatccccaggtccgtgccatgcacacgtccccatggctggctggtggcgcgggatgtgacggagccacagggcgaggggcggctg

SEQ ID NO: 81155 - DNA, 600 bp, Chicken  19866894374374_2
tggcaatgaggcacagcttggctcgttcagtaaattgcagagcaaagagaaaaacaaggcaaggcttttttatttttttcttttctgaggcaataaattgtgagggagcagcctgcraagctgcagcagccgcgttccctgggctccttaaaagggagattttagtccgggacagaagggagacagcaaagccgtaaacacccttgcaggaatgtggctgctgagaaatgaggctcccgcagcagtggggggagcagagccgtgccgggtgccttggccatccccacatctggtggtccycagggagctctgacccagtgctgtgtccctgcatccccaggtccgtgccatgcacacgtccccatggctggctggtggcgcgggatgtgacggagccacagggcgaggggcggctgctcgcatcagtgactgccctgtgcgtttgggtagggggttccctttttactcttctgatcttttcactcccacaggatctacagactgcctctcagggatacttgttgctgacgtagccctgcacttttctcccacaccagcatgtgttgcatttccactgaagccagctggcagggacggctg

SEQ ID NO: 81156 - DNA, 600 bp, Chicken  19866894374377_1
gttctgagactgtgcattagaaatatgaaaaccaagggctcagctcccaaaattcaagagatactatcaaaagccaaaagtaagattgcttctttctagcaaataagttactgcattccaactgttgcattatatttcttatttaatgcatcgttgttagtctggttgttaatttggcaagtcattagctgttttataggcattgttaaacagacatttaccatggtattttcatttgtttatctattattcagcatctgttacctttctacaagttatattgcagggcccccacccctmtccctccaaaaaatgctatggttaacactgcaatttgttaagtgcaaaaaattcttaactgataaatatattatatatagttcagggtttttctgattgtagaaagctgagatatcttggaataaaaataaaaagagaagaataaaaaagaaaaraaaagatactttttatgagaatttagaacatgagaccagcacaacttgatttaaggtattttcagtacagctttcctaaacacggtaaccaagatcagacctggataaagtgtgttttttaagaaacttgtaggataagaataaa

SEQ ID NO: 81157 - DNA, 600 bp, Chicken  19866894374377_2
gttagtctggttgttaatttggcaagtcattagctgttttataggcattgttaaacagacatttaccatggtattttcatttgtttatctattattcagcatctgttacctttctacaagttatattgcagggcccccacccctmtccctccaaaaaatgctatggttaacactgcaatttgttaagtgcaaaaaattcttaactgataaatatattatatatagttcagggtttttctgattgtagaaagctgagatatcttggaataaaaataaaaagagaagaataaaaaagaaaaraaaagatactttttatgagaatttagaacatgagaccagcacaacttgatttaaggtattttcagtacagctttcctaaacacggtaaccaagatcagacctggataaagtgtgttttttaagaaacttgtaggataagaataaagacctggtaactgcaacacattctatttctatagacattatacattttttctttttatcttccactgcaaaggaaaagagaaactcaaaggatttagaggttttgttctttgccagcaggcacagagcatcatttgggaaggacctgtgaaagat

SEQ ID NO: 81158 - DNA, 600 bp, Chicken  19866894374384_1
agggaaacactgcaaagaaaaggcacacttgtatggagcctcattgcagctggatgtgttcctacaggaggtttctcacaaaggaaagagaatgaattatttttgctccctgaacaaaggcaaaattgaaccttcagagggtatataacacaaagaatgttgcagacacttggaattggacctgttaataacagcatctcaacacccctttcacataattagtctcacttctttctagagcagaagtactctttgaaattcacacgctctcaacacaatatttaagttcaatgcattcaygtctgttttacttacaccccarcaccatgtgaacagacgcaatgccttgcccctctgtaccgactcaagagtgccaacatacatcctgatccaggccccactgagccatcagtttcctttctgagcccacactgtaactgacagcagcttaaaaaggacagcatggtgcagagagctccgccagcaaacaacgtggccttagcagcgctgtccccagcacatctacctgcccacccacaggcaggcacagccctctgctcaccaggcaggccaccccaggtaagaagcacagctttcaga

SEQ ID NO: 81159 - DNA, 600 bp, Chicken  19866894374384_2
gcacacttgtatggagcctcattgcagctggatgtgttcctacaggaggtttctcacaaaggaaagagaatgaattatttttgctccctgaacaaaggcaaaattgaaccttcagagggtatataacacaaagaatgttgcagacacttggaattggacctgttaataacagcatctcaacacccctttcacataattagtctcacttctttctagagcagaagtactctttgaaattcacacgctctcaacacaatatttaagttcaatgcattcaygtctgttttacttacaccccarcaccatgtgaacagacgcaatgccttgcccctctgtaccgactcaagagtgccaacatacatcctgatccaggccccactgagccatcagtttcctttctgagcccacactgtaactgacagcagcttaaaaaggacagcatggtgcagagagctccgccagcaaacaacgtggccttagcagcgctgtccccagcacatctacctgcccacccacaggcaggcacagccctctgctcaccaggcaggccaccccaggtaagaagcacagctttcagagcctgcaggtagtgcttagagc

SEQ ID NO: 81160 - DNA, 600 bp, Chicken  19866894374386_1
cctctggatggttgtgaagtgaaatcaggagccttggctgaaccaaacagccagtacttgtcaactgacagtcagtatctatcgcctagtaaacagtcaaaagacactcccttcattgcatcagatcagatggctagggcctttgcagatgtgcattcccgagtgagccgagactcaagtgagatggactctgttctggagcagttagaccgttcagcccgggatctaggcagggagtcggtggatgccgaggaagttgtgagagaaatagacaagctcttgcaggactgtcggggaaaygaccctgtggccatcagaaagtgagggggaaaataaggacaggctggcagttacgttcctcttctgctgattaaaactaactaaataaaaaataaaatcccctggttgtaacagatttacaggaatgaaggaagaccaatgctgctttaaggcttttagtgaacatctgaagtgcccacaagtatgttcttttcactgctctttctttttgacagataacactggtttcattttgaccaaactttcattaggacagagtcaagtacacaaagaactatatgaatgaggaaagacggtgcc

SEQ ID NO: 81161 - DNA, 600 bp, Chicken  19866894374386_2
acaagtatgttcttttcactgctctttctttttgacagataacactggtttcattttgaccaaactttcattaggacagagtcaagtacacaaagaactatatgaatgaggaaagacggtgccattttgacaatctgataggaaagtgcgagaaaggtggaatggaaatacgtctgatactttaagactgtcctcaatagctgatgctgactttactgtttacgtacaaaccccaagaaaaacagggttgaatatttctgttctgtggtggatttccagcagtcaccacaggcttctacrgaaagtcctaaaagagttcttgtagtagtccaagtgacaccaaacattaacattcatttgtggtaaacatttatgtacaaagttatctgccacaaataagagagggaagaaaaaaaaaaaaactagaaaacaaaaaagacaccattcagatcattattcaaccagacatatcctgatcatcagtaaaacacttcatatcatattaagattaaatgtaaaatgatatagtccatcttgtcctgcacacacatcagctaattcacttgaaaaagaagaaaaaaaatagtatctatttagcat

SEQ ID NO: 81162 - DNA, 599 bp, Chicken  19866894374390_1
  misc_feature (1)..(87): n is any nucleotide
nnnnnnnnnnnnnnnnnnnnnnnnnnnnnnnnnnnnnnnnnnnnnnnnnnnnnnnnnnnnnnnnnnnnnnnnnnnnnnnnnnnnnnnaatcatttatgttttgtgtaactcctcacatttctgcttatgcaacttctagcagtgcagtggtactgacacaacggcacacggcatccatttgttcaaagcctttagaaacatccacgtgacaagaagaaaggggttaatattaactatactccaggcctgctgcaaaaacagtacttgaaaagatttatcctgcataagctgggggagagrgcaatgggacatctgcctccttcagctctattccacttcagtcaaactaagacactgacagaaggaaatacatttgtgcagtcatggaaggagcactgggatcaagagatgggtaggaaagcagaagctgggaagacaagcagcatcactgtgggatcaggcagtgagctgccacacaagtggaactacaacagaagaaaacaggtgtcacagagaagccaygagctacaagaagagattccaagcatccacaaaaattaagtccacgtaatcttaaagtgaaacagtgagaaagwgtg

SEQ ID NO: 81163 - DNA, 600 bp, Chicken  19866894374390_2
gttaatattaactatactccaggcctgctgcaaaaacagtacttgaaaagatttatcctgcataagctgggggagagrgcaatgggacatctgcctccttcagctctattccacttcagtcaaactaagacactgacagaaggaaatacatttgtgcagtcatggaaggagcactgggatcaagagatgggtaggaaagcagaagctgggaagacaagcagcatcactgtgggatcaggcagtgagctgccacacaagtggaactacaacagaagaaaacaggtgtcacagagaagccaygagctacaagaagagattccaagcatccacaaaaattaagtccacgtaatcttaaagtgaaacagtgagaaagwgtgctgattgttttaaaacagcactgttttgtgctttatctcwagagtgaacgtattccaagagcttgtaaggaacctattgagaggtttagaggarctggtataaaatgagcatgcgtactccgtgcacttccaggaattatacaagccactccttagatgcaagaactcaaacaggaggccaacagaagggccaagctcaatgtcaaaaccaagaacaagcacc

SEQ ID NO: 81164 - DNA, 600 bp, Chicken  19866894374390_3
gagrgcaatgggacatctgcctccttcagctctattccacttcagtcaaactaagacactgacagaaggaaatacatttgtgcagtcatggaaggagcactgggatcaagagatgggtaggaaagcagaagctgggaagacaagcagcatcactgtgggatcaggcagtgagctgccacacaagtggaactacaacagaagaaaacaggtgtcacagagaagccaygagctacaagaagagattccaagcatccacaaaaattaagtccacgtaatcttaaagtgaaacagtgagaaagwgtgctgattgttttaaaacagcactgttttgtgctttatctcwagagtgaacgtattccaagagcttgtaaggaacctattgagaggtttagaggarctggtataaaatgagcatgcgtactccgtgcacttccaggaattatacaagccactccttagatgcaagaactcaaacaggaggccaacagaagggccaagctcaatgtcaaaaccaagaacaagcacctccaagtgtatgctaaggtcatatgtgattcatcgcatgaacttcatacgctgtagtttggatactgcagatga

SEQ ID NO: 81165 - DNA, 600 bp, Chicken  19866894374390_4
agtcaaactaagacactgacagaaggaaatacatttgtgcagtcatggaaggagcactgggatcaagagatgggtaggaaagcagaagctgggaagacaagcagcatcactgtgggatcaggcagtgagctgccacacaagtggaactacaacagaagaaaacaggtgtcacagagaagccaygagctacaagaagagattccaagcatccacaaaaattaagtccacgtaatcttaaagtgaaacagtgagaaagwgtgctgattgttttaaaacagcactgttttgtgctttatctcwagagtgaacgtattccaagagcttgtaaggaacctattgagaggtttagaggarctggtataaaatgagcatgcgtactccgtgcacttccaggaattatacaagccactccttagatgcaagaactcaaacaggaggccaacagaagggccaagctcaatgtcaaaaccaagaacaagcacctccaagtgtatgctaaggtcatatgtgattcatcgcatgaacttcatacgctgtagtttggatactgcagatgaattctgattagctctgttacagcattctatttactgtaaccac

SEQ ID NO: 81166 - DNA, 600 bp, Chicken  19866894374390_5
cactgggatcaagagatgggtaggaaagcagaagctgggaagacaagcagcatcactgtgggatcaggcagtgagctgccacacaagtggaactacaacagaagaaaacaggtgtcacagagaagccaygagctacaagaagagattccaagcatccacaaaaattaagtccacgtaatcttaaagtgaaacagtgagaaagwgtgctgattgttttaaaacagcactgttttgtgctttatctcwagagtgaacgtattccaagagcttgtaaggaacctattgagaggtttagaggarctggtataaaatgagcatgcgtactccgtgcacttccaggaattatacaagccactccttagatgcaagaactcaaacaggaggccaacagaagggccaagctcaatgtcaaaaccaagaacaagcacctccaagtgtatgctaaggtcatatgtgattcatcgcatgaacttcatacgctgtagtttggatactgcagatgaattctgattagctctgttacagcattctatttactgtaaccacttcataaagctgtcacacagaacacatgacgacaatttgcagccttgtttgtca

SEQ ID NO: 81167 - DNA, 600 bp, Chicken  19866894374390_6
ggatactgcagatgaattctgattagctctgttacagcattctatttactgtaaccacttcataaagctgtcacacagaacacatgacgacaatttgcagccttgtttgtcacccaagttctattaaaacactgcagtgcaaagtctgaggttcagctgaaggaaaaagaggcaaacgtcgcaaggaagtagctacaaaaaaggcttgaaaggcaatcctgtcagataaagatgaggaagcacagtggatttggagggtgtgctaactttcctctgaagcaaggcatcaaaacacacacstgtatctaaagacactgagtgcagccccatacaatcaggttttgctctacctcaaggtgggacagagaaaggtctctttcagaatgccctcataacaaaggccatggatgaaggtaaaaccaatgggcaaatggacacagttggacaggcaaccctaccaaccttattaatgaagcaagaaactttaaaaaaaacttcccttgcaagtcagaccaagtttgtatagttcattctgcatatattcagccaaacacctactgactgttaacgataccagagcattaactacttgcatggtag

SEQ ID NO: 81168 - DNA, 600 bp, Chicken  19866894374391_1
tagcaataacatattttcagtgcaagggagactgtttgaaaatggaataataagcaatgaaaattatgtattgggatgctgagatcttaatgctgggatgcactgaaataataagattgattttattttattttattttatgttattttattttttaaaatcagtttttccattatttggctaatatatttttttaaatcctgggactctggaagtcagggctcagattctgttcctggttaacccctctgcacctctgttttctcgaaggtaacccagaaacagctgcatctcctcacrtgatagagttgtttgggccacattatttagaaccagtgcccagagtccacgcaggagcacatctaacctcrcttgtttgaactatgccggtgtgatttcaaatggcaagctgctgtggagtaatccacacaaaatgataggcaggttttttctggtgcaggcccgtaggaggcagagagggaggagctgggaagcactgacctgagtggaaactgccttcaccacctctgacttgccttgctgatacctggaaggggattttctgaacagaaaacctgaaagcaacatgaggagaataat

SEQ ID NO: 81169 - DNA, 600 bp, Chicken  19866894374391_2
tgggatgctgagatcttaatgctgggatgcactgaaataataagattgattttattttattttattttatgttattttattttttaaaatcagtttttccattatttggctaatatatttttttaaatcctgggactctggaagtcagggctcagattctgttcctggttaacccctctgcacctctgttttctcgaaggtaacccagaaacagctgcatctcctcacrtgatagagttgtttgggccacattatttagaaccagtgcccagagtccacgcaggagcacatctaacctcrcttgtttgaactatgccggtgtgatttcaaatggcaagctgctgtggagtaatccacacaaaatgataggcaggttttttctggtgcaggcccgtaggaggcagagagggaggagctgggaagcactgacctgagtggaaactgccttcaccacctctgacttgccttgctgatacctggaaggggattttctgaacagaaaacctgaaagcaacatgaggagaataatctgtttgacccctgctctctcctaagccttccattttcatcatgacatctcatttctcaccaactgcaggt

SEQ ID NO: 81170 - DNA, 600 bp, Chicken  19866894374393_1
ccttttccagaccctagactatggcactataagaacaagtctcccagaactggaacttggtcctactgtgaatatgatatacatggaactaagtttttctgaaaaaattagagaactatgatgtgactgttctgcacatgcagttaatcttgtgcttgcataaactgtgttaatttgtgcaagagttatgaactagcattactattctatcagcaaacctcacagacaagatgaatttttgccatatttaaagaaagtgttacactgaacattttcagtgattggggtgttgttacttaytgcttttctctacagatatgtctgcacatacaagaattacattgttttctaattacttgatatagaactaacactcaagagttttaaagccatgaaaaatatttatcataggaaaaggaggaatccataacatttaagaaggcaaattatgatgcaagaatttgccaagacactttttattggtacacttaaataagcaaggccataactgtacatcaagaactattacaggatcctctacatgaaggaagaataaaatatctgtgctgaccttgacaaagcaacatttctcttgtgatg

SEQ ID NO: 81171 - DNA, 574 bp, Chicken  19866894374393_2
aaaaggaggaatccataacatttaagaaggcaaattatgatgcaagaatttgccaagacactttttattggtacacttaaataagcaaggccataactgtacatcaagaactattacaggatcctctacatgaaggaagaataaaatatctgtgctgaccttgacaaagcaacatttctcttgtgatggcacccaccaccagctgtcctgtgaggtaatacaaagattcatcattgatgaattattcattggtttggaagtcacctttctaccaaaacattcacaaatcacagctcatcygtattggtctccatctttaccattgtctccccagaaattatttccctgctggtgagatgcataaatacatctgagacctttgaaagctaatgacaaatcttcaccagcacagcattggaaaaaaattttccaagagggtgtcatttgattccagagcctgcagccccattccaggacgcacagtgctactttgacacaacctcctgccagaatgttcagtagatttgtacatcatataatccaaactgagtgcatttagcaacaggctccctca

SEQ ID NO: 81172 - DNA, 494 bp, Chicken  19866894374394_1
ttctcaggctggacagaaacacagatctttgcgtttacaacctttttaatttgagaatctaatttatatttttccccctccagtagaggtcaggctctctagaagagttgtaaaataaactgtcttatactgccatagaacaggaaggaactgggttgtttcagtcactttcagtggatgtctgagaagtaccttcatacttgtactgatttctggaccaaattaaaccagtgtttcccagagaaggagaagaccttccaggtccaggacatggtggtgtgcagcagcagtgtggagccscagcaaaggagctccactgggtatcagctagtttggatgccagaaatactggtcccctcaggaaggatcaggattctgccaaggatggttcccagtaaggtgggaacaggtgattctcatgcatgcaaaaggcaagtagagcagtgacaatagactgtacttagagacaacaactgcacctgtaattatgggat

SEQ ID NO: 81173 - DNA, 599 bp, Chicken  19866894374396_1
  misc_feature (1)..(4): n is any nucleotide
nnnntaagcaggtggaagacagcaacttggaagcactgaagaccaactctcctgcaggctctgcctggccagcaaagactctgcaactatcctactggggatcacaagcatgctaacacctagcctagaagcccattacatcctacttgtcttttatgtttgctaaccaataaatgattgctttgtactctttggagtctcgttgtatataggaaaagttccccaaggtgatccagagagagactgttacacctgtaacagcaagtgagtgctattaccttaaatgatcttgagtaaagkaagaaatttttattacagttattcactatctactatccattacccctctgacttatcttacatcaagtctgagctttattacaggcaaccaatttttaatgccatgccacagtaagcaatctaaaatgaataggctcatgtcagtaatgaaaaggttatccagcctccaaaaatccaggtatatgtatattcttccccctccatttttacaggcttattgtaatactgaaggcttgcttttaatgtaaacctgctacacttatacattattaataatgttagaacattttggagtaaaa

SEQ ID NO: 81174 - DNA, 600 bp, Chicken  19866894374401_1
tagacacaatttgcaggtggaagcagttctcttccttcctcactgtatctacaggagaaagtgccaactttttatttacttcccgaactggttcttctgtcttgttgagtgaggtctttctttctcacctcataacacacactctgtatttgcatggcttcagatagataattaaagcactcatcgtcacttatctgaaccctgctataaatctccacatagcagagagtgcagccttttggcaggagcaaaagcacagcccaatgcttgctgaagaagagcataacggctgctgacatkctctttcagcttgtactgttgggaatgagttcaccttcctgagtcaaccctctgccataaagtaaagcccctcttgcctgaacaccacgaagattcctgttaagaaccgggcagaagattggaattcactgaagaacttgaaaaagcaggtgtataatggtaggttatgtgttcgggcgattacttacttggggtagggagagaaggctattgattcagatgtttacctttctgtaagatgatgttcacatgcttccttgccctccatctccatctccctgcagccccatgttgctatcc

SEQ ID NO: 81175 - DNA, 600 bp, Chicken  19866894374404_1
acagcttgagatatttcctctggtcatctccacttcactggtattgacattgttcatattgtacttctttagcactgttgtttgttcttctttaactccacttctatgattttatgaggttaagatattttttcccccgcgattgcattagtactgctctagttttcaatttcctcttgttcatgttaccccaagtaaagctactgtcagtgctgtgttcatgcggacacagtgggacaactagagggtgggtgtgaaatagtggtcttaatctataaatcagtaagtggaagcatctaygaatctaaatctatactagtgtattttatagaaggaagtttagtttctcagaatgacattgtcatcttgtgtgaagaaaagttttataatttgaagaataaatgatttagtgaaatacatttagttttcccttcctctggatatggaaagatattttctttagaataatctgtatttttattaggctttatttctgaagtaggcaataaaagttagagtgttttataatgagtgacagaccatgtgatttaggtcaggattgctgacattataacctttccaggaagcaattatggtata

SEQ ID NO: 81176 - DNA, 600 bp, Chicken  19866894374406_1
ccctgctcatgtcaaggtgtttggaactagatggtctttaatgttctctctaacctaagtcattctatgactcaaacctgagctactattccctacatgaaaaggatggtaaactacctcaggtataggtccaaagtctatctgattgaagaagttatgtacagatgtgtaggtcttaaataccatttaatatcaagttgcacctcctgtctccttgccttcactgccgcgggcaagcagtcaaatttcaaaaaagacacttgactatcaagcagaggcaacttcatttagctcgagttytttctcacttgttcatgagcacagtgagatataatctgtggtgaaatgtaaggtatgtaaatgccaattgataagatatgatgaaatgcttaacaaatgacctcacttgtactgaccattgagaaagctaaaaagaggatttttatgataaaatcttagatctctgaaartaattgcttctgacatctccagctaggcaatgggctgcataaaacagtgccattcagttacaaattctgaggctactgaagtgagaagaacacagggtagatacaaattaaatcttacttatgatgaaca

SEQ ID NO: 81177 - DNA, 600 bp, Chicken  19866894374406_2
aggtcttaaataccatttaatatcaagttgcacctcctgtctccttgccttcactgccgcgggcaagcagtcaaatttcaaaaaagacacttgactatcaagcagaggcaacttcatttagctcgagttytttctcacttgttcatgagcacagtgagatataatctgtggtgaaatgtaaggtatgtaaatgccaattgataagatatgatgaaatgcttaacaaatgacctcacttgtactgaccattgagaaagctaaaaagaggatttttatgataaaatcttagatctctgaaartaattgcttctgacatctccagctaggcaatgggctgcataaaacagtgccattcagttacaaattctgaggctactgaagtgagaagaacacagggtagatacaaattaaatcttacttatgatgaacagtctggattgtttccttaaacttgcattttgtgtgtggagaggggaaaaataatcatttcaaaatagtatgcttttgtgttttttatttttagaagttgccacggtgttttgattaacagcaaggaatgcctgtagggtagttgtatgatgttaatgaaaccccactgtc

SEQ ID NO: 81178 - DNA, 600 bp, Chicken  19866894374413_1
ttctggcataccagggctcaatacattcgttgttatcagaaaaaatgctcagtactttgtagacagacatctgtttttgtgttactggcttaggttactaaataattcagaaacagtaactgcaaggtgcagctgtatgctgttagccatctagttatatgaagaacgagctgagcatcaaaaaggaggccactgaagtggagttttaaaagatgaaagtaatgcagcaacaggcaagaaatgccttccgacatctttttttctgccctgatgtctgagggaaaaaatacaaagtggcaygcagcttcacagtttccaaagtattttgcaacatacagtgtatgaaacgtaacaagaaacaatgtaccaactcaaggacccctgcaaataatagcacagctaacgcctggagaaatcctcagtgctatatctattgggcaggggcctaacaggtcaatgaatatcagctttcttgccagctcagccctctgtgctacagccatgctgtgcacatggctcttcaaaaacaattcataacattacagaggatgtataaaagtgttctgatatgaaatgcctacattgtgtgaagctgtagcc

SEQ ID NO: 81179 - DNA, 600 bp, Chicken  19866894374416_1
ccattttgtagagtcctgctgtagccatcttgattgcagtactcctggaaagagtgggaaacaaatacgtgggttaattttttcactgcttctagtattaccttgctttaaacagtgaagtgcaagggtagtcatgagtcagcttgtacactaaggaacactgttaatgacacacaaagagcattacttctcttaaaatggaggagtatatgaggcattacatggattgcatgattttccacctcaggacagcaagatgctgagtgtgagtcaggctgtgtggacaatggtttgtgagayttttcgctttatccatccctcattatagaatcacagaatcgttaaggctggaaaagatcactaagatcatcagttccattaacccatcaccatcatgcccaccttccttccccctgctcctttctactgtgatctgagaaggctctgggagacaaattgcacaccttctaaaccycacagctaaactttgggaggtgctctgtcagcaattaacactttcatcctggagaccctcaaagaatgccttcactgagatggagacactggtggattttgtcactgtgtgtgaacgaagtcctt

SEQ ID NO: 81180 - DNA, 510 bp, Chicken  19866894374416_2
aaagagcattacttctcttaaaatggaggagtatatgaggcattacatggattgcatgattttccacctcaggacagcaagatgctgagtgtgagtcaggctgtgtggacaatggtttgtgagayttttcgctttatccatccctcattatagaatcacagaatcgttaaggctggaaaagatcactaagatcatcagttccattaacccatcaccatcatgcccaccttccttccccctgctcctttctactgtgatctgagaaggctctgggagacaaattgcacaccttctaaaccycacagctaaactttgggaggtgctctgtcagcaattaacactttcatcctggagaccctcaaagaatgccttcactgagatggagacactggtggattttgtcactgtgtgtgaacgaagtccttccaacctctacgtccatgcacaggcagcagcctcccatcttgtagacggaggaggtgacaatctccaggtgtcaccataatgata

SEQ ID NO: 81181 - DNA, 600 bp, Chicken  19866894374431_1
caaataagtcatctaataaactatttatcactgcattggtacactcactgaagtgctgtaaaatttagcactgatgcacgttttaatgtagcaggctattgtatgcatataaccttcaaaaatcaatagtatattttaatggtgctttattacatgttgtcatacgggtataaaaatgagaaaaagtacttctggggggtctgagaatacattgcagggaaagtgaatgtgtttccataaaagtacaatttctttgtttcctttgagtgttgtcaaaaacagaagaaaaaattacttctytttatttacgatcccatttgctttatgtatatgtcagagaaagtgtatgaaacactgctgatccagtggtaataaggtgaacaaaattaggttactttgaaatactgtttagcttttcatttgtttagaacaatattgcagtgtagtattaatgatttatttatttcatgtccacgataaacacagtatgtgcttgcccaacgttcagcttcatgaagctttctgcttttggtagtactacttgctcctcatactgttactgtataggttgaaatgagttgtattccttaaaagttgtat

SEQ ID NO: 81182 - DNA, 600 bp, Chicken  19866894374441_1
tgctcagctcactcttcagtagaaatgcactccttgtctgggccattacctacacctagtagcacaagctgcctccaaatatgatggaaatcatgccagagttcagtaagatttcagcaagtctgtcactgcccagctttttggagttttgagcagtggcctgtacactgggctaatccgcccaacatgcaatgcctacttcgggggacagaggaataggaaatttaaggattaacatttcttcagtacctgagggaacaccacatgtaaccatcgtatgatgattacaaccatctaacrcctctgaaaatctcctgctatagacacagagctggcaggaaacgtacaagatggctctctaggacagaaaagtaagggcagatatctccagwgcactgcgtgtggttcagcctcttgacttccattagcgataatagggaaaacccagctatgtcctaccctgacaatgcagcccaagaggatttttttgccyataaacactgtgatttactgcacagcgctgcacgcagtattcccacctctgccttcattttgtcagcacagtcattgccatgtgctagctctgcagcaagacaagat

SEQ ID NO: 81183 - DNA, 600 bp, Chicken  19866894374441_2
atgccagagttcagtaagatttcagcaagtctgtcactgcccagctttttggagttttgagcagtggcctgtacactgggctaatccgcccaacatgcaatgcctacttcgggggacagaggaataggaaatttaaggattaacatttcttcagtacctgagggaacaccacatgtaaccatcgtatgatgattacaaccatctaacrcctctgaaaatctcctgctatagacacagagctggcaggaaacgtacaagatggctctctaggacagaaaagtaagggcagatatctccagwgcactgcgtgtggttcagcctcttgacttccattagcgataatagggaaaacccagctatgtcctaccctgacaatgcagcccaagaggatttttttgccyataaacactgtgatttactgcacagcgctgcacgcagtattcccacctctgccttcattttgtcagcacagtcattgccatgtgctagctctgcagcaagacaagatttatggaggctttccttttgcgctcacctttcccacgttgctacaaaggcaaaatgacagcttttaggggaaagggctgagtaaatttacaa

SEQ ID NO: 81184 - DNA, 600 bp, Chicken  19866894374441_3
gcctacttcgggggacagaggaataggaaatttaaggattaacatttcttcagtacctgagggaacaccacatgtaaccatcgtatgatgattacaaccatctaacrcctctgaaaatctcctgctatagacacagagctggcaggaaacgtacaagatggctctctaggacagaaaagtaagggcagatatctccagwgcactgcgtgtggttcagcctcttgacttccattagcgataatagggaaaacccagctatgtcctaccctgacaatgcagcccaagaggatttttttgccyataaacactgtgatttactgcacagcgctgcacgcagtattcccacctctgccttcattttgtcagcacagtcattgccatgtgctagctctgcagcaagacaagatttatggaggctttccttttgcgctcacctttcccacgttgctacaaaggcaaaatgacagcttttaggggaaagggctgagtaaatttacaagtaagtattacagaaaggaagaaaaaaacggacaacacagcaggaaagagctcgagggaagaagtgagaaaaggaaataggtgacattcaactcttcaagt

SEQ ID NO: 81185 - DNA, 599 bp, Chicken  19866894374442_1
  misc_feature (1)..(10): n is any nucleotide
nnnnnnnnnnttgggtggattagcccagtgtacaggccactgctcaaaactccaaaaagctgggcagtgacagacttgctgaaatcttactgaactctggcatgatttccatcatatttgaaggcagcttgtgctactaggtgtaggtaatggcccagacaaggagtgcatctctactgaagagtgagctgagcacagagcttgaggtgctgctctatcagcttggtacaggtacagctgcagagtggcttgtggtgtagcgggactgaaccattcagctgcgctgtgttcaagcattartgtgtgcttggctaaaacttgatcagctaaaaggtaattagtttcagccaagtaggaattggccagtattgaggactctgtggttcaaaatagcacaagcagtgagtctttgtgagggactttatctttgcagattgaaagtagttacctgattcccacagggaggtaaaagcatgaagattttctggttacrtccagctctacagtggctgcagccacggtgatcacctccagcccagctgtggacatagggtgacaggagcaggctgctggtgaggggagcaggaccaggggacatt

SEQ ID NO: 81186 - DNA, 512 bp, Chicken  19866894374442_2
cacagagcttgaggtgctgctctatcagcttggtacaggtacagctgcagagtggcttgtggtgtagcgggactgaaccattcagctgcgctgtgttcaagcattartgtgtgcttggctaaaacttgatcagctaaaaggtaattagtttcagccaagtaggaattggccagtattgaggactctgtggttcaaaatagcacaagcagtgagtctttgtgagggactttatctttgcagattgaaagtagttacctgattcccacagggaggtaaaagcatgaagattttctggttacrtccagctctacagtggctgcagccacggtgatcacctccagcccagctgtggacatagggtgacaggagcaggctgctggtgaggggagcaggaccaggggacattaacccaggcagcaaccctgcttagctttgaaagtggggaagtcagaagcaggtctgatagatcctttaattattcaaacatcatcaaaatagacaaaaaaagcctg

SEQ ID NO: 81187 - DNA, 600 bp, Chicken  19866894374453_1
ggaagtgatgaagattgtttatcatgagcacacagacaatgtggtttagtttcccaagattcagggatggcgagagtcagcctaaaacagggattatttcagctttttagcaggacgaactcctagataattgagcccagtcctcttcattgttcttctacaattggtgcttgttttattagttcactgctgagtttcttcgtgaaagaagttaggtttggattcagattaatgacaaaggtagggaaggctcttctatgatgtgttgctttaaaaaaatattgagcacaagttttcatygtcaacagcagtttcagcacctctcctgtttaagtgcccttacataaatataatgaaatccatcagttttatagggattcttctctgagcctyamccagtttttaactctctaacgtgaacaaaatggactttctgcatactgtttggcaggtattttrtagctgcaaagctgcacttagcaaacagaagaacagctttgatatgtctgttttgaaaacacacagtaacattgacaaactgtcakagaatcaggtgagcaagttgaaatgcaattggaataaaaaatactcattgtggat

SEQ ID NO: 81188 - DNA, 600 bp, Chicken  19866894374453_2
ttatttcagctttttagcaggacgaactcctagataattgagcccagtcctcttcattgttcttctacaattggtgcttgttttattagttcactgctgagtttcttcgtgaaagaagttaggtttggattcagattaatgacaaaggtagggaaggctcttctatgatgtgttgctttaaaaaaatattgagcacaagttttcatygtcaacagcagtttcagcacctctcctgtttaagtgcccttacataaatataatgaaatccatcagttttatagggattcttctctgagcctyamccagtttttaactctctaacgtgaacaaaatggactttctgcatactgtttggcaggtattttrtagctgcaaagctgcacttagcaaacagaagaacagctttgatatgtctgttttgaaaacacacagtaacattgacaaactgtcakagaatcaggtgagcaagttgaaatgcaattggaataaaaaatactcattgtggatattgatcatacctattgcattctgtattgcattctgtgttcctgtataatgcttgaaaattggatttttttttctcatttggagaagccttga

SEQ ID NO: 81189 - DNA, 600 bp, Chicken  19866894374453_3
atttcagctttttagcaggacgaactcctagataattgagcccagtcctcttcattgttcttctacaattggtgcttgttttattagttcactgctgagtttcttcgtgaaagaagttaggtttggattcagattaatgacaaaggtagggaaggctcttctatgatgtgttgctttaaaaaaatattgagcacaagttttcatygtcaacagcagtttcagcacctctcctgtttaagtgcccttacataaatataatgaaatccatcagttttatagggattcttctctgagcctyamccagtttttaactctctaacgtgaacaaaatggactttctgcatactgtttggcaggtattttrtagctgcaaagctgcacttagcaaacagaagaacagctttgatatgtctgttttgaaaacacacagtaacattgacaaactgtcakagaatcaggtgagcaagttgaaatgcaattggaataaaaaatactcattgtggatattgatcatacctattgcattctgtattgcattctgtgttcctgtataatgcttgaaaattggatttttttttctcatttggagaagccttgatt

SEQ ID NO: 81190 - DNA, 600 bp, Chicken  19866894374453_4
acaattggtgcttgttttattagttcactgctgagtttcttcgtgaaagaagttaggtttggattcagattaatgacaaaggtagggaaggctcttctatgatgtgttgctttaaaaaaatattgagcacaagttttcatygtcaacagcagtttcagcacctctcctgtttaagtgcccttacataaatataatgaaatccatcagttttatagggattcttctctgagcctyamccagtttttaactctctaacgtgaacaaaatggactttctgcatactgtttggcaggtattttrtagctgcaaagctgcacttagcaaacagaagaacagctttgatatgtctgttttgaaaacacacagtaacattgacaaactgtcakagaatcaggtgagcaagttgaaatgcaattggaataaaaaatactcattgtggatattgatcatacctattgcattctgtattgcattctgtgttcctgtataatgcttgaaaattggatttttttttctcatttggagaagccttgatttgaaatcacacagaaggtgattttcaacaagaattttacccatacaagctcaaattctagtcat

SEQ ID NO: 81191 - DNA, 533 bp, Chicken  19866894374453_5
gaaggctcttctatgatgtgttgctttaaaaaaatattgagcacaagttttcatygtcaacagcagtttcagcacctctcctgtttaagtgcccttacataaatataatgaaatccatcagttttatagggattcttctctgagcctyamccagtttttaactctctaacgtgaacaaaatggactttctgcatactgtttggcaggtattttrtagctgcaaagctgcacttagcaaacagaagaacagctttgatatgtctgttttgaaaacacacagtaacattgacaaactgtcakagaatcaggtgagcaagttgaaatgcaattggaataaaaaatactcattgtggatattgatcatacctattgcattctgtattgcattctgtgttcctgtataatgcttgaaaattggatttttttttctcatttggagaagccttgatttgaaatcacacagaaggtgattttcaacaagaattttacccatacaagctcaaattctagtcattttatccagacaagctttg

SEQ ID NO: 81192 - DNA, 600 bp, Chicken  19866894374459_1
ctaaaagatgtgcaatgagagatgtctgtttgaagtagcgattctactcatcctccttgttgcaagtattcacgttcctctctatcacctaatgttctatactagaactaccgaaggcagttatcagggatttagcatatgataacacatgaaaacttgttggtaccactaccaaaatagaagctactgtgtgtctgctatggttgctgaatggtttctgaatatctcttataacagttttttctagcaaaaatggaatgtagttagtgacagtaaaactaacagctatgggaaagcaartaagggaggtcttaggcacttatgggattatacattgaaaagaaatggtctttgctatatcaggacttaaaacagatgaagaatgaatttgatattataacttcttaaattcagattttcaaataactgtttgctcttggtaccagtaatgtacttattaaatgtgataaactgaagacaggcagaatgttgtcacgtttacaagagaacttcagcagcgcttgactgaaatgagcaactrcatcaagcctatgtgttactcctcataattacgtctaattccactagaataaagcaatt

SEQ ID NO: 81193 - DNA, 483 bp, Chicken  19866894374459_2
ttctagcaaaaatggaatgtagttagtgacagtaaaactaacagctatgggaaagcaartaagggaggtcttaggcacttatgggattatacattgaaaagaaatggtctttgctatatcaggacttaaaacagatgaagaatgaatttgatattataacttcttaaattcagattttcaaataactgtttgctcttggtaccagtaatgtacttattaaatgtgataaactgaagacaggcagaatgttgtcacgtttacaagagaacttcagcagcgcttgactgaaatgagcaactrcatcaagcctatgtgttactcctcataattacgtctaattccactagaataaagcaattgcttctaaaaatcaatctgcatgaggtagtaataatgctggataaccattttaagccgcatgtaacatgcaacgctaatttgaaaacattggttacatgtaatgggtgggagaaagatattaaa

SEQ ID NO: 81194 - DNA, 599 bp, Chicken  19866894374468_1
  misc_feature (1)..(47): n is any nucleotide
nnnnnnnnnnnnnnnnnnnnnnnnnnnnnnnnnnnnnnnnnnnnnnnagaacgagttcggctcaaaggatttgaaaagtatcgtgctcagctggacacgaaagagtaaggagtcttttttttgcttaagtgaacaaaatacgtaatatagttactaattgattttttttcccacagaattgttaaatgtaagctctttgcaatgggaggaaagttgttcactattgaaagtgaaagcagagcaagtatgtacattgacccagacacatagggtcttgataagtattggacttatgggacktttatactaatttggtgtgaaattattactaaagctgcaacaagaaaccagtagactatggagctgttatcaccattgcaaacccatcactgctgtattgtgtaatgaataatcaaaacagttggcatgtcatgaatttcttgaatgatacgctaatgaactggctcagaatgtgttgggatcccaaataattcyaccttgacaagttgatctactgcttttatgctatgcctgttgcatgtaayttcttctctaagctgtttttcctggtatcaaatgtatttttgcctctatgattt

SEQ ID NO: 81195 - DNA, 600 bp, Chicken  19866894374468_2
tttgcaatgggaggaaagttgttcactattgaaagtgaaagcagagcaagtatgtacattgacccagacacatagggtcttgataagtattggacttatgggacktttatactaatttggtgtgaaattattactaaagctgcaacaagaaaccagtagactatggagctgttatcaccattgcaaacccatcactgctgtattgtgtaatgaataatcaaaacagttggcatgtcatgaatttcttgaatgatacgctaatgaactggctcagaatgtgttgggatcccaaataattcyaccttgacaagttgatctactgcttttatgctatgcctgttgcatgtaayttcttctctaagctgtttttcctggtatcaaatgtatttttgcctctatgatttttctttagatttatagaagttagactatttttgacagttatagtatcaattttaaccttacaacattaaattaaaaaaaatgcagttgaaagatgatttcgggtgacagaaactatacatgaaatattaattttttttaagcagagtttgtgaaatacctgtttatcagctactgctacttcattccatttgtaaa

SEQ ID NO: 81196 - DNA, 600 bp, Chicken  19866894374468_3
tatgtacattgacccagacacatagggtcttgataagtattggacttatgggacktttatactaatttggtgtgaaattattactaaagctgcaacaagaaaccagtagactatggagctgttatcaccattgcaaacccatcactgctgtattgtgtaatgaataatcaaaacagttggcatgtcatgaatttcttgaatgatacgctaatgaactggctcagaatgtgttgggatcccaaataattcyaccttgacaagttgatctactgcttttatgctatgcctgttgcatgtaayttcttctctaagctgtttttcctggtatcaaatgtatttttgcctctatgatttttctttagatttatagaagttagactatttttgacagttatagtatcaattttaaccttacaacattaaattaaaaaaaatgcagttgaaagatgatttcgggtgacagaaactatacatgaaatattaattttttttaagcagagtttgtgaaatacctgtttatcagctactgctacttcattccatttgtaaatctatgtaaagatactcaagacaattttggtctatattcctttccttcaa

SEQ ID NO: 81197 - DNA, 600 bp, Chicken  19866894374471_1
tctactgacaaaatgcaaaactcttaataacagacctaagtaagagaacatcattaatacatttaccagtgaaaaaagtacctacaggacacaacgggaactatatcagccattgcagaaacagtgggacactgcctcaaaaagagtgaacggcttggtcaactcacctcaggatcacagaatcatagaattgcttgggttggaagggatcataaagatcatgctacaatcccctgccatgggctgcccagggccccatccaacatggccttgatcacctccagggacagggcacccatmgattctttgggcacctcgtgtcaccaccctctgagtaaagaatttcttcctactgtctaacctaaagatatcaaaatacaaatagttttgcctgagcttgtgggaattgtggttgtttgtatcgtgcacatggctcaggacatgcccaagcgctctgtcccacagctcagagcttcctgtagctaacatgtagcagaggaatgtggtctcaccacaaagccctcagtgtagatgaaaaccaagcataaggcacttggactacagctcccatgaaatagcacaacatttctaaacactttt

SEQ ID NO: 81198 - DNA, 510 bp, Chicken  19866894374472_1
ctggagactctagcagagaaaaatgggagaaggctgatacatatcgatgttcaaaggtgataatgtcaccctggcccaacaccatttcagtacgttgatggtggaatttaagtcgcactctcatatcgagtacacaaagaggtacatcttggcagtataacaaaagccaatgtgggtggcaaggtagctgcaaatttaagcatgaatgctctggatgtgggggcttgcacctgattaccagatgcttcaagcagatggccagggagaggagagaacaaggctcatggttgctttgatagygaaacacygcatactctgcgcttgatttgggagctgagtcccagaatcaggcttttgattaaatatcagcagcaaagctttcagaaatggggttcatgaaaaaaaaaaagaaagaaatgaaagaaaaaagaaaaacatttccactatgcggaaaagagagctgctattattggggggttttcctgcttggagagtcctcttcataggagg

SEQ ID NO: 81199 - DNA, 502 bp, Chicken  19866894374472_2
ctggagactctagcagagaaaaatgggagaaggctgatacatatcgatgttcaaaggtgataatgtcaccctggcccaacaccatttcagtacgttgatggtggaatttaagtcgcactctcatatcgagtacacaaagaggtacatcttggcagtataacaaaagccaatgtgggtggcaaggtagctgcaaatttaagcatgaatgctctggatgtgggggcttgcacctgattaccagatgcttcaagcagatggccagggagaggagagaacaaggctcatggttgctttgatagygcatactctgcgcttgatttgggagctgagtcccagaatcaggcttttgattaaatatcagcagcaaagctttcagaaatggggttcatgaaaaaaaaaaagaaagaaatgaaagaaaaaagaaaaacatttccactatgcggaaaagagagctgctattattggggggttttcctgcttggagagtcctcttcataggagg

SEQ ID NO: 81200 - DNA, 600 bp, Chicken  19866894374475_1
tgtgatgaggggactgtaaagtgctccatgtgggggctgcactcagaagacagagctcgtggcagaggcagcaatctgtttgctacattctgtttcacacaggtaacacctcacgctgctgttttcagcctgcactaggttttgactcgttacctgatgatggctgaagtgttattttgcagctaattgcttacagcctggctaccagataaagacttctctaacgcaacagtacagccatagggatttggcagagaaacatgaaggttggtatggacaaagtatgattggcagtgtacragtgcaaaatcatcaagaaaaacaagaagggctaaaagaggggcaggagcagatgtgccaaaatcagaaggtcaccaggattgcagcatacgctgtgcagcttctcaaggacctggctctggaaaacctcaggctgccttctggtgagcctcctgatgaaggcagcttggctccagctctctctcctagtggaccttggacctaccctgtagctttgtcttcagccctacagtggtggccaaaggtggaccttagacctgttttgcagccttgtctcagccttccctctggtcccatctc

SEQ ID NO: 81201 - DNA, 600 bp, Chicken  19866894374476_1
tgacaaatccccccattgaatccatgcagctcctctgtgatgcttttgtgaggacagatcagaacaaaatttgctttggcgtgcaactactaacagggaggaaatgattgtgttttctctcatcacgcacagaagcctggagctaaggaacatttgctttgccacagtgctctgcacacgacgctctgctccgaccagctgctcccacatcaccaccccgctcacagagaaagctgttaggaagggagaacaagaagctgtggcttcaacagtagatgaaagtcttgcaagaaagctcayggagcctgcagccgtgtcaygctctgttgtgagtgaggagagtgagcagcactgctctgcccacccagcactcaaagtgaggtacaagtgcttatttttaaaacccaaatgttccaaggtcaccatgtgctgggagactcaccagcaccatcaggtagcacccagagccacaaacctgagggacttaatggtccccttgtttatamaggcaaacaccaaatctagtcccatggagaagcgaaacatgtaccacctacrcagacctatgtcctgaagatcagatgggctataagaacgagc

SEQ ID NO: 81202 - DNA, 600 bp, Chicken  19866894374476_2
tccatgcagctcctctgtgatgcttttgtgaggacagatcagaacaaaatttgctttggcgtgcaactactaacagggaggaaatgattgtgttttctctcatcacgcacagaagcctggagctaaggaacatttgctttgccacagtgctctgcacacgacgctctgctccgaccagctgctcccacatcaccaccccgctcacagagaaagctgttaggaagggagaacaagaagctgtggcttcaacagtagatgaaagtcttgcaagaaagctcayggagcctgcagccgtgtcaygctctgttgtgagtgaggagagtgagcagcactgctctgcccacccagcactcaaagtgaggtacaagtgcttatttttaaaacccaaatgttccaaggtcaccatgtgctgggagactcaccagcaccatcaggtagcacccagagccacaaacctgagggacttaatggtccccttgtttatamaggcaaacaccaaatctagtcccatggagaagcgaaacatgtaccacctacrcagacctatgtcctgaagatcagatgggctataagaacgagccttgggctgagaagaaggta

SEQ ID NO: 81203 - DNA, 465 bp, Chicken  19866894374476_3
acatcaccaccccgctcacagagaaagctgttaggaagggagaacaagaagctgtggcttcaacagtagatgaaagtcttgcaagaaagctcayggagcctgcagccgtgtcaygctctgttgtgagtgaggagagtgagcagcactgctctgcccacccagcactcaaagtgaggtacaagtgcttatttttaaaacccaaatgttccaaggtcaccatgtgctgggagactcaccagcaccatcaggtagcacccagagccacaaacctgagggacttaatggtccccttgtttatamaggcaaacaccaaatctagtcccatggagaagcgaaacatgtaccacctacrcagacctatgtcctgaagatcagatgggctataagaacgagccttgggctgagaagaaggtaccatagagatcagcacacacagcagagcaggtacaggtctgtaggccccat

SEQ ID NO: 81204 - DNA, 413 bp, Chicken  19866894374476_4
tgtggcttcaacagtagatgaaagtcttgcaagaaagctcayggagcctgcagccgtgtcaygctctgttgtgagtgaggagagtgagcagcactgctctgcccacccagcactcaaagtgaggtacaagtgcttatttttaaaacccaaatgttccaaggtcaccatgtgctgggagactcaccagcaccatcaggtagcacccagagccacaaacctgagggacttaatggtccccttgtttatamaggcaaacaccaaatctagtcccatggagaagcgaaacatgtaccacctacrcagacctatgtcctgaagatcagatgggctataagaacgagccttgggctgagaagaaggtaccatagagatcagcacacacagcagagcaggtacaggtctgtaggccccat

SEQ ID NO: 81205 - DNA, 599 bp, Chicken  19866894374477_1
  misc_feature (1)..(111): n is any nucleotide
nnnnnnnnnnnnnnnnnnnnnnnnnnnnnnnnnnnnnnnnnnnnnnnnnnnnnnnnnnnnnnnnnnnnnnnnnnnnnnnnnnnnnnnnnnnnnnnnnnnnnnnnnnnnnnnatttgaatcattaaataaaaagtccctgtatacacacacagctgctttttggagagcaacagtaatttcctgcttttcaatgacttgaacaaatgtggtgagttttatttgaaagtctttttgcttgttacttaattggtgaattcttgtgtcaaagcatctgaatcattcacagaattgaaaaaaaaraaagaaagaaaagaaagaagaaatcctgcattggctttgaagaagctgaacatggagctcagcacagggcacactgcatgctcccaacctcacaaggacagcacgtgtcrttggaggcagtgggccagcaaggtgggaccccatagtcccatcccagtacagtcctccagggcttatggatgmggctgagatcacaatggaagagactgtcacgtctccagccttcatttccttgaaatttacaaaaatccttgactccagcttagaaatcagtctgaataagaaatgagtatgcatta

SEQ ID NO: 81206 - DNA, 599 bp, Chicken  19866894374477_2
  misc_feature (1)..(1): n is any nucleotide
natttgaatcattaaataaaaagtccctgtatacacacacagctgctttttggagagcaacagtaatttcctgcttttcaatgacttgaacaaatgtggtgagttttatttgaaagtctttttgcttgttacttaattggtgaattcttgtgtcaaagcatctgaatcattcacagaattgaaaaaaaaraaagaaagaaaagaaagaagaaatcctgcattggctttgaagaagctgaacatggagctcagcacagggcacactgcatgctcccaacctcacaaggacagcacgtgtcrttggaggcagtgggccagcaaggtgggaccccatagtcccatcccagtacagtcctccagggcttatggatgmggctgagatcacaatggaagagactgtcacgtctccagccttcatttccttgaaatttacaaaaatccttgactccagcttagaaatcagtctgaataagaaatgagtatgcattagtgttcaaaaaaaggaacattcataattaaatgaytactcctcgtttacttgccttctccctctttcagattgaaggcttagcttctgtttaatawccctaataggtaac

SEQ ID NO: 81207 - DNA, 600 bp, Chicken  19866894374477_3
cttttcaatgacttgaacaaatgtggtgagttttatttgaaagtctttttgcttgttacttaattggtgaattcttgtgtcaaagcatctgaatcattcacagaattgaaaaaaaaraaagaaagaaaagaaagaagaaatcctgcattggctttgaagaagctgaacatggagctcagcacagggcacactgcatgctcccaacctcacaaggacagcacgtgtcrttggaggcagtgggccagcaaggtgggaccccatagtcccatcccagtacagtcctccagggcttatggatgmggctgagatcacaatggaagagactgtcacgtctccagccttcatttccttgaaatttacaaaaatccttgactccagcttagaaatcagtctgaataagaaatgagtatgcattagtgttcaaaaaaaggaacattcataattaaatgaytactcctcgtttacttgccttctccctctttcagattgaaggcttagcttctgtttaatawccctaataggtaactctcagtccctgcagagatttacattggatctccagaactgcagaagggatttcacacagatctttccaattta

SEQ ID NO: 81208 - DNA, 600 bp, Chicken  19866894374477_4
aaatgtggtgagttttatttgaaagtctttttgcttgttacttaattggtgaattcttgtgtcaaagcatctgaatcattcacagaattgaaaaaaaaraaagaaagaaaagaaagaagaaatcctgcattggctttgaagaagctgaacatggagctcagcacagggcacactgcatgctcccaacctcacaaggacagcacgtgtcrttggaggcagtgggccagcaaggtgggaccccatagtcccatcccagtacagtcctccagggcttatggatgmggctgagatcacaatggmagagactgtcacgtctccagccttcatttccttgaaatttacaaaaatccttgactccagcttagaaatcagtctgaataagaaatgagtatgcattagtgttcaaaaaaaggaacattcataattaaatgaytactcctcgtttacttgccttctccctctttcagattgaaggcttagcttctgtttaatawccctaataggtaactctcagtccctgcagagatttacattggatctccagaactgcagaagggatttcacacagatctttccaatttactgggaaatcaycacaaa

SEQ ID NO: 81209 - DNA, 600 bp, Chicken  19866894374477_5
ctttgaagaagctgaacatggagctcagcacagggcacactgcatgctcccaacctcacaaggacagcacgtgtcrttggaggcagtgggccagcaaggtgggaccccatagtcccatcccagtacagtcctccagggcttatggatgmggctgagatcacaatggaagagactgtcacgtctccagccttcatttccttgaaatttacaaaaatccttgactccagcttagaaatcagtctgaataagaaatgagtatgcattagtgttcaaaaaaaggaacattcataattaaatgaytactcctcgtttacttgccttctccctctttcagattgaaggcttagcttctgtttaatawccctaataggtaactctcagtccctgcagagatttacattggatctccagaactgcagaagggatttcacacagatctttccaatttactgggaaatcaycacaaaataaagaacctgagcccttccctcagtgacagaccaaattcctgttgtcgttatttatgcttwttttgattccttactctgatttctcagccacgcattagaactgaataaaacaaattaaccttattaatta

SEQ ID NO: 81210 - DNA, 600 bp, Chicken  19866894374477_6
ggacagcacgtgtcrttggaggcagtgggccagcaaggtgggaccccatagtcccatcccagtacagtcctccagggcttatggatgmggctgagatcacaatggaagagactgtcacgtctccagccttcatttccttgaaatttacaaaaatccttgactccagcttagaaatcagtctgaataagaaatgagtatgcattagtgttcaaaaaaaggaacattcataattaaatgaytactcctcgtttacttgccttctccctctttcagattgaaggcttagcttctgtttaatawccctaataggtaactctcagtccctgcagagatttacattggatctccagaactgcagaagggatttcacacagatctttccaatttactgggaaatcaycacaaaataaagaacctgagcccttccctcagtgacagaccaaattcctgttgtcgttatttatgcttwttttgattccttactctgatttctcagccacgcattagaactgaataaaacaaattaaccttattaattatgtacagccaacttttcaattttccattaacgtgtattgaactctgcgtcttcacctgcag

SEQ ID NO: 81211 - DNA, 536 bp, Chicken  19866894374477_7
aatggaagagactgtcacgtctccagccttcatttccttgaaatttacaaaaatccttgactccagcttagaaatcagtctgaataagaaatgagtatgcattagtgttcaaaaaaaggaacattcataattaaatgaytactcctcgtttacttgccttctccctctttcagattgaaggcttagcttctgtttaatawccctaataggtaactctcagtccctgcagagatttacattggatctccagaactgcagaagggatttcacacagatctttccaatttactgggaaatcaycacaaaataaagaacctgagcccttccctcagtgacagaccaaattcctgttgtcgttatttatgcttwttttgattccttactctgatttctcagccacgcattagaactgaataaaacaaattaaccttattaattatgtacagccaacttttcaattttccattaacgtgtattgaactctgcgtcttcacctgcagtcagaatgtaaaaggaattagtattattttcagttc

SEQ ID NO: 81212 - DNA, 467 bp, Chicken  19866894374477_8
agaaatcagtctgaataagaaatgagtatgcattagtgttcaaaaaaaggaacattcataattaaatgaytactcctcgtttacttgccttctccctctttcagattgaaggcttagcttctgtttaatawccctaataggtaactctcagtccctgcagagatttacattggatctccagaactgcagaagggatttcacacagatctttccaatttactgggaaatcaycacaaaataaagaacctgagcccttccctcagtgacagaccaaattcctgttgtcgttatttatgcttwttttgattccttactctgatttctcagccacgcattagaactgaataaaacaaattaaccttattaattatgtacagccaacttttcaattttccattaacgtgtattgaactctgcgtcttcacctgcagtcagaatgtaaaaggaattagtattattttcagttc

SEQ ID NO: 81213 - DNA, 600 bp, Chicken  19866894374484_1
aaaagcaggaattacgaatctccactttgaactagacaaacaactgcagtgcagtaacgactggtattgtcagtgtttgaattttgtattttaaaatgtagcctttacaattattttattttatgaacatgttttctgtaaatatgtatacatatctatatttctgtgtagacttctttcttaataataaataaaaacagttcttccaaactctttagcttccaaaagcaataccaagctccaaatcaggaattcaatagaccccatgtctcctgtgttgtcaccttctatgtccttctycaagtcccccttctgttctgtagaagtctactgctgctaaactggaattgctagctgtagcttctgtctgcaagaatttgcatgtcacacttgtccaatgttctgttgattatagcaaactcaaaaacttgtgtaaatttgcatctcatttctgaaaacagtctgaatcttatttataaaagtggattacattaacaattgagctaatgacatcagatgcagaacaacaaaggttattatatattctaaagctgagtgaaaggaatgactcatgagaaatattgcaggcatttattatat

SEQ ID NO: 81214 - DNA, 599 bp, Chicken  19866894374486_1
  misc_feature (1)..(77): n is any nucleotide
nnnnnnnnnnnnnnnnnnnnnnnnnnnnnnnnnnnnnnnnnnnnnnnnnnnnnnnnnnnnnnnnnnnnnnnnnnnnnggagctgcataccgaggccaggacattgtgcagaggaaaagcaaacaatgagccactcaggccagcggcagcccctcaggacagtgcttctgcagggtcacgcagctccagaggaccctgcaccccgtggggggtggggaatctgaatgcagacaggcagcaggacctgctgacatcccaaagggcccctaaaatgggcttcaagaaggctgcaggtgtgcargccagctcttgcgraacagccacccgctcccctctcttacaattccaaacatcaggcacaaggctggggatgtggggacagtccctgctttggcccctttcctggcagcagcgaggaagtgtttgcagcatgtgaagcggagagcacttgggcacccagccgagcccagagcgctgctaatgggctcccagcacgggggatgtctgtgaggatgaaggttaacacctagcgaaggctcctcgctgggcaagatcccgccgcactgcaggacagactgccgtgcaaatccgttccctgca

SEQ ID NO: 81215 - DNA, 599 bp, Chicken  19866894374486_2
  misc_feature (1)..(63): n is any nucleotide
nnnnnnnnnnnnnnnnnnnnnnnnnnnnnnnnnnnnnnnnnnnnnnnnnnnnnnnnnnnnnnnggagctgcataccgaggccaggacattgtgcagaggaaaagcaaacaatgagccactcaggccagcggcagcccctcaggacagtgcttctgcagggtcacgcagctccagaggaccctgcaccccgtggggggtggggaatctgaatgcagacaggcagcaggacctgctgacatcccaaagggcccctaaaatgggcttcaagaaggctgcaggtgtgcargccagctcttgcgraacagccacccgctcccctctcttacaattccaaacatcaggcacaaggctggggatgtggggacagtccctgctttggcccctttcctggcagcagcgaggaagtgtttgcagcatgtgaagcggagagcacttgggcacccagccgagcccagagcgctgctaatgggctcccagcacgggggatgtctgtgaggatgaaggttaacacctagcgaaggctcctcgctgggcaagatcccgccgcactgcaggacagactgccgtgcaaatccgttccctgcaggtgtcagccggca

SEQ ID NO: 81216 - DNA, 600 bp, Chicken  19866894374486_3
attttgctgggtgtgctgcaggctcagcttgtggcagacctcaaacgcctgtcccaccgtccgcacgatgcgcatggcctggctctgcagggggagggagagcagcacaggcatcagcccacggtgagcagctgcccggctttccgcgcatcgccactgcgactgcagctcagaatgcaagccatcgtgatgccaggtcccggcacagccacccccggcatcctcaccttcttcttggatttgaagacgttgcacctgaacacgttgctagacccatcccgggcaatgtagctgaagatyttcaggtcctgcgagtcgtgggacacatagaatatcctgcaaggacagaaaggaaagggaggatattgcttccaacacacactacccacagcgccttgcaggatgcctgcaaggccacagccagagtctygcagggcaccctctgggtgctgacagctgcccagcctctgcagcacggccctataaagcccagcagatagtcttttttagcagtggttccacctagggtgaaaaaaactcctctgctgactcagcagcagcaaacacttcatgaagacagcacagggattactctgctca

SEQ ID NO: 81217 - DNA, 600 bp, Chicken  19866894374486_4
gctgcccggctttccgcgcatcgccactgcgactgcagctcagaatgcaagccatcgtgatgccaggtcccggcacagccacccccggcatcctcaccttcttcttggatttgaagacgttgcacctgaacacgttgctagacccatcccgggcaatgtagctgaagatyttcaggtcctgcgagtcgtgggacacatagaatatcctgcaaggacagaaaggaaagggaggatattgcttccaacacacactacccacagcgccttgcaggatgcctgcaaggccacagccagagtctygcagggcaccctctgggtgctgacagctgcccagcctctgcagcacggccctataaagcccagcagatagtcttttttagcagtggttccacctagggtgaaaaaaactcctctgctgactcagcagcagcaaacacttcatgaagacagcacagggattactctgctcagcccccgtggcagcgctgggggtcccgggttgcaaaacgtctgtgcmtttttggggtgctggtctcctctaccccagccagccctctgggtggatgctgggagtgcacagcaagccagagcagctgccct

SEQ ID NO: 81218 - DNA, 600 bp, Chicken  19866894374486_5
gaaaggaaagggaggatattgcttccaacacacactacccacagcgccttgcaggatgcctgcaaggccacagccagagtctygcagggcaccctctgggtgctgacagctgcccagcctctgcagcacggccctataaagcccagcagatagtcttttttagcagtggttccacctagggtgaaaaaaactcctctgctgactcagcagcagcaaacacttcatgaagacagcacagggattactctgctcagcccccgtggcagcgctgggggtcccgggttgcaaaacgtctgtgcmtttttggggtgctggtctcctctaccccagccagccctctgggtggatgctgggagtgcacagcaagccagagcagctgccctgtgccctctgaggtcaccgcaggatagttctatcagccaccgtgccccagcctggctccagcctgtgaagccaccccgccgtcrggtctctccctaccccagcagggtgcagctttattgctctaattgggatcattaaaaggggcttagtggcacccggcccggctgtcctgcagaactcaggagaggttttcctgcaggagtgtgcctgctccca

SEQ ID NO: 81219 - DNA, 600 bp, Chicken  19866894374486_6
caggatgcctgcaaggccacagccagagtctygcagggcaccctctgggtgctgacagctgcccagcctctgcagcacggccctataaagcccagcagatagtcttttttagcagtggttccacctagggtgaaaaaaactcctctgctgactcagcagcagcaaacacttcatgaagacagcacagggattactctgctcagcccccgtggcagcgctgggggtcccgggttgcaaaacgtctgtgcmtttttggggtgctggtctcctctaccccagccagccctctgggtggatgcmgggagtgcacagcaagccagagcagctgccctgtgccctctgaggtcaccgcaggatagttctatcagccaccgtgccccagcctggctccagcctgtgaagccaccccgccgtcrggtctctccctaccccagcagggtgcagctttattgctctaattgggatcattaaaaggggcttagtggcacccggcccggctgtcctgcagaactcaggagaggttttcctgcaggagtgtgcctgctcccagctgagcacagacccaccagccatcactgcacagctcagggctcagctcag

SEQ ID NO: 81220 - DNA, 600 bp, Chicken  19866894374486_7
atgcctgcaaggccacagccagagtctygcagggcaccctctgggtgctgacagctgcccagcctctgcagcacggccctataaagcccagcagatagtcttttttagcagtggttccacctagggtgaaaaaaactcctctgctgactcagcagcagcaaacacttcatgaagacagcacagggattactctgctcagcccccgtggcagcgctgggggtcccgggttgcaaaacgtctgtgcmtttttggggtgctggtctcctctaccccagccagccctctgggtggatgctgggmgtgcacagcaagccagagcagctgccctgtgccctctgaggtcaccgcaggatagttctatcagccaccgtgccccagcctggctccagcctgtgaagccaccccgccgtcrggtctctccctaccccagcagggtgcagctttattgctctaattgggatcattaaaaggggcttagtggcacccggcccggctgtcctgcagaactcaggagaggttttcctgcaggagtgtgcctgctcccagctgagcacagacccaccagccatcactgcacagctcagggctcagctcaggctg

SEQ ID NO: 81221 - DNA, 600 bp, Chicken  19866894374486_8
ggttccacctagggtgaaaaaaactcctctgctgactcagcagcagcaaacacttcatgaagacagcacagggattactctgctcagcccccgtggcagcgctgggggtcccgggttgcaaaacgtctgtgcmtttttggggtgctggtctcctctaccccagccagccctctgggtggatgctgggagtgcacagcaagccagagcagctgccctgtgccctctgaggtcaccgcaggatagttctatcagccaccgtgccccagcctggctccagcctgtgaagccaccccgccgtcrggtctctccctaccccagcagggtgcagctttattgctctaattgggatcattaaaaggggcttagtggcacccggcccggctgtcctgcagaactcaggagaggttttcctgcaggagtgtgcctgctcccagctgagcacagacccaccagccatcactgcacagctcagggctcagctcaggctgcagggtgctggtgtggcacatcagagcatcccccaggtgatcttacctgtaaatgggatcgtgcatgacgagcattttgttctcgtcccaggcccattcttttttctgcaag

SEQ ID NO: 81222 - DNA, 600 bp, Chicken  19866894374488_1
tccgctgctccatcacattgcttggtagaacatcacacccgaggatgctctgcctccctctgatagaggatggctgtgcacctgcggactcccaccccaatccactgccttgctgcagtgcagtgcgttctcccacgttcccaggaagatgtcttgggtgtattttgaacccatagaagggctggcatgagcaaaatcaccccctggtaatgagtgcccatccaagcacacccatatttcggagccatcctgtgcccgctgcatctggccctccctttccttctttatttgtttcaaagsaaagggctctggataacaccacgccaacagctattttaaggggaacaacctaatgcacaaaaaagcccacgtttctgccaaaatggcatcgcagcaaggcggagctctcggctcctcccgacaccgagccccatgcccaatttaggtgaaactattttccatgggatgccggtgccgcagggctttcctggacccatcccattgggttgtcaccgtggtggtggcccctctgtgatgtcccattgctatgcgagcagrgcaggcgctggggtctgctctccttcaccttgagagcaaagc

SEQ ID NO: 81223 - DNA, 600 bp, Chicken  19866894374488_2
ctgcatctggccctccctttccttctttatttgtttcaaagsaaagggctctggataacaccacgccaacagctattttaaggggaacaacctaatgcacaaaaaagcccacgtttctgccaaaatggcatcgcagcaaggcggagctctcggctcctcccgacaccgagccccatgcccaatttaggtgaaactattttccatgggatgccggtgccgcagggctttcctggacccatcccattgggttgtcaccgtggtggtggcccctctgtgatgtcccattgctatgcgagcagrgcaggcgctggggtctgctctccttcaccttgagagcaaagcaagtgaaggcacatcaaatattcatgccttccattttccgtttacagccctgcggtcggtggaggggaggacgatgctctgcatctcctccggggtcctgcagacgatcaatggtggtgctgggaacgaagcccgaggtgtcacattgcccttgtccctgtcaagccagcagggagctgggggatacgtctctcctcgctttttcagcttcccgtcttgttggtgctgggtggattttttgggcttgggtgcagtcct

SEQ ID NO: 81224 - DNA, 600 bp, Chicken  19866894374489_1
actccggagccaagttactcctatgcctaggtgatatttaagaatcctggcccctatatcggtatattgcaggtggagaaatgcatctgttcgttcatcattaacagattaattaatttctaatcagaatttgtaagcagttgtagatgtaacagctttctgtcagcaaatgctatttgaaagaaatgctttgatggttgtattctgtggttgtgccaagatacttgtgggaaatcatcaaaatatttgtttactaaaagcttgtagcatttcagtttgactctattatcacactcataygattaaaaatgagaccrctgaaataaaatcaggaaagacagtcaaagtgaagtattatttttgttgttcttttgtgatgtaggatggagaaaaccaaatacccatgtccgaaagttttcccaagaaagaaatctgaatttcagtagcttgaattttaatattaatatcccttcctacgtaaacagcttgactttttcaagctgtttcaatctgtgctggaaagcaaatgagaatcagacttcctaatgctggatatacttatagaaaagaaagtggtgccatttctgagaagtacaattt

SEQ ID NO: 81225 - DNA, 600 bp, Chicken  19866894374489_2
ctcctatgcctaggtgatatttaagaatcctggcccctatatcggtatattgcaggtggagaaatgcatctgttcgttcatcattaacagattaattaatttctaatcagaatttgtaagcagttgtagatgtaacagctttctgtcagcaaatgctatttgaaagaaatgctttgatggttgtattctgtggttgtgccaagatacttgtgggaaatcatcaaaatatttgtttactaaaagcttgtagcatttcagtttgactctattatcacactcataygattaaaaatgagaccrctgaaataaaatcaggaaagacagtcaaagtgaagtattatttttgttgttcttttgtgatgtaggatggagaaaaccaaatacccatgtccgaaagttttcccaagaaagaaatctgaatttcagtagcttgaattttaatattaatatcccttcctacgtaaacagcttgactttttcaagctgtttcaatctgtgctggaaagcaaatgagaatcagacttcctaatgctggatatacttatagaaaagaaagtggtgccatttctgagaagtacaatttactttctctctggctcc

SEQ ID NO: 81226 - DNA, 600 bp, Chicken  19866894374491_1
ctggttttggaactccaaaacctttgtcagttactcaggaggacgttgttaacactgttttaaagactaggaaagaacaaagtgatttttcatcgcgtacggacacaccactgttaggttcagagttcaggagatacaaaaatactgacagctacatcagaatcagagttacctgaaatactctgcacagtctctgtggaatttagtcagagaagactgctgtcaggtaagctctgtgcattattgatcacgagacattcagactgactaacagtaccgttcagcacgctgttttcaccraagaagaaaaggtttatggccatctgaaatggcaattgagggaggaagtattactacaagatgtggaaaaggaacggactgaagctgtactctgtgaactgttaaaaccctcttggctttctagacasacatggaatagttcttcagtattaccactcacatttgcattattcgggaaacaatttgtacaaaaaagagaatgaataaatcaaatgggtgtttaaatgcaaacaagttgatccacgaaacaatgttatctctgaatgaaatcttattagcagttcatattgcttcacatct

SEQ ID NO: 81227 - DNA, 600 bp, Chicken  19866894374491_2
aggagatacaaaaatactgacagctacatcagaatcagagttacctgaaatactctgcacagtctctgtggaatttagtcagagaagactgctgtcaggtaagctctgtgcattattgatcacgagacattcagactgactaacagtaccgttcagcacgctgttttcaccraagaagaaaaggtttatggccatctgaaatggcaattgagggaggaagtattactacaagatgtggaaaaggaacggactgaagctgtactctgtgaactgttaaaaccctcttggctttctagacasacatggaatagttcttcagtattaccactcacatttgcattattcgggaaacaatttgtacaaaaaagagaatgaataaatcaaatgggtgtttaaatgcaaacaagttgatccacgaaacaatgttatctctgaatgaaatcttattagcagttcatattgcttcacatctattgcaactgacaacatttcagcttctaaaatgaattatctccattcataagcttggtgaatttgcctttcaggtcccaaggagatcaggctatacattcattttaagctggccagacgccacaggga

SEQ ID NO: 81228 - DNA, 600 bp, Chicken  19866894374491_3
tgtttaaatgcaaacaagttgatccacgaaacaatgttatctctgaatgaaatcttattagcagttcatattgcttcacatctattgcaactgacaacatttcagcttctaaaatgaattatctccattcataagcttggtgaatttgcctttcaggtcccaaggagatcaggctatacattcattttaagctggccagacgccacagggagcacagggtagcccacattacctctgatttaataaacctgtacagtgctgtcagcagtgcttgttgaaaaattaagtagttccatgagsaagaaagctacagaaaacactggttccaatcagatactgtttgtggagccagaggactgcagaaaagcagtgtgtgccagcacacagatgggcaatgaggtctcttctctgcttcaatgctgttttcaaggcatataacatctatcttagaaactgctcctccatcagtctaaatggtatcacaccacttaaataaaaactggaaggacggtggattagtgtgggtagttttcccctgtagtgtggccagattcaaacacaggagtattaacaaagctgtatctgctgagtttggaaaaa

SEQ ID NO: 81229 - DNA, 599 bp, Chicken  19866894374493_1
  misc_feature (1)..(158): n is any nucleotide
nnnnnnnnnnnnnnnnnnnnnnnnnnnnnnnnnnnnnnnnnnnnnnnnnnnnnnnnnnnnnnnnnnnnnnnnnnnnnnnnnnnnnnnnnnnnnnnnnnnnnnnnnnnnnnnnnnnnnnnnnnnnnnnnnnnnnnnnnnnnnnnnnnnnnnnnnnnnnnccaggtatacagaatagttcttcccagaagagactcaacattttggagtggctgttaatgagaagtcaccagaaggatagaggtggatctgtgctatcaagatccaggctggatttggcccagccccagcccatttcccatytgtgcaggagagatgttgtgtgaccaacactggaaatatctgaagcatttcttacagctggggccacataaggacaagtcaggtctacagagatctttctcctctgtctgctggctaagwcccaacagaagaactgttcttgcagaaggaaaatgtctaagaatgagtggcatggttagtgggcatggcaggggtgggttgatggttggacgtgatgattttagagatcttttctgacctatatgattctatgaaaagcagattccytgagcaactgcggcttctcccagcagcagctc

SEQ ID NO: 81230 - DNA, 599 bp, Chicken  19866894374493_2
  misc_feature (1)..(38): n is any nucleotide
nnnnnnnnnnnnnnnnnnnnnnnnnnnnnnnnnnnnnnccaggtatacagaatagttcttcccagaagagactcaacattttggagtggctgttaatgagaagtcaccagaaggatagaggtggatctgtgctatcaagatccaggctggatttggcccagccccagcccatttcccatytgtgcaggagagatgttgtgtgaccaacactggaaatatctgaagcatttcttacagctggggccacataaggacaagtcaggtctacagagatctttctcctctgtctgctggctaagwcccaacagaagaactgttcttgcagaaggaaaatgtctaagaatgagtggcatggttagtgggcatggcaggggtgggttgatggttggacgtgatgattttagagatcttttctgacctatatgattctatgaaaagcagattccytgagcaactgcggcttctcccagcagcagctccccttagtggaagcccttctccctcctacctggctgcagcccctgtcaggtattgtgctgggatgcaatgggcagcaagctcacacagcacagctcccgggatgttttgcaagcccagct

SEQ ID NO: 81231 - DNA, 600 bp, Chicken  19866894374493_3
tggatttggcccagccccagcccatttcccatytgtgcaggagagatgttgtgtgaccaacactggaaatatctgaagcatttcttacagctggggccacataaggacaagtcaggtctacagagatctttctcctctgtctgctggctaagwcccaacagaagaactgttcttgcagaaggaaaatgtctaagaatgagtggcatggttagtgggcatggcaggggtgggttgatggttggacgtgatgattttagagatcttttctgacctatatgattctatgaaaagcagattccytgagcaactgcggcttctcccagcagcagctccccttagtggaagcccttctccctcctacctggctgcagcccctgtcaggtattgtgctgggatgcaatgggcagcaagctcacacagcacagctcccgggatgttttgcaagcccagctcaaaggtctgagcagacacaacagagataagccaggagtgaaatcaaaagcctgcatttcaaaaggtgtggatcatggtcatcccacaacagcactaaggctggttttcagaagcagaatcttggaggggataaggatgtattttgac

SEQ ID NO: 81232 - DNA, 600 bp, Chicken  19866894374493_4
tctgctccctgaggtccagcactctttgctagacgatgtacggactataggctgtgaaatatcctgcctgatttatcttgggtggagcaataaaggaagcaaagtcacaatagttctcctccctttatcaaaatagcctatgcctatctaagaatcaaggataaattaatagcagggactcttggggatttgcactgctgccagaagccaacaagggacacagtgaatacacacacttgaatgtcatccaagcatttaacaccctttgatttggacaaagtgtctgtgtagcatcccttyaatcagctcccctgcattctcacaaaatgcataaaaacagcactctgtttttaaaagcctttcttccctttcctatccagtttctatatcccaggcatcctccaacactgtcctcccaaaggagaacccagtgctttccatccctgcagcctctgagtgcccatcacagttgagaacaacatcttctgcatgtcctagtggtcccagtgtggatgggtcatggcctgatgtcaaatcatgccatcgagaagtgtccctttggggtttgcatttcctatttttgcagcagctcaaaagatg

SEQ ID NO: 81233 - DNA, 600 bp, Chicken  19866894374495_1
aagtaaaagaagatattccatacttgcacttgtggtgaacgcattcacatatacgcagcatttcaaggtgacaacactagaacctgtccactcagagtatcagtcagtgctgtggtgctatgtgcagtgctcacccggtcctcttcagcccggtgctgcctttctccactcctgtccatgcacaaaatccttccaacctcaggatatcccatctactcacacaccggtaccacccatttttcaaggctgtgcaccagttctctttttcagttcacagggaaagcacatcagcagcaacascaaacaacctagggcctgttgctttatgatcaggarcatctttatagacatacatggactggtagacagctgaagcatcaggtacatggtaggatcctaaaacaaggatccagtcgttccagtagctttgggtagactatcctgctgtctattattctgaattttttacctggttatcagaagcaaagacagcatagatactggatgacaatgctagctagtacatgaagtaactgtgagaatttgtaatacaataggtgggaaaatattcctagaagttggctgaaataagaaagaaga

SEQ ID NO: 81234 - DNA, 600 bp, Chicken  19866894374495_2
gaacgcattcacatatacgcagcatttcaaggtgacaacactagaacctgtccactcagagtatcagtcagtgctgtggtgctatgtgcagtgctcacccggtcctcttcagcccggtgctgcctttctccactcctgtccatgcacaaaatccttccaacctcaggatatcccatctactcacacaccggtaccacccatttttcaaggctgtgcaccagttctctttttcagttcacagggaaagcacatcagcagcaacascaaacaacctagggcctgttgctttatgatcaggarcatctttatagacatacatggactggtagacagctgaagcatcaggtacatggtaggatcctaaaacaaggatccagtcgttccagtagctttgggtagactatcctgctgtctattattctgaattttttacctggttatcagaagcaaagacagcatagatactggatgacaatgctagctagtacatgaagtaactgtgagaatttgtaatacaataggtgggaaaatattcctagaagttggctgaaataagaaagaagaccttacaaatactgatatttaatttctatactataa

SEQ ID NO: 81235 - DNA, 600 bp, Chicken  19866894374497_1
tgcttggagccagtgtgatagggaatacttcagatactctgtgcctttgaggactttatggctgtgttcattttccatttctttgctctctgatttctcagttgtgcttctccttattccagtaatagtgcatccagctgttgcttgcctttctccactaagaaatgctatccggcctctcccgtggccaccagttaggaatggcgtcctctccctatccagcgcaaagccattgcataatcttcttagccaggaataactgctggaaagcaaggacaatatgctattcctgcaagaagraatyatccaagttaaaagcttggtgaatttcaaacagcgcatctgctgtgatcatgccttttcttgcctttcatttcttcctgtgttgtacatgtaagtgaaaaggtagttagctctttgttgtgaggcttaggtacaggttatgaacaatacctaataattgtgtaatagttgtactgaggaacaggatacagtgatggcatccctcagctacacagcaggaatgttgatggatagcagttactaaagtgatttcacttaggtttgtggttcttgatgctagcagatgaaaaatcattg

SEQ ID NO: 81236 - DNA, 600 bp, Chicken  19866894374497_2
tggagccagtgtgatagggaatacttcagatactctgtgcctttgaggactttatggctgtgttcattttccatttctttgctctctgatttctcagttgtgcttctccttattccagtaatagtgcatccagctgttgcttgcctttctccactaagaaatgctatccggcctctcccgtggccaccagttaggaatggcgtcctctccctatccagcgcaaagccattgcataatcttcttagccaggaataactgctggaaagcaaggacaatatgctattcctgcaagaagraatyatccaagttaaaagcttggtgaatttcaaacagcgcatctgctgtgatcatgccttttcttgcctttcatttcttcctgtgttgtacatgtaagtgaaaaggtagttagctctttgttgtgaggcttaggtacaggttatgaacaatacctaataattgtgtaatagttgtactgaggaacaggatacagtgatggcatccctcagctacacagcaggaatgttgatggatagcagttactaaagtgatttcacttaggtttgtggttcttgatgctagcagatgaaaaatcattgaagg

SEQ ID NO: 81237 - DNA, 600 bp, Chicken  19866894374497_3
tctgctgtgatcatgccttttcttgcctttcatttcttcctgtgttgtacatgtaagtgaaaaggtagttagctctttgttgtgaggcttaggtacaggttatgaacaatacctaataattgtgtaatagttgtactgaggaacaggatacagtgatggcatccctcagctacacagcaggaatgttgatggatagcagttactaaagtgatttcacttaggtttgtggttcttgatgctagcagatgaaaaatcattgaaggacatcatggtgtttgttattagtgttattatcttcaytgtacagcactggaccagtcccttggagttatagatacataagcaaaatagagccatgctctcaatttaatcaagagttgcccagcgcttacagcaaagtcatgtttcaatgagtcacttgcgggagggacacgagacatttaaagtggaaggcctcagtggcaggtcaaagctggacttgccctggtaaactggtgtcctgaacctggtgtgtgtgtgtgtgtgtgtgtgtgtgtgtttgtcgctgtttaatcaccgtgagtttaattgcagtctatactttgtgttgcctccctttct

SEQ ID NO: 81238 - DNA, 599 bp, Chicken  19866894374505_1
  misc_feature (1)..(67): n is any nucleotide
nnnnnnnnnnnnnnnnnnnnnnnnnnnnnnnnnnnnnnnnnnnnnnnnnnnnnnnnnnnnnnnnnnnatgagtgtgtgtgtgtgtgttggtggagcaggaccagatcctggcaggtcctgggactcccaaaagtacaaggcatgatggaggcttccctgcaggacctcccacccttgtaagtgagcacagatgggttgatctgaagtgggtttctcctctcattgccccctgcatttttaaaaatctgacatgggtttgggtgaggaaggtttctgcctttgcttgctccactttctccragcagtgacgcacacatttactcgtttttgccacataagtgggcggtttatatgctgggagggaatgattcataaattagctgcaacctgtgcctttattgctctaatgatgtgtgagcaggattacatgtaaacctttctgcctggccttcagacagagttgttgaggagttatattttcactttctggctgcgggtagccaagccttgcccagggagaaaagctctcccagtgaataaaatggaggacagctgcagggagatgagatggcctgctacctgcaaaggaaaaccatgaa

SEQ ID NO: 81239 - DNA, 600 bp, Chicken  19866894374509_1
agtactgaaggcatttggaatcaacttgcagtcttgaaaatacagggccactgtatacatgattaaatgagaacccaaagatttcattcacataaaacaagacactgcttccaatgaagtacataggttgcctcctatttatttccatggaaactacaacaaagagcacaataacactatttgatacagcacattctcagctacaaaatactattttgcagcgtagtcatcaccagtagctatacatttttgccagtgatgaacaaatgcctgaatgctgcactcataaaaaccttcatyagtggaggtaacccactattgctgtcaccactgctgaaatgcaccacccgcctcatcactgcgctcacatccactgtttggtctcctacacattcagcaagtgtcaatgaatgtcaataggtgatatttttttcctcatggaagaattcagtgacatccctctgcttcatacaggcttccatatcagacgccattttgccagactgcccccctgctgccatctgtcacacagcaacaaaatgtaatgggatactggtggraagrttcagcctctactgccattgaaccagcatccacctc

SEQ ID NO: 81240 - DNA, 600 bp, Chicken  19866894374509_2
gaacaaatgcctgaatgctgcactcataaaaaccttcatyagtggaggtaacccactattgctgtcaccactgctgaaatgcaccacccgcctcatcactgcgctcacatccactgtttggtctcctacacattcagcaagtgtcaatgaatgtcaataggtgatatttttttcctcatggaagaattcagtgacatccctctgcttcatacaggcttccatatcagacgccattttgccagactgcccccctgctgccatctgtcacacagcaacaaaatgtaatgggatactggtggraagrttcagcctctactgccattgaaccagcatccacctctgatgttgtgggacatcataaaacagggggcattactttctgagcagtcctcatataacgtattgaatcatattgatcctattttatgacaacatataatgatcagtctgacattttccacagtaaatataatttgactatcactctttttccttctctggaaaactaataaatgatgacatgcacttttgatgacactgcatttctggtatttatcaaatgacctctaatatttcagttgcctttatcagctaacttga

SEQ ID NO: 81241 - DNA, 600 bp, Chicken  19866894374509_3
aaatgcctgaatgctgcactcataaaaaccttcatyagtggaggtaacccactattgctgtcaccactgctgaaatgcaccacccgcctcatcactgcgctcacatccactgtttggtctcctacacattcagcaagtgtcaatgaatgtcaataggtgatatttttttcctcatggaagaattcagtgacatccctctgcttcatacaggcttccatatcagacgccattttgccagactgcccccctgctgccatctgtcacacagcaacaaaatgtaatgggatactggtggraagrttcagcctctactgccattgaaccagcatccacctctgatgttgtgggacatcataaaacagggggcattactttctgagcagtcctcatataacgtattgaatcatattgatcctattttatgacaacatataatgatcagtctgacattttccacagtaaatataatttgactatcactctttttccttctctggaaaactaataaatgatgacatgcacttttgatgacactgcatttctggtatttatcaaatgacctctaatatttcagttgcctttatcagctaacttgaaaaa

SEQ ID NO: 81242 - DNA, 600 bp, Chicken  19866894374517_1
atgcattgcttgaagtactgggatatttcttggccttgaaatcagctcctgcctaggatctctgttatcctagggaaaccacatactttaaaagaacgtttaaaggtgaaataataccaggacagcacaatgagctcatttcacaacagccatttgtttcagttgtgatcggatatttttcacccttgtttggtgacagcgttacaacacaggacttcatcagatataacctgcaggagcacagcaaagcaaagtaagaggagactgacatcaaacatcctctttatagcactaagtagrtaagttttatggagcctgagtggtgaagcagcatttctcccacatccttccctataaaggaaggtaaatgttatgagcagcacatttgtctagaagtcgaacacacattttgttacagcagcttaccttcaattcaggctttcaacctttaggggtaaatagtcagtgtggggattggasaataaatctcagtgaaacacatggaagatttakgacaaactttgaaaaaataagaaaaaaagcattatgacagaaaatgatttaggtcagtgggtcaattcattgtattagccctagtat

SEQ ID NO: 81243 - DNA, 600 bp, Chicken  19866894374517_2
cacccttgtttggtgacagcgttacaacacaggacttcatcagatataacctgcaggagcacagcaaagcaaagtaagaggagactgacatcaaacatcctctttatagcactaagtagrtaagttttatggagcctgagtggtgaagcagcatttctcccacatccttccctataaaggaaggtaaatgttatgagcagcacatttgtctagaagtcgaacacacattttgttacagcagcttaccttcaattcaggctttcaacctttaggggtaaatagtcagtgtggggattggasaataaatctcagtgaaacacatggaagatttakgacaaactttgaaaaaataagaaaaaaagcattatgacagaaaatgatttaggtcagtgggtcaattcattgtattagccctagtatttacaatgccacttgccctattataatatacgctttatcatttatatataatcttgtgtcataattctgatatatgtacttcacaaactcctttatactgatacagccacatatatggtttttaccctctcgatgccgatacttctcaggtaggctgcccctctcatcttagatctgaaa

SEQ ID NO: 81244 - DNA, 600 bp, Chicken  19866894374517_3
acttcatcagatataacctgcaggagcacagcaaagcaaagtaagaggagactgacatcaaacatcctctttatagcactaagtagrtaagttttatggagcctgagtggtgaagcagcatttctcccacatccttccctataaaggaaggtaaatgttatgagcagcacatttgtctagaagtcgaacacacattttgttacagcagcttaccttcaattcaggctttcaacctttaggggtaaatagtcagtgtggggattggasaataaatctcagtgaaacacatggaagatttakgacaaactttgaaaaaataagaaaaaaagcattatgacagaaaatgatttaggtcagtgggtcaattcattgtattagccctagtatttacaatgccacttgccctattataatatacgctttatcatttatatataatcttgtgtcataattctgatatatgtacttcacaaactcctttatactgatacagccacatatatggtttttaccctctcgatgccgatacttctcaggtaggctgcccctctcatcttagatctgaaataaatgatcacacagtacattttgtgtgttgct

SEQ ID NO: 81245 - DNA, 448 bp, Chicken  19866894374526_1
ctgccactttccccaggggaataccgtgggagacagtgccaaaagctttgctgacatgtgtagaccatgtcagcagcctttctctcatccaccaggctgatcacccagtcatcttactgatcatttgagagaatactttttacaatttttttctaatggagcgttatttctttttcaaatgttagaattattattattttaatgctactttttcatagattgcaatgctctcttgtgaaagtgttaagttctgtggttgtctgggcaattgtaaatgccttgccttcaaatatgttattkcctaatctagttgcttgaatttttgtaactactgcccttttctgtataggacatggtttaccgaaaataataaatgtatataatagacctggtattttttgattccttgtgcttcgtattgcaacttttcctactttttctggggagg

SEQ ID NO: 81246 - DNA, 600 bp, Chicken  19866894374532_1
gagcaagaagactctggtgaatgctgggccctttgcagaatgcagctttactcaaaataatcaacagtccctctagctcatacttatctgcatttggattcaggtgtaacagaaatacagtgtttgtatacactttaccaagagcccagggcggctcctactgaaagactccaaaatggtgaaaggtatgaatttgcaatgaatgcttacgttctatgctgtaaatgaagcatcctatcagtcctaccagtcctttccaacattaacatggtccagcatattgtgccagaaattactgcrcatcttttaaatttcaaataaaagaataatgaagaaagtaaaacagcatttcttactttcgacggaacatttctgcaaatatgcaaccaacactccaaagatcaactggtgttgcatagctggactgaagcaaaacttcaggagctctataccacaaagtaacaacctgtaaaacaaaaaggaagataagttacagcaagcttagctgtacaactacaacctcagaaatgttactctacacagatccaatttagcttcatccaaaccacaaagcctcacagattcaggcaaayttatttg

SEQ ID NO: 81247 - DNA, 600 bp, Chicken  19866894374532_2
tactgcrcatcttttaaatttcaaataaaagaataatgaagaaagtaaaacagcatttcttactttcgacggaacatttctgcaaatatgcaaccaacactccaaagatcaactggtgttgcatagctggactgaagcaaaacttcaggagctctataccacaaagtaacaacctgtaaaacaaaaaggaagataagttacagcaagcttagctgtacaactacaacctcagaaatgttactctacacagatccaatttagcttcatccaaaccacaaagcctcacagattcaggcaaayttatttgatcagtgcgtagaaaagtgtcttgcatggagaatctacatatgggtaagctgcaataacaatgaatcaggtagtaccacttctccagaagagagcagttcaacagtacaataaaaatgttaacggagctggactgaccaacttgggtaaatgtgttctacctgtctcaaaagttcattctccatgttgaactgaagacgtttattattttagcatctggatacatattaagttaaaagctccccaaacgctgcccattacaaaaggcattcagtgctgtccattgtggtgtcc

SEQ ID NO: 81248 - DNA, 600 bp, Chicken  19866894374536_1
attcctgaacccagtcggtaattttcatttcaactagagctcagctcttgcaaaggtgttcaatcatgtttttaaagactccaaaatgacagagcatccgccatgtccctaggcaagccattcctgtgattaattaccttctctgttaaaaatgtgcacctcattaccagcccgcatttgaaattcaaagttgttccagcattaacgaaggcttattgaggccccaatctaaataaataaatgggatcctgcacattcagatctaaattaaaaaaggaaagagagagaagagggagagarattctggagrtgatctttttttyccctttttcagcacaagtccgtaaatgtctatagatttccatgtaattgtcagttccaatcaatagaaaatattgcctgtttcaggacgggcsataaatcctcactaacctcctcagacttcacccacaacagacatcaagagcccagctaaatgtctatggatctgtactgctttagttgctactaaatcctttaggacattccctgtaggatgtatgggcttgtgcacagcagcytgtcaactaaacaattccatggcatccataaatactactt

SEQ ID NO: 81249 - DNA, 600 bp, Chicken  19866894374536_2
ccagtcggtaattttcatttcaactagagctcagctcttgcaaaggtgttcaatcatgtttttaaagactccaaaatgacagagcatccgccatgtccctaggcaagccattcctgtgattaattaccttctctgttaaaaatgtgcacctcattaccagcccgcatttgaaattcaaagttgttccagcattaacgaaggcttattgaggccccaatctaaataaataaatgggatcctgcacattcagatctaaattaaaaaaggaaagagagagaagagggagagarattctggagrtgatctttttttyccctttttcagcacaagtccgtaaatgtctatagatttccatgtaattgtcagttccaatcaatagaaaatattgcctgtttcaggacgggcsataaatcctcactaacctcctcagacttcacccacaacagacatcaagagcccagctaaatgtctatggatctgtactgctttagttgctactaaatcctttaggacattccctgtaggatgtatgggcttgtgcacagcagcytgtcaactaaacaattccatggcatccataaatactactttttgttagtt

SEQ ID NO: 81250 - DNA, 600 bp, Chicken  19866894374536_3
ttcatttcaactagagctcagctcttgcaaaggtgttcaatcatgtttttaaagactccaaaatgacagagcatccgccatgtccctaggcaagccattcctgtgattaattaccttctctgttaaaaatgtgcacctcattaccagcccgcatttgaaattcaaagttgttccagcattaacgaaggcttattgaggccccaatctaaataaataaatgggatcctgcacattcagatctaaattaaaaaaggaaagagagagaagagggagagarattctggagrtgatctttttttyccctttttcagcacaagtccgtaaatgtctatagatttccatgtaattgtcagttccaatcaatagaaaatattgcctgtttcaggacgggcsataaatcctcactaacctcctcagacttcacccacaacagacatcaagagcccagctaaatgtctatggatctgtactgctttagttgctactaaatcctttaggacattccctgtaggatgtatgggcttgtgcacagcagcytgtcaactaaacaattccatggcatccataaatactactttttgttagttttatagatttcct

SEQ ID NO: 81251 - DNA, 600 bp, Chicken  19866894374536_4
gccattcctgtgattaattaccttctctgttaaaaatgtgcacctcattaccagcccgcatttgaaattcaaagttgttccagcattaacgaaggcttattgaggccccaatctaaataaataaatgggatcctgcacattcagatctaaattaaaaaaggaaagagagagaagagggagagarattctggagrtgatctttttttyccctttttcagcacaagtccgtaaatgtctatagatttccatgtaattgtcagttccaatcaatagaaaatattgcctgtttcaggacgggcsataaatcctcactaacctcctcagacttcacccacaacagacatcaagagcccagctaaatgtctatggatctgtactgctttagttgctactaaatcctttaggacattccctgtaggatgtatgggcttgtgcacagcagcytgtcaactaaacaattccatggcatccataaatactactttttgttagttttatagatttcctctctcttttttttttcctttcatcatctcatgtcagcatatatatattccagaagacattcaatttgtttgaaatagagcaggggagaaaaga

SEQ ID NO: 81252 - DNA, 600 bp, Chicken  19866894374536_5
atctaaattaaaaaaggaaagagagagaagagggagagarattctggagrtgatctttttttyccctttttcagcacaagtccgtaaatgtctatagatttccatgtaattgtcagttccaatcaatagaaaatattgcctgtttcaggacgggcsataaatcctcactaacctcctcagacttcacccacaacagacatcaagagcccagctaaatgtctatggatctgtactgctttagttgctactaaatcctttaggacattccctgtaggatgtatgggcttgtgcacagcagcytgtcaactaaacaattccatggcatccataaatactactttttgttagttttatagatttcctctctcttttttttttcctttcatcatctcatgtcagcatatatatattccagaagacattcaatttgtttgaaatagagcaggggagaaaagaaagggtcaacgtgacacttggaaatgaaatgtattgtagagagcagattgggcaggttcatgagattaactgtaggatcaggatatttctaacatgatcaagtacctgaaagctggagtcagcaaagctcctcttggaaataag

SEQ ID NO: 81253 - DNA, 600 bp, Chicken  19866894374541_1
gagcatcagcttcgataaagtcagcataaatcttttgggctttggcggtgatgctggcagaagacttggtgcttttgaagtcctcacaagccagccagaactcccaccattctcctcactgaattctgacttcaaaaacttcctaaaagctgccaggccatctggagaaaaatgcacgagactgaggggtggagcaaagctgaaaaatcaatatagattctatacatgtgtgcatatacatgcaggatatatgttgtcactcgtgtttctgaaatacttttgcccatcagccagcagctwgccccaggaggctgttgtggggaaaataagtagggggtgaaacaacagcaatggtaaggtgatgaagggagttctgtcagttattaacagaggaaggctcccaatacctgctyggtgtgagccggtctctccaatgctcattattcaaaaggaaatctgggtcatgttggtttgtaaggggatttggagcaactagacaatcaggggtgtgaggctgagccccgctctargcagcatgctggacattaattcgtgctgtggcagtatgctgctctcagagctgaggctagcctggctagg

SEQ ID NO: 81254 - DNA, 600 bp, Chicken  19866894374541_2
cctcactgaattctgacttcaaaaacttcctaaaagctgccaggccatctggagaaaaatgcacgagactgaggggtggagcaaagctgaaaaatcaatatagattctatacatgtgtgcatatacatgcaggatatatgttgtcactcgtgtttctgaaatacttttgcccatcagccagcagctwgccccaggaggctgttgtggggaaaataagtagggggtgaaacaacagcaatggtaaggtgatgaagggagttctgtcagttattaacagaggaaggctcccaatacctgctyggtgtgagccggtctctccaatgctcattattcaaaaggaaatctgggtcatgttggtttgtaaggggatttggagcaactagacaatcaggggtgtgaggctgagccccgctctargcagcatgctggacattaattcgtgctgtggcagtatgctgctctcagagctgaggctagcctggctaggtagctcctttgccacctttcaggtaatgagtgtcagtttgatcaaggctcacatgccaccagcagtactgtggctcagagtacacggtgagttgggcagacagcagcatgcaa

SEQ ID NO: 81255 - DNA, 562 bp, Chicken  19866894374541_3
tgcatatacatgcaggatatatgttgtcactcgtgtttctgaaatacttttgcccatcagccagcagctwgccccaggaggctgttgtggggaaaataagtagggggtgaaacaacagcaatggtaaggtgatgaagggagttctgtcagttattaacagaggaaggctcccaatacctgctyggtgtgagccggtctctccaatgctcattattcaaaaggaaatctgggtcatgttggtttgtaaggggatttggagcaactagacaatcaggggtgtgaggctgagccccgctctargcagcatgctggacattaattcgtgctgtggcagtatgctgctctcagagctgaggctagcctggctaggtagctcctttgccacctttcaggtaatgagtgtcagtttgatcaaggctcacatgccaccagcagtactgtggctcagagtacacggtgagttgggcagacagcagcatgcaaacctgatggcaatgtgtgcaagttggtttgacacgggtttgttgtttttaaagcttttcatgtactcttacctttattg

SEQ ID NO: 81256 - DNA, 600 bp, Chicken  19866894374545_1
agtcgtgtgtgtgtgtgtgtgtgttttatctttgcaaatatctgattttactgaattgtagataagacctttaaaaggttaaataccaacgttgcatgttgtgcaaagtgacaaaccctcttatattacaatttataatgcatttttcttaagaaaagctgtcagtatcttcatttacctgctgttagaggtcttcagcaacaatatcacacattcttcctgatcttgtcccagtattgtccttcactttataatgcatttaaggctgatagagttggaatttaagcactctaaggaaawtttggaatatccaagtttatgttaagcttagttgggttccaagctcagcttatgcacttgaactgcgctgctgaaaaagtgaaaagaagtgaggactacacttagtggctccttttgcaggggagcaggagctttatctacctcataaattctgaaagtctactatgtacatgagctgctccaaaagtaatgccttctattttcttatgtggcstattggcattagaaactgatgttggtggtatagcaatacaggttgaactttccccaccagtattccattatgtgttgtttctgtgc

SEQ ID NO: 81257 - DNA, 600 bp, Chicken  19866894374545_2
tcttcctgatcttgtcccagtattgtccttcactttataatgcatttaaggctgatagagttggaatttaagcactctaaggaaawtttggaatatccaagtttatgttaagcttagttgggttccaagctcagcttatgcacttgaactgcgctgctgaaaaagtgaaaagaagtgaggactacacttagtggctccttttgcaggggagcaggagctttatctacctcataaattctgaaagtctactatgtacatgagctgctccaaaagtaatgccttctattttcttatgtggcstattggcattagaaactgatgttggtggtatagcaatacaggttgaactttccccaccagtattccattatgtgttgtttctgtgcaatgtatggcagcagaggggcagaatgatagaatagcgtctgacatggaagtgcttatgaagcaaaggtgtagaactgaattcctttatgtagaaaaaaatggcacccattgaaatgtattgatacttgctgaatgtttccagagacgaaacagcagatgtgagcacggtgaggcagtgggtggtgcatgtyagcagtggggacagcaatgtga

SEQ ID NO: 81258 - DNA, 600 bp, Chicken  19866894374545_3
ccttctattttcttatgtggcstattggcattagaaactgatgttggtggtatagcaatacaggttgaactttccccaccagtattccattatgtgttgtttctgtgcaatgtatggcagcagaggggcagaatgatagaatagcgtctgacatggaagtgcttatgaagcaaaggtgtagaactgaattcctttatgtagaaaaaaatggcacccattgaaatgtattgatacttgctgaatgtttccagagacgaaacagcagatgtgagcacggtgaggcagtgggtggtgcatgtyagcagtggggacagcaatgtgaaagacaagcagtgttccagatggccatacacagctgtcacaccatgacgggaagagagccttgatcagttsatttgtgcaaatcagttaatggtggtgagtaagttgaaaaattgtgttttgtagctgagaatcwgttgtattaaatagcgctattatgctctttatatctgtagtttccccagaaacaaataggaggtgttaattctggtgtgatctgcgtatatccaggaacatatcatggtgacctgactgtacttctgtagagcaggttgttag

SEQ ID NO: 81259 - DNA, 600 bp, Chicken  19866894374545_4
gtgttgtttctgtgcaatgtatggcagcagaggggcagaatgatagaatagcgtctgacatggaagtgcttatgaagcaaaggtgtagaactgaattcctttatgtagaaaaaaatggcacccattgaaatgtattgatacttgctgaatgtttccagagacgaaacagcagatgtgagcacggtgaggcagtgggtggtgcatgtyagcagtggggacagcaatgtgaaagacaagcagtgttccagatggccatacacagctgtcacaccatgacgggaagagagccttgatcagttsatttgtgcaaatcagttaatggtggtgagtaagttgaaaaattgtgttttgtagctgagaatcwgttgtattaaatagcgctattatgctctttatatctgtagtttccccagaaacaaataggaggtgttaattctggtgtgatctgcgtatatccaggaacatatcatggtgacctgactgtacttctgtagagcaggttgttagctagaaggatctctgtgcctgtcagatctgtcagattgtggctatagagcagtcttgtttctttcatgttttgctgtcttgcccctaccctcc

SEQ ID NO: 81260 - DNA, 600 bp, Chicken  19866894374545_5
agtgcttatgaagcaaaggtgtagaactgaattcctttatgtagaaaaaaatggcacccattgaaatgtattgatacttgctgaatgtttccagagacgaaacagcagatgtgagcacggtgaggcagtgggtggtgcatgtyagcagtggggacagcaatgtgaaagacaagcagtgttccagatggccatacacagctgtcacaccatgacgggaagagagccttgatcagttsatttgtgcaaatcagttaatggtggtgagtaagttgaaaaattgtgttttgtagctgagaatcwgttgtattaaatagcgctattatgctctttatatctgtagtttccccagaaacaaataggaggtgttaattctggtgtgatctgcgtatatccaggaacatatcatggtgacctgactgtacttctgtagagcaggttgttagctagaaggatctctgtgcctgtcagatctgtcagattgtggctatagagcagtcttgtttctttcatgttttgctgtcttgcccctaccctccccttctgtttgagatgatgtccaagaaattgtgttttttatctcaaattgaaactatcctagat

SEQ ID NO: 81261 - DNA, 599 bp, Chicken  19866894374554_1
  misc_feature (1)..(162): n is any nucleotide
nnnnnnnnnnnnnnnnnnnnnnnnnnnnnnnnnnnnnnnnnnnnnnnnnnnnnnnnnnnnnnnnnnnnnnnnnnnnnnnnnnnnnnnnnnnnnnnnnnnnnnnnnnnnnnnnnnnnnnnnnnnnnnnnnnnnnnnnnnnnnnnnnnnnnnnnnnnnnnnnnntgttccgcttggaaagtgtagcggcacagtgtgctgctgcactgaagtaatgcagaaaaaaaatattaaaaaatacctgtgtaataattgaaagtgctggtgaacgttgtgattccttgctagactgggggcactggrgggaaacgtctgctgtaaaatttgttacccctcctggtgttcggatccctggcactggacttgtagttgggcagttaaaatggatgagttattgtttgtgtagggtgttataggaggatgaggcaacaggattttctaggcttagaaactatttggtgccggatgtaaggcagctatacccacatgaactrggccaagcatggctggcagttaagacacttatactttagggaaagtgacatggtccaatacgcagggagcctggtggatagtcagaagacctscatcgtttccctggt

SEQ ID NO: 81262 - DNA, 600 bp, Chicken  19866894374554_2
tgtgctgctgcactgaagtaatgcagaaaaaaaatattaaaaaatacctgtgtaataattgaaagtgctggtgaacgttgtgattccttgctagactgggggcactggrgggaaacgtctgctgtaaaatttgttacccctcctggtgttcggatccctggcactggacttgtagttgggcagttaaaatggatgagttattgtttgtgtagggtgttataggaggatgaggcaacaggattttctaggcttagaaactatttggtgccggatgtaaggcagctatacccacatgaactrggccaagcatggctggcagttaagacacttatactttagggaaagtgacatggtccaatacgcagggagcctggtggatagtcagaagacctscatcgtttccctggtctctgtgtgactttgaacgatgtgtttcactgctctgtacctcattttccatcttatctgcttcgcaccgtatgtatttagatattaaaccattagaaataggactgcctctctcaccaggcagagcaacggcatgctgcgacatagtcttaataaacataaacagtgctgatctttggatagtgaatatac

SEQ ID NO: 81263 - DNA, 600 bp, Chicken  19866894374554_3
gactgggggcactggrgggaaacgtctgctgtaaaatttgttacccctcctggtgttcggatccctggcactggacttgtagttgggcagttaaaatggatgagttattgtttgtgtagggtgttataggaggatgaggcaacaggattttctaggcttagaaactatttggtgccggatgtaaggcagctatacccacatgaactrggccaagcatggctggcagttaagacacttatactttagggaaagtgacatggtccaatacgcagggagcctggtggatagtcagaagacctscatcgtttccctggtctctgtgtgactttgaacgatgtgtttcactgctctgtacctcattttccatcttatctgcttcgcaccgtatgtatttagatattaaaccattagaaataggactgcctctctcaccaggcagagcaacggcatgctgcgacatagtcttaataaacataaacagtgctgatctttggatagtgaatatacatttcagacaattctagttaattttttattttcagctgtatcaccatggcttgatctttggacccgtataaccaaacttttttccttatttgc

SEQ ID NO: 81264 - DNA, 569 bp, Chicken  19866894374554_4
ccttactcgtaggagcagaagggttttgtcacgactcttagaagcagtgtgttttgattttttttttctttttttctttttccccccatctcttctaacagtctcacagctcagcttgggtgttaaacacgccttacttgatcagatggggtgattgatgccccctgcttcttgctctgcctgtgccagcagaaggctgtgctgctctttggggcggttttgctgtggtgtctcggtcgggtaaggaaacctgccttgctgactgggtctgtgtggttgtgtaactgtgggaagggttgyagtgcctctatcctggttcttgtggcacaggagggatgtgtctctggaacaggtccactagctctcgtctggcatggacaatctctgctgtgcgcttgagtcaaaagattacaagcaatgctttgatatcaggggttcttasggaggttgagggttatttaaactcagtattaaaatgcgaagtgagagcgtttgaaagcttttgtatgatacctgtacgccacagctggtcgatgtcatcaaagtcagctttttcctcctactttctc

SEQ ID NO: 81265 - DNA, 427 bp, Chicken  19866894374554_5
cagatggggtgattgatgccccctgcttcttgctctgcctgtgccagcagaaggctgtgctgctctttggggcggttttgctgtggtgtctcggtcgggtaaggaaacctgccttgctgactgggtctgtgtggttgtgtaactgtgggaagggttgyagtgcctctatcctggttcttgtggcacaggagggatgtgtctctggaacaggtccactagctctcgtctggcatggacaatctctgctgtgcgcttgagtcaaaagattacaagcaatgctttgatatcaggggttcttasggaggttgagggttatttaaactcagtattaaaatgcgaagtgagagcgtttgaaagcttttgtatgatacctgtacgccacagctggtcgatgtcatcaaagtcagctttttcctcctactttctc

SEQ ID NO: 81266 - DNA, 600 bp, Chicken  19866894374563_1
aagttgtatttgctaatggcaataataataatttctggagaaaaaaattaggcttgggcttcttgccagattctttgttgttcatcaggcacagaagtcgctgtattacttacatggtgacaccaaaacttcacaggaggggtcctgccaggaaaagttttcacagattcttatggaagatgcagggttgaaaacagaagagtaactcgggagggaaaagaagcagcaaatccctgctgtgcttgctaagagtagaaagtaaagaaagcaacagttatgaatgaacatgggatccagcartcctgctcagggcatggatgtctttttccagcagggtctgagcgcctcagggaagggaaggagcaataacctgagtgacttgctaggtgacaaggactcccccgaggtgacttgtgcagaattagaggtgaactcttaccctccagagcccagctcagtaggtcacctcccagttcatctcttcctctataaaatcagtcttccacttttaaactcatgtgcccatcaggtcaaattacaattaagactctgcaaatatggcaaaatatattcatgaacatctgtttgaataataaggct

SEQ ID NO: 81267 - DNA, 600 bp, Chicken  19866894374567_1
aggaagcaaacacaacagaagaataggaagtcatcactttgagcaagagagtaaagaacaggaaataaataaaagaactggagaaaacagaagagatggaactacttgagctcaaaagtagatcagtagacacaaactggttattgctgtaaaacgttagtaattgtgacacaaacaacatccagggaatagtgaagttccagatgttaaatgttaatgacatggtattaaaagtttgtcagtaagatcacactaaataaacttctgttatacagagatacccagatctcaaagatagartgaatgtactgactgtgatcattgtgaaaactgctctgtacaactctgtaaatataaaaagaaaatagggtgagggaggtgatcctgcccctctgctccatgctgatgaggcctcacctggagcacagcatccagatgtggagtcctcagtacaggagagatgtggacctgttggagcacatcctgaggagggccacaaaaatgatccacggaatggaacaccactcctgtaagaacaggctgagagaactgaggttsttcagcttcagaagagaaggctctggggggacctgagagagg

SEQ ID NO: 81268 - DNA, 600 bp, Chicken  19866894374567_2
aaacttctgttatacagagatacccagatctcaaagatagartgaatgtactgactgtgatcattgtgaaaactgctctgtacaactctgtaaatataaaaagaaaatagggtgagggaggtgatcctgcccctctgctccatgctgatgaggcctcacctggagcacagcatccagatgtggagtcctcagtacaggagagatgtggacctgttggagcacatcctgaggagggccacaaaaatgatccacggaatggaacaccactcctgtaagaacaggctgagagaactgaggttsttcagcttcagaagagaaggctctggggggacctgagagaggctgtcaatatccaaagrgaatcttcaagaaagaaagagacagattctttaacaggttttgttgcgatagaacaaggggaaattcagtttcaaacaaaaggagaggaggtgaagatttcctctgtgtgtttccaacgttcaagtctacatcactggattacggaaagcagaaattcatagagattttatttctctcttacatttcctggtttctccagtgattttggcatctgaattttaaagcttttacttcttagtc

SEQ ID NO: 81269 - DNA, 576 bp, Chicken  19866894374567_3
atcattgtgaaaactgctctgtacaactctgtaaatataaaaagaaaatagggtgagggaggtgatcctgcccctctgctccatgctgatgaggcctcacctggagcacagcatccagatgtggagtcctcagtacaggagagatgtggacctgttggagcacatcctgaggagggccacaaaaatgatccacggaatggaacaccactcctgtaagaacaggctgagagaactgaggttsttcagcttcagaagagaaggctctggggggacctgagagaggctgtcaatatccaaagrgaatcttcaagaaagaaagagacagattctttaacaggttttgttgcgatagaacaaggggaaattcagtttcaaacaaaaggagaggaggtgaagatttcctctgtgtgtttccaacgttcaagtctacatcactggattacggaaagcagaaattcatagagattttatttctctcttacatttcctggtttctccagtgattttggcatctgaattttaaagcttttacttcttagtctttgcagggttgttttagaaaagaggattaaattt

SEQ ID NO: 81270 - DNA, 600 bp, Chicken  19866894374574_1
aatgtagaaatgtgttgaataggcatttaatttacaggctggcaaaaagcacgttattgcaatttactgtaatgaagcaggtgtgtactgaatatgggcatgagtatttacacaaactgctataaaaacaagatacctattaatggaaatgtgaaggacacttaaagttttcaggaaaacattctagtactttccatgtgcaatacaggagtgccacatgagactaacagcaatgcagtaattaacattgttttttaatctggtgtttattcaggactgcttttttttgctgtgttgcarttccccacggagtagttgttctttagaatcttaggacgtatttgtgcattttttgaagttttgttttagaggaaacatatgagaacattcttcatagccacccaggtaaacagtgcagtataggttcttctccttatgtcatgtttatcctacaagggagtaagagcaggaaacatatttccacacatacacaccggctgggggaagaagtctggtgaatgttcagcatccttctttacattgtctttcccccaagtcatgcaacttcttcagtagtactgatagtgtgttatccacaga

SEQ ID NO: 81271 - DNA, 600 bp, Chicken  19866894374575_1
ggttcacaggtgtctagaaagtggttagaactgatgcagagcagagtgtactagacatatttttttaatagctgggtcttccacagcacaaagaccgcctccagtccaagctcagactttggcataccatacttcgagtctctccaaatgcagaatgaattaaagataggctactgcaaagatcagaagagtattaaggttgtgtggctctttaaaattacttcttgtgtcttgctttctgctttgaaagacaaagagtagagatagtctgttaaggcctgctgtagagggtagaatgarttcagtccctttgttctccctccagaagagctgaaatgcagtaaactgacctccarcatcttccctgatcacatctgtcatttttaaaattaattyagatcacgttatttttttttccctgtaactccactgcatccattcatcttgccttttcctcatagtaattaataaaaaagaaaaaaaaaacagcccaacgcatggtttttacagaagaaaactaggasagagatgtattggaaataggactgtaagcaaagtagtatgccccacacatttcacaggatcaaggctttaataatg

SEQ ID NO: 81272 - DNA, 600 bp, Chicken  19866894374575_2
atatttttttaatagctgggtcttccacagcacaaagaccgcctccagtccaagctcagactttggcataccatacttcgagtctctccaaatgcagaatgaattaaagataggctactgcaaagatcagaagagtattaaggttgtgtggctctttaaaattacttcttgtgtcttgctttctgctttgaaagacaaagagtagagatagtctgttaaggcctgctgtagagggtagaatgarttcagtccctttgttctccctccagaagagctgaaatgcagtaaactgacctccarcatcttccctgatcacatctgtcatttttaaaattaattyagatcacgttatttttttttccctgtaactccactgcatccattcatcttgccttttcctcatagtaattaataaaaaagaaaaaaaaaacagcccaacgcatggtttttacagaagaaaactaggasagagatgtattggaaataggactgtaagcaaagtagtatgccccacacatttcacaggatcaaggctttaataatgttgtagtgtttcgcatacgtggtacattgatttgccatatctttggggtttattta

SEQ ID NO: 81273 - DNA, 600 bp, Chicken  19866894374575_3
gcctccagtccaagctcagactttggcataccatacttcgagtctctccaaatgcagaatgaattaaagataggctactgcaaagatcagaagagtattaaggttgtgtggctctttaaaattacttcttgtgtcttgctttctgctttgaaagacaaagagtagagatagtctgttaaggcctgctgtagagggtagaatgarttcagtccctttgttctccctccagaagagctgaaatgcagtaaactgacctccarcatcttccctgatcacatctgtcatttttaaaattaattyagatcacgttatttttttttccctgtaactccactgcatccattcatcttgccttttcctcatagtaattaataaaaaagaaaaaaaaaacagcccaacgcatggtttttacagaagaaaactaggasagagatgtattggaaataggactgtaagcaaagtagtatgccccacacatttcacaggatcaaggctttaataatgttgtagtgtttcgcatacgtggtacattgatttgccatatctttggggtttatttaattttttttcttcctgggccattttttcctatttctcacc

SEQ ID NO: 81274 - DNA, 600 bp, Chicken  19866894374575_4
ttgtgtcttgctttctgctttgaaagacaaagagtagagatagtctgttaaggcctgctgtagagggtagaatgarttcagtccctttgttctccctccagaagagctgaaatgcagtaaactgacctccarcatcttccctgatcacatctgtcatttttaaaattaattyagatcacgttatttttttttccctgtaactccactgcatccattcatcttgccttttcctcatagtaattaataaaaaagaaaaaaaaaacagcccaacgcatggtttttacagaagaaaactaggasagagatgtattggaaataggactgtaagcaaagtagtatgccccacacatttcacaggatcaaggctttaataatgttgtagtgtttcgcatacgtggtacattgatttgccatatctttggggtttatttaattttttttcttcctgggccattttttcctatttctcacctttttctatggttggaagaaaataagcatatcctgtaggccagactgaaatatcctgaaattgcatgaaatgctatccctagaaggcactccttggaaagtgctaagacagtggtagcctagttcaac

SEQ ID NO: 81275 - DNA, 600 bp, Chicken  19866894374575_5
cgtggtacattgatttgccatatctttggggtttatttaattttttttcttcctgggccattttttcctatttctcacctttttctatggttggaagaaaataagcatatcctgtaggccagactgaaatatcctgaaattgcatgaaatgctatccctagaaggcactccttggaaagtgctaagacagtggtagcctagttcaaccaagtgtctaaggtgtctcacatggtacagtcaaactgtccgtaagacgagtccaagttcattcacaagttcaaactttgtgtgctatctacrcagctyttgtgtccagcatggctgcaggctatgctctgaaagatgtctgaagagaaatgtccaaggtctctcctaggtggtgtggatgagtcatgcatgagcagactacagtccgagccactagcatgttcagtaagccctgcatttcatttgtagggtgtggctggcccaaagcagcgtaccttcatgacacacagaagagctaaaagttgatagcrcagaagggagcctggcgtagcagatcccagaacttgcagtgctcttcacctcccagtgcttttgaacacttaaaaaggctta

SEQ ID NO: 81276 - DNA, 600 bp, Chicken  19866894374575_6
acattgatttgccatatctttggggtttatttaattttttttcttcctgggccattttttcctatttctcacctttttctatggttggaagaaaataagcatatcctgtaggccagactgaaatatcctgaaattgcatgaaatgctatccctagaaggcactccttggaaagtgctaagacagtggtagcctagttcaaccaagtgtctaaggtgtctcacatggtacagtcaaactgtccgtaagacgagtccaagttcattcacaagttcaaactttgtgtgctatctacrcagctyttgtgtccagcatggctgcaggctatgctctgaaagatgtctgaagagaaatgtccaaggtctctcctaggtggtgtggatgagtcatgcatgagcagactacagtccgagccactagcatgttcagtaagccctgcatttcatttgtagggtgtggctggcccaaagcagcgtaccttcatgacacacagaagagctaaaagttgatagcrcagaagggagcctggcgtagcagatcccagaacttgcagtgctcttcacctcccagtgcttttgaacacttaaaaaggcttaaaaacc

SEQ ID NO: 81277 - DNA, 600 bp, Chicken  19866894374575_7
ggtgtctcacatggtacagtcaaactgtccgtaagacgagtccaagttcattcacaagttcaaactttgtgtgctatctacrcagctyttgtgtccagcatggctgcaggctatgctctgaaagatgtctgaagagaaatgtccaaggtctctcctaggtggtgtggatgagtcatgcatgagcagactacagtccgagccactagcatgttcagtaagccctgcatttcatttgtagggtgtggctggcccaaagcagcgtaccttcatgacacacagaagagctaaaagttgatagcrcagaagggagcctggcgtagcagatcccagaacttgcagtgctcttcacctcccagtgcttttgaacacttaaaaaggcttaaaaacctttccaggttccttgcctttgagtggaatagtctgagaatccataatgctgctgattttgttgattcatctgcttaggttctaaatgtcacagttctaaattatccagctgtatggtaatgaggaagcagtatcgtgagggtctcttgcttaatgtgattcaagtgcacaactcctttgtacttacatttctacgggaagcaaaagtagaga

SEQ ID NO: 81278 - DNA, 600 bp, Chicken  19866894374586_1
ttccctcagggactccaatcctgatgagatagaaatagattttgaaaccttgaagcccacaacgttgcgagaactggagagatacgtgaaatcttgtttacagaaaaagcaaaggaaaccattttgtaagttagctcttggggcacacattcctccacgagcccttgggctcagctttggaatcagggcatgtgtgttgggattcttttatccagctgctgggtatgtgatgatagggatttttagagattcttttctacttgagaaaatagcagaaactttctgtgggttttttccttygcatatggaccctcacatggagacttggagggatcactgtattcctctgcaagaccattgtgatatccttactgcttatctagaacctagaaggcactacagtttcagtctcattatgttgtgtgtaacatgcctatatgtggaaggatcagtttcttagcctgaatagtttatcatctaattaggaagttagaaagtgtggtttgaatcccaaacaccaaggaaatgaatgaattgcacacatttacttgagtaagctaaggactctggatgtgtccgagttgtatscttgccacaaaa

SEQ ID NO: 81279 - DNA, 441 bp, Chicken  19866894374586_2
gttttttccttygcatatggaccctcacatggagacttggagggatcactgtattcctctgcaagaccattgtgatatccttactgcttatctagaacctagaaggcactacagtttcagtctcattatgttgtgtgtaacatgcctatatgtggaaggatcagtttcttagcctgaatagtttatcatctaattaggaagttagaaagtgtggtttgaatcccaaacaccaaggaaatgaatgaattgcacacatttacttgagtaagctaaggactctggatgtgtccgagttgtatscttgccacaaaactgctagtcctaactggcctgattaccatataataatcagtgtcagataaggaggtgcatgttaatggactggagagtgtaccgtgcagaatggtacaggcttttctgtgcttcagccacagagtgaat

SEQ ID NO: 81280 - DNA, 600 bp, Chicken  19866894374591_1
tccctctgaggtgctccctctccagaattattcttgtggtaattacttctcttcctctctctgaaagggcacccccgtctcttgatttccttgccctgttccccttacaggggaataaagcaacacagtgtgaaaggattatgcaagccatgtcatccgaaaacttgtgggaaaaataatcagctgtccatctcacctggaagatctggagggatcatggagggctttggcttcaggacgagacaaggcacaaagtaatctcaataaaaagcaattaatactacacagaatatctagtgyctggtcctggaaatctggcatcagaaattgtgtctgaacatgaaatttttttaagcttagtcaaagattcctgacatacctcacattcttctatagtctgacattcagctgtcaaaaaatacgagtttatcattcacatccaaagctcattttgtcagcttcgtcttgtttctcaagcacattttacacagtatgattccttcagaaagaggcaatgcaaccattagcactgttcaacagaatgaattttcatgaaaatgctcaattgagcctccaaacagacttttgcaaatgatgctg

SEQ ID NO: 81281 - DNA, 600 bp, Chicken  19866894374592_1
tttccaaggagaatgggaagggaacggcatctacccacatgaggctggaagtatgacgtagctgtggatgttttccctttgcttggcagaaaaaaaattgttcccctagacaggagggaagggaagctggagcatcagctcccagcacctgacagtaatcctgttttcaccaggtctatacagactgagggattgcaaccagtaccatcccctaggtgctattcaaccagatcacctgggtattcatacaggcttttttcagtcagctgaggtcagagccctttacagcagaggctgcaycatcagcccaycccacagcaggtacaaaagcagcataaggacagcaaggcatgaccatggcacactacagctcctggtgcaggaatatatttgcaggtggaaatgtcttagttgtacttaggtgtattatcaaaacttttgaagcaggtgcatgactttgccatagcgctggagcaaggctagagttcaagagttagctaattgtatctctcaaaaaggaattgcctcagaccagttaatttgtcaagataacgaattgcagcaattctcctctgttggagctgggccactaacactgat

SEQ ID NO: 81282 - DNA, 600 bp, Chicken  19866894374592_2
aatgggaagggaacggcatctacccacatgaggctggaagtatgacgtagctgtggatgttttccctttgcttggcagaaaaaaaattgttcccctagacaggagggaagggaagctggagcatcagctcccagcacctgacagtaatcctgttttcaccaggtctatacagactgagggattgcaaccagtaccatcccctaggtgctattcaaccagatcacctgggtattcatacaggcttttttcagtcagctgaggtcagagccctttacagcagaggctgcaycatcagcccaycccacagcaggtacaaaagcagcataaggacagcaaggcatgaccatggcacactacagctcctggtgcaggaatatatttgcaggtggaaatgtcttagttgtacttaggtgtattatcaaaacttttgaagcaggtgcatgactttgccatagcgctggagcaaggctagagttcaagagttagctaattgtatctctcaaaaaggaattgcctcagaccagttaatttgtcaagataacgaattgcagcaattctcctctgttggagctgggccactaacactgatctgaactgtat

SEQ ID NO: 81283 - DNA, 539 bp, Chicken  19866894374593_1
acctttgacaagcaaagtgtcatatgctcagacaatgtgggcgctcagtactgaaagaaataatgccaaatgtatgcttgcaaaatggtatgattcatgattactgaaatctgtgtgatggaaaaaatttagtgctcttttaaccgttttgatattattttccattgtaacactaaactactcatggttttgacagagggcctttttttctcatttcccttcctaagttctttcttttcaggtagaaggcgtcacatcatggatgctttcactccagctgaaagatattcttcagacatkatgagattccatctgagaccccttcaagatgacagatgagaactatctgacagcctgtacattctgaaagcctaacaatactgtggtattcagccagctcatagcttttgcagtcaatgccacaagctttttactcacacgatctaggtacctgtgtttgtaactctgagcgtgccctcacacaagccttgcttacagacacactgcttccatcacattattcgtaacattatattgta

SEQ ID NO: 81284 - DNA, 600 bp, Chicken  19866894374597_1
taaactaattatctgtaatggtaaatactattttaagaaactttacatcttcattaaaatgcctacttttcatgctaaagaatgtaaaaaataatccaaatgctattttattttttgtaggttagaacagaagttttcattttggatacaacatttagagtcaggccaccttgataatactcttcatctgcctaggcttcagcatcttggttcctgcggtaaaagcacttcatatttcacaatattttggttttaatcagatccaaagttaatagatcataaatattagaaaatcaaatytgaattttcaacagagggtctagctttctatgttagaatttcttaatttatcttggagttctattcagagtcatacagagatatctgagtttcattagaaagaacacattgacacaccattgcatctgggtggaaatactgtatttcagcagcttaataatctgtgctgttgagcttgtgaaaagtactctgcaaacaaagctatgctgcttctaaggtatgagctaagtgctgatgtgtaatacctcactgtgatgtatttttagtaatttaagtgtactaacccagttaccaaaaaac

SEQ ID NO: 81285 - DNA, 600 bp, Chicken  19866894374597_2
tttcattagaaagaacacattgacacaccattgcatctgggtggaaatactgtatttcagcagcttaataatctgtgctgttgagcttgtgaaaagtactctgcaaacaaagctatgctgcttctaaggtatgagctaagtgctgatgtgtaatacctcactgtgatgtatttttagtaatttaagtgtactaacccagttaccaaaaaacggtagaagtacttagaggcctaaatgtcatgtcaagtctcaaaatgtcatgagttgctatgtatctcatttgtttaactttttgtaaayctagaaagagaaatctaaattcctggaaagcaagtgacttgcttgaaaagttttctttggctgaaaacccaattttccagcaaattagactctttcccagtggaaaaataaacctgttaatatagaatgtctgtataaagtatgaacataactcattttgcytacaaatrctctaattctgcactatatgtctgacttcatttgcatgttcaaagaagagcataaactgttacactggagagaacgtaaataaaaggtattatcctkcagtagcagccatatctttgtgcggtgcgctgg

SEQ ID NO: 81286 - DNA, 600 bp, Chicken  19866894374597_3
gtgatgtatttttagtaatttaagtgtactaacccagttaccaaaaaacggtagaagtacttagaggcctaaatgtcatgtcaagtctcaaaatgtcatgagttgctatgtatctcatttgtttaactttttgtaaayctagaaagagaaatctaaattcctggaaagcaagtgacttgcttgaaaagttttctttggctgaaaacccaattttccagcaaattagactctttcccagtggaaaaataaacctgttaatatagaatgtctgtataaagtatgaacataactcattttgcytacaaatrctctaattctgcactatatgtctgacttcatttgcatgttcaaagaagagcataaactgttacactggagagaacgtaaataaaaggtattatcctkcagtagcagccatatctttgtgcggtgcgctgggtaggaattatagatacaaaagactagcatctctatttaataatactaaacacacagcaatcaagtcagccccatattattattaatatttagggagtaaacataaggactcagcacttccgaagtctggacagcaagatatcatgtttgcagaagaggatt

SEQ ID NO: 81287 - DNA, 600 bp, Chicken  19866894374597_4
tttttagtaatttaagtgtactaacccagttaccaaaaaacggtagaagtacttagaggcctaaatgtcatgtcaagtctcaaaatgtcatgagttgctatgtatctcatttgtttaactttttgtaaayctagaaagagaaatctaaattcctggaaagcaagtgacttgcttgaaaagttttctttggctgaaaacccaattttccagcaaattagactctttcccagtggaaaaataaacctgttaatatagaatgtctgtataaagtatgaacataactcattttgcytacaaatrctctaattctgcactatatgtctgacttcatttgcatgttcaaagaagagcataaactgttacactggagagaacgtaaataaaaggtattatcctkcagtagcagccatatctttgtgcggtgcgctgggtaggaattatagatacaaaagactagcatctctatttaataatactaaacacacagcaatcaagtcagccccatattattattaatatttagggagtaaacataaggactcagcacttccgaagtctggacagcaagatatcatgtttgcagaagaggattttctgaga

SEQ ID NO: 81288 - DNA, 600 bp, Chicken  19866894374597_5
ctatgtatctcatttgtttaactttttgtaaayctagaaagagaaatctaaattcctggaaagcaagtgacttgcttgaaaagttttctttggctgaaaacccaattttccagcaaattagactctttcccagtggaaaaataaacctgttaatatagaatgtctgtataaagtatgaacataactcattttgcytacaaatrctctaattctgcactatatgtctgacttcatttgcatgttcaaagaagagcataaactgttacactggagagaacgtaaataaaaggtattatcctkcagtagcagccatatctttgtgcggtgcgctgggtaggaattatagatacaaaagactagcatctctatttaataatactaaacacacagcaatcaagtcagccccatattattattaatatttagggagtaaacataaggactcagcacttccgaagtctggacagcaagatatcatgtttgcagaagaggattttctgagacaaacaaatagattattctttcttcttctacgtacattccaaaacaaagtcaaataaacacagagaatgaaagtaggaagcaaaaacaattagctca

SEQ ID NO: 81289 - DNA, 600 bp, Chicken  19866894374601_1
gtgaggctgaaaacactgttggtgacataaacttgaaagaatgctaaaagctgccaaaggctgcaaaaatggctgaagtatagttttaagcataagatgaggagttcattcttttaatgtcctctctatagtttagacaagtccctaatagtctacccttaataatttgtattccctcttggtgcaacagtcacagcaaaagaccactgggaaataatggttagtaaacagcttttaatcctgactgatgttcatcatctttctttccagtcttatcagtatttgtccgaaacaattggyataaccaggatatagctttaaaatagcaatgctatcaaatattctttaaaacaactcaaaataaagaaagatgtttatcctagaagtaaaacaaccgtatgcaaagaragattgcaagaatgtgggagagggctgattaataggagcagtagataaaagaagcgcttacgttcaatactgccgtatttcttatcttatagacatatggaaagtaggctaaagagttcagtataagataaaataaaatcaagccaatgtgaattactgcatatgctgtataagcacagatgctcttgggaa

SEQ ID NO: 81290 - DNA, 592 bp, Chicken  19866894374601_2
ttcttttaatgtcctctctatagtttagacaagtccctaatagtctacccttaataatttgtattccctcttggtgcaacagtcacagcaaaagaccactgggaaataatggttagtaaacagcttttaatcctgactgatgttcatcatctttctttccagtcttatcagtatttgtccgaaacaattggyataaccaggatatagctttaaaatagcaatgctatcaaatattctttaaaacaactcaaaataaagaaagatgtttatcctagaagtaaaacaaccgtatgcaaagaragattgcaagaatgtgggagagggctgattaataggagcagtagataaaagaagcgcttacgttcaatactgccgtatttcttatcttatagacatatggaaagtaggctaaagagttcagtataagataaaataaaatcaagccaatgtgaattactgcatatgctgtataagcacagatgctcttgggaaaacaattgcttcagcatcatgggttcagtcagtccctggatattctagacagtaattcagtggagtctgtcattactgagaattcattatgaaacagttt

SEQ ID NO: 81291 - DNA, 600 bp, Chicken  19866894374602_1
ttgttccaaggcaaactgtaatccagcaaaaggtaacaatgaccagttgtttataaaaaccactgaaatgtttgggaactagttcacattctcatgctgtgtttatgtttccatttatcatccttctccctgagaagatagctcaaaaggaagaaagagtagagaacaaaattttgtttaaattacacatgcagacgtcaggtaatataacaaatcgagacaaaaaagggatgcctgtgtacagctaaaatcattattgcattagatcattttctcctctctctctctttaagggactcrtccttgccatgcagtttatatttattttgtatattcagctttgccaagaacttctagcttgcaaattaagaaaaggaaccagaaataccatcaaaatgtaagagtatacgatctataaatgttactgcagttttactaatcaaagaatagatcagatctctggttacaagtgcgcatcttaatgattgattcccactcttctcacacttttcttctattttctttttttttttttttaagcaaaatacaacacagtatactattacacccacaggaaataaattggaggggatgatgcaa

SEQ ID NO: 81292 - DNA, 600 bp, Chicken  19866894374608_1
gtgcactcgaggctgggaggtactggtgtctcctgagtcctggagctggggtggaatatggctacacagaaaagtcctggtgtcacattgctcagtatttttgagcattttgctttgctgagtgtttcccttgccgaattgtggctgtgggtctggcagaccttcacctgagcagtggttgataagcttcagtctccaaggatggattaatttcataaatgaaaagacagcagtgcttccaaaggcagaggatctccagggacctctctgcaggagatgggttcagattccccctccagmgtggccttggtcaccacagatgagattgctttgcagaacctattaacagacagattaagatctctcgcagaggtcatttagcaaacagggagacaaatcagcggccttcctctgaggaatacttgttttcttctcagtcctcaaaacaatctggggaatgtgtttggatccagcttgtttctgctggatttaaccctctcatccctaggaataatcgtttgtgtcctgcccatgtgatggggatgggacaagctgttccccatcccatggggatcaggaagcttggggatactgttgcag

SEQ ID NO: 81293 - DNA, 600 bp, Chicken  19866894374618_1
ctactcgtgcatagtaggtataacttcataccctttccttacatacctctccttgtgtatttttaacttacatgcatcctaaactcttctgttcaaattaatatttctgtgatttgagctggatttaaaacagaaaaattctcacgtgcattcttcttgcagaaaggctgccaaggcaatgctgtcagtatggagtccttctaatgctaagaggtatctaaacagcatgacatagcaactcttgctaccttcccccctttctcttttcttccacggatgtggttaatacgaggcttatgrgaaaatggggtatggccaaatttctgtctattcctatccctgcactcagggaaarctgttagctggcctgaagcacagaggttgcatttgccaatcatttgctgtaaaccaggaattgtgcaactggtttgcatgcrgctttatgctggactgtttagggatttgtcacagcctaggaactgtccaggcaggatggggcaattgtttatgctgtagctaaggcagaattaaaaacatctcctaaatggggaacagagacaaaagttgcagccaagacttacaaactcacaggctggaata

SEQ ID NO: 81294 - DNA, 600 bp, Chicken  19866894374618_2
tgtatttttaacttacatgcatcctaaactcttctgttcaaattaatatttctgtgatttgagctggatttaaaacagaaaaattctcacgtgcattcttcttgcagaaaggctgccaaggcaatgctgtcagtatggagtccttctaatgctaagaggtatctaaacagcatgacatagcaactcttgctaccttcccccctttctcttttcttccacggatgtggttaatacgaggcttatgrgaaaatggggtatggccaaatttctgtctattcctatccctgcactcagggaaarctgttagctggcctgaagcacagaggttgcatttgccaatcatttgctgtaaaccaggaattgtgcaactggtttgcatgcrgctttatgctggactgtttagggatttgtcacagcctaggaactgtccaggcaggatggggcaattgtttatgctgtagctaaggcagaattaaaaacatctcctaaatggggaacagagacaaaagttgcagccaagacttacaaactcacaggctggaatatctctacagatcattcaacattgaacttcaaatgcatattggatacttcctaaat

SEQ ID NO: 81295 - DNA, 600 bp, Chicken  19866894374618_3
attctcacgtgcattcttcttgcagaaaggctgccaaggcaatgctgtcagtatggagtccttctaatgctaagaggtatctaaacagcatgacatagcaactcttgctaccttcccccctttctcttttcttccacggatgtggttaatacgaggcttatgrgaaaatggggtatggccaaatttctgtctattcctatccctgcactcagggaaarctgttagctggcctgaagcacagaggttgcatttgccaatcatttgctgtaaaccaggaattgtgcaactggtttgcatgcrgctttatgctggactgtttagggatttgtcacagcctaggaactgtccaggcaggatggggcaattgtttatgctgtagctaaggcagaattaaaaacatctcctaaatggggaacagagacaaaagttgcagccaagacttacaaactcacaggctggaatatctctacagatcattcaacattgaacttcaaatgcatattggatacttcctaaatagactcaaattgcctggttctgtcgctggaggtataaatacacactgttggatattaagcaggttggttcctattgggcaca

SEQ ID NO: 81296 - DNA, 600 bp, Chicken  19866894374621_1
ttatcggatttgtatttccataaaagggatgaatgagccaaagttgtcacttgtttttgcctaaggcgaaacttgactcttgctgctacagttttacatgctgtgtgaagattttagggaattacctaaaaacagaaaaagaggaaaaacacaagacacagaacatcagcatccattgcttaccttgacctgattcattatgaaaacagaagattcaatgatggccatttgagagagttaaaaacatacagagcattatgttaaccacaaccgtgggtgtaatacttttttttttttttyccttttcacaggaaagcacatcttctcttcctcccactgtttcagactgtctgcgggctgatgttagaatccccgttgctcatagccaaaattgttccaactacccagaagggctggacttgacctatggtttcctctaccctcccagtgagcactgttctttttatagctggagtttagaaagtcttaatcagctggatgtgggtttatgtttaaacatataaccaaacaccaaagcaaacttctttggatcagcatgttgggcagaaaaatgtttccagtgtttgtagactcaccaaa

SEQ ID NO: 81297 - DNA, 600 bp, Chicken  19866894374625_1
ctgaaaaaatgactcttgggggttttctcctggattttaaattagtttatagtgagcttgtgtccaggacacatggaagaacttatttaatttaaaataaatctaccaagccccgagctttgaccatatgaagtggtccttctcttgcggctcctttctcggtggaaaaatccaccttgggaaatgcttctgcagcccaaaagcattaattttgagcaaaaaaagcagtaaatggaggaaaatcctggccagaagtgaaatgtagcatacaatctgctctcgtccggcacaaactggggyagctggagcctgggcaggatgagttgctctccagcatccctgctttgcacatctgggaggaaccaagcacctgtaattcctgctgctgtcaatgggccagtgcctgacacggcaaaawgcctgcacagaatgcttgcaygtcccaatggagctcacgtgcatgttaaatttcaagattcaggcattggtaacaaggtcatttagaggctgtcagcccccaaactaagcatttcccatcaatctggccttggctactgaggtctacaacagtaaatattttactaggcttatttattctcc

SEQ ID NO: 81298 - DNA, 600 bp, Chicken  19866894374625_2
tttgaccatatgaagtggtccttctcttgcggctcctttctcggtggaaaaatccaccttgggaaatgcttctgcagcccaaaagcattaattttgagcaaaaaaagcagtaaatggaggaaaatcctggccagaagtgaaatgtagcatacaatctgctctcgtccggcacaaactggggyagctggagcctgggcaggatgagttgctctccagcatccctgctttgcacatctgggaggaaccaagcacctgtaattcctgctgctgtcaatgggccagtgcctgacacggcaaaawgcctgcacagaatgcttgcaygtcccaatggagctcacgtgcatgttaaatttcaagattcaggcattggtaacaaggtcatttagaggctgtcagcccccaaactaagcatttcccatcaatctggccttggctactgaggtctacaacagtaaatattttactaggcttatttattctccttcctttttgcagtctttcatgtatgcatatatataaaggccatttgctgtgacactgtatttcaatgacaaaaagaaagaaaaaaagaaaaaaaaaaagccctttttctgtttggat

SEQ ID NO: 81299 - DNA, 600 bp, Chicken  19866894374625_3
ttctcttgcggctcctttctcggtggaaaaatccaccttgggaaatgcttctgcagcccaaaagcattaattttgagcaaaaaaagcagtaaatggaggaaaatcctggccagaagtgaaatgtagcatacaatctgctctcgtccggcacaaactggggyagctggagcctgggcaggatgagttgctctccagcatccctgctttgcacatctgggaggaaccaagcacctgtaattcctgctgctgtcaatgggccagtgcctgacacggcaaaawgcctgcacagaatgcttgcaygtcccaatggagctcacgtgcatgttaaatttcaagattcaggcattggtaacaaggtcatttagaggctgtcagcccccaaactaagcatttcccatcaatctggccttggctactgaggtctacaacagtaaatattttactaggcttatttattctccttcctttttgcagtctttcatgtatgcatatatataaaggccatttgctgtgacactgtatttcaatgacaaaaagaaagaaaaaaagaaaaaaaaaaagccctttttctgtttggatttatggcttagctttacagtt

SEQ ID NO: 81300 - DNA, 600 bp, Chicken  19866894374628_1
caaaaattactgaaagcagttccacaaaggtatgcccttttccacatgtattagtaaacaagcatttttatgtacctgtggtgtcatctgttgggaactgtgatggaatggattgaaaatcagaggtgtttaatacagaaagagttcttcagaattcatcatttcagcaatggaatgcttgacatttaagtcatactatttctttaaattattatgtttttattattgatgcatactgtgtttaagttaatagaattttaagtaatgttagtaaagaaatggaatgtctattagtctggyggggcagcagtgctaaggaggagtaggaaaccaccactaacacaatagtcttactacgctgagtagtttgaatttgtttgcaagctgaaatattgacgactaatctgtgagaaacacaaccggtgagataacaagagtttgcacactgtcacagtattctgactactcagtatgctgcagtcatgctttgttgtttttcactagtccttaaaatgtgttaaatgaagacattaaaaagttaagctacatttgaaatttcttcctgaaacagtaagagagtcatttcagattctatctgta

SEQ ID NO: 81301 - DNA, 367 bp, Chicken  19866894374633_1
cactgtccctgcagcgcccgcacttctccctccagtgcccgcagccgtcccagcaccgcctccagcacctctgccccacaggagagctccggggggacggggggaggaccgggggatgctcctgcattcccctgtgccctccgaagtgccagcgccagaagcaggagcggcagccctggggtcatggtcctgtggggaagggacagatggcagcggcccagggacctcccaggggacacacacaggacacaaagacaccgtggggttgcacccagctcccatccatggtgtcaccccccmaggctctgagggctcaatagagagttggggttgtggggggggtcccagtgctgccaggtacaccccg

SEQ ID NO: 81302 - DNA, 599 bp, Chicken  19866894374634_1
  misc_feature (1)..(18): n is any nucleotide
nnnnnnnnnnnnnnnnnntattttctcagtttaaaggaaaagaaaaaaagagtggaatgctgaagaggaaataattcccatgcgctgtttcagcccaatagatcccctggttctccagatgtcaggaagaggggagaggagatgccggctcacgctgcaaacagtgcttggaggatctcagccagcaaagccatcggcagtgttttgtctgtctgtcccccttcatctcacctgctctgggctgccaggtccggggctgttccacgttcttcgtgatgtcctgtgctgaacttcactaayagttttgtaaygtcattttgggcagaatattgcacatggattttgtgtgcaaagaggaatgtgtttgcactgctgcaatgtgtaattgaagggccagagcctcatcttcctctaattgccctcaactggaaattccagctgaaatgtctgatttmttgaccaatggaacagcaacgaattatcaccacagcagtagatcttgtgcgcctcccagggactggggggtcaccatccctgggtgtttcccagagctgtggggatgtggcactgagggacgtggcagtgggcatagcggggtg

SEQ ID NO: 81303 - DNA, 599 bp, Chicken  19866894374634_2
  misc_feature (1)..(7): n is any nucleotide
nnnnnnntattttctcagtttaaaggaaaagaaaaaaagagtggaatgctgaagaggaaataattcccatgcgctgtttcagcccaatagatcccctggttctccagatgtcaggaagaggggagaggagatgccggctcacgctgcaaacagtgcttggaggatctcagccagcaaagccatcggcagtgttttgtctgtctgtcccccttcatctcacctgctctgggctgccaggtccggggctgttccacgttcttcgtgatgtcctgtgctgaacttcactaayagttttgtaaygtcattttgggcagaatattgcacatggattttgtgtgcaaagaggaatgtgtttgcactgctgcaatgtgtaattgaagggccagagcctcatcttcctctaattgccctcaactggaaattccagctgaaatgtctgatttmttgaccaatggaacagcaacgaattatcaccacagcagtagatcttgtgcgcctcccagggactggggggtcaccatccctgggtgtttcccagagctgtggggatgtggcactgagggacgtggcagtgggcatagcggggtgggtggggttgg

SEQ ID NO: 81304 - DNA, 600 bp, Chicken  19866894374634_3
tgcaaacagtgcttggaggatctcagccagcaaagccatcggcagtgttttgtctgtctgtcccccttcatctcacctgctctgggctgccaggtccggggctgttccacgttcttcgtgatgtcctgtgctgaacttcactaayagttttgtaaygtcattttgggcagaatattgcacatggattttgtgtgcaaagaggaatgtgtttgcactgctgcaatgtgtaattgaagggccagagcctcatcttcctctaattgccctcaactggaaattccagctgaaatgtctgatttmttgaccaatggaacagcaacgaattatcaccacagcagtagatcttgtgcgcctcccagggactggggggtcaccatccctgggtgtttcccagagctgtggggatgtggcactgagggacgtggcagtgggcatagcggggtgggtggggttggaattgtgagatcctagaaggctattctaacctcaatgattccatgattctgttatatcctggccaaactgcaggccatacagaagcccccggctcatggcttggtccccagtttgccaaaatgcccagaactaactgggaacatc

SEQ ID NO: 81305 - DNA, 600 bp, Chicken  19866894374636_1
gctccttcacttctgtgactctttagttataaaaaccccactcaaagtttctttgttaaatcaatcaattaataagctgattccagtggagttcctttagactgatcccagagtgaggacaaggtcagaccataaagccaagctgtgttttacaaagactctgtgcagtttaaggggtttgtgtagggctgcacagtttaatttaaggcctaagtgagctgctgcttatcacccttctgatgatcaaacatgcagagaaagaatagggatgtatacatacacagcagccactctaatgcyctctagctgctaaggatctgaacagtaaatgtcatagcagactaataataggaaaaaaacagagagcctaggatgcaatagtaatttaagaaagcagtgttacccaaaacaagaacagactatattattcactgtcaaggtagcactaactagatgagagtattttgctattataatagcatatttattgggaaacaacaacaaagccattattttgtgtatttacttcagactttcccctacctgctccttttttcacagtcagtgcaaattaccatatcccaatcactctgatttctg

SEQ ID NO: 81306 - DNA, 599 bp, Chicken  19866894374639_1
  misc_feature (1)..(1): n is any nucleotide
nctgaaaaaggctgtgtgtaaagcaacaaatttttctgacatggacccaaccttgctttagaatattgctggcaagtcaataataggtagagcagaaatcaatcggcaataatgctgcaaatgaggcacggagcacagaaagtcctttcagcacaataaataaatctctgcttgttcaaacaagtagcatttatgacatgatatgaaacttctaaaagcagacatttgtgcaaacagaaaaagacatcaagtttattgactgaataacagctaggcaacctcttctctcttccccccccyctccctcccaacaatacagagataaaatattagaaagaaaatccaagcagaaggacctgaaattaggggatcgtgcaaagagatgcagattcagggaggcagtctcatacttggagaaattgctctcttggggataaaattatttttaggaaataaagctattttacgatcctaaagaatttagcagaaaattatacctttcagttgagattttgtatgttattaaatcacagaaatagaattttagaggttattaaaaactcggtaaaaattaaattattctctgtttaactctacag

SEQ ID NO: 81307 - DNA, 600 bp, Chicken  19866894374639_2
aagtttttaatgcatgagacactgttaggaaacctcctaggaagctggcaatcttgcagcccatcggagagtaaaaggagcaattaggattttgcagagaagggaaattatttcattgtgtctgtttccagctcagagattgtcactgaaatacttgctatttgcttgctcaatatacgtaataaatctgggaatattgttgaagaattaggctaagcccattctcaaacattttgctggaataacagtgtcagcaaaagcccatgtactttttttattatcccagcaaagagtcagcayaatgcaaagacagcttattctgctagaggaagcttgtttaccccaaattaacaaaactgaaattgttgacaagaagcaagtttatgtaacatctccattgaggttgtaccactgctgccttccagatgggtcatgagagggttgagtggctccttctccttctgtggcttttccctgagtaatggggaatgggctggggaacagggggctggtgctagacttgaaggatgccaaaatttcatgggtggctgagagttccctgatgagcaaggagctggcccaagagccacagaaagcggc

SEQ ID NO: 81308 - DNA, 600 bp, Chicken  19866894374646_1
cgtaataggagaaacatcactactcaaatctctgggtgctctgtgaacagacagccaaatgcagaccgcagcatttagttaatgtgcataaaatattaaatggctctgctcaaatctactgatctgacttgttttctcaacagaagatgaatagcataaagcaagaagctgtcccctgtgggaatctagtcatcaaggggaaacagatcaggtatggaaagaaaaaagtacttccaataaacttggaggtattctgaaaagcacagtaagacctaacaaatgagactacctgatttttaragatcagcatagaatgactatggagtaaatctcctccagtcttcaaaagcacatgttctcttcctagacacaatggactacactttgaacagtatctgaaaacaagaataggtgaagagatacttactgcaatatattaaatatttgtgaaaaaaattaagagcttgtaacagaatctgagcaggtagatcagttttacatcttatgcagaatatatcaccttgggctatacaggctattaggtgacaccrgagatagaaataaagccaagtcatttatacatttacaaattcaggtgac

SEQ ID NO: 81309 - DNA, 600 bp, Chicken  19866894374646_2
ttctgaaaagcacagtaagacctaacaaatgagactacctgatttttaragatcagcatagaatgactatggagtaaatctcctccagtcttcaaaagcacatgttctcttcctagacacaatggactacactttgaacagtatctgaaaacaagaataggtgaagagatacttactgcaatatattaaatatttgtgaaaaaaattaagagcttgtaacagaatctgagcaggtagatcagttttacatcttatgcagaatatatcaccttgggctatacaggctattaggtgacaccrgagatagaaataaagccaagtcatttatacatttacaaattcaggtgacaatcatgctgtctactctgccatatttgactggtgaaataagatgagatcacacagtataagaaagtacaacagcacatctccgttcctgacacagaatcattaaggttggaaaaggccactaagatcataaagcccaattgtcagcccatcaccactgtgccactaaccacatctctcactgccacatctccacagttatttaacccctccagagagtgactccaccacttccctgggaactacagaaac

SEQ ID NO: 81310 - DNA, 599 bp, Chicken  19866894374648_1
  misc_feature (1)..(66): n is any nucleotide
nnnnnnnnnnnnnnnnnnnnnnnnnnnnnnnnnnnnnnnnnnnnnnnnnnnnnnnnnnnnnnnnnnaaaatttttcttaatttgaggtagaggagaataagaattagagtaagaattgcaaatagatgccacctcataccatgtaaatatcatgcactttatccaaaggacagtgtgtatgataccaatactttattaaaagcttccagaaataactaatatgatataattaaatagttcatttttataaaacaacccatagaaaatcagaaagaaacaagacattccttatattaagayggaaaaataagggtcaggttagagcaacgcttttgaatttgactcagtacatcttaacgccagtttgttttttccagttctcactttcaattcattgtgggtttggttttacttcattttcttggtttgtctgttcttttgtttgttggtttatagagtaaaaagtgtatgttatactttgatgtgaattattatactcatacattatatacatataatatacatatattatatgtacagttcagcttcacctaaatggcatcatatttcaacaagtcaaataaattgctgggttttgt

SEQ ID NO: 81311 - DNA, 547 bp, Chicken  19866894374648_2
caggttagagcaacgcttttgaatttgactcagtacatcttaacgccagtttgttttttccagttctcactttcaattcattgtgggtttggttttacttcattttcttggtttgtctgttcttttgtttgttggtttatagagtaaaaagtgtatgttatactttgatgtgaattattatactcatacattatatacatataatatacatatattatatgtacagttcagcttcacctaaatggcatcatatttcaacaagtcaaataaattgctgggttttgttgtagttgtagttgytgttgttttctgttctgtccaggaacacagtaagaagctactgtatttcttctttaaattttctgaagcagattacatgcttccaacctattcttgcatgtacycattttaaattttgcagaaaatgaatttttgcacttaaagaaatgttaacataaaataactagtatatttgctgctgctttagagatgtgtttcttaacattttttaatgaagccgtattattaagatctggaatttatgaag

SEQ ID NO: 81312 - DNA, 443 bp, Chicken  19866894374648_3
ttcttggtttgtctgttcttttgtttgttggtttatagagtaaaaagtgtatgttatactttgatgtgaattattatactcatacattatatacatataatatacatatattatatgtacagttcagcttcacctaaatggcatcatatttcaacaagtcaaataaattgctgggttttgttgtagttgtagttgytgttgttttctgttctgtccaggaacacagtaagaagctactgtatttcttctttaaattttctgaagcagattacatgcttccaacctattcttgcatgtacycattttaaattttgcagaaaatgaatttttgcacttaaagaaatgttaacataaaataactagtatatttgctgctgctttagagatgtgtttcttaacattttttaatgaagccgtattattaagatctggaatttatgaag

SEQ ID NO: 81313 - DNA, 599 bp, Chicken  19866894374659_1
  misc_feature (1)..(31): n is any nucleotide
nnnnnnnnnnnnnnnnnnnnnnnnnnnnnnnaggcagtagtggtgcatttcagtcacagcaacagtgggtcgtctctgccggtgcagatgcaaaatgtgtttagtcattagaataggttgcctgtgttctctttttcatctccattgttttgataatattatgaagagtcttttagatataaagtgttattttttaaaatttccattattatttctgattgcttgttgagcatctaaaatggtcgcagacagtgtgcagagaatataaaaaacacaatccttacccgaagggatttgatmtaatgttagatggttgcagaaatggaggctagcactaagccatgaagtgagatagagaggaatcgccttaaagtaggaaaaaacattgagctgcagtgagattttagttcatgttgtttatccttaatttgttttcagtaaaaaaaaaaaaaaggattaarttctaataaatgtgarttttaatgcaagttcactgtttttattcactgaaaaatgaaacaaaagtgcctcagcattttgtcctattatatcctttgcctaaagaagcaatagtaagtaattgagaggaaataaaaata

SEQ ID NO: 81314 - DNA, 600 bp, Chicken  19866894374659_2
tgaagagtcttttagatataaagtgttattttttaaaatttccattattatttctgattgcttgttgagcatctaaaatggtcgcagacagtgtgcagagaatataaaaaacacaatccttacccgaagggatttgatmtaatgttagatggttgcagaaatggaggctagcactaagccatgaagtgagatagagaggaatcgccttaaagtaggaaaaaacattgagctgcagtgagattttagttcatgttgtttatccttaatttgttttcagtaaaaaaaaaaaaaaggattaarttctaataaatgtgarttttaatgcaagttcactgtttttattcactgaaaaatgaaacaaaagtgcctcagcattttgtcctattatatcctttgcctaaagaagcaatagtaagtaattgagaggaaataaaaataagttctgaatatattacagccttagaataactgaacaaatttggtgttcctttcatgtccaatatcctgcactaagagcttgctgtttttttctgcgtttgttttgtttatattgtctgcatgtgtctgctctgtttgagtctaatatacaggatatgaaag

SEQ ID NO: 81315 - DNA, 600 bp, Chicken  19866894374659_3
tataaagtgttattttttaaaatttccattattatttctgattgcttgttgagcatctaaaatggtcgcagacagtgtgcagagaatataaaaaacacaatccttacccgaagggatttgatmtaatgttagatggttgcagaaatggaggctagcactaagccatgaagtgagatagagaggaatcgccttaaagtaggaaaaaacattgagctgcagtgagattttagttcatgttgtttatccttaatttgttttcagtaaaaaaaaaaaaaaggattaarttctaataaatgtgarttttaatgcaagttcactgtttttattcactgaaaaatgaaacaaaagtgcctcagcattttgtcctattatatcctttgcctaaagaagcaatagtaagtaattgagaggaaataaaaataagttctgaatatattacagccttagaataactgaacaaatttggtgttcctttcatgtccaatatcctgcactaagagcttgctgtttttttctgcgtttgttttgtttatattgtctgcatgtgtctgctctgtttgagtctaatatacaggatatgaaagtagaaaactgagcata

SEQ ID NO: 81316 - DNA, 600 bp, Chicken  19866894374661_1
aagtggcaaccctgataacagtgctccatgtgtattatattcagtttactctaagattagtagcaatcagccagaactaccaaaaactcttaagaccacagaggcaatgcaatcataagagttgtaaacacttcaaaagtaccagtgatgctctgaaaaatgatccaggaaaggtttccaaacattaactacacccctgtgcaaccagctgaaaaggccctgggctcctcttgcttagtacttctgccaccaaactgcaatttctgtctctttctcactgctgggagatcactgcatcgrtgccatccatctactgctggagtctgtccctgttttcctgcccacctggaccactttatgggtctgtttgatcacactgcagctctactttgctgctgaatgggcagaactttccaatattattattctagtgagatttcctatggtaaaaatcatataaaaacaggacttcaaacaaatacaacacataaaaatcacctccacagacttctccagggactcgccagccacagtagaggactgggcaccagaaacacccaaatcaaaccaaattttgccatagaatttgtgactgagact

SEQ ID NO: 81317 - DNA, 600 bp, Chicken  19866894374663_1
aatgggtacacaccattctgctttttcctgtctcctgcattttctacacatttgtctttcagtgtagctctcaccaagagataatatcattaacattcaacaaatattagcagagcatttggtgcacagttcattaagatattgcagtgtctcaaacaggtgatagaggagttgctatggttactatagccgcttaagctgaacactaaataggttcacaaaacatatattcctacttgttatgtaaaatattagttacccagctggtattcatttatgcactccttttattttgtcaargactttccactccttcatctttcaaataaagtggattttagtgttgtttggagaaaggagaggtcactagccattctcctccttcagaaaaggggacaagttaggtagctcattgtataccctgtttataattaaatctaaaaatgacagcttcactgtactggaaatgtgagagctttcattttggaggatttaatgagtcatggaaacatgtttacaagcatgcaacaagccctcactacacaaagaactcaacattagcgtggcagtagaccatatagcttttaatggcctgaactt

SEQ ID NO: 81318 - DNA, 600 bp, Chicken  19866894374664_1
cacaatttgtgcctttatgagaggaaagaacacacgtggccagcttccacacagcaataaagaaaatggtgtcttttctgtcccagtggcacttcaggctctcccttgaaatgtcagtgcactgcgactgtattggagggactcagtcctgaaactcagactgtgcacatggagagatgtggttgccgtgcaggtggcacatgacagtaggacatgcacataagcagcggagtaagataaggctacagcccatgtaatagggccaaaccatcctagcaaggatatcactctgaacccagsagcaaggtcctggcaggagcacacagagcactgtgctgagaggagcagacaggaacagtcacagctgatgctgtgtcccagcttcaggagrtgtgtgtgctccccacacacaaccaggcagacccactgcatgctgcagagacctacaggcacactaggctctttcagacagccaggagcagcatggtgcacatacatacatggctagcatttagcatgagaaaggcttcctacacctgcagctgcaacctgtctgtgcagtgagaagaaaccaaaatacagataaaaataaaaaacaag

SEQ ID NO: 81319 - DNA, 600 bp, Chicken  19866894374664_2
cttcaggctctcccttgaaatgtcagtgcactgcgactgtattggagggactcagtcctgaaactcagactgtgcacatggagagatgtggttgccgtgcaggtggcacatgacagtaggacatgcacataagcagcggagtaagataaggctacagcccatgtaatagggccaaaccatcctagcaaggatatcactctgaacccagsagcaaggtcctggcaggagcacacagagcactgtgctgagaggagcagacaggaacagtcacagctgatgctgtgtcccagcttcaggagrtgtgtgtgctccccacacacaaccaggcagacccactgcatgctgcagagacctacaggcacactaggctctttcagacagccaggagcagcatggtgcacatacatacatggctagcatttagcatgagaaaggcttcctacacctgcagctgcaacctgtctgtgcagtgagaagaaaccaaaatacagataaaaataaaaaacaagctagaaaggatgccatgtcactgattctacttccccacttttgttttcatggctactcagagtgtagtctgagccaaaaagagaatgtcag

SEQ ID NO: 81320 - DNA, 600 bp, Chicken  19866894374683_1
ccctctgccccccacgctcccccatcaataatgcaaaggaatctcgcatgggcagagaacttatggatcatggagcaaagccctcatgggacttaacacagccgtctccacccagcccgacaccaagcactcacccctgtggcaccccactttgggaggagaaagaggagccaaagtcttccctcctgcctttcccgtctttccgttccaccacctggcatcacgccgggctgccattgcctgaccccatcccagggctcagctgccgatgagtcagggcggtggggatgggatctcctkgtgcacggccagggatggttggtcctacacgtccacagccctgaagctcatgggcatgaccccatccatggctctttgccttggtgaggtgcaggaaatgagggagctgccactcccatacaaagatctcttcatcggctctctgtgccgctccctacagccccactgtaccccttcttcccaactcctgctggttttggatccagagctgttgctggctggcgcgttggctcagagtcacatcacaccgacattttcagcagtcagcctccatttgagagctgctcccaacctgccccg

SEQ ID NO: 81321 - DNA, 600 bp, Chicken  19866894374686_1
tgcagtagctgaattaagtgtgtgataaccgataagccgaattattttgtaccatccagtgtacctttagaataccagatttgagagaaatacaggatgccattaatgttcccaaatgttgtggtttattgtttccatgctaagtgagcatagtgcatgtttcttgacagcttgtcagatatgtggctggcataggtgacctggatgtcttcaggtagctgccttgttcagtggagactgctctctgcccaccttgttccttggtctgctgttctgctttaatggctgctcttagacgtragaaacacagtaggcagtggtgaagaaacaaaacaaaaaaaggaatcttcagctggattaactggaagaatccwcagctgaagatgaagatttcattattaaaaggtggtagtgtagaggcttttctgaggagtggtayggagagctgtaccaggaattactagggaatgaagagatgaagaccagaagatggctcagctaagagcaaaaagtcatrcagatggttcagaacatagtgaaaagagaagggaatttgcctgaggtagcagagtgatgcttttgcattgatcaaatgcattt

SEQ ID NO: 81322 - DNA, 600 bp, Chicken  19866894374686_2
ccagatttgagagaaatacaggatgccattaatgttcccaaatgttgtggtttattgtttccatgctaagtgagcatagtgcatgtttcttgacagcttgtcagatatgtggctggcataggtgacctggatgtcttcaggtagctgccttgttcagtggagactgctctctgcccaccttgttccttggtctgctgttctgctttaatggctgctcttagacgtragaaacacagtaggcagtggtgaagaaacaaaacaaaaaaaggaatcttcagctggattaactggaagaatccwcagctgaagatgaagatttcattattaaaaggtggtagtgtagaggcttttctgaggagtggtayggagagctgtaccaggaattactagggaatgaagagatgaagaccagaagatggctcagctaagagcaaaaagtcatrcagatggttcagaacatagtgaaaagagaagggaatttgcctgaggtagcagagtgatgcttttgcattgatcaaatgcattttttctctccctcttgctaaaatctgttgaatcttcataccacttgttgcagtgtgacttcactgtggctcatca

SEQ ID NO: 81323 - DNA, 600 bp, Chicken  19866894374686_3
ctaagtgagcatagtgcatgtttcttgacagcttgtcagatatgtggctggcataggtgacctggatgtcttcaggtagctgccttgttcagtggagactgctctctgcccaccttgttccttggtctgctgttctgctttaatggctgctcttagacgtragaaacacagtaggcagtggtgaagaaacaaaacaaaaaaaggaatcttcagctggattaactggaagaatccwcagctgaagatgaagatttcattattaaaaggtggtagtgtagaggcttttctgaggagtggtayggagagctgtaccaggaattactagggaatgaagagatgaagaccagaagatggctcagctaagagcaaaaagtcatrcagatggttcagaacatagtgaaaagagaagggaatttgcctgaggtagcagagtgatgcttttgcattgatcaaatgcattttttctctccctcttgctaaaatctgttgaatcttcataccacttgttgcagtgtgacttcactgtggctcatcactgttctctgagtacaatgagcagaaagtagctaagggcagcaggctctcgaggggaaaattctg

SEQ ID NO: 81324 - DNA, 535 bp, Chicken  19866894374686_4
gctgccttgttcagtggagactgctctctgcccaccttgttccttggtctgctgttctgctttaatggctgctcttagacgtragaaacacagtaggcagtggtgaagaaacaaaacaaaaaaaggaatcttcagctggattaactggaagaatccwcagctgaagatgaagatttcattattaaaaggtggtagtgtagaggcttttctgaggagtggtayggagagctgtaccaggaattactagggaatgaagagatgaagaccagaagatggctcagctaagagcaaaaagtcatrcagatggttcagaacatagtgaaaagagaagggaatttgcctgaggtagcagagtgatgcttttgcattgatcaaatgcattttttctctccctcttgctaaaatctgttgaatcttcataccacttgttgcagtgtgacttcactgtggctcatcactgttctctgagtacaatgagcagaaagtagctaagggcagcaggctctcgaggggaaaattctgttgatgctattac

SEQ ID NO: 81325 - DNA, 600 bp, Chicken  19866894374689_1
tggttccggcaacccatgtcccggggtgggagctcagcgggacggggggcgtttgggctctctgggaatgctgcagcccacggggacagaagtgcccactgcaccctgagaaggagcgcacccagcccgaaagtggcactgctccaaaggctgaccctcaccgtggagattgatggaaagtgtctgcctccaatggggctgcttcagtctggctgctgagaaaatgggacccccaaccccagaccatgcaggaaaacagcgtcatctgcggccctaagggatgggggtaccaccgccccraagggatttgggtgtcagctccctgcggggcctctcctgaagtgggtgtgggaattctgtgcatctcagcaaaaactgagggaagaactcaaatgtgcagaaagcactgattttccacgtggatgcgctgccattagccctgcccattaattagaataacactaattgttatgataatgatgattatatagactacttgatatttactgagattggagatatataaagcaaacccttgcagaattcgtgcagtttaatcaaagcctccaacatcccagataacatttttaaatgccaaat

SEQ ID NO: 81326 - DNA, 600 bp, Chicken  19866894374690_1
gtttctgcaaaagaataagctccaacaaattgaaaaaagttctgtattttaaagatataatgaaattttaaaagggttatagaaaactgaatcattgactggagttggatgatctacatgaaagagagaaaactattcaacttgtctaaaaccccaagttcttctcaaaacgcactgtgaaacagcattcagagggacaaagtaaattagaaaaccaccaacatagttcatatttgtatgaaactaattcacacaggatgcagcaaatatggcataactacagcaccacagtttgttctyctttatatatcaccaaagcctttgtttctttgaagatgggtaattgtatggaatacagtacttttgacttcctacctacagctcttctccccagttgctctacacagcagaatgtattgactacaaacgatgaaagcaggactccttcactttggttgtttttcagagactgtcagtgtctctgatgggctgaaactgtcatagtgaaagagcgtgcatatggacataaaagcatgctatttatcttcaaagagaaaagcaattgagaagtcttgacagatctcttgattatttggattt

SEQ ID NO: 81327 - DNA, 600 bp, Chicken  19866894374698_1
taatttctttcaaatatatgagaacattgtaagatgtacacagcgtatgtatggagatgttatctgtattaaaagtggaggacaactaaccagagttaaaatggacaaaacaggtaatgtaaatgttagttaatgaagaacaagatttgaagatcttgtattaaacttcgaaagaggcatgaacataagggttttccatttatttctgtggacatgacaggtagatttcttaaagtgaacagataagcatttggaaaacaggaatggaacaaattgtaggagtggtcatgtacttccagwgtttgcagatttggggatttgtaaaaacagtagtaaggttactagtaaaacctttattacactcataacatctacaaagacatgtaaggtatcatggaaaccgctggttttctttttaatttatatcagggagaaagaaattacagtttagtcaaaggctactgtatgattctgaagaatgatacattctgttctgactttgtttcctacatactcatcctctttgaaaaaaaaaaccaaacctgtaaattacacagtttctgttgaggataagagagagaatcaataaaacaatggaat

SEQ ID NO: 81328 - DNA, 600 bp, Chicken  19866894374700_1
aaggctctttgtagcccaaaatagctgtaccaagactttgccgtattcaatcatttttacccagaacctgatttctattctgtagagtagcaataactcttctaaaccctgcatgcttttgcagacatgtaaggttcaaaagccccaatgcctagttaatcaatactttaggaaggtcttgtataacgctcattaaagcctaacacattgtatttcatcatcttgtctgtgctctgtactcagaatgccctgcagcttctctccagcgcaatgtccttcaagttcttcatgcagcttgtyggggtgttttcctgcccacttctcagtgacacagcttaacatctcagataaatgttttgtcttatatcctcccttctctatagacaacgtcaagaaaatggcagagtgggggtacatgaggaaaaccaaattctcaagtattaattcctgatgctgctgctgcagtttttgctctgaagtgagaaacctgcaggctgtcaggctgcagagcaggcagcaaagacatcctcatacagtcccagtcaacacggctgaacagccagattgctctgaacaacagttattttctccatctcactc

SEQ ID NO: 81329 - DNA, 600 bp, Chicken  19866894374700_2
gcttaacatctcagataaatgttttgtcttatatcctcccttctctatagacaacgtcaagaaaatggcagagtgggggtacatgaggaaaaccaaattctcaagtattaattcctgatgctgctgctgcagtttttgctctgaagtgagaaacctgcaggctgtcaggctgcagagcaggcagcaaagacatcctcatacagtcccagtcaacacggctgaacagccagattgctctgaacaacagttattttctccatctcactcttgaactcaactgtgggcaaaactgacaaaggytttacagccagttctgtctgttgcctccatcaccaggcaaagagattccaggcagtgccaacctaaacaatactgtgcatcattcagcctatagcctgatctcggtgctgtggggagggctcgaacaaagctcatttgctgcctatttacaatttccagcctactccaagcgttcaatttgttcacacaaagtaacagtctcctaattgaggaataaggattataatatgaccaaacaagactccgtctaataaccagttaggtaatgcttagaagatcctgtattaagttgagatacac

SEQ ID NO: 81330 - DNA, 600 bp, Chicken  19866894374711_1
aattcccagcaactaggaccagatgcaccaatgctagaaagcaaatcagaagttaaaactgaagaaactgagccagagactagtgagacacaagtggaagctaagactgaggtaaatgagattctatacagcttaactgaaagcagtgatagatataaaagcactcaatggtatgtctgaattgatgagctaaggggcgagaagagggtagttactggaaagtaactgtcctgaggaaagccatggatggagagtgctttgacaatctcataagctaatatttgaatgactgaagcctgkgtcrtagatgtaacagtgcatcttgttgcctcctttcttaaggtggaggaggatttacaaggatcttcacaaacaaaggaggaaacagatggaactgagctgaaacaagagccaatggaaatagaagaaaagaagcctgaaataaaagtagatgctaaggaggaagaggaaagtggcactaatggaaccacttcacaatccacatcgccatctcagccccgcaaaaaaagtacgtgtatgaaaactgattcctttttcttgtgtacttcgttttatgcagcccttcctttttctgcggtc

SEQ ID NO: 81331 - DNA, 600 bp, Chicken  19866894374711_2
cccagcaactaggaccagatgcaccaatgctagaaagcaaatcagaagttaaaactgaagaaactgagccagagactagtgagacacaagtggaagctaagactgaggtaaatgagattctatacagcttaactgaaagcagtgatagatataaaagcactcaatggtatgtctgaattgatgagctaaggggcgagaagagggtagttactggaaagtaactgtcctgaggaaagccatggatggagagtgctttgacaatctcataagctaatatttgaatgactgaagcctgkgtcrtagatgtaacagtgcatcttgttgcctcctttcttaaggtggaggaggatttacaaggatcttcacaaacaaaggaggaaacagatggaactgagctgaaacaagagccaatggaaatagaagaaaagaagcctgaaataaaagtagatgctaaggaggaagaggaaagtggcactaatggaaccacttcacaatccacatcgccatctcagccccgcaaaaaaagtacgtgtatgaaaactgattcctttttcttgtgtacttcgttttatgcagcccttcctttttctgcggtctttg

SEQ ID NO: 81332 - DNA, 600 bp, Chicken  19866894374711_3
ggaaacagatggaactgagctgaaacaagagccaatggaaatagaagaaaagaagcctgaaataaaagtagatgctaaggaggaagaggaaagtggcactaatggaaccacttcacaatccacatcgccatctcagccccgcaaaaaaagtacgtgtatgaaaactgattcctttttcttgtgtacttcgttttatgcagcccttcctttttctgcggtctttgttcctgctgggaggggcttgtttatttttgaaagtagaattcctttaacattacctgaatcagaggtgaagtagcrtgctgtgttcttgatgccagcagtgtccctcgcagtttgcagtttctgcccagaaggactgaggtggtaagggagtggttgctgctcgggtgatgtgcatgaatctctccctctgcatcttggccagtgctctttcacaggagctcagtatagatgcaacaaccaagaaatagccattgctaaataaacagccaaaaataaattgcttctctttgtaatgaaggcaagataagtttttttggactcaaactcaaaagccttggctgcctcgacacttggttttttgagatgaccatttct

SEQ ID NO: 81333 - DNA, 600 bp, Chicken  19866894374715_1
ccaagttcctaaaacaatttgaagatgctggggatcaacctgatgtcctgtccctgattctgaagtatttatctaaagctatactcgtgtatgtattttgacagcaagttcgcactcattccagaatgacaatggaatgacaagcatggatcagaggtcaatgtttggaaatgcatgcaaatgcagttctatagattatagaaatacagaaaataacaactattgggtgtatggcagattgagagtatttgcaagaagacagtcttatctgacagtgatttgatggttatttcctcaatmgtattttgaattacaaggacaaatagcttcacgtatacatactatattcatctgatcaatccatggtcgatacagaacttgacaacttacctctttcttcccttttttgttttgaagtgagtatgaagtgagtgtctgtcattttgggagtactcccgcagaaccctgcttgtatagttgttaagccactgccttttgatgatacagaagtttggggtcttgcataatgcccccttggggattttgcaccctttgtagcagtttccactcctttcatgtgagcctttttgagagatctca

SEQ ID NO: 81334 - DNA, 600 bp, Chicken  19866894374716_1
gcgctttgggaagtgggcagcgggggttttgggggagcccagcccagggctcgttggggaccaaatgccatggggaccccccgtgtctgccttgaaggtcacacactgagatgaggacattgagaactgcagaaccccggggttgatggcacccagaggtcaaacctctgcagacctgaaggccaaagtcagctctgagccaggctggccgtggcttcgtgcagccacatgagcacccccagggatggaggtcccaggtcttctcagagctctgtctcagtgcacattgcactgcttggmtctgtgtgtgcgcccccagtttctgttgggttccagccccatgccaacagcccaagtcatggctgtgccactggatgaggtgaagtcccactttctgctggaggaagaggaagggctgagagctgctcgcctctgccccatgagccctttagtgctggtgtgacttacatgcttagcagataccactacacaaaaatacaccgagctgtgctttctaagtacgaaactgtttgggggcagattaggaagcacttcgttaaaccacattccatgattttattatttttaaagacttctttt

SEQ ID NO: 81335 - DNA, 600 bp, Chicken  19866894374718_1
tggtagcttggtttcagagcaaacacctgcctgcatgtttagcttgtgctgcaacttgagtgtgcaggaagctttaaggtcgatttgatctaaataactgttcacctttaacatttatcctctggttagaagattagccagctttcatgcgcttcttaaggcctctccaatagcataactgagctctgcatcaaaaagtggattctactttcttccttctgctgacatgtatcatactgcttctgctaacaccatttcatttgcaaaagcggccaaggctgagtcaatgaacaaaggggyctagcttatgaatctcctgtgcaaatagaacatgaaatgggccagctccaaaggaagcacaattttcagagaagtgaaaatgcagaagaggtggaaacataaggcaggactgctggacagggcaatatagacagggcaatatttttactaggttttgggtgcagtcatagagaatagmcctgagtgcttgaactcagcccaggtattttcatatgttcaagatgtaaccgaggaagtatagaagggagttgcatgaaacgtttgcctacaatgagaggaagtacctgatggatggggaag

SEQ ID NO: 81336 - DNA, 600 bp, Chicken  19866894374718_2
ctgagctctgcatcaaaaagtggattctactttcttccttctgctgacatgtatcatactgcttctgctaacaccatttcatttgcaaaagcggccaaggctgagtcaatgaacaaaggggyctagcttatgaatctcctgtgcaaatagaacatgaaatgggccagctccaaaggaagcacaattttcagagaagtgaaaatgcagaagaggtggaaacataaggcaggactgctggacagggcaatatagacagggcaatatttttactaggttttgggtgcagtcatagagaatagmcctgagtgcttgaactcagcccaggtattttcatatgttcaagatgtaaccgaggaagtatagaagggagttgcatgaaacgtttgcctacaatgagaggaagtacctgatggatggggaaggctcttctcactctgcaggcattttgaaactgagtcaggaaatggctccagattttgtatatggacgtgaaaaatctccattcagcacaagcaaayacatgcatacaaatggaaagagagaaaaactcatgaaacctgtgatggaccacttctgtctcttggtggcattttcagtcca

SEQ ID NO: 81337 - DNA, 466 bp, Chicken  19866894374718_3
acataaggcaggactgctggacagggcaatatagacagggcaatatttttactaggttttgggtgcagtcatagagaatagmcctgagtgcttgaactcagcccaggtattttcatatgttcaagatgtaaccgaggaagtatagaagggagttgcatgaaacgtttgcctacaatgagaggaagtacctgatggatggggaaggctcttctcactctgcaggcattttgaaactgagtcaggaaatggctccagattttgtatatggacgtgaaaaatctccattcagcacaagcaaayacatgcatacaaatggaaagagagaaaaactcatgaaacctgtgatggaccacttctgtctcttggtggcattttcagtccacttgtcggacatgcattataaagcacagtgtactgcacgaccccacgagctgtaccatgggtcctggcttagaaaaacatccat

SEQ ID NO: 81338 - DNA, 409 bp, Chicken  19866894374719_1
ggccataacacaagcacttctggtgtttctgcccaccctggagtcaatgtgctggaagtccctagaagtctccgcttttctgcttgcgcttcttcttgttagcagtgctctgagcttgcacagaacaggaggcaaagatgccaaagcatgtcaaccacctggattaattaggtcatacgctaaaaacggaactacaatgaagtggatgattattaaaccagcaaccttgtggaaactggatacctcctctactatatttcagcttccttaaccttttaagtgcctcgaggcaagaacagygttgtgtgtgtataaagcattttgcattaacaatagcagtattaataacaatattaaatgtgtttctcctttggggtaggtaaatatcactcttcattttacagctgat

SEQ ID NO: 81339 - DNA, 600 bp, Chicken  19866894374723_1
agcactgaaaggttgagattgactccaagtgtgttccaggtaggcccagggaccagagaacaacagtggcccttaagtacactgattattcattggcttgcctgccctcataccaagagtatgctcctccctgtcatacactaaagtctgacagccaaatttcgtagcaaatacagatgcattcgaactccttctcactgtcataacagaacttgacagtggccactactacacaatttcattctcattttgctagaattgcagaacactggccctttattttaggcatctgtggaactrtgtattatatgtattatatgctttatgaaagcactgcagaagactttatgatgctgcagggacacgtataaaataacaatgttaaggatgtggataacatacaccagccaagargaaacaaaaaggaatagccctcttccttttaataattgtctggtgagaagaaaatttacactgtggggccasaaggacccctgtgatcttattgctattttttggtaatagattaaactttaataaaaagtgcaacacacacctcagacgtccatttttaatgactactaaactcgtagtagatat

SEQ ID NO: 81340 - DNA, 600 bp, Chicken  19866894374723_2
aagagtatgctcctccctgtcatacactaaagtctgacagccaaatttcgtagcaaatacagatgcattcgaactccttctcactgtcataacagaacttgacagtggccactactacacaatttcattctcattttgctagaattgcagaacactggccctttattttaggcatctgtggaactrtgtattatatgtattatatgctttatgaaagcactgcagaagactttatgatgctgcagggacacgtataaaataacaatgttaaggatgtggataacatacaccagccaagargaaacaaaaaggaatagccctcttccttttaataattgtctggtgagaagaaaatttacactgtggggccasaaggacccctgtgatcttattgctattttttggtaatagattaaactttaataaaaagtgcaacacacacctcagacgtccatttttaatgactactaaactcgtagtagatatatgctttcagtcataacaatgatttcctattacgctaatttccttcttgccagtaacacagaagatactattaaaatattttaattttgtcagaggacaccattcatgtgcaaa

SEQ ID NO: 81341 - DNA, 600 bp, Chicken  19866894374723_3
actccttctcactgtcataacagaacttgacagtggccactactacacaatttcattctcattttgctagaattgcagaacactggccctttattttaggcatctgtggaactrtgtattatatgtattatatgctttatgaaagcactgcagaagactttatgatgctgcagggacacgtataaaataacaatgttaaggatgtggataacatacaccagccaagargaaacaaaaaggaatagccctcttccttttaataattgtctggtgagaagaaaatttacactgtggggccasaaggacccctgtgatcttattgctattttttggtaatagattaaactttaataaaaagtgcaacacacacctcagacgtccatttttaatgactactaaactcgtagtagatatatgctttcagtcataacaatgatttcctattacgctaatttccttcttgccagtaacacagaagatactattaaaatattttaattttgtcagaggacaccattcatgtgcaaatctatttgcttcaatccagtaaaaatattggaaagtcaccaatttgttgaatgaatatttaagatctcaccc

SEQ ID NO: 81342 - DNA, 600 bp, Chicken  19866894374728_1
aactgccttttggaaaccaaagccactgcagaacgtggcatgctacgtatgtgctcaggggaggatcggagtgcctgcactgctcaatccttgtgttcccctatgacttaattcaacaattcacatcttctgacttagctgaactgctgttctccccaggcttacatctcaaagaacaggatgatcttaaaattaagttctctaaataacaataatgtttttaaaaggcagtgcatatttgagtcacacataaaactcttcgatgcaaaggctgaaaaattatgcactcaaaaaactacrgtgtcagaaagaagattattttttcaaacttaattcagccttcttgtacacttacctaaaattgttggttagagaaacatcaaaatactattttccttctcacattcctgctttattcagtgcagagtttgatgctactccactagagagcagctcttcaatattattattattattttttttttttgcagtttctgaccccatcctttatttattcttctgaaattaaaatgctctcttttcctagtgggcttttctgtcctttcatctcagggtgagaaacaaacagtgcttggcagg

SEQ ID NO: 81343 - DNA, 599 bp, Chicken  19866894374734_1
  misc_feature (1)..(123): n is any nucleotide
nnnnnnnnnnnnnnnnnnnnnnnnnnnnnnnnnnnnnnnnnnnnnnnnnnnnnnnnnnnnnnnnnnnnnnnnnnnnnnnnnnnnnnnnnnnnnnnnnnnnnnnnnnnnnnnnnnnnnnnnnnnatgcacccatctctaaacaaaagatttttggattggaaatctcttctaccattacacatatttctggtctgctgaatatagcactccctggacataccttctgtctcatagctgatgggaaatgaagaggtattgaaagttactgccctttggacaggtgtctaatcgcagcccccmacactgcagtgataactccccaaaagttgcacaaaacaatgtgagttgaagaaagaaaccaccacatttcccccagtggtgattttttccctctgcatctttccagacagagtgctgttgccactgggaatactgcattatatcttccactctgtgtatgttcagtgactgaactgtaagaaccaatctccaatccatcaagtgtcttagaaatttcctgtagtttccattgattttttggggagagagtgaaacacagaactcccttttgctttcccttttacacagagaagatttta

SEQ ID NO: 81344 - DNA, 600 bp, Chicken  19866894374735_1
ttacctcttgtgctcctagggtatgtcagcagcaccagtgctaataacagtgtgtgtgtgtggcacagaggagctaagctgtgttggctaggaggattgacaaggccagttaagccaggtgctgccttcatctgtatagacttgcaggcagccaggcttaaataaaagcctctccttttctgttttcttaccaagacaatttattctctgtgaacaaaagcattcgaccccaaacatctctctttaggcctttttgtgttaaaaaaaaatacagagaaaagcttaaaaaatgaaggtttrgactctccagctgccaagcatctggccttgtcctggggaggctgggtattctgaagagtggtactggcacagttctctgttctgtgccaggcccctctatgcaaaccagaaagggattataaattaattaaattaaaaaaatatatatcagccaagactttgcagctggtagacatagctcatgtttttgtttctttgtagctccaatggggtgactgtgcaagatctgccctaaagctctctattttagcaacatggtatttgcagaaaatgtgagctctaaacagtgtttttgtccta

SEQ ID NO: 81345 - DNA, 600 bp, Chicken  19866894374738_1
ctttggagatctgaatcatgtaaagacatgtatgtgtatgaagcccagttcctttcagtacctcaatgacacgattggagctctgtgtttacttctaccacagtgctgacctttctaagcagagaaatcagtcaataagaaaacaaaatcgtcctttttgtagatgtagcttccaaaagcaagtatttgaatatgtctgcttagcatgcagctcttctttcaagcactgaaatattactcaagcagagcatgtactcattttaaactggacctgcctagcacaggcgtctgagagagcaygtgatttaaagcaattgctaggagaatgctctgaaatatttagtgaaattggraactataaatttgattcaatacctcatcactgcgttcttccccgcagsatgatcagtgagtgttttaactacagtgcaactgagcgagaatttttttccccgcttatgtgaattccatcagagcaagagacttgctcaaagaagcaggagacagatttgtccagctcttactgggtcagatttccactagaatcagtggtgggtttaagtaagaagtagaagattgagctgatgcattcacctacaa

SEQ ID NO: 81346 - DNA, 600 bp, Chicken  19866894374738_2
ttcagtacctcaatgacacgattggagctctgtgtttacttctaccacagtgctgacctttctaagcagagaaatcagtcaataagaaaacaaaatcgtcctttttgtagatgtagcttccaaaagcaagtatttgaatatgtctgcttagcatgcagctcttctttcaagcactgaaatattactcaagcagagcatgtactcattttaaactggacctgcctagcacaggcgtctgagagagcaygtgatttaaagcaattgctaggagaatgctctgaaatatttagtgaaattggraactataaatttgattcaatacctcatcactgcgttcttccccgcagsatgatcagtgagtgttttaactacagtgcaactgagcgagaatttttttccccgcttatgtgaattccatcagagcaagagacttgctcaaagaagcaggagacagatttgtccagctcttactgggtcagatttccactagaatcagtggtgggtttaagtaagaagtagaagattgagctgatgcattcacctacaaattatgcatagctcatcatctgcctgtctgccaaaacaagaaagctaagaaag

SEQ ID NO: 81347 - DNA, 600 bp, Chicken  19866894374738_3
agtgctgacctttctaagcagagaaatcagtcaataagaaaacaaaatcgtcctttttgtagatgtagcttccaaaagcaagtatttgaatatgtctgcttagcatgcagctcttctttcaagcactgaaatattactcaagcagagcatgtactcattttaaactggacctgcctagcacaggcgtctgagagagcaygtgatttaaagcaattgctaggagaatgctctgaaatatttagtgaaattggraactataaatttgattcaatacctcatcactgcgttcttccccgcagsatgatcagtgagtgttttaactacagtgcaactgagcgagaatttttttccccgcttatgtgaattccatcagagcaagagacttgctcaaagaagcaggagacagatttgtccagctcttactgggtcagatttccactagaatcagtggtgggtttaagtaagaagtagaagattgagctgatgcattcacctacaaattatgcatagctcatcatctgcctgtctgccaaaacaagaaagctaagaaagaccatcacagagctgcaggaaaacctgcttgaatcttgagccctctgc

SEQ ID NO: 81348 - DNA, 600 bp, Chicken  19866894374740_1
cctttctttgtgtttacacagcagaccatgaaatgtggagatgtcctccttcttctctagtttctaaagctagcttatttaacccctatatgttcaaaccctaggccctcctgagctcccgatctcaccctcctggccatgttctttttaatgcaccccaagatgccactggccgccttggccatgagtgcatgctgctggctcatggcctacctgttgtccaccaggacccccaaggttcctctctgcagagctcatctccagcaggtcatgtcccaccctctactgatacttatggtwattcattcccacatgcaagactctacatctggttttgttaaacctcatcaggtttcctactgtccagctctttccagctggtgcctttgacgtctctcactgtccttcccttgtagcagccaggtcagcagagaaggaagaaagagatgcaagcccagagtgagtaagaagtgctttttattgcccctcaataaaatgccttttcaaactccgtgtatgacttggcccgaggccaggtgccctcagctgcctctgtgggactycgcaggccgccattttgttttggcaccgtgccgccat

SEQ ID NO: 81349 - DNA, 600 bp, Chicken  19866894374740_2
gcaggtcatgtcccaccctctactgatacttatggtwattcattcccacatgcaagactctacatctggttttgttaaacctcatcaggtttcctactgtccagctctttccagctggtgcctttgacgtctctcactgtccttcccttgtagcagccaggtcagcagagaaggaagaaagagatgcaagcccagagtgagtaagaagtgctttttattgcccctcaataaaatgccttttcaaactccgtgtatgacttggcccgaggccaggtgccctcagctgcctctgtgggactycgcaggccgccattttgttttggcaccgtgccgccattttgtgcccccacatgtgaaatgccacatagctccacsattggctgctggccgtgcctggacatggtgttagcaggcagccctgggtctggctgccagtggccggacccactgtactgcacgggtacatccccgtgcatttgtttgyaatacaaatgtaggcaatacatatgtatygtatgttataccaatacgtaggacagtacaggtaaatttctacttgtataggaccatataaatgtcgcctgccgtgttgctatttta

SEQ ID NO: 81350 - DNA, 600 bp, Chicken  19866894374740_3
taaacctcatcaggtttcctactgtccagctctttccagctggtgcctttgacgtctctcactgtccttcccttgtagcagccaggtcagcagagaaggaagaaagagatgcaagcccagagtgagtaagaagtgctttttattgcccctcaataaaatgccttttcaaactccgtgtatgacttggcccgaggccaggtgccctcagctgcctctgtgggactycgcaggccgccattttgttttggcaccgtgccgccattttgtgcccccacatgtgaaatgccacatagctccacsattggctgctggccgtgcctggacatggtgttagcaggcagccctgggtctggctgccagtggccggacccactgtactgcacgggtacatccccgtgcatttgtttgyaatacaaatgtaggcaatacatatgtatygtatgttataccaatacgtaggacagtacaggtaaatttctacttgtataggaccatataaatgtcgcctgccgtgttgctattttacattaatacgtaggtatgaaacccttttataaaggtacataattgtttacgccccccacaaacaccacgcccagc

SEQ ID NO: 81351 - DNA, 541 bp, Chicken  19866894374740_4
tgcaagcccagagtgagtaagaagtgctttttattgcccctcaataaaatgccttttcaaactccgtgtatgacttggcccgaggccaggtgccctcagctgcctctgtgggactycgcaggccgccattttgttttggcaccgtgccgccattttgtgcccccacatgtgaaatgccacatagctccacsattggctgctggccgtgcctggacatggtgttagcaggcagccctgggtctggctgccagtggccggacccactgtactgcacgggtacatccccgtgcatttgtttgyaatacaaatgtaggcaatacatatgtatygtatgttataccaatacgtaggacagtacaggtaaatttctacttgtataggaccatataaatgtcgcctgccgtgttgctattttacattaatacgtaggtatgaaacccttttataaaggtacataattgtttacgccccccacaaacaccacgcccagcttcgcgtcgcaccgcgcagcacctgagcaacgccgctctcggggggcggg

SEQ ID NO: 81352 - DNA, 512 bp, Chicken  19866894374740_5
tttattgcccctcaataaaatgccttttcaaactccgtgtatgacttggcccgaggccaggtgccctcagctgcctctgtgggactycgcaggccgccattttgttttggcaccgtgccgccattttgtgcccccacatgtgaaatgccacatagctccacsattggctgctggccgtgcctggacatggtgttagcaggcagccctgggtctggctgccagtggccggacccactgtactgcacgggtacatccccgtgcatttgtttgyaatacaaatgtaggcaatacatatgtatygtatgttataccaatacgtaggacagtacaggtaaatttctacttgtataggaccatataaatgtcgcctgccgtgttgctattttacattaatacgtaggtatgaaacccttttataaaggtacataattgtttacgccccccacaaacaccacgcccagcttcgcgtcgcaccgcgcagcacctgagcaacgccgctctcggggggcggg

SEQ ID NO: 81353 - DNA, 600 bp, Chicken  19866894374741_1
gatggaaagtacagcaatgacagcagagtagtgaagtcctaggctacagcaagtaaaggcttgctcaaacacatggacatagaaacaaaggaaagtatctgcttatctttagaagacttcaggcacacaaagatctctaccaagttacctttacctccactgccagcccttaaatgaggtctgggaagtggtagatcctggttccaccccttctggtcactcaggtgcattgcttgcacctgtgctcccctgggttggccctgccttcccaccaggtgttcaatcaccggttcaagttgygacttagcatttctgctacattctttaatatctactctgtatatttcacccatgaatggtgtccttctatctacacaggatggaaactgaagggagaatattacagccctgaaccttctggtagatggcaaggtggcaaatgaacttccgttctgctaaatgcagcctagcacacatgggaggcaggggaaagttgaactgctcacccatttgacagagttctgaagaaacccagttaactcagactcaaactccraaagtgcagtttgctgacagattgaatggaaaatcatggctctc

SEQ ID NO: 81354 - DNA, 509 bp, Chicken  19866894374741_2
ggccctgccttcccaccaggtgttcaatcaccggttcaagttgygacttagcatttctgctacattctttaatatctactctgtatatttcacccatgaatggtgtccttctatctacacaggatggaaactgaagggagaatattacagccctgaaccttctggtagatggcaaggtggcaaatgaacttccgttctgctaaatgcagcctagcacacatgggaggcaggggaaagttgaactgctcacccatttgacagagttctgaagaaacccagttaactcagactcaaactccraaagtgcagtttgctgacagattgaatggaaaatcatggctctccatctgaaaacaaagaaaggctatttaaacaaacaaacaaaaaggacaaaaattgcaatagggaaaggaatggacaacagtaaagaagcattacataaagctgcttgcaacgtggggttgcagactgaaatactatttccccacactgataggtaaacaattgca

SEQ ID NO: 81355 - DNA, 600 bp, Chicken  19866894374743_1
gcatttatatatatactgataatggaactggtgcaaataatgcagattacattttctgtaagaatgctgtattatgtctctatctgtgggattattttgtgtttgttctcaaaagtacataacgatgttaagcacgactttctggtcttatttttatctaattatctaccctatactgcatttttaaggtagtcatgaatatgagactggtgtgctgaataactgctgcattgtgtgatgcagacaataccaggcagaagaaatagaggggataggcagtgtgacttaagctctgggcartatggtgaatagccattactttgtagcttttgttgggcaatattcattgcaaattgttggatggaaatttcatacttctggctcaggcagcaaggagagggttcgttcccatctgcacccgtatcatagaatcatagaatatgtgtaactgcatcttcagcagttactgactgacctaatgacctttgtctagcaaattcaggcaaaaactgaagaactaaatgctgctttgtggtgaagcatatagtaagttatgttttaaaaagacctctttccctctgaccctgactgattctgcaa

SEQ ID NO: 81356 - DNA, 600 bp, Chicken  19866894374751_1
tatattgtgatacaatcttcctaaggtagcaatacagttgaatcatcactgattgtattcactgcttatgtattttctaaaggaagcagtaatgtgttatggagcagatgactgacaatctttttcacttctggtgaccatcattgtgataattttagatggacacaaaaggcatacctacatttgtaggatactctctaaacatgtctcttgtaacttagtgctgactgttagcttccataacagtactaagaatgagcagagatgagctggagcttttaggtaagcttattatttcaygaaggcttttgttctttatcaracaattgtacctacccttttcctgtgctcttcgtactttgctttgtcccattttagctgaagatatttactgctacaaggtaaaacggactggtaggcttgatgcatcttacacaaagtgaaacatctccgagtctgggctttggggaaaaaaaaaaaagaaaagaaaagcatgagtaatatcagcctgagccttcctaaagcaaagccctggagacttgtggtatgtttgtagccagtcacatgatggttgtcatggtattctgctaagaaaaagaa

SEQ ID NO: 81357 - DNA, 600 bp, Chicken  19866894374751_2
aaggtagcaatacagttgaatcatcactgattgtattcactgcttatgtattttctaaaggaagcagtaatgtgttatggagcagatgactgacaatctttttcacttctggtgaccatcattgtgataattttagatggacacaaaaggcatacctacatttgtaggatactctctaaacatgtctcttgtaacttagtgctgactgttagcttccataacagtactaagaatgagcagagatgagctggagcttttaggtaagcttattatttcaygaaggcttttgttctttatcaracaattgtacctacccttttcctgtgctcttcgtactttgctttgtcccattttagctgaagatatttactgctacaaggtaaaacggactggtaggcttgatgcatcttacacaaagtgaaacatctccgagtctgggctttggggaaaaaaaaaaaagaaaagaaaagcatgagtaatatcagcctgagccttcctaaagcaaagccctggagacttgtggtatgtttgtagccagtcacatgatggttgtcatggtattctgctaagaaaaagaatgaatagctggtggtagcattt

SEQ ID NO: 81358 - DNA, 600 bp, Chicken  19866894374760_1
aacactgtggactaggggtctcccttgttcctctggtcctcactgatccgtgggcaaacaatgcttttaagacactgtttacagactctctctttcatccacaaaagttttgtggttttccatttcatgttttacatcaattctgtttgggtttatcccatttgttgtcctcagaaagctcccccaggacgctgctccccagcaatgtcactaacaaaccagagacattcagtactttctgctcaattaaggacagaaaaacaaccctcatccatgcagtatctagtctgcctctaagaygggcaccragcacttcataaggatgttcaggaaggactgcaacaggcacgaacagaatgatgtctccataaaatatttttctccgagtctttattatccagtgatgcatgaagcccagatttattccatttggacttattccatttcttttataggaagaaagcttcagcaaactatgggtgttctcttttatataaacatgcttttttgaacttctgctatcacgagatgatagggacatccaccacacactgtgctcactgctggctcttctcctccttatctcaaactctctttggg

SEQ ID NO: 81359 - DNA, 600 bp, Chicken  19866894374760_2
ggactaggggtctcccttgttcctctggtcctcactgatccgtgggcaaacaatgcttttaagacactgtttacagactctctctttcatccacaaaagttttgtggttttccatttcatgttttacatcaattctgtttgggtttatcccatttgttgtcctcagaaagctcccccaggacgctgctccccagcaatgtcactaacaaaccagagacattcagtactttctgctcaattaaggacagaaaaacaaccctcatccatgcagtatctagtctgcctctaagaygggcaccragcacttcataaggatgttcaggaaggactgcaacaggcacgaacagaatgatgtctccataaaatatttttctccgagtctttattatccagtgatgcatgaagcccagatttattccatttggacttattccatttcttttataggaagaaagcttcagcaaactatgggtgttctcttttatataaacatgcttttttgaacttctgctatcacgagatgatagggacatccaccacacactgtgctcactgctggctcttctcctccttatctcaaactctctttgggacctatgt

SEQ ID NO: 81360 - DNA, 600 bp, Chicken  19866894374762_1
gagacacacaattgtccaacagccccatctatccattaatactgggaaaatctgctccaaagccattaataagttgtgttgttgatgttgtttttttaagaacattttttacatatttgtttgttttaagataacaatctgatacacaaggaaaaaagtcatctgctctccacgaccactgtgtgcagaagacaaggaaaaaaaacaaacttaaatgacagctaggagatctctgtattagataaaaggagaaatattttaacagcaaggagagtgaaatattgaaacagactgtacacwgtagctgtagcacagataaagaatttaaagaaaaaatgctggaattgatcacttacatttaaatcttatttggaatacacagattctggatggcttcctgtgctcctttcagaccttcttttctgattctatgaacatacactttcaaacagataacagaaatatcacagctctccacgagactaagcaaagagatttcactttcaatacagaaggaaaagtgtctgatgaacagaagagagttaccaaggcagaaagatttttccattatgggtcaggaaactggatagcagtcattct

SEQ ID NO: 81361 - DNA, 599 bp, Chicken  19866894374765_1
  misc_feature (1)..(104): n is any nucleotide
nnnnnnnnnnnnnnnnnnnnnnnnnnnnnnnnnnnnnnnnnnnnnnnnnnnnnnnnnnnnnnnnnnnnnnnnnnnnnnnnnnnnnnnnnnnnnnnnnnnnnnnnagtatgctagacaagtcattacttttcctatcaaactcaaaggagaaatagtctcttacatcaaatatatatacatatgtattattttgacaatacatatctgtatatcttagaatatacctagcatttgcttacatattctacacttctaaaattagttttggtcaaaagttaagcacttcctgttcattctctwaatcagcaggaaagtgtgatggcagtgtagccctcagttcatccacaggactacaaggacaaaagctcccagatgttaaacttkaacattttctctcttcyataaagaataaggtagcttgaaaatggatgcattttcagaatgaagattcccatgttctcttcctttttttccctggaaaaacaactgcattcaacagatggaataacyctgcaaggagaacaaactttggctgaatgctttttataatggacataaattgaatcaagacttgggaaattatttmtttcctttctttc

SEQ ID NO: 81362 - DNA, 599 bp, Chicken  19866894374765_2
  misc_feature (1)..(20): n is any nucleotide
nnnnnnnnnnnnnnnnnnnnagtatgctagacaagtcattacttttcctatcaaactcaaaggagaaatagtctcttacatcaaatatatatacatatgtattattttgacaatacatatctgtatatcttagaatatacctagcatttgcttacatattctacacttctaaaattagttttggtcaaaagttaagcacttcctgttcattctctwaatcagcaggaaagtgtgatggcagtgtagccctcagttcatccacaggactacaaggacaaaagctcccagatgttaaacttkaacattttctctcttcyataaagaataaggtagcttgaaaatggatgcattttcagaatgaagattcccatgttctcttcctttttttccctggaaaaacaactgcattcaacagatggaataacyctgcaaggagaacaaactttggctgaatgctttttataatggacataaattgaatcaagacttgggaaattatttmtttcctttctttctttctttttttgcctggatctcatttcttcctgttgattcatgagttatattcactttatacatctttgtacaaactattattt

SEQ ID NO: 81363 - DNA, 599 bp, Chicken  19866894374765_3
  misc_feature (1)..(3): n is any nucleotide
nnnagtatgctagacaagtcattacttttcctatcaaactcaaaggagaaatagtctcttacatcaaatatatatacatatgtattattttgacaatacatatctgtatatcttagaatatacctagcatttgcttacatattctacacttctaaaattagttttggtcaaaagttaagcacttcctgttcattctctwaatcagcaggaaagtgtgatggcagtgtagccctcagttcatccacaggactacaaggacaaaagctcccagatgttaaacttkaacattttctctcttcyataaagaataaggtagcttgaaaatggatgcattttcagaatgaagattcccatgttctcttcctttttttccctggaaaaacaactgcattcaacagatggaataacyctgcaaggagaacaaactttggctgaatgctttttataatggacataaattgaatcaagacttgggaaattatttmtttcctttctttctttctttttttgcctggatctcatttcttcctgttgattcatgagttatattcactttatacatctttgtacaaactattatttactaagtcaatgatatt

SEQ ID NO: 81364 - DNA, 600 bp, Chicken  19866894374765_4
atcttagaatatacctagcatttgcttacatattctacacttctaaaattagttttggtcaaaagttaagcacttcctgttcattctctwaatcagcaggaaagtgtgatggcagtgtagccctcagttcatccacaggactacaaggacaaaagctcccagatgttaaacttkaacattttctctcttcyataaagaataaggtagcttgaaaatggatgcattttcagaatgaagattcccatgttctcttcctttttttccctggaaaaacaactgcattcaacagatggaataacyctgcaaggagaacaaactttggctgaatgctttttataatggacataaattgaatcaagacttgggaaattatttmtttcctttctttctttctttttttgcctggatctcatttcttcctgttgattcatgagttatattcactttatacatctttgtacaaactattatttactaagtcaatgatatttacagtattattctactctgccacttacttrtacttattatgactaacttgtattyagtgtctacaaaagtacctgcacaatatctgtctctatcttgcactcaasaaat

SEQ ID NO: 81365 - DNA, 600 bp, Chicken  19866894374765_5
ctgttcattctctwaatcagcaggaaagtgtgatggcagtgtagccctcagttcatccacaggactacaaggacaaaagctcccagatgttaaacttkaacattttctctcttcyataaagaataaggtagcttgaaaatggatgcattttcagaatgaagattcccatgttctcttcctttttttccctggaaaaacaactgcattcaacagatggaataacyctgcaaggagaacaaactttggctgaatgctttttataatggacataaattgaatcaagacttgggaaattatttmtttcctttctttctttctttttttgcctggatctcatttcttcctgttgattcatgagttatattcactttatacatctttgtacaaactattatttactaagtcaatgatatttacagtattattctactctgccacttacttrtacttattatgactaacttgtattyagtgtctacaaaagtacctgcacaatatctgtctctatcttgcactcaasaaatastgtatcctgaaaattacaacctgttttctagtaatatacttaaaacatgacaggaccctctttttcctataatt

SEQ ID NO: 81366 - DNA, 600 bp, Chicken  19866894374765_6
cattttcagaatgaagattcccatgttctcttcctttttttccctggaaaaacaactgcattcaacagatggaataacyctgcaaggagaacaaactttggctgaatgctttttataatggacataaattgaatcaagacttgggaaattatttmtttcctttctttctttctttttttgcctggatctcatttcttcctgttgattcatgagttatattcactttatacatctttgtacaaactattatttactaagtcaatgatatttacagtattattctactctgccacttacttrtacttattatgactaacttgtattyagtgtctacaaaagtacctgcacaatatctgtctctatcttgcactcaasaaatastgtatcctgaaaattacaacctgttttctagtaatatacttaaaacatgacaggaccctctttttcctataattcatttcagattagttatactgtgctgtaaacccagtggatgcagcctctggggatcctcgtcaactaggcaaaacttctgacacagaaattgctcagagaacaggtcatctcccccatggccactaattttgggaatgctgctca

SEQ ID NO: 81367 - DNA, 600 bp, Chicken  19866894374765_7
ttctcttcctttttttccctggaaaaacaactgcattcaacagatggaataacyctgcaaggagaacaaactttggctgaatgctttttataatggacataaattgaatcaagacttgggaaattatttmtttcctttctttctttctttttttgcctggatctcatttcttcctgttgattcatgagttatattcactttatacatctttgtacaaactattatttactaagtcaatgatatttacagtattattctactctgccacttacttrtacttattatgactaacttgtattyagtgtctacaaaagtacctgcacaatatctgtctctatcttgcactcaasaaatastgtatcctgaaaattacaacctgttttctagtaatatacttaaaacatgacaggaccctctttttcctataattcatttcagattagttatactgtgctgtaaacccagtggatgcagcctctggggatcctcgtcaactaggcaaaacttctgacacagaaattgctcagagaacaggtcatctcccccatggccactaattttgggaatgctgctcaataatcaagttatctctactccctg

SEQ ID NO: 81368 - DNA, 600 bp, Chicken  19866894374765_8
aacyctgcaaggagaacaaactttggctgaatgctttttataatggacataaattgaatcaagacttgggaaattatttmtttcctttctttctttctttttttgcctggatctcatttcttcctgttgattcatgagttatattcactttatacatctttgtacaaactattatttactaagtcaatgatatttacagtattattctactctgccacttacttrtacttattatgactaacttgtattyagtgtctacaaaagtacctgcacaatatctgtctctatcttgcactcaasaaatastgtatcctgaaaattacaacctgttttctagtaatatacttaaaacatgacaggaccctctttttcctataattcatttcagattagttatactgtgctgtaaacccagtggatgcagcctctggggatcctcgtcaactaggcaaaacttctgacacagaaattgctcagagaacaggtcatctcccccatggccactaattttgggaatgctgctcaataatcaagttatctctactccctggattcagtgctctccaagccatctgcctttacacctgaggctgccctgca

SEQ ID NO: 81369 - DNA, 600 bp, Chicken  19866894374765_9
gcaaggagaacaaactttggctgaatgctttttataatggacataaattgaatcaagacttgggaaattatttmtttcctttctttctttctttttttgcctggatctcatttcttcctgttgattcatgagttatattcactttatacatctttgtacaaactattatttactaagtcaatgatatttacagtattattctactctgccacttacttrtacttattatgactaacttgtattyagtgtctacaaaagtacctgcacaatatctgtctctatcttgcactcaasaaatastgtatcctgaaaattacaacctgttttctagtaatatacttaaaacatgacaggaccctctttttcctataattcatttcagattagttatactgtgctgtaaacccagtggatgcagcctctggggatcctcgtcaactaggcaaaacttctgacacagaaattgctcagagaacaggtcatctcccccatggccactaattttgggaatgctgctcaataatcaagttatctctactccctggattcagtgctctccaagccatctgcctttacacctgaggctgccctgcataaagc

SEQ ID NO: 81370 - DNA, 600 bp, Chicken  19866894374766_1
acaaatggtgcctttttacttgaaaaacaagctttcattttacataatactacagaactggcagtttcccttgccgacaattctcactgtgaagaaatacacaagccagatatctgctagctgaaagttaccaatgtgaaaaaaaaatcccccttctctccttccatcaaatttgccccatttaattcaaagaaaaagcaatttgagggctagaagtagggaaaagagctttacatacaagtgacgaaagaaacaatctatgctgtttcctgaagaaaacttccaaatatcctccagctygttgagattacattcagtgaaagcaatgtgaaaacgactctttgctttgcttgtgcactgatgagcaaggaaggtttttggagcaaactgccacagccagactgaattcagggtgaaaccasagcataacggtgcggctggagcygggcggctcctctgggctgggggcacacagcagctgaagctgtccctgctcttactctgggcctggtagygagaggatccagatccaccactggatgaccacttgatccagcttcctgtgccttcacagggcgctggcctaactgactttgtaaa

SEQ ID NO: 81371 - DNA, 600 bp, Chicken  19866894374766_2
gaaagttaccaatgtgaaaaaaaaatcccccttctctccttccatcaaatttgccccatttaattcaaagaaaaagcaatttgagggctagaagtagggaaaagagctttacatacaagtgacgaaagaaacaatctatgctgtttcctgaagaaaacttccaaatatcctccagctygttgagattacattcagtgaaagcaatgtgaaaacgactctttgctttgcttgtgcactgatgagcaaggaaggtttttggagcaaactgccacagccagactgaattcagggtgaaaccasagcataacggtgcggctggagcygggcggctcctctgggctgggggcacacagcagctgaagctgtccctgctcttactctgggcctggtagygagaggatccagatccaccactggatgaccacttgatccagcttcctgtgccttcacagggcgctggcctaactgactttgtaaaaacagagaagggcagcggagctgcttgcatccacctgctctgcaacacacctcaagtgtccaactgcagcaagctgtgctacaaatgctgccagcaacactgattttttccacttctcgtac

SEQ ID NO: 81372 - DNA, 600 bp, Chicken  19866894374766_3
aatcccccttctctccttccatcaaatttgccccatttaattcaaagaaaaagcaatttgagggctagaagtagggaaaagagctttacatacaagtgacgaaagaaacaatctatgctgtttcctgaagaaaacttccaaatatcctccagctygttgagattacattcagtgaaagcaatgtgaaaacgactctttgctttgcttgtgcactgatgagcaaggaaggtttttggagcaaactgccacagccagactgaattcagggtgaaaccasagcataacggtgcggctggagcygggcggctcctctgggctgggggcacacagcagctgaagctgtccctgctcttactctgggcctggtagygagaggatccagatccaccactggatgaccacttgatccagcttcctgtgccttcacagggcgctggcctaactgactttgtaaaaacagagaagggcagcggagctgcttgcatccacctgctctgcaacacacctcaagtgtccaactgcagcaagctgtgctacaaatgctgccagcaacactgattttttccacttctcgtacctcttcctaccaccacgagggat

SEQ ID NO: 81373 - DNA, 600 bp, Chicken  19866894374766_4
gtagggaaaagagctttacatacaagtgacgaaagaaacaatctatgctgtttcctgaagaaaacttccaaatatcctccagctygttgagattacattcagtgaaagcaatgtgaaaacgactctttgctttgcttgtgcactgatgagcaaggaaggtttttggagcaaactgccacagccagactgaattcagggtgaaaccasagcataacggtgcggctggagcygggcggctcctctgggctgggggcacacagcagctgaagctgtccctgctcttactctgggcctggtagygagaggatccagatccaccactggatgaccacttgatccagcttcctgtgccttcacagggcgctggcctaactgactttgtaaaaacagagaagggcagcggagctgcttgcatccacctgctctgcaacacacctcaagtgtccaactgcagcaagctgtgctacaaatgctgccagcaacactgattttttccacttctcgtacctcttcctaccaccacgagggatcaatcaacaaactctgagacacaagagtcagtaacattttcagcgttagaagtacaaagcaagttgttac

SEQ ID NO: 81374 - DNA, 600 bp, Chicken  19866894374769_1
gtcttgtggcagatacatttttgcaatcaatatctagcactggcagaaactgtgtgtactgaaaacgcagaaagatttcctgtgccatctacctttagtcaaaggaataagacatatccttgctttcacagtatttcatctgttcagttctaactgttctggacttctgtttttgtggaagtgttggctttgcattgcaggaatacaaaaagacaccagaggatgtgacagagcagacttgtacctgcccagagatggcagtgggggcttccccaggctggtgtgcaccagccaagcaasgatgtctgagcattcctggactgtgcagattgcatcctaagtgccagctgaggcagaatttttccacgcacagaacgcaggggttgcacctctgctgcaaacagcagggccaatggrctctccataatgacccttagcagggaccagcattgatgcctagccaaagatttgcaaaagaaccaggatgatgccctgccccaaagactttctactcctacctctcattttctaagtgtcctacatgtgtctattgcagttgttacaatgcccatgtgtagaaagtgtttagacagaatactg

SEQ ID NO: 81375 - DNA, 600 bp, Chicken  19866894374769_2
ccttgctttcacagtatttcatctgttcagttctaactgttctggacttctgtttttgtggaagtgttggctttgcattgcaggaatacaaaaagacaccagaggatgtgacagagcagacttgtacctgcccagagatggcagtgggggcttccccaggctggtgtgcaccagccaagcaasgatgtctgagcattcctggactgtgcagattgcatcctaagtgccagctgaggcagaatttttccacgcacagaacgcaggggttgcacctctgctgcaaacagcagggccaatggrctctccataatgacccttagcagggaccagcattgatgcctagccaaagatttgcaaaagaaccaggatgatgccctgccccaaagactttctactcctacctctcattttctaagtgtcctacatgtgtctattgcagttgttacaatgcccatgtgtagaaagtgtttagacagaatactgtttcaggagaagaatagctaagcaatgtttctgtatctggcttttgcttaccatcttgtgggagaggtcctatgaatatgccttgagtgtgaaatgacttcggtggtttgagtcaca

SEQ ID NO: 81376 - DNA, 599 bp, Chicken  19866894374771_1
  misc_feature (1)..(109): n is any nucleotide
nnnnnnnnnnnnnnnnnnnnnnnnnnnnnnnnnnnnnnnnnnnnnnnnnnnnnnnnnnnnnnnnnnnnnnnnnnnnnnnnnnnnnnnnnnnnnnnnnnnnnnnnnnnnnttcaggaaaagcctttttatttttgctgtttttgagataagaatcctttttaagacaaaattctcattgggaattgaggctgcataagcagcaccacttatgtgtgcacttaatcagtaagtttgggtttgtttcttttctttctttcgtggttaagataatcagtaagaaagtgattaaacccaagtgayttcagtcaaagcatgcttgtagaatcataggatcacagaaggatagaaagggaatggggaaggggatttaggaagggaaaaggaagagttatcatagcttttaattaatttttgacagcataaatgaaaaaaaaagaaaaaaaaasctgttagttcttgctatcttttgcctagctttgagagggcaagaagtaatagaatttgtctgtattaatcttcarttaattttcatcctgtttccctcctaatttcagtgtgtacctctgtctcttcgttaatcaggagtttaatggcatgta

SEQ ID NO: 81377 - DNA, 600 bp, Chicken  19866894374771_2
taagaatcctttttaagacaaaattctcattgggaattgaggctgcataagcagcaccacttatgtgtgcacttaatcagtaagtttgggtttgtttcttttctttctttcgtggttaagataatcagtaagaaagtgattaaacccaagtgayttcagtcaaagcatgcttgtagaatcataggatcacagaaggatagaaagggaatggggaaggggatttaggaagggaaaaggaagagttatcatagcttttaattaatttttgacagcataaatgaaaaaaaaagaaaaaaaaasctgttagttcttgctatcttttgcctagctttgagagggcaagaagtaatagaatttgtctgtattaatcttcarttaattttcatcctgtttccctcctaatttcagtgtgtacctctgtctcttcgttaatcaggagtttaatggcatgtaaatatctgagcacctgatggagttgtatgtgtccctgttcactgcaggagagttggactggatggcctttaagggtcccttccaactcaaacaattgtatgattctatatcatgccattccaatgtatacagacatcatggggataa

SEQ ID NO: 81378 - DNA, 600 bp, Chicken  19866894374771_3
atcagtaagtttgggtttgtttcttttctttctttcgtggttaagataatcagtaagaaagtgattaaacccaagtgayttcagtcaaagcatgcttgtagaatcataggatcacagaaggatagaaagggaatggggaaggggatttaggaagggaaaaggaagagttatcatagcttttaattaatttttgacagcataaatgaaaaaaaaagaaaaaaaaasctgttagttcttgctatcttttgcctagctttgagagggcaagaagtaatagaatttgtctgtattaatcttcarttaattttcatcctgtttccctcctaatttcagtgtgtacctctgtctcttcgttaatcaggagtttaatggcatgtaaatatctgagcacctgatggagttgtatgtgtccctgttcactgcaggagagttggactggatggcctttaagggtcccttccaactcaaacaattgtatgattctatatcatgccattccaatgtatacagacatcatggggataaagtccaggcatatcctcaaggggcaggcattgagagcaggctctgtttttaattagagtaatggagctcattacc

SEQ ID NO: 81379 - DNA, 600 bp, Chicken  19866894374772_1
tgattctccagatgcagagccaaaggcacacgctggctgttcctgtgagctgagaactgaaatgcaattccctctctgcctcaagaaaaaaatgttggaagaagctttgtttctgactttccaaaacatatttgaaacataagtcagtggcaggctttgttttggaaatggtcttgttccagcaacggttctgccaaggctgtttatcccaattcctacatagcttcacaggctgagaaagtaaaactggtgtgtgggtggctgcttgaaaatggtccttatggatattgctgcaatttkttgagcaaatagcagtagcttgtacatgagcctgtaattcacatagcttgtactagagcatagtgcgacggcacgtggagagatggggtggtggaaaaagcagaggcaggaggyttgggaactctgtgccccgttatgtgacgtgattcagatgtgctggaagtcagttttcttaactggttattggagaactcaaaacttccgacatcacagagaaaagagggctgtgctgtccgcgccggggcaggtgatggatgtgaacaccaacagtgttctttccaaatagttgcagcgttaatt

SEQ ID NO: 81380 - DNA, 600 bp, Chicken  19866894374772_2
gactttccaaaacatatttgaaacataagtcagtggcaggctttgttttggaaatggtcttgttccagcaacggttctgccaaggctgtttatcccaattcctacatagcttcacaggctgagaaagtaaaactggtgtgtgggtggctgcttgaaaatggtccttatggatattgctgcaatttkttgagcaaatagcagtagcttgtacatgagcctgtaattcacatagcttgtactagagcatagtgcgacggcacgtggagagatggggtggtggaaaaagcagaggcaggaggyttgggaactctgtgccccgttatgtgacgtgattcagatgtgctggaagtcagttttcttaactggttattggagaactcaaaacttccgacatcacagagaaaagagggctgtgctgtccgcgccggggcaggtgatggatgtgaacaccaacagtgttctttccaaatagttgcagcgttaattatggcctgagtctgagaaatctttggctggtgtgtaggaggtggaaggataggggtgggaggggagaaggtgaaaccatcaaaattccagaaaattcactgttttgggatagga

SEQ ID NO: 81381 - DNA, 600 bp, Chicken  19866894374777_1
atttttttccagctgtagcagaactttgcatgctatgctcctaccagatgcgtcctgctatgaatggagtagatttgagctcatggcacacagctttatttaccttcatgtggtatggtcagtacattgttgtcatttatttggatgtgaagaggacaactaaaggagctggccctttcaaagaccctctttgagctcacagaaggacctgtgggctatgctagaattttgggtgaatggaaataaaaatatttgtaatagcctcagatctcttgacttttccaaaaggcagacaacccmccaattatgtatgcagacaaaatcaaacaattgtaatttggatttaggtttgggaaggaacgggatgttaatgagataatgtctaggtgtgatactgtctcacttcytggcgtaagaatgcataataaaatcttctacactgtgcatttataaggataaactccaatgatacctttttcagtatttcatatctatttataactatacatttattagaataaggttatttataatttcaatgttcctctgtgtacataaagtccaatttcaggcttataaataaatatatagcttaaagga

SEQ ID NO: 81382 - DNA, 600 bp, Chicken  19866894374777_2
atgtggtatggtcagtacattgttgtcatttatttggatgtgaagaggacaactaaaggagctggccctttcaaagaccctctttgagctcacagaaggacctgtgggctatgctagaattttgggtgaatggaaataaaaatatttgtaatagcctcagatctcttgacttttccaaaaggcagacaacccmccaattatgtatgcagacaaaatcaaacaattgtaatttggatttaggtttgggaaggaacgggatgttaatgagataatgtctaggtgtgatactgtctcacttcytggcgtaagaatgcataataaaatcttctacactgtgcatttataaggataaactccaatgatacctttttcagtatttcatatctatttataactatacatttattagaataaggttatttataatttcaatgttcctctgtgtacataaagtccaatttcaggcttataaataaatatatagcttaaaggacaattcaaaacaggaaacagtgaagcacagggaggttaactcatcaagggcaatgctgttccactggaaactttatctactgtctgaaaaatgcttttgggtttggt

SEQ ID NO: 81383 - DNA, 599 bp, Chicken  19866894374784_1
  misc_feature (1)..(159): n is any nucleotide
nnnnnnnnnnnnnnnnnnnnnnnnnnnnnnnnnnnnnnnnnnnnnnnnnnnnnnnnnnnnnnnnnnnnnnnnnnnnnnnnnnnnnnnnnnnnnnnnnnnnnnnnnnnnnnnnnnnnnnnnnnnnnnnnnnnnnnnnnnnnnnnnnnnnnnnnnnnnnnnccttgtttacctgttttttcttccaccacctgagcattttcttcttgctctcctgtttcaccaacaggtctcagttcagtcatgctggtctcttgccttcctttcctgacatctgagaataaagagctcttgtgcccaaamgaaagcttccttaaagatctaccagctctgtcctattctcttatcctttaggacaaactcccaggtggttttgttgactaacttcctgaagagcaggaagctggctttcctaaaattaagcttcctgattttacactttgcttgtacaatatccatcaatagtgtaaatccactgctccataatcaccacaggtcaggcagcctccagtcctgatgtcaccaatcagttccctccattggtgaacagaaggaccagcattgcatctgccttggtggggctgtctattgcctggctcagg

SEQ ID NO: 81384 - DNA, 600 bp, Chicken  19866894374786_1
acatcctcttaccagagtaaaatgttttggctttcagctccagctccagcaatgtgccaggtcttataaagcaagaaggctggttttgtgcctgtgcagcttacactggtgcacatggcagctgtcctctggggtctaactgggagtggtttagagcaaatggaatataagatacatgaaaatggaggtgaatcccaagtcaccttgtagataacaaacttcctgagattaactatttaaaacaaaaagaaccgtacttcatcttcctgaggaatactgaggaattagctttgcaattcytcacattgtaaggataaacagttttgtaataactgaaaacaaataaatacatacagtgccactacataatctgcctgcaagcatgcatgtacatgcacacaagtatgttcctcagttttgtttttgtctaaaatgaatcagacagatgtaaagctggaaagggaaattttgggacaaccatctctttgctcttactgcttctctgaaaagaagtgatagttccttgctttcttccccttgcttctaatatacatacattatggctgtgtcctttcccactgctccattgcacaatgtatc

SEQ ID NO: 81385 - DNA, 600 bp, Chicken  19866894374786_2
tggctgtgtcctttcccactgctccattgcacaatgtatcactagcatgtcattttcccaaacagcatgagagacatgccctttacagttggtgtagataaatctctttcctttatacacaaagttaaaaatgctcttttccatcttcttgtaaagtaaattttctgaaggccaagatcaatgcaaatagaaaatcatttcaaaatcaaagaaaatttttattggactacattccaaagtgagttttcagtaggtgttctgcctcatcatgagaaaatgaactttggttctttccttgcrcatcattaaagtgaagagtacaaaccagataatttttgtctatgtatgcagatagcaaatgaagtatctgaaatacaaatgaaacaaaaataagagtgtttcttgaaggcagctcagcagagtcctacatctgttgaagtttgaaaagaaatatactttgattacataaaacacttaatttctaatcatccctgtaaaatttctctaaagaatacgcacatttaacaccctaaaatgtaattctattctcttgttcagcattttcctagttattctaagatttattatgcaccatttctt

SEQ ID NO: 81386 - DNA, 599 bp, Chicken  19866894374788_1
  misc_feature (1)..(34): n is any nucleotide
nnnnnnnnnnnnnnnnnnnnnnnnnnnnnnnnnnccaggttgtgttgctattttaacaatatttcttgcagttctttgcactaaataaagtctttgcccaggtggacaaggctatcgtctaggctgattgctcttccatgctactctgtatcagttgttgattcattgtaagcattgctaaactccagcaaactggcaggtgttgttaactcagtgtgtctataaggctttcctaagcttcatagaagagataaaaatgaggatgttcctctctggtcattggagaggttttactcttasaaaactttagaaaacaagatgtatcatcaggcgtgacttgcccttggtgatgccatgttggctaccactgatcacctaacatttgatgttatgcttccaaatgtgagcagaatgtaaatgttctgttgacttctaagtatacttatctgattccttccagtggaaggttctaaaaataacattggttctaaaaaaaaaagtaagtaacttttaagcaaatgattgattagtaattgataatattattccatgacacttgaataaattgtatgtattatccgttttaaatgatagtctta

SEQ ID NO: 81387 - DNA, 600 bp, Chicken  19866894374790_1
accccattgtattcaggggttacatccgaacttttcctcttagctccttaatcactgttttgatggatgagctccatgagaaatgccgccgcagccatctctgccactggttctgcatggatcaaaatggctcctctgcttctggctgctcttgctccagctctgggcgaagcaaggaggggatggattcccttctgagcagggacatgggagccctccctgagccgtgcaggcagccgtaagccccgtgaacccacagccattaatgctgcggggcgtgcagttccctccagggctccygcgtctgctgccatttccctggtgcaatcctggggaattatccatatctctgacaagagaataggttactaatgcaccaacacagctgttttgacacttttgatgaataacattcaatactattaattggaacaattgcttttcatttaactaaatcactagaattgctaaactaaattgaaacggaatgtaattttgcctcgctctcctttaatatgggcctctaaatgtcttctccctgaagaattagtaacttaatcacctaacagtgataactgtttcatagccctcagctggaag

SEQ ID NO: 81388 - DNA, 600 bp, Chicken  19866894374793_1
aaggttagcactgcagcactaagatccatggaggggaaaagaagaataatttaattaaatcctggaagaaaagtttgggaaataaaaagccacgatgatagggtaagcctctcagatttagatagcgtgcacagctcagaagtaacagaaagtggtattaaattgcaagggatagcagtttatcccctctcagacaaaaatgcaaaaacaactcgaaaccagaaatgagacagagggcatctctgcgttattctccacagcttcactccttcactgggatctgctacaaatgaatcttcycttggcagagggaagaagccgagacttacagagcagcaccgagacttacagagcaagtcttttgacagtctctgtcagggatgtcctcttctgttagagacataactggaaataatgagagagtgcaaggaggaagaaactcgtgtatgtgcaaagcagtcttcagtaggtttgctcatcctagggatgctgtctaaggcagtgtgagtgatctgagacaggaaagcaagtattgctgccagatgatgtgcaagaagaggttaaaaggaagagtcaagagggacaacagtgctacggtgg

SEQ ID NO: 81389 - DNA, 600 bp, Chicken  19866894374796_1
tttgagtagtgctatgtagagctgagagccggactttatgattcttatgggtcccttccaacttgggatactctatgattctatgattctactcatggatgagttagaccagtggtggtctaacttatgcccttctgcctcaccttgccatctttgcatccacattgcagttgtcactgatccctttctcacctcctttctaagatggcaagccatggtgtgtcacttcccctattttacctgctcgtactagcagaggtgaagaaagctctgtactgacatctgcatccctctataatrcatccgagggcaaaaaataaagggtgctgcaccrctggtgataggtaaggtctggtatggatcaatagcaaccagctttggcatgtctaccatgccaaagcactcaacttgctgctctatagctgccttgcactcaactctctctgctctatactgccatatgcagtgtgtttcaccagcgtactccctaatgctactgtactsagccctccctgatcctgctgggaccccaactgtcacttgaaatgagaaaaactgttctttatttctgtcatgttctacatggatggtttgatgatt

SEQ ID NO: 81390 - DNA, 600 bp, Chicken  19866894374796_2
tttatgattcttatgggtcccttccaacttgggatactctatgattctatgattctactcatggatgagttagaccagtggtggtctaacttatgcccttctgcctcaccttgccatctttgcatccacattgcagttgtcactgatccctttctcacctcctttctaagatggcaagccatggtgtgtcacttcccctattttacctgctcgtactagcagaggtgaagaaagctctgtactgacatctgcatccctctataatrcatccgagggcaaaaaataaagggtgctgcaccrctggtgataggtaaggtctggtatggatcaatagcaaccagctttggcatgtctaccatgccaaagcactcaacttgctgctctatagctgccttgcactcaactctctctgctctatactgccatatgcagtgtgtttcaccagcgtactccctaatgctactgtactsagccctccctgatcctgctgggaccccaactgtcacttgaaatgagaaaaactgttctttatttctgtcatgttctacatggatggtttgatgattcctcctagcaaacatttcaccagtagacaaaaag

SEQ ID NO: 81391 - DNA, 600 bp, Chicken  19866894374796_3
atggcaagccatggtgtgtcacttcccctattttacctgctcgtactagcagaggtgaagaaagctctgtactgacatctgcatccctctataatrcatccgagggcaaaaaataaagggtgctgcaccrctggtgataggtaaggtctggtatggatcaatagcaaccagctttggcatgtctaccatgccaaagcactcaacttgctgctctatagctgccttgcactcaactctctctgctctatactgccatatgcagtgtgtttcaccagcgtactccctaatgctactgtactsagccctccctgatcctgctgggaccccaactgtcacttgaaatgagaaaaactgttctttatttctgtcatgttctacatggatggtttgatgattcctcctagcaaacatttcaccagtagacaaaaagttaccatatcacagtgcctgttctggcctgcaagttagcaaacaataaatcttaattacrcttaagtgccaaaaatctgaaaagagtgaggcaatgttagtcagctgtgcattggtcctgactcctgcctctgctttggctggagatgcagctgcaggaatacataaact

SEQ ID NO: 81392 - DNA, 600 bp, Chicken  19866894374796_4
ccaaagcactcaacttgctgctctatagctgccttgcactcaactctctctgctctatactgccatatgcagtgtgtttcaccagcgtactccctaatgctactgtactsagccctccctgatcctgctgggaccccaactgtcacttgaaatgagaaaaactgttctttatttctgtcatgttctacatggatggtttgatgattcctcctagcaaacatttcaccagtagacaaaaagttaccatatcacagtgcctgttctggcctgcaagttagcaaacaataaatcttaattacrcttaagtgccaaaaatctgaaaagagtgaggcaatgttagtcagctgtgcattggtcctgactcctgcctctgctttggctggagatgcagctgcaggaatacataaactagtttttgatttgtttgtgccagtacaatcagtggtaactgctccttaagagcgtttccagtattagtgggcttactggcaatcatcctattagcatctcagatgcaggtggcatctggaaagttttattttaaaagacttttagaattgtactttggttaataagaagcgttatttttaaatatctcgg

SEQ ID NO: 81393 - DNA, 600 bp, Chicken  19866894374798_1
aagactgaaataggtatatttaatcaaaaatgttcatttttcacccaattcaacaaactcggtaagaaagaagttcacatgctattttctgcatactccatttgacgtgctggagtaatctacctgctccagagctcattcttgggcatcctccttcctgagtcttctaaccagtgacaatgagaggaccaccttaaatataatttctcattagaaaagcaaatattcattcactacggaactgtcctataagatatgcacaccacaccacacacaatggcaaaggatgggattttgackgtaagcaaaggctcagaataagaaggcaaaacttttgtgtaagtaatctatttctgcagaattttctcatctaaaaccttgtttttgagtcacgttattgttgtttataagaatgttgtgtgatccactgtttctttttctggctgtgtttacaaaaccagaaacattgtgccagtagccaaatttttgtgtcctctgtgctggaggactttcttcttccttcaccttctttctcctttatttcttttaatgccattaaataagacacatgcaaatttaaagggatgcaagcaatggtat

SEQ ID NO: 81394 - DNA, 600 bp, Chicken  19866894374804_1
tgagtgatagatttaggaacgtgaaaaatctgtatgtaggattaaaatggttgtttcatctaggaagaaaattggggtggtaggatatgaacatttcacttgttaccaaaaaaaaaaaaggctatgcattcaaaaagcagataaggaagtaacactgccaaaatacatgatgggcgtttcgctgtctcgctacaggatgtggttgtagtgctgagttcattggcatggaagagcctgagtgttataaataacaccctttctgcgacacctgatgaggctttaaacctaatattctccccmtgtgagaatttgtattgacattgaccttttttttttgtgcccagatctcaccctacagctctctgctgtgggtaggttccctcttagtacacttgaggtcctctataggcactggaggtggagcgcatctcattgacacagtggggttcgtggtgagcacaaaacattgagtgctggggcagacttatctctgctccactcatgtctctcctgtaactttctggccattggttatagttgttctttccactcccttcccttggttgcgggggtgctgaatttgcttctaacggagcagct

SEQ ID NO: 81395 - DNA, 599 bp, Chicken  19866894374809_1
  misc_feature (1)..(46): n is any nucleotide
nnnnnnnnnnnnnnnnnnnnnnnnnnnnnnnnnnnnnnnnnnnnnncatgaaacatcacctaatcccacactaaagcactactaaggtgttttctcacttccaatcactctgaagcatagcctgagacatctaatggaaaacaacacactcaacctactcactcacaagcttcaacagaggctcagactcctcttctggcagcaaaaccagatcctggctgtttccataaaatagcgagcaacacatcaattggaatagagccacttcttggcaaagagttatctttcttgtgcccctcrtgtttcctctactacgcrtatttcagaaagccttcaaggttaatgctagaaggatcttttcttctgcygaatccctacaacatgagctctgaaacttctctgttcaactctttgctttctcaaagcctaaaaacctggactattctgagagygtgttagtaacttagttttaagkataatgttcaaagggactgagggacaataggatgagtcagttttgccattaccagaatgacattttaacctgaaatcttgcaatattactagcaataacaaatgaataaaaatgaatgttatga

SEQ ID NO: 81396 - DNA, 599 bp, Chicken  19866894374809_2
  misc_feature (1)..(28): n is any nucleotide
nnnnnnnnnnnnnnnnnnnnnnnnnnnncatgaaacatcacctaatcccacactaaagcactactaaggtgttttctcacttccaatcactctgaagcatagcctgagacatctaatggaaaacaacacactcaacctactcactcacaagcttcaacagaggctcagactcctcttctggcagcaaaaccagatcctggctgtttccataaaatagcgagcaacacatcaattggaatagagccacttcttggcaaagagttatctttcttgtgcccctcrtgtttcctctactacgcrtatttcagaaagccttcaaggttaatgctagaaggatcttttcttctgcygaatccctacaacatgagctctgaaacttctctgttcaactctttgctttctcaaagcctaaaaacctggactattctgagagygtgttagtaacttagttttaagkataatgttcaaagggactgagggacaataggatgagtcagttttgccattaccagaatgacattttaacctgaaatcttgcaatattactagcaataacaaatgaataaaaatgaatgttatgatttttgtttcaagaatag

SEQ ID NO: 81397 - DNA, 600 bp, Chicken  19866894374809_3
cactaaagcactactaaggtgttttctcacttccaatcactctgaagcatagcctgagacatctaatggaaaacaacacactcaacctactcactcacaagcttcaacagaggctcagactcctcttctggcagcaaaaccagatcctggctgtttccataaaatagcgagcaacacatcaattggaatagagccacttcttggcaaagagttatctttcttgtgcccctcrtgtttcctctactacgcrtatttcagaaagccttcaaggttaatgctagaaggatcttttcttctgcygaatccctacaacatgagctctgaaacttctctgttcaactctttgctttctcaaagcctaaaaacctggactattctgagagygtgttagtaacttagttttaagkataatgttcaaagggactgagggacaataggatgagtcagttttgccattaccagaatgacattttaacctgaaatcttgcaatattactagcaataacaaatgaataaaaatgaatgttatgatttttgtttcaagaatagaggtctctccttgttggcttcagcatttctaatattttctactaatttcat

SEQ ID NO: 81398 - DNA, 600 bp, Chicken  19866894374809_4
acctactcactcacaagcttcaacagaggctcagactcctcttctggcagcaaaaccagatcctggctgtttccataaaatagcgagcaacacatcaattggaatagagccacttcttggcaaagagttatctttcttgtgcccctcrtgtttcctctactacgcrtatttcagaaagccttcaaggttaatgctagaaggatcttttcttctgcygaatccctacaacatgagctctgaaacttctctgttcaactctttgctttctcaaagcctaaaaacctggactattctgagagygtgttagtaacttagttttaagkataatgttcaaagggactgagggacaataggatgagtcagttttgccattaccagaatgacattttaacctgaaatcttgcaatattactagcaataacaaatgaataaaaatgaatgttatgatttttgtttcaagaatagaggtctctccttgttggcttcagcatttctaatattttctactaatttcatacagcttcatctcattcagagaattacagaataatgtaggttggaaaagaccttcaagatcaaacctgaccatctgcttgacct

SEQ ID NO: 81399 - DNA, 600 bp, Chicken  19866894374809_5
cagaggctcagactcctcttctggcagcaaaaccagatcctggctgtttccataaaatagcgagcaacacatcaattggaatagagccacttcttggcaaagagttatctttcttgtgcccctcrtgtttcctctactacgcrtatttcagaaagccttcaaggttaatgctagaaggatcttttcttctgcygaatccctacaacatgagctctgaaacttctctgttcaactctttgctttctcaaagcctaaaaacctggactattctgagagygtgttagtaacttagttttaagkataatgttcaaagggactgagggacaataggatgagtcagttttgccattaccagaatgacattttaacctgaaatcttgcaatattactagcaataacaaatgaataaaaatgaatgttatgatttttgtttcaagaatagaggtctctccttgttggcttcagcatttctaatattttctactaatttcatacagcttcatctcattcagagaattacagaataatgtaggttggaaaagaccttcaagatcaaacctgaccatctgcttgacctaccaaatctactactaaaccatg

SEQ ID NO: 81400 - DNA, 600 bp, Chicken  19866894374809_6
agaatgacattttaacctgaaatcttgcaatattactagcaataacaaatgaataaaaatgaatgttatgatttttgtttcaagaatagaggtctctccttgttggcttcagcatttctaatattttctactaatttcatacagcttcatctcattcagagaattacagaataatgtaggttggaaaagaccttcaagatcaaacctgaccatctgcttgacctaccaaatctactactaaaccatgtatgtcccttactgccacatccacgcctcttaaatacacccagggataggggytgaaccacatccctgtgcagcctaatccaatgcctaaccacgctctccatgaagaaattcttcctgacttccagtctaaaccttccctgtgtcaacttgaggacactacctcatctcctgtcacttgttacttgagaacagagaccaayagccttcttgctgccacctcctttcaggtagctgtagagattgatggtgtctcctctcagcctctttttctccagactaaataatctccataactgctcctcgtaggtcttattttctagtcccttcactcaatttgttgctcttcgcccc

SEQ ID NO: 81401 - DNA, 600 bp, Chicken  19866894374809_7
tctcattcagagaattacagaataatgtaggttggaaaagaccttcaagatcaaacctgaccatctgcttgacctaccaaatctactactaaaccatgtatgtcccttactgccacatccacgcctcttaaatacacccagggataggggytgaaccacatccctgtgcagcctaatccaatgcctaaccacgctctccatgaagaaattcttcctgacttccagtctaaaccttccctgtgtcaacttgaggacactacctcatctcctgtcacttgttacttgagaacagagaccaayagccttcttgctgccacctcctttcaggtagctgtagagattgatggtgtctcctctcagcctctttttctccagactaaataatctccataactgctcctcgtaggtcttattttctagtcccttcactcaatttgttgctcttcgccccaagagtaaataagaaaccctagtctttttcacttttttaagtgtttgtttccctcttgtattgagtagttcttctttgatcccacctttttctccttcctctttctcattaccttcatactactgcagactttaatttgtacactcctg

SEQ ID NO: 81402 - DNA, 600 bp, Chicken  19866894374815_1
ttgttaatttaatagctgggatcctcccatcaaggtgaattacaaagaagatattgcatgcgaggaccagcaagaggccttaaattgcacctccttcagcataaagtcctgtggggtgcattcacttccttaaattggcctcattggtgcaactgcagtggaagatgaaggggctgaagaaagatgagctgtcatatgagctgtgcaaaccttccccttaggagcatggcacagtggcagactcatgacatgcagtgtatgcagacatagaaggagtatgtggctttcaacatgctccaygctgcttatcagctgaattgcgctgaaatggcacctaccagagccctctcttccaatgcattctccatgacttctcattggccaatggtactcaacatcttctaggactttgttcatttatttttatgaatttgagttcatgatttctgcctggctgtaggaaaagttagggtttacagcttcaccctrgcatgtatcagatctgcagttaactaagtatgagcaaaaaaacccaaaacactagtgtgaattgcttaagctgaaggtgatttatgccatttcaaaatctgaacataactg

SEQ ID NO: 81403 - DNA, 600 bp, Chicken  19866894374815_2
tgtcatatgagctgtgcaaaccttccccttaggagcatggcacagtggcagactcatgacatgcagtgtatgcagacatagaaggagtatgtggctttcaacatgctccaygctgcttatcagctgaattgcgctgaaatggcacctaccagagccctctcttccaatgcattctccatgacttctcattggccaatggtactcaacatcttctaggactttgttcatttatttttatgaatttgagttcatgatttctgcctggctgtaggaaaagttagggtttacagcttcaccctrgcatgtatcagatctgcagttaactaagtatgagcaaaaaaacccaaaacactagtgtgaattgcttaagctgaaggtgatttatgccatttcaaaatctgaacataactgattttcttcttttgatattgtttaagcaaatattaataaattagcccatgacaggaacaaattctttttctcttcattataaatttctgttttatatgaaaatgtactaaaaataagagggctcctttgaaagtaatgcgtctcattttatcaggttggctcgtgatagcagaggtggatgttggcggt

SEQ ID NO: 81404 - DNA, 599 bp, Chicken  19866894374818_1
  misc_feature (1)..(108): n is any nucleotide
nnnnnnnnnnnnnnnnnnnnnnnnnnnnnnnnnnnnnnnnnnnnnnnnnnnnnnnnnnnnnnnnnnnnnnnnnnnnnnnnnnnnnnnnnnnnnnnnnnnnnnnnnnnncttatacttgggactgtaaggtattcttagactgtatttgtactgggtagtgtgggcattttttcccctgtaagttttaaatattcataatgactgagattaagtttactacattattcccagattttgaaaagctaattggagaacacgagttaatgaatggagatatggattcatcacctgcccagggargtggtggagtcactgtccctggaggtgttcacraaacatttagatgttgtactgatggacacatttcagtgggatatactggtgacaggtggacagttggactggatgatcttagaggccttttccaaccttggtgattctatrattcaatggcttagatcgccactcattaaataccagttgaaaatataatttctatataataytaccagtgatcaatttgtgcacgtggctgaaatttgaatatgaagaagtggaactcagagacttttcttcttgaagtagattggttatggaca

SEQ ID NO: 81405 - DNA, 599 bp, Chicken  19866894374818_2
  misc_feature (1)..(75): n is any nucleotide
nnnnnnnnnnnnnnnnnnnnnnnnnnnnnnnnnnnnnnnnnnnnnnnnnnnnnnnnnnnnnnnnnnnnnnnnnnncttatacttgggactgtaaggtattcttagactgtatttgtactgggtagtgtgggcattttttcccctgtaagttttaaatattcataatgactgagattaagtttactacattattcccagattttgaaaagctaattggagaacacgagttaatgaatggagatatggattcatcacctgcccagggargtggtggagtcactgtccctggaggtgttcacraaacatttagatgttgtactgatggacacatttcagtgggatatactggtgacaggtggacagttggactggatgatcttagaggccttttccaaccttggtgattctatrattcaatggcttagatcgccactcattaaataccagttgaaaatataatttctatataataytaccagtgatcaatttgtgcacgtggctgaaatttgaatatgaagaagtggaactcagagacttttcttcttgaagtagattggttatggacatggaacttactgttgtgttctaaaatctagttc

SEQ ID NO: 81406 - DNA, 600 bp, Chicken  19866894374818_3
tttgtactgggtagtgtgggcattttttcccctgtaagttttaaatattcataatgactgagattaagtttactacattattcccagattttgaaaagctaattggagaacacgagttaatgaatggagatatggattcatcacctgcccagggargtggtggagtcactgtccctggaggtgttcacraaacatttagatgttgtactgatggacacatttcagtgggatatactggtgacaggtggacagttggactggatgatcttagaggccttttccaaccttggtgattctatrattcaatggcttagatcgccactcattaaataccagttgaaaatataatttctatataataytaccagtgatcaatttgtgcacgtggctgaaatttgaatatgaagaagtggaactcagagacttttcttcttgaagtagattggttatggacatggaacttactgttgtgttctaaaatctagttcattctgcatgtggcctgtttcagattctgtagtttcagagcttgcgtgttgcaactcataccaaatgctactgggatggttgcactataatatgcaggatgtttttttctaa

SEQ ID NO: 81407 - DNA, 600 bp, Chicken  19866894374818_4
attaagtttactacattattcccagattttgaaaagctaattggagaacacgagttaatgaatggagatatggattcatcacctgcccagggargtggtggagtcactgtccctggaggtgttcacraaacatttagatgttgtactgatggacacatttcagtgggatatactggtgacaggtggacagttggactggatgatcttagaggccttttccaaccttggtgattctatrattcaatggcttagatcgccactcattaaataccagttgaaaatataatttctatataataytaccagtgatcaatttgtgcacgtggctgaaatttgaatatgaagaagtggaactcagagacttttcttcttgaagtagattggttatggacatggaacttactgttgtgttctaaaatctagttcattctgcatgtggcctgtttcagattctgtagtttcagagcttgcgtgttgcaactcataccaaatgctactgggatggttgcactataatatgcaggatgtttttttctaacctgtaaaggacctaggcccatttaaaaaatggtggatgatttaaaatgcttaccatgcact

SEQ ID NO: 81408 - DNA, 600 bp, Chicken  19866894374829_1
ttctatggtaatttttattctaaggtattgcatttctatggaaacatatttttaaggtaatgtaaaaatgctgactgcttttaaaaccttcattttacttacctgccttttactgccataactgtttctatggaaactagaactggccacgaagcagttcaacatgaattctcacttgtcagttttaccttaaagtgccaccttcaaagtcttttaataaactagtaatgtggctgcattgcctaaagagttttcaaattaaacaaaacgagaaagcacgctttcactgaaagctccacrcaatattttgtaggtgtggtctaaatctaagaattttttaacagtgtgcatgatatggctctggttaaggatatgatctgtaaacagagagacagtttattagcagtaaaagccctagtgtgtgtagttcgacttacataaaggtgacttataccaatatgggtatgtctagactgctgtcacagaagcatactgtagagatgctgagtaaacaggtaaaccagcctaatgtgagctctgtgctcccacagctagctggggtacttctgtgcaggcacatgcatacggtgttccctctaa

SEQ ID NO: 81409 - DNA, 600 bp, Chicken  19866894374832_1
agggaatttattaaaagaaggcaaatagatatatgagtaagaagagagtgctaggaaagtaattaccaacactcaggctgacaaagtatccttttactgatgacagaacacaacccaaactcccccatgtttttacattagatacggaaacagcctcaaattaagtaaagagatcattttatcttacacgaacataaaagtattttacctcagatcttagttattttcaagtgtaacgacttccaagcaattctttttttaaaatttgtatttgcccttgaaatatgcactttgaacttyagctttgggctgctgttgcatctgcacaatctcaaatcatatccaataattttctcttcaagagcagctatcctcattagtacctcagtcttcccacttaattattttaaaagtccatcctcagggaaggtgagctcaaaatacttatttctaatacatttcttttagttggaaatacatgaaaatagattaagcttggaacaataaaagaaaaaaattcaaattatcttggtttgatattaatacaatgtgagcaagcatgacaaagatacagctgctcgccttcttgttgcatttaag

SEQ ID NO: 81410 - DNA, 600 bp, Chicken  19866894374833_1
ctgcatcctgcttgtgctacaaagtgtacggtctccacaacagcttttattctaggaaatatgacataagaaaggaaacttagaagcaaggctttttgaaaacaaacctctgaagcaaaaatatgcatagccagttcacgtacactgcttaagcaaaacggaagcttttaatgtcacacacccatgaaagtcctaacacctctacaggggaggagtgcagggagaaacacaacactgagacaggaatttagaaggacataactgtggacggttatttgttagcaggctggcagcagtttrgttcaggttgcttgaccaacttctttactgaggatgtcctaagatctattataacttcacgaggagcatgttaagagaggcatttctgataatttaaacaaggtcctctgcagattcctctgatctccagaaaggatttagataatatcaacacttcaagctccttatggytttttctgcacatctggataatatcagtttttgttacgaaatgcattcaggattgatctgagctagaagaaagtattttgtacgcactgctctctttggaagctgtagtaaattttggctagaacacaa

SEQ ID NO: 81411 - DNA, 600 bp, Chicken  19866894374833_2
tgtcacacacccatgaaagtcctaacacctctacaggggaggagtgcagggagaaacacaacactgagacaggaatttagaaggacataactgtggacggttatttgttagcaggctggcagcagtttrgttcaggttgcttgaccaacttctttactgaggatgtcctaagatctattataacttcacgaggagcatgttaagagaggcatttctgataatttaaacaaggtcctctgcagattcctctgatctccagaaaggatttagataatatcaacacttcaagctccttatggytttttctgcacatctggataatatcagtttttgttacgaaatgcattcaggattgatctgagctagaagaaagtattttgtacgcactgctctctttggaagctgtagtaaattttggctagaacacaactcaattgacctaaagttagttgaaaagtcagtttatgccataactgggacagtaacagagctccattacatgctaacaccagatgacagcctgggaccacattacaaacaatgcaaagacttaatcttgactataaaagctttgcaaacaaagatactttctttttacac

SEQ ID NO: 81412 - DNA, 600 bp, Chicken  19866894374835_1
atgttcccctcctaagtttcactagctctgtttcatgtactttcattctcatgtatgaattctgccagttttcttatttaaataacctgatgcctcctgtgagggattttcagaccatttgtttccaatgccagtgctgtcttctagtatgttctgtatggtctttcagttggatgaacatgttctagcatacgctagagtccccatatatattattagtattttccaggatttggttttctccttgttttccaaagggctgaaagtaaagccatccaaacaaaccacacggcagcaccrttttagctgcttgtgaagcattcaaagtcataatagccagagcatttttagtgcraagtattgaaagtttttcaagagtaccaaggctggaaacctgaagcttgcttgtactcaacacaagcaaaaatctcatgttctgtcttcaagacagctcctgcagatgcaggttgagccctgggaactcactgaggtgtcaaggtagctctggccagagagaagtatatgcttattgacaaacctgtttggctcagacggatcacagaggatgatcctatggagtttctatttttacctaatctg

SEQ ID NO: 81413 - DNA, 600 bp, Chicken  19866894374835_2
tgaattctgccagttttcttatttaaataacctgatgcctcctgtgagggattttcagaccatttgtttccaatgccagtgctgtcttctagtatgttctgtatggtctttcagttggatgaacatgttctagcatacgctagagtccccatatatattattagtattttccaggatttggttttctccttgttttccaaagggctgaaagtaaagccatccaaacaaaccacacggcagcaccrttttagctgcttgtgaagcattcaaagtcataatagccagagcatttttagtgcraagtattgaaagtttttcaagagtaccaaggctggaaacctgaagcttgcttgtactcaacacaagcaaaaatctcatgttctgtcttcaagacagctcctgcagatgcaggttgagccctgggaactcactgaggtgtcaaggtagctctggccagagagaagtatatgcttattgacaaacctgtttggctcagacggatcacagaggatgatcctatggagtttctatttttacctaatctggatctgcagggatctctgagaggtttatggtagttttacagctcctagattgtgg

SEQ ID NO: 81414 - DNA, 599 bp, Chicken  19866894374838_1
  misc_feature (1)..(63): n is any nucleotide
nnnnnnnnnnnnnnnnnnnnnnnnnnnnnnnnnnnnnnnnnnnnnnnnnnnnnnnnnnnnnnnttggcacagctgtggttgtgtagtgagaatgagtatgaccctgccggtgggtgggacctactcatcacttcaagttaggtacatgtttaagagatttgtttgatatggacaccacatcaaagctccacagacaccatatcaaagctccacaaagctccacagagctccacagtaagtgctgtgttgagccagggcctaaatgtagtttgccatgtggggccttcttggcttcgctgwttacctacctggcagcctcgctctcttagatgagaactccttcacttcagaacctgtgttcagcaactwaaagcctactttctcatagtaagaaaacagtgattatactctcatggtaaaacgttgaattaacactctcttgagccgagattacaagattaggagatcatcataaaaatctgaaaacactgcatattaggagttataacactcatattaggagttacacaaactacaaataaaaatgttgtctgctgccttttgtaaaattctgcttacattttctttctttcctttta

SEQ ID NO: 81415 - DNA, 600 bp, Chicken  19866894374838_2
cagctgtggttgtgtagtgagaatgagtatgaccctgccggtgggtgggacctactcatcacttcaagttaggtacatgtttaagagatttgtttgatatggacaccacatcaaagctccacagacaccatatcaaagctccacaaagctccacagagctccacagtaagtgctgtgttgagccagggcctaaatgtagtttgccatgtggggccttcttggcttcgctgwttacctacctggcagcctcgctctcttagatgagaactccttcacttcagaacctgtgttcagcaactwaaagcctactttctcatagtaagaaaacagtgattatactctcatggtaaaacgttgaattaacactctcttgagccgagattacaagattaggagatcatcataaaaatctgaaaacactgcatattaggagttataacactcatattaggagttacacaaactacaaataaaaatgttgtctgctgccttttgtaaaattctgcttacattttctttctttccttttaaaataccgtgtaactagagttttatstcttgccaagtttagccaggtgagaaaacatgaacctctttttc

SEQ ID NO: 81416 - DNA, 600 bp, Chicken  19866894374838_3
ttagatgagaactccttcacttcagaacctgtgttcagcaactwaaagcctactttctcatagtaagaaaacagtgattatactctcatggtaaaacgttgaattaacactctcttgagccgagattacaagattaggagatcatcataaaaatctgaaaacactgcatattaggagttataacactcatattaggagttacacaaactacaaataaaaatgttgtctgctgccttttgtaaaattctgcttacattttctttctttccttttaaaataccgtgtaactagagttttatstcttgccaagtttagccaggtgagaaaacatgaacctctttttcttaactaaaggggaaatatgaaacagttatagtagcaaagcaaacttattagcatactttttctgctttttttccttccaraatcttctgtgaatccaatttttccataaaatacggttgttcaaataaaccgtgggctgtgcaggagccaccaaactcatggcttgcaaaacaatcctcatattccagcacaaccactttaggtcattgaaacttgacctgtggctggaatgttgcctgtgcattagggctcact

SEQ ID NO: 81417 - DNA, 477 bp, Chicken  19866894374838_4
ttacaagattaggagatcatcataaaaatctgaaaacactgcatattaggagttataacactcatattaggagttacacaaactacaaataaaaatgttgtctgctgccttttgtaaaattctgcttacattttctttctttccttttaaaataccgtgtaactagagttttatstcttgccaagtttagccaggtgagaaaacatgaacctctttttcttaactaaaggggaaatatgaaacagttatagtagcaaagcaaacttattagcatactttttctgctttttttccttccaraatcttctgtgaatccaatttttccataaaatacggttgttcaaataaaccgtgggctgtgcaggagccaccaaactcatggcttgcaaaacaatcctcatattccagcacaaccactttaggtcattgaaacttgacctgtggctggaatgttgcctgtgcattagggctcacttc

SEQ ID NO: 81418 - DNA, 600 bp, Chicken  19866894374839_1
gatcaaacacaagtaactttggaattacttaacagcattgttatgcaatagatgaaagtgaaaaattccccagtgttcaaaatgtgttattttttagtcatttttttcctgaatctccttcagcatctactcatgatggcctcaagctgcaccaggggaggttcagttcgaatattaggacgtatttctcctcagaaagagcagtgaggcagtggcacaggctgcccgggggtggttgagtcactgtccctggaagtgttccagaactgtggagatgtggcactgagggacagtgggcakggtggaatggtttgtggttggacttgaggatcttataggtcttctccagccttattgattccatggttctgtactccttatgctgatttgttcaacattgtgctattattgttacagaaactcttttggcttagaatcattgttgaaaaagaccactaagtccaaccaccagctcatcacccccgtgcccactaaccatgttcccaagtcctgcttgggtaattatggaaacagcatgcttctaagcagtcatacttggtcttgctaaaagctcagatagactattttcataggttgctt

SEQ ID NO: 81419 - DNA, 599 bp, Chicken  19866894374843_1
  misc_feature (1)..(16): n is any nucleotide
nnnnnnnnnnnnnnnnattgtatttttctgatcttttgaatgtcattctgatttaacaaaaatactaagaaaatggaaatatatgaacaacattatttcttttttacacttagaattttacacaccttcatccccatcttcaactttcaagtaattagttatgaattgaagagtgatataaacatatgtataatgcctacacttagaataatttgcatgctttgaatggtgtttttattttaaatactttaaaatacttttatttaacttttatacttcttacatttactacaagtatgwctgcttttatttaatctaatttcttggaattttgtcttgagaaaatgttaaactgatatttttataggaaattgtttttaacagtaggatgttacgctggtactatctattagtacattactttgtattattcagagtggtaacaagaagaaagctgttgcttcctgagaggtaacagttgcttttgccttgccatatttctaatctatagatacatgaacaaacagaaaaatggacatcggttccatctgtactacttttggggaaatctagaattggaaataaagttaggcattcct

SEQ ID NO: 81420 - DNA, 600 bp, Chicken  19866894374847_1
tgtgctcaggaatgcaaagaaaagagatgctaaaggtcacactgaagcatctcttacacaatcctacaatcgcagaatttttaactccttgccttcagaaacagcactgaagcacttacctggctgtttggagtttaaatatactttaaactctttaacaccgagctgtactgtatctccctaagagtctgaaggaaatacagcagttatgtgcagttaagaaatacttcttacttcaatgctgcagtaggtatttgatccacaaatctgatatacctactaccatttcacaacaatttyaaatcttgggatccagaaaaaaaggcaaaaaatcctcagggtcagcaaattccattatagatgcaggtgttttctaagaaagaaaaggctttccagatgtatatgtacataagtttatgtaatgtataaagaaaccaggtagatttataattactatatattaacttcgtctcagcatccttgtaaagtagataaggcacgaaggcactgggaagcaagaaaaatgccaaaagtagcagactgagccgtcagtgagaagataaaaaccctacagatgctgcacatgctgtaccttcagcc

SEQ ID NO: 81421 - DNA, 600 bp, Chicken  19866894374847_2
tataattactatatattaacttcgtctcagcatccttgtaaagtagataaggcacgaaggcactgggaagcaagaaaaatgccaaaagtagcagactgagccgtcagtgagaagataaaaaccctacagatgctgcacatgctgtaccttcagccaggacgactgggaccaactcagcactaagtggttttttattcctatgacatggcatttcagtcttgcctagtttgatttctgtatttaattctgtaaattatattatgagctttatttgtcaccatgcaattcaaggtggggaamgtaagaaattgcactgcactaaacagagccaacagatccttcagagctgctgcagatgcacaccttatgttctctctcaagagtgcaagttacttaaaagacagaaacaacttgtcaaaaatgcatcagctacagagaacaaactgcacatttcctcattggaaagagagcaaaggggctttgcctcaaacacagcagaagcaaaattgccacaagcttcttacctcccactcacttgcgagcttcacaggcaactctatgcccttcttctccagctcttccaacttgtagccctcatac

SEQ ID NO: 81422 - DNA, 599 bp, Chicken  19866894374852_1
  misc_feature (1)..(134): n is any nucleotide
nnnnnnnnnnnnnnnnnnnnnnnnnnnnnnnnnnnnnnnnnnnnnnnnnnnnnnnnnnnnnnnnnnnnnnnnnnnnnnnnnnnnnnnnnnnnnnnnnnnnnnnnnnnnnnnnnnnnnnnnnnnnnnnnnnnnnntcagcattcagaaaggcagagccaagctattctttagtgagaaaaaattcaggtcatctgattacagcacatgcaccactggcagtggtggtaggaaactaaatactcattggaaatttctcctcaccttcattttccccttcaggattggtccagtgctgaagcytatgatgatgcagttgggaagtgcaggagctggacttggttgtgctgtgcctgcagtgaagctgctgccaggtattgacttcatggggagcccagagctatttcccactccccacagtgggctcccactgccccacagcttgtctcaagtgccaccagcaggttgcagcagccagtcccatttactgggtccactgaacagagagaaggcarccaawttgttttagctggtccaggaccagaaamtcctgatctaacacrgaagcctagggctccctgtgagcagggcaagactcattc

SEQ ID NO: 81423 - DNA, 600 bp, Chicken  19866894374852_2
ctggcagtggtggtaggaaactaaatactcattggaaatttctcctcaccttcattttccccttcaggattggtccagtgctgaagcytatgatgatgcagttgggaagtgcaggagctggacttggttgtgctgtgcctgcagtgaagctgctgccaggtattgacttcatggggagcccagagctatttcccactccccacagtgggctcccactgccccacagcttgtctcaagtgccaccagcaggttgcagcagccagtcccatttactgggtccactgaacagagagaaggcarccaawttgttttagctggtccaggaccagaaamtcctgatctaacacrgaagcctagggctccctgtgagcagggcaagactcattctgcactgctgtgctaagggtttctgcaggggtctgtgttcatgccttggaccacacattccttcagcagatcaggcagcgatgctacctcctacagaaggaagacctagtaggtttttgctgataccttagcaaaaccacatcactgaagctgctatagattcataggaggagactgaggcttgagaagaaccagaaaacaaatgtaatttaa

SEQ ID NO: 81424 - DNA, 600 bp, Chicken  19866894374852_3
agtggtggtaggaaactaaatactcattggaaatttctcctcaccttcattttccccttcaggattggtccagtgctgaagcytatgatgatgcagttgggaagtgcaggagctggacttggttgtgctgtgcctgcagtgaagctgctgccaggtattgacttcatggggagcccagagctatttcccactccccacagtgggctcccactgccccacagcttgtctcaagtgccaccagcaggttgcagcagccagtcccatttactgggtccactgaacagagagaaggcarccaawttgttttagctggtccaggaccagaaamtcctgatctaacacrgaagcctagggctccctgtgagcagggcaagactcattctgcactgctgtgctaagggtttctgcaggggtctgtgttcatgccttggaccacacattccttcagcagatcaggcagcgatgctacctcctacagaaggaagacctagtaggtttttgctgataccttagcaaaaccacatcactgaagctgctatagattcataggaggagactgaggcttgagaagaaccagaaaacaaatgtaatttaataatt

SEQ ID NO: 81425 - DNA, 600 bp, Chicken  19866894374852_4
ggaaatttctcctcaccttcattttccccttcaggattggtccagtgctgaagcytatgatgatgcagttgggaagtgcaggagctggacttggttgtgctgtgcctgcagtgaagctgctgccaggtattgacttcatggggagcccagagctatttcccactccccacagtgggctcccactgccccacagcttgtctcaagtgccaccagcaggttgcagcagccagtcccatttactgggtccactgaacagagagaaggcarccaawttgttttagctggtccaggaccagaaamtcctgatctaacacrgaagcctagggctccctgtgagcagggcaagactcattctgcactgctgtgctaagggtttctgcaggggtctgtgttcatgccttggaccacacattccttcagcagatcaggcagcgatgctacctcctacagaaggaagacctagtaggtttttgctgataccttagcaaaaccacatcactgaagctgctatagattcataggaggagactgaggcttgagaagaaccagaaaacaaatgtaatttaataattattttacattattacaaaaggaaacttc

SEQ ID NO: 81426 - DNA, 600 bp, Chicken  19866894374852_5
ccttcattttccccttcaggattggtccagtgctgaagcytatgatgatgcagttgggaagtgcaggagctggacttggttgtgctgtgcctgcagtgaagctgctgccaggtattgacttcatggggagcccagagctatttcccactccccacagtgggctcccactgccccacagcttgtctcaagtgccaccagcaggttgcagcagccagtcccatttactgggtccactgaacagagagaaggcarccaawttgttttagctggtccaggaccagaaamtcctgatctaacacrgaagcctagggctccctgtgagcagggcaagactcattctgcactgctgtgctaagggtttctgcaggggtctgtgttcatgccttggaccacacattccttcagcagatcaggcagcgatgctacctcctacagaaggaagacctagtaggtttttgctgataccttagcaaaaccacatcactgaagctgctatagattcataggaggagactgaggcttgagaagaaccagaaaacaaatgtaatttaataattattttacattattacaaaaggaaacttctgcttcttgatgcct

SEQ ID NO: 81427 - DNA, 599 bp, Chicken  19866894374857_1
  misc_feature (1)..(21): n is any nucleotide
nnnnnnnnnnnnnnnnnnnnncttcacaggtctgttcagatcagctcttcatgttctcaagagaagtttaataaaaaagcatttgcgactttgaaggaacagtgaccatccaggttggtgtacatttgatacaaacaggatgtcttcaaaattggggttatagaagcattttttcttctgcaaactcttggacataaacactatggatttacctaagatatctgcaagttagactggcaaggctccagaaacactgaaggtacactctcccttctgatatatgaacatacggtggtcccragataacagcaccagcaaaacagggttagactgaggatcgtatgtatttctttcttacatttctatttctttagtcctaatattgattttttwaaaaactctgagtttgttttgttttttaaacaagtctttgatttcttttacttttttccctgagatgcccagcctttwtttkatttcagggcacgctatcatatccacctagagtagctgctgtgtacaatttcayagtttgagtgtagagaaaragctcttactcctcttgttcagacagctgagctgtaattggcaaagcaagc

SEQ ID NO: 81428 - DNA, 600 bp, Chicken  19866894374857_2
aaggaacagtgaccatccaggttggtgtacatttgatacaaacaggatgtcttcaaaattggggttatagaagcattttttcttctgcaaactcttggacataaacactatggatttacctaagatatctgcaagttagactggcaaggctccagaaacactgaaggtacactctcccttctgatatatgaacatacggtggtcccragataacagcaccagcaaaacagggttagactgaggatcgtatgtatttctttcttacatttctatttctttagtcctaatattgattttttwaaaaactctgagtttgttttgttttttaaacaagtctttgatttcttttacttttttccctgagatgcccagcctttwtttkatttcagggcacgctatcatatccacctagagtagctgctgtgtacaatttcayagtttgagtgtagagaaaragctcttactcctcttgttcagacagctgagctgtaattggcaaagcaagcaataggtatatgccacgttgtgggagtgaatgagaatgccctttaaattacctataaaaccctttgattcaaactgctgatgttgccatgggca

SEQ ID NO: 81429 - DNA, 600 bp, Chicken  19866894374857_3
tttcttctgcaaactcttggacataaacactatggatttacctaagatatctgcaagttagactggcaaggctccagaaacactgaaggtacactctcccttctgatatatgaacatacggtggtcccragataacagcaccagcaaaacagggttagactgaggatcgtatgtatttctttcttacatttctatttctttagtcctaatattgattttttwaaaaactctgagtttgttttgttttttaaacaagtctttgatttcttttacttttttccctgagatgcccagcctttwtttkatttcagggcacgctatcatatccacctagagtagctgctgtgtacaatttcayagtttgagtgtagagaaaragctcttactcctcttgttcagacagctgagctgtaattggcaaagcaagcaataggtatatgccacgttgtgggagtgaatgagaatgccctttaaattacctataaaaccctttgattcaaactgctgatgttgccatgggcaatttgctaagcgtattgatcatcttctgtttaaattaaagtttgatgtcctggaacaggctattcagcacagagagct

SEQ ID NO: 81430 - DNA, 600 bp, Chicken  19866894374857_4
ttctgcaaactcttggacataaacactatggatttacctaagatatctgcaagttagactggcaaggctccagaaacactgaaggtacactctcccttctgatatatgaacatacggtggtcccragataacagcaccagcaaaacagggttagactgaggatcgtatgtatttctttcttacatttctatttctttagtcctaatattgattttttwaaaaactctgagtttgttttgttttttaaacaagtctttgatttcttttacttttttccctgagatgcccagcctttwtttkatttcagggcacgctatcatatccacctagagtagctgctgtgtacaatttcayagtttgagtgtagagaaaragctcttactcctcttgttcagacagctgagctgtaattggcaaagcaagcaataggtatatgccacgttgtgggagtgaatgagaatgccctttaaattacctataaaaccctttgattcaaactgctgatgttgccatgggcaatttgctaagcgtattgatcatcttctgtttaaattaaagtttgatgtcctggaacaggctattcagcacagagagctaatg

SEQ ID NO: 81431 - DNA, 600 bp, Chicken  19866894374857_5
tagactggcaaggctccagaaacactgaaggtacactctcccttctgatatatgaacatacggtggtcccragataacagcaccagcaaaacagggttagactgaggatcgtatgtatttctttcttacatttctatttctttagtcctaatattgattttttwaaaaactctgagtttgttttgttttttaaacaagtctttgatttcttttacttttttccctgagatgcccagcctttwtttkatttcagggcacgctatcatatccacctagagtagctgctgtgtacaatttcayagtttgagtgtagagaaaragctcttactcctcttgttcagacagctgagctgtaattggcaaagcaagcaataggtatatgccacgttgtgggagtgaatgagaatgccctttaaattacctataaaaccctttgattcaaactgctgatgttgccatgggcaatttgctaagcgtattgatcatcttctgtttaaattaaagtttgatgtcctggaacaggctattcagcacagagagctaatgggataggatgagataggggtagtgagagaaacacatgcacacgggggaaatgga

SEQ ID NO: 81432 - DNA, 600 bp, Chicken  19866894374857_6
aaacactgaaggtacactctcccttctgatatatgaacatacggtggtcccragataacagcaccagcaaaacagggttagactgaggatcgtatgtatttctttcttacatttctatttctttagtcctaatattgattttttwaaaaactctgagtttgttttgttttttaaacaagtctttgatttcttttacttttttccctgagatgcccagcctttwtttkatttcagggcacgctatcatatccacctagagtagctgctgtgtacaatttcayagtttgagtgtagagaaaragctcttactcctcttgttcagacagctgagctgtaattggcaaagcaagcaataggtatatgccacgttgtgggagtgaatgagaatgccctttaaattacctataaaaccctttgattcaaactgctgatgttgccatgggcaatttgctaagcgtattgatcatcttctgtttaaattaaagtttgatgtcctggaacaggctattcagcacagagagctaatgggataggatgagataggggtagtgagagaaacacatgcacacgggggaaatggactgtggtcaaaggaaaaaa

SEQ ID NO: 81433 - DNA, 600 bp, Chicken  19866894374858_1
cgtgctttgccttgctgaccccccaactctgccctgtgatgctctcctgcagtaacctcccgtgtttctccaactcagcagcgttgagtttgtgatatctgtgaagctgcagcctgcacaggatgaatagcaacgacccaatcctggctgcaaatacacagcaaaggaagtaaaaagcaaagctgtgattccaaaaaccagcgcaggctggctggtaagtttttgcttccatctcccaactaatggcatctcagtaaattaaaccagagcagcagctgcaaggaagcaaacaaagcagcygtgggggctgggttgagggaaggagagctgggctgcacatataatgccgccctggcactcaattcctatttttgttattctactgaatgagttatttcaaattgtggattagatttactgagrgaaggcgaagagccagatcaacatgcgtgcgtgtgcgtgcgtgtgcacacatccacaccaccgtgctcccctccttggcaactctgcatctccataacttcattctccccagctgttccatctccatctggccacgtttcagcgcctcttagatcttctttcacagtcgctcaggtc

SEQ ID NO: 81434 - DNA, 600 bp, Chicken  19866894374858_2
tgaatagcaacgacccaatcctggctgcaaatacacagcaaaggaagtaaaaagcaaagctgtgattccaaaaaccagcgcaggctggctggtaagtttttgcttccatctcccaactaatggcatctcagtaaattaaaccagagcagcagctgcaaggaagcaaacaaagcagcygtgggggctgggttgagggaaggagagctgggctgcacatataatgccgccctggcactcaattcctatttttgttattctactgaatgagttatttcaaattgtggattagatttactgagrgaaggcgaagagccagatcaacatgcgtgcgtgtgcgtgcgtgtgcacacatccacaccaccgtgctcccctccttggcaactctgcatctccataacttcattctccccagctgttccatctccatctggccacgtttcagcgcctcttagatcttctttcacagtcgctcaggtcattttctcagtaaatgaaggagccctgctacaaagagagacatagcgaaatgggagcgatacattacaaacgataaatgtttaatcacccaaagaggtggggagggaaaatttggctaacagg

SEQ ID NO: 81435 - DNA, 600 bp, Chicken  19866894374867_1
tgggagccagctgcagtcaggtaacagtcccctattctacagtgccaggggcaggtagcaacatgctggatgcatttttgctaatagcttaccaggtgggtgagaaacagccaggggctttccttccctgaaacacctgcagcagggctgggaggaggtgcatgcagctggagcagccgtggccaccaggcactggggcttccctaccaggatggaggggctgattcagggtgccgtgctgcagccctttccctggctgtgccttgaaggcagctctgtgtgcctctacctgggacgtgktgcctatagactccttgctgacctggctggagagtgccctgagccaggtggaacctggcactgactgttttctctcctcaatgccaaacttctaccaggctgcttcctaaaaggactgcaattaagtgcagtggctgtgctgcatctrcagtgtgctctgccagctgctctggcttcccccatcccctcaaaacagcaagtggggcagcatatccacacacccccctccgtgtccagtgggctgcagtgaggggtgggcacctccagcagctgctgctcatccccagcttgctccaggtg

SEQ ID NO: 81436 - DNA, 600 bp, Chicken  19866894374867_2
tgggaggaggtgcatgcagctggagcagccgtggccaccaggcactggggcttccctaccaggatggaggggctgattcagggtgccgtgctgcagccctttccctggctgtgccttgaaggcagctctgtgtgcctctacctgggacgtgktgcctatagactccttgctgacctggctggagagtgccctgagccaggtggaacctggcactgactgttttctctcctcaatgccaaacttctaccaggctgcttcctaaaaggactgcaattaagtgcagtggctgtgctgcatctrcagtgtgctctgccagctgctctggcttcccccatcccctcaaaacagcaagtggggcagcatatccacacacccccctccgtgtccagtgggctgcagtgaggggtgggcacctccagcagctgctgctcatccccagcttgctccaggtgagaggagctgcgctgatgccctggagcaatggggtgcagaacgacagccctgctcctctgtgctgtggggcagctgccagagggagccctgcatgcagcatgtggggctcagcacctcatcccctgtgcacccacaccagcatcccca

SEQ ID NO: 81437 - DNA, 600 bp, Chicken  19866894374869_1
tgctagagcaggcacggagcgagcggggaaaggataggtgcaggcactgcctgctgccctcaaaaggcaaccagtgctgctcagagcgagccctgccacttaggatgggagagcagctgctgcagctgcaggtccatcctgcacctatgggctgctccccaggatggtcggtctcggggcgatgggctccagcacgtactggcggaagcaagcacccaacctatggaagttctattctgtaattagtttcaaaaattctgactacagtttcactataaatctacagatgaactttaaagsctttaaagaatgagaaagtcaacaaatcgctggtaaatgcagctgcaagtggcagcagactgtcacatcaaaaggctgcagcaatgctctttcctttcatgagccatgctggggcattttcactgttgcttcttcaacacctacagcttgtatgatcagaaagcttgctatggttaagctctcttcttagcgttttgaatttaagatgtctgttacaaaacagctttcacaggctcccaaagcaagtacttcttggaaacagaactcagaagccacagttacaagcaaggatccaggttt

SEQ ID NO: 81438 - DNA, 530 bp, Chicken  19866894374888_1
catggctttggcaaagggactatgaaagaaaagacatctccactagtttctttaaaatagatttctttaatagtttccatttaatatgtttatttgcagttagtaaattggcattcagctgggcagcacacacctcagcgctccgtggggacagtgcagacttccagctgtggtagtgaccgggctcccagctctgtccccatcctcacgcccactgcagcctctgcctggtcccaaggaggagcactgctcatttgtctgccagctgccccaggcagccccacctgtgctgggctccaygccccctgggagcagtgctggccccctacagtccagcacatgctgttgctggagacttccagcctgggcctctgcagccagctcagcctgaaggtggatgcagaaccaagctgcttgcagcaggcagtgcccaaaatgcagggcagagtggaaacggccacactcccacatggggaggaagattcaccagctgggagcacagccaaggacagacagagcctggcccctca

SEQ ID NO: 81439 - DNA, 600 bp, Chicken  19866894374889_1
tgcttcactttgtgtggaagtgttgttatttcactgcagtgttgttatgcatatgaggttaattgcattcctggtagattatctgcaggtgaaaagtccagcccggagatagggtgtcctgggctgggttttattgctgagattatggggaagaagaaacgagcagcagaaagaaggcagtctgggggctctgagctccttgtctgaaaatccagccttaaaacggccaaatttgggcaactgcactgcaccaaaggcaaaccaggtcctgagagagaagtaaaatcaaccaataggagwcaaagtcgttcaaatcacctctagttgttaaaaaatgtgtattttctggaaggtgtaatcagtgcgttgggtatcggaagtgacactgtggggtctgggctcgagcaaagcccccatagccaacactgctatcagtgctatcaggagccaccgaacttatcagggctgcattgtccccattgtgtccattgagttggtcaaaggcggtgggtggaaatctccatccaaatgtgatggcttgggttgagctggcacgtggatcttaacagatagagtcaggtggcaatgacttccagcagg

SEQ ID NO: 81440 - DNA, 600 bp, Chicken  19866894374896_1
tggggcacctgtgtgaaaacattgttgcttttgcattttatccctcgctgctgtttatgcttgttatgtcacaagttgattgctgaagagataatcgtgctgtccaaagtggaggatgcagtacctgggaagtctggtgattggcactccatcagcaccatgagccttagcttgggaaaggagggtgatgcttttcctcttcttatgtatattgaagctctctgaggcaagaagaaagataacattgagaccagaaagcaaatgtggagagaggaccaggggcccaccacacagcagcayrcaccaccctgggctggcatttgttgctgctgaggagctggctgtgtggtgttcggggagccctgccctgctctgctctgctttaacaaagacagaggaatgaggtggatgggatgaggagcaatgtgcctcttgtggacttctttctctttcagacttaggtggtctccacacactgtgccaaagggggaaaaaaaagaggatatctaaggcattttgctggcagatgcttaaatgcctttaggattaggtggggggttgaggatttacattttggatgcaggcatttgaatcggggtt

SEQ ID NO: 81441 - DNA, 600 bp, Chicken  19866894374896_2
ggggcacctgtgtgaaaacattgttgcttttgcattttatccctcgctgctgtttatgcttgttatgtcacaagttgattgctgaagagataatcgtgctgtccaaagtggaggatgcagtacctgggaagtctggtgattggcactccatcagcaccatgagccttagcttgggaaaggagggtgatgcttttcctcttcttatgtatattgaagctctctgaggcaagaagaaagataacattgagaccagaaagcaaatgtggagagaggaccaggggcccaccacacagcagcayrcaccaccctgggctggcatttgttgctgctgaggagctggctgtgtggtgttcggggagccctgccctgctctgctctgctttaacaaagacagaggaatgaggtggatgggatgaggagcaatgtgcctcttgtggacttctttctctttcagacttaggtggtctccacacactgtgccaaagggggaaaaaaaagaggatatctaaggcattttgctggcagatgcttaaatgcctttaggattaggtggggggttgaggatttacattttggatgcaggcatttgaatcggggttt

SEQ ID NO: 81442 - DNA, 600 bp, Chicken  19866894374896_3
tgggatgaggagcaatgtgcctcttgtggacttctttctctttcagacttaggtggtctccacacactgtgccaaagggggaaaaaaaagaggatatctaaggcattttgctggcagatgcttaaatgcctttaggattaggtggggggttgaggatttacattttggatgcaggcatttgaatcggggtttagttatctaagcctccctctagcaaggtgtcagcacatttttcagattctcttctgctaaatgatgtagataaaatcagaaaatgcttctggaaaaagcctcccttcractctgcctcaactcttttatttgtcaatgagttgctgcctctcagataagagcaactattttttttgcagggagtagctgaagcaaaggaatatttcaggtattccttaagtacctcacacttcactttttctctcctgaagcatgcgtccttgattgcttccttaattagtacttttaaagtctctctcgccttccatttataaataaatcaaaatataaatgcagagtgctaatttatcaggcactcgatccgtattcgagagagcaaatttaacacctgaacatgaaagaagtggg

SEQ ID NO: 81443 - DNA, 600 bp, Chicken  19866894374896_4
ctctcagataagagcaactattttttttgcagggagtagctgaagcaaaggaatatttcaggtattccttaagtacctcacacttcactttttctctcctgaagcatgcgtccttgattgcttccttaattagtacttttaaagtctctctcgccttccatttataaataaatcaaaatataaatgcagagtgctaatttatcaggcactcgatccgtattcgagagagcaaatttaacacctgaacatgaaagaagtgggtgcccccagaagctcctaagccgatgactttggtggtgrctgtggagcatccgcaagcttctctcataggcctgcttcattagcaattatccaaggaagccgtgagaaaaatgaattgcctgtgtaattgcatttatttttcatcctagcaagtctcccagttcacttggcagcttcttttcttcgttccctccttccctccttccttgcctccttccatctttccttaattcacgcttgcttgctttttttgttctttcttagccattttgtctgaacaaaagcagtcccacaagggcaggctaatgtattcgtagctttgctgcaacttagctgatg

SEQ ID NO: 81444 - DNA, 600 bp, Chicken  19866894374896_5
ttaagctctaattaagcctgcccatcaaaaaagactcagaaagcaggcttctactgtgcctggtggtaagtcacattttccccctcaattttcttactatgaacatgcaactggtaattgtgggtttgggttttggctctgaacagcacacaagtacttaatgaacttttaccgtagcatttaccttaagggccagcttcaattatacggtggattagaacaaacatcacgtgaaaggatcagctgagctaaggctgcagctaaggtcgtgctggatcatcatactgaagtcaaagaaawtcttctcagcttttcatgcaatgccagaaaatgtgctagaaatctttctgaggagtagcatrgtccagaagagtcaatataacagagatggctgyatggtctttctggaaataggagagaaggtgcaatatcctgagtacttcatccttttcctgayattggagtaggagccaccaatggttacagctagaggaarttctcacctgctaactgtaggttaatgctaagtcacagcccaaagcagtgattgagtgcctggtgagaaggcagggccaatccaggggagctcaggtgcatgca

SEQ ID NO: 81445 - DNA, 600 bp, Chicken  19866894374896_6
gtggtaagtcacattttccccctcaattttcttactatgaacatgcaactggtaattgtgggtttgggttttggctctgaacagcacacaagtacttaatgaacttttaccgtagcatttaccttaagggccagcttcaattatacggtggattagaacaaacatcacgtgaaaggatcagctgagctaaggctgcagctaaggtcgtgctggatcatcatactgaagtcaaagaaawtcttctcagcttttcatgcaatgccagaaaatgtgctagaaatctttctgaggagtagcatrgtccagaagagtcaatataacagagatggctgyatggtctttctggaaataggagagaaggtgcaatatcctgagtacttcatccttttcctgayattggagtaggagccaccaatggttacagctagaggaarttctcacctgctaactgtaggttaatgctaagtcacagcccaaagcagtgattgagtgcctggtgagaaggcagggccaatccaggggagctcaggtgcatgcaatacacctgagtgaccggaaggggtggacccaggatccactccttcccagacctcatttaag

SEQ ID NO: 81446 - DNA, 600 bp, Chicken  19866894374896_7
actatgaacatgcaactggtaattgtgggtttgggttttggctctgaacagcacacaagtacttaatgaacttttaccgtagcatttaccttaagggccagcttcaattatacggtggattagaacaaacatcacgtgaaaggatcagctgagctaaggctgcagctaaggtcgtgctggatcatcatactgaagtcaaagaaawtcttctcagcttttcatgcaatgccagaaaatgtgctagaaatctttctgaggagtagcatrgtccagaagagtcaatataacagagatggctgyatggtctttctggaaataggagagaaggtgcaatatcctgagtacttcatccttttcctgayattggagtaggagccaccaatggttacagctagaggaarttctcacctgctaactgtaggttaatgctaagtcacagcccaaagcagtgattgagtgcctggtgagaaggcagggccaatccaggggagctcaggtgcatgcaatacacctgagtgaccggaaggggtggacccaggatccactccttcccagacctcatttaaggattggcaaggggaggtgagagcattctgctgg

SEQ ID NO: 81447 - DNA, 600 bp, Chicken  19866894374896_8
ttaatgaacttttaccgtagcatttaccttaagggccagcttcaattatacggtggattagaacaaacatcacgtgaaaggatcagctgagctaaggctgcagctaaggtcgtgctggatcatcatactgaagtcaaagaaawtcttctcagcttttcatgcaatgccagaaaatgtgctagaaatctttctgaggagtagcatrgtccagaagagtcaatataacagagatggctgyatggtctttctggaaataggagagaaggtgcaatatcctgagtacttcatccttttcctgayattggagtaggagccaccaatggttacagctagaggaarttctcacctgctaactgtaggttaatgctaagtcacagcccaaagcagtgattgagtgcctggtgagaaggcagggccaatccaggggagctcaggtgcatgcaatacacctgagtgaccggaaggggtggacccaggatccactccttcccagacctcatttaaggattggcaaggggaggtgagagcattctgctggagatccctgcctacctgaggccttccaaaagtaagcagtttttcttcctttgtttttgtgtc

SEQ ID NO: 81448 - DNA, 600 bp, Chicken  19866894374896_9
cttcaattatacggtggattagaacaaacatcacgtgaaaggatcagctgagctaaggctgcagctaaggtcgtgctggatcatcatactgaagtcaaagaaawtcttctcagcttttcatgcaatgccagaaaatgtgctagaaatctttctgaggagtagcatrgtccagaagagtcaatataacagagatggctgyatggtctttctggaaataggagagaaggtgcaatatcctgagtacttcatccttttcctgayattggagtaggagccaccaatggttacagctagaggaarttctcacctgctaactgtaggttaatgctaagtcacagcccaaagcagtgattgagtgcctggtgagaaggcagggccaatccaggggagctcaggtgcatgcaatacacctgagtgaccggaaggggtggacccaggatccactccttcccagacctcatttaaggattggcaaggggaggtgagagcattctgctggagatccctgcctacctgaggccttccaaaagtaagcagtttttcttcctttgtttttgtgtctgtggctgctgcatttgtgcttgttctcatttgctgcag

SEQ ID NO: 81449 - DNA, 600 bp, Chicken  19866894374900_1
ctctcctatccagaaagcaaatactgctattgacctgaatcccaataaactgacattattatgtgccaactagtcatttttatattaagaattagctagtacatgcagaattgattataaaagccaaatgctcttgggatctcctacactgaaaataaaccaaacaagctcccaggaaagctaaacaaactgtacaatgtatttgttactctttcataacgttgtctgaatttcctaaggaactttatttcgtccctaacagaaaaaaaaaacaacaatatagtgctcacccctttagcrgcactgaagatcacttcaacaaaactgcaaatgattgggcaataactccgttccaaatgtacctgtgcaaaatttatttttccatgctcaactggagcttcagtatttctatagattttctatctaataagattttaaaagctacaaagttacctgcaagctttttagtttgtatggatttcttctgaaaaagcatgaattactgtgctggaattccatgactgctcatgcagaaggccagactggatgaccataatagtaggtcttaaaatctatgagtcagttaatgtatgagtctga

SEQ ID NO: 81450 - DNA, 599 bp, Chicken  19866894374903_1
  misc_feature (1)..(15): n is any nucleotide
nnnnnnnnnnnnnnntttttggctatttttgcaagcttactccgctcatggaacatcaccagatactacagacagcccaaatgagcaccaggaagcaggggactgggagaaacctccttcaggcagagcccagcaatggcatctcagagctcgtttgcctgcaaagtgagagcaggtgggtgggaaaagcctatggggaatacaacagcagcagctgccagagtcatcttcgtggtgctcctgaaagggcaccagagggctctcaggagggagtgaagaggaagtggtccttgtctctgryaccaggtactgttctcactggttctctctctgagctctaaaggcaccaaaggctgttacagggcataytgctattgttctgtgtgttttagagtacagcaatgaagaagatccccagaaatgggtgctttgcttgcttatagaaggcccctgcttccctgtgttcgttccwctaaacagggaaattcagctggggtgaatacagaccctgcctgatactgggaggagcrgggtggaacagcagtagggcagctctgtgcatagcagcctcaggcttygtgctgcagaaagctgcttcc

SEQ ID NO: 81451 - DNA, 599 bp, Chicken  19866894374903_2
  misc_feature (1)..(14): n is any nucleotide
nnnnnnnnnnnnnntttttggctatttttgcaagcttactccgctcatggaacatcaccagatactacagacagcccaaatgagcaccaggaagcaggggactgggagaaacctccttcaggcagagcccagcaatggcatctcagagctcgtttgcctgcaaagtgagagcaggtgggtgggaaaagcctatggggaatacaacagcagcagctgccagagtcatcttcgtggtgctcctgaaagggcaccagagggctctcaggagggagtgaagaggaagtggtccttgtctctgryaccaggtactgttctcactggttctctctctgagctctaaaggcaccaaaggctgttacagggcataytgctattgttctgtgtgttttagagtacagcaatgaagaagatccccagaaatgggtgctttgcttgcttatagaaggcccctgcttccctgtgttcgttccwctaaacagggaaattcagctggggtgaatacagaccctgcctgatactgggaggagcrgggtggaacagcagtagggcagctctgtgcatagcagcctcaggcttygtgctgcagaaagctgcttccc

SEQ ID NO: 81452 - DNA, 600 bp, Chicken  19866894374903_3
agacagcccaaatgagcaccaggaagcaggggactgggagaaacctccttcaggcagagcccagcaatggcatctcagagctcgtttgcctgcaaagtgagagcaggtgggtgggaaaagcctatggggaatacaacagcagcagctgccagagtcatcttcgtggtgctcctgaaagggcaccagagggctctcaggagggagtgaagaggaagtggtccttgtctctgryaccaggtactgttctcactggttctctctctgagctctaaaggcaccaaaggctgttacagggcataytgctattgttctgtgtgttttagagtacagcaatgaagaagatccccagaaatgggtgctttgcttgcttatagaaggcccctgcttccctgtgttcgttccwctaaacagggaaattcagctggggtgaatacagaccctgcctgatactgggaggagcrgggtggaacagcagtagggcagctctgtgcatagcagcctcaggcttygtgctgcagaaagctgcttccccaaccccccagacttagcttgtcaccctgtggatcttaccaggttcttgatccacttgtttgcttgtct

SEQ ID NO: 81453 - DNA, 600 bp, Chicken  19866894374903_4
caggtgggtgggaaaagcctatggggaatacaacagcagcagctgccagagtcatcttcgtggtgctcctgaaagggcaccagagggctctcaggagggagtgaagaggaagtggtccttgtctctgryaccaggtactgttctcactggttctctctctgagctctaaaggcaccaaaggctgttacagggcataytgctattgttctgtgtgttttagagtacagcaatgaagaagatccccagaaatgggtgctttgcttgcttatagaaggcccctgcttccctgtgttcgttccwctaaacagggaaattcagctggggtgaatacagaccctgcctgatactgggaggagcrgggtggaacagcagtagggcagctctgtgcatagcagcctcaggcttygtgctgcagaaagctgcttccccaaccccccagacttagcttgtcaccctgtggatcttaccaggttcttgatccacttgtttgcttgtctttgagggtctatgcagtgagtccagcgctgggagaaccgtgttatcaccccgttctccacagacagcgtgtcgtttggtaaaccagcaatctaatagggggaa

SEQ ID NO: 81454 - DNA, 600 bp, Chicken  19866894374903_5
cgtggtgctcctgaaagggcaccagagggctctcaggagggagtgaagaggaagtggtccttgtctctgryaccaggtactgttctcactggttctctctctgagctctaaaggcaccaaaggctgttacagggcataytgctattgttctgtgtgttttagagtacagcaatgaagaagatccccagaaatgggtgctttgcttgcttatagaaggcccctgcttccctgtgttcgttccwctaaacagggaaattcagctggggtgaatacagaccctgcctgatactgggaggagcrgggtggaacagcagtagggcagctctgtgcatagcagcctcaggcttygtgctgcagaaagctgcttccccaaccccccagacttagcttgtcaccctgtggatcttaccaggttcttgatccacttgtttgcttgtctttgagggtctatgcagtgagtccagcgctgggagaaccgtgttatcaccccgttctccacagacagcgtgtcgtttggtaaaccagcaatctaatagggggaaaaagtctgcttatcagccactgggaacatctggaaacgcagcacagctgatctccttg

SEQ ID NO: 81455 - DNA, 600 bp, Chicken  19866894374903_6
aggaagtggtccttgtctctgryaccaggtactgttctcactggttctctctctgagctctaaaggcaccaaaggctgttacagggcataytgctattgttctgtgtgttttagagtacagcaatgaagaagatccccagaaatgggtgctttgcttgcttatagaaggcccctgcttccctgtgttcgttccwctaaacagggaaattcagctggggtgaatacagaccctgcctgatactgggaggagcrgggtggaacagcagtagggcagctctgtgcatagcagcctcaggcttygtgctgcagaaagctgcttccccaaccccccagacttagcttgtcaccctgtggatcttaccaggttcttgatccacttgtttgcttgtctttgagggtctatgcagtgagtccagcgctgggagaaccgtgttatcaccccgttctccacagacagcgtgtcgtttggtaaaccagcaatctaatagggggaaaaagtctgcttatcagccactgggaacatctggaaacgcagcacagctgatctccttgttgcaggatatggcttgtctgttctctctttaatgtgtttgcctgctg

SEQ ID NO: 81456 - DNA, 600 bp, Chicken  19866894374914_1
aactggacaaaagcataaattacatccttatgctcagcagcgttttgttttcgtgggttatgtcaataaaccaattttagaagccgaaagggcaggtggtactgtgtgaactggggaaaaaaaaagggaaaagaagaggaatttttcatacaggccagcatgtttcatacagcaagaagtatggtaggtgttataaccaagacgtcagctctattggcaaatcttagcactggtctaattgtttccataacgatacaggcatgatgtcatcctggctccagcgttaagtctaaatcagcrttaaaccagctaatctcgcaggtgctatctacagaggcaggatttgmctgtgccaaacaaagttaccgatactgtaacatcactaagagatacraaagataaggaggaaaaaagtttatgctggcacaagtgatgaaattccactgaataacatctttgtggtaccagtgctacctaccgtcatagtccagcacaataagcagaaacagaatacgtgcccagctttgttggcacttatataagcaacgtggtagtcctgtaagctagactgaggcatgttcctgtaaagctgtaactccg

SEQ ID NO: 81457 - DNA, 600 bp, Chicken  19866894374914_2
ttttcgtgggttatgtcaataaaccaattttagaagccgaaagggcaggtggtactgtgtgaactggggaaaaaaaaagggaaaagaagaggaatttttcatacaggccagcatgtttcatacagcaagaagtatggtaggtgttataaccaagacgtcagctctattggcaaatcttagcactggtctaattgtttccataacgatacaggcatgatgtcatcctggctccagcgttaagtctaaatcagcrttaaaccagctaatctcgcaggtgctatctacagaggcaggatttgmctgtgccaaacaaagttaccgatactgtaacatcactaagagatacraaagataaggaggaaaaaagtttatgctggcacaagtgatgaaattccactgaataacatctttgtggtaccagtgctacctaccgtcatagtccagcacaataagcagaaacagaatacgtgcccagctttgttggcacttatataagcaacgtggtagtcctgtaagctagactgaggcatgttcctgtaaagctgtaactccgtgggagggatcaaagctggaatgcccataagaatgtattaggcaggg

SEQ ID NO: 81458 - DNA, 600 bp, Chicken  19866894374914_3
ggtggtactgtgtgaactggggaaaaaaaaagggaaaagaagaggaatttttcatacaggccagcatgtttcatacagcaagaagtatggtaggtgttataaccaagacgtcagctctattggcaaatcttagcactggtctaattgtttccataacgatacaggcatgatgtcatcctggctccagcgttaagtctaaatcagcrttaaaccagctaatctcgcaggtgctatctacagaggcaggatttgmctgtgccaaacaaagttaccgatactgtaacatcactaagagatacraaagataaggaggaaaaaagtttatgctggcacaagtgatgaaattccactgaataacatctttgtggtaccagtgctacctaccgtcatagtccagcacaataagcagaaacagaatacgtgcccagctttgttggcacttatataagcaacgtggtagtcctgtaagctagactgaggcatgttcctgtaaagctgtaactccgtgggagggatcaaagctggaatgcccataagaatgtattaggcagggaaaaaaagccttgtggcttgccaatgttttattcaaaccagaataga

SEQ ID NO: 81459 - DNA, 600 bp, Chicken  19866894374925_1
ttatgctctttgctttgcaggtcatttgagggagtttgaggcaatgtctcttgcttccttttgtcaactggagatgtgtgggaggttcttattctctttgctctttgaataattcaaagagattgttctgaaatcataaaaccattagggttggaaaagatctctaaggtcatctagttcaaccatccacctaccaccaatattgcccactaagccatgtccctaaatactacatccatcctttcctttaaaacctccaggaacagtgacccgaccacctctctgggcagcctgtgccartgcttcaccactctttccaaaaagaaattcttcctaatatccaacctgaacctcccccagtacaacttaaggccattcccacttgtcctccttatcaggagttctgatagtaccagtgttatctgcctgcaaagtcattaataattcaaatgtttgcatacttagaacttttcaagggaggaatggtcaatgacattaacatttctttctgtcccttgactattaatggtaaatgtagcacttaaatctgagattgcccacaggacagagtatgtagcaccaaggggaggcatggagatc

SEQ ID NO: 81460 - DNA, 600 bp, Chicken  19866894374936_1
ttattcagtgagaaaacagcctgaaaaacttaaacatcatgaaaggaattattttcatcatctttattaagactcttggaaaaaaacagttgaagttagatgcaccaacttatggaataactgttgttgtctgcactaggtagtgtattaacaatgtattgcccaaatgaggttttgagattggagtgtatttcttaaagttctgagatttattttttttttcattcctcatcaactcttaactgaaaccttcattacattggtagtatccttgtagatactgcatacctgatctgagcytgcttttccaaactcccatctgctcttgacttaaactgaaatgtaaagatactgtctgtctggaaatcatggctgtggagrcaatrtagatgctgaaaattcttatgcaaatggaatataatattagcacacaatctagcagtgctcaaaattatctgatttctcccagctcaaaaatcacaaaatggaagtatacttctttttctcttcttacctagatatcagtcagtaatgtgtcttgttttggtggctttttttcagttggttggtcttttgttttttggggaggaatgaggagcc

SEQ ID NO: 81461 - DNA, 600 bp, Chicken  19866894374936_2
aaaaacagttgaagttagatgcaccaacttatggaataactgttgttgtctgcactaggtagtgtattaacaatgtattgcccaaatgaggttttgagattggagtgtatttcttaaagttctgagatttattttttttttcattcctcatcaactcttaactgaaaccttcattacattggtagtatccttgtagatactgcatacctgatctgagcytgcttttccaaactcccatctgctcttgacttaaactgaaatgtaaagatactgtctgtctggaaatcatggctgtggagrcaatrtagatgctgaaaattcttatgcaaatggaatataatattagcacacaatctagcagtgctcaaaattatctgatttctcccagctcaaaaatcacaaaatggaagtatacttctttttctcttcttacctagatatcagtcagtaatgtgtcttgttttggtggctttttttcagttggttggtcttttgttttttggggaggaatgaggagccaaatctaatctaaattctagattacaacaagagtaaggagacagcagacatcaataatatcaaatatacgatatggcatgc

SEQ ID NO: 81462 - DNA, 600 bp, Chicken  19866894374936_3
cagttgaagttagatgcaccaacttatggaataactgttgttgtctgcactaggtagtgtattaacaatgtattgcccaaatgaggttttgagattggagtgtatttcttaaagttctgagatttattttttttttcattcctcatcaactcttaactgaaaccttcattacattggtagtatccttgtagatactgcatacctgatctgagcytgcttttccaaactcccatctgctcttgacttaaactgaaatgtaaagatactgtctgtctggaaatcatggctgtggagrcaatrtagatgctgaaaattcttatgcaaatggaatataatattagcacacaatctagcagtgctcaaaattatctgatttctcccagctcaaaaatcacaaaatggaagtatacttctttttctcttcttacctagatatcagtcagtaatgtgtcttgttttggtggctttttttcagttggttggtcttttgttttttggggaggaatgaggagccaaatctaatctaaattctagattacaacaagagtaaggagacagcagacatcaataatatcaaatatacgatatggcatgctgaag

SEQ ID NO: 81463 - DNA, 599 bp, Chicken  19866894374937_1
  misc_feature (1)..(63): n is any nucleotide
nnnnnnnnnnnnnnnnnnnnnnnnnnnnnnnnnnnnnnnnnnnnnnnnnnnnnnnnnnnnnnnaatttttaaaaagcctttttttatgtatagcttataatgcaaaacaatgtgtccgaagatgtatgttgcaaaataaataaaataaaaaacgatccagcttgaattcagtattctagacatctacctgtatttgacttacaaaatgtattccgttttcaacataggtcggaacagttaatggatactaacagaagttagttctgcattaagaatactcagttgtcaaaaaaaaaaaammaaacccaaagttaaaactattatttgcaaatgagctcttccttatccatcactaagaaattatgtaccaaccaagaacatggacagcataattaccaaatggccagctggacatgaaataaatatgaggagtcttttcccataacagtacagttgagtaaataattacacagcttaaaccatcattaccctcccttctgamagacaatcttacggcattcattcattcaatatgctttgcaggagaaacccaaaaagtaaacacagcaaaagygtagcgtaagaatgtgtaagaaaac

SEQ ID NO: 81464 - DNA, 599 bp, Chicken  19866894374937_2
  misc_feature (1)..(62): n is any nucleotide
nnnnnnnnnnnnnnnnnnnnnnnnnnnnnnnnnnnnnnnnnnnnnnnnnnnnnnnnnnnnnnaatttttaaaaagcctttttttatgtatagcttataatgcaaaacaatgtgtccgaagatgtatgttgcaaaataaataaaataaaaaacgatccagcttgaattcagtattctagacatctacctgtatttgacttacaaaatgtattccgttttcaacataggtcggaacagttaatggatactaacagaagttagttctgcattaagaatactcagttgtcaaaaaaaaaaaammaaacccaaagttaaaactattatttgcaaatgagctcttccttatccatcactaagaaattatgtaccaaccaagaacatggacagcataattaccaaatggccagctggacatgaaataaatatgaggagtcttttcccataacagtacagttgagtaaataattacacagcttaaaccatcattaccctcccttctgamagacaatcttacggcattcattcattcaatatgctttgcaggagaaacccaaaaagtaaacacagcaaaagygtagcgtaagaatgtgtaagaaaaca

SEQ ID NO: 81465 - DNA, 600 bp, Chicken  19866894374937_3
aaaatgtattccgttttcaacataggtcggaacagttaatggatactaacagaagttagttctgcattaagaatactcagttgtcaaaaaaaaaaaammaaacccaaagttaaaactattatttgcaaatgagctcttccttatccatcactaagaaattatgtaccaaccaagaacatggacagcataattaccaaatggccagctggacatgaaataaatatgaggagtcttttcccataacagtacagttgagtaaataattacacagcttaaaccatcattaccctcccttctgamagacaatcttacggcattcattcattcaatatgctttgcaggagaaacccaaaaagtaaacacagcaaaagygtagcgtaagaatgtgtaagaaaacaaactctgcagccggaacaaagcaagagtcacactccagtatcctgtgtactgtggctgtttcaaaaggaaaagggagtgggatgtatccaaccacactgaacacagggatttaagtggctattaaactatgaaggcaccttgccttggaggagacaaactggttagaactctaaacctggaggaggtcatcaggcaggcact

SEQ ID NO: 81466 - DNA, 600 bp, Chicken  19866894374937_4
atactcagttgtcaaaaaaaaaaaammaaacccaaagttaaaactattatttgcaaatgagctcttccttatccatcactaagaaattatgtaccaaccaagaacatggacagcataattaccaaatggccagctggacatgaaataaatatgaggagtcttttcccataacagtacagttgagtaaataattacacagcttaaaccatcattaccctcccttctgamagacaatcttacggcattcattcattcaatatgctttgcaggagaaacccaaaaagtaaacacagcaaaagygtagcgtaagaatgtgtaagaaaacaaactctgcagccggaacaaagcaagagtcacactccagtatcctgtgtactgtggctgtttcaaaaggaaaagggagtgggatgtatccaaccacactgaacacagggatttaagtggctattaaactatgaaggcaccttgccttggaggagacaaactggttagaactctaaacctggaggaggtcatcaggcaggcactgcaggaagctgtgctggaactgttcaacatattcataagtggtctaaaaagggagatgaccaggatattgct

SEQ ID NO: 81467 - DNA, 600 bp, Chicken  19866894374946_1
atgcagcaaagaagacgtgaaacaacaaagcaggcacattagggatcactctttccaactgaaccaagagactgcccgcaaagcaaatatattttggttaaaaacatctaacgtatgttttattaaatttaagaataatcacattagtacacagggttgtgaatgccccctccatggaagcattcaaggccaggctggatggggctttgagcagcctgatctagagggaggtatccctgcctatagcagagtgttggaactaggtgatcttaaaggttccttccaacccaaaccattctmtgattctatcctttgaaataattgggatatacgcttactatgtaggtcactccaaatataatgcctcctattcatttccatggaaataaagagcacaataacactatttgatcaagcaaattcttggctactaaacactatttttcaacatagtcaccactattagctgtgcatttttaccagcaaccaacaaaagcctgcatgctgtgcctgtaaaaatctccttggctgtctggaacatcgcttgtttttcatgttgttgacatcactgctgaaatgcaccacccattgcctcactgt

SEQ ID NO: 81468 - DNA, 600 bp, Chicken  19866894374952_1
atacctaatgaagaaataacagtttagcagcaggcatttgaagttaaggggcttcctggggatagcattgcaagtggtagatctgaaagtggaactcagatccttggatacccaatactctgtttcaatctgtccaaaactgaggtgctattttcaagaacagatattatagccccgttcaatggttgtttcatttcatcaaaacatttttaaatgcagttttttactgcatttttatcatgattctcacattgggtagagttcagtagccttggccatgtcaaaatcacatactagtcyaagttgactgtccaagtttcctttctattcagtgaaaaggaaaggttgttttcaggaagtggctcctcgtagaccctctgctattgtactggcttgatctgtggtatgcctttccctcctgaatgcaatactgcagaccaaagtcatgaggttacttgagggtactcctgtcacaataagaatttgtcacaaagacttcgtttcagatatttctaatactctgtattctctacagaggcgggttactgttcagtatttaggaagaaagatactagattataaacaattcaaaatatgtaa

SEQ ID NO: 81469 - DNA, 599 bp, Chicken  19866894374954_1
  misc_feature (1)..(41): n is any nucleotide
nnnnnnnnnnnnnnnnnnnnnnnnnnnnnnnnnnnnnnnnnagactgcacctgcaaacctgcagagcactcgtacccctcaccctgggagcaacgtgtgcatccaccctggggagcaaaaacccaattccctaccctcaaatctaagcccagttcacatcccagctttgcgtgctcggtaatttcaacccgtcacggttaccagttcagctctgcagccagtttacacaaagctccagtatcaacatgggatttcatcgagcttttcataaatatattagacaagtgacagcagaatccyctcagctctggggaatgtgaagattagaaggttttgcttttcctttccatttaatgcgtaacatttttcacctgaagagactctcagatcatttgatgactaaaataacttcaccacagttctccctacaatcctattgtgcacttcaaatgatccttagagcagtgctcagacaataggtttcaaccaataatgcggcatcccaaaaaccatctgttaagggagatgacaaactcccctgcctcctctgctgcttcgtaccatctttacttatcgcatgatgaatttcttcagccaac

SEQ ID NO: 81470 - DNA, 584 bp, Chicken  19866894374958_1
ggaccatgatgaatgtattccacagtgtgatctttgttgaaaattggaaaacttgaaaacaacctttgaacgttttgacgtaaaagtatgctgttttctcctctcccttgcttcctctgtctgtgctcccttttgctcttgctattgtgctataactctttagtattccatatctgtcctcgtgtagcaccagctagtcctctaaaatctccctacaagccttcccccacccgaagcacagacaggaagaaggcgacttcaccctccacttctgatgccgggaaaggggtggctgcaggwgaagtgactcaggtcagtttggaatgttcttgattttacttctggataaactgatggggcttcttgttgataccttttcctttctatcactttattttttacaagtatctcttttataagtaacagtaagaaagtaagacttgcgtgcatcagttgcttttccactctggcgttgcaacattttaatatcttcctcctgctgaaagtcaacattaagcaatggtatttagaacagcaacacctttattttcaggggaactgagaagcgcatacttctggactca

SEQ ID NO: 81471 - DNA, 600 bp, Chicken  19866894374962_1
ttttgctacttatatacatggcccaagacaattcctcttcactcaatgcggcccagacaagccaaaaggttggacacccatgttttaaaagcagcactctgtccctgcacgctggtggcctctgacttccccacctttccaccacctggaagcaccagcaaagcagaagtgaaccggtggaaggccttcctgagaatcccaacctgaaatgcttggtttctccatcagcacctactactcctcacctcagcaccagttcccaacagcctctggtaccaaagagtctgtgcaagtgcttgytgcatcaaaccactggttaaatcttattctcacctttaaagggatcttgggggaatatgctgcttctcgctttgccatgagagagagcttcttcatcagccatatcaacgtggctggccggcccttctcttctgtgtcctctccttctccctctccttgagcagaaacatctttctcttcctcatcttcagaagcctcctgctcttccacctcacagccaagttctccttcggcctgttcaccttcctctgagggaggtgctagcaagtaaataaccttggcaacaaacagcaaattctt

SEQ ID NO: 81472 - DNA, 600 bp, Chicken  19866894374962_2
ttggagtgcagttgatggcagaatgcgaaaacaagctccttcacctggtgggacaaaacagggaaggaactgttacatgacaggaagccagcagcagaaccccacagcagcgttgtgcagtcaccaccaaaggtggttctcagggaggccaacgaactggctcagcacaagttctgcctgcatcttgcagtcctgaagggaatctttgtgttgctcagaataagaccccagagaagccccctcccaccagcacagacagctgctcaaatgctttcagtgatcaggattaggcagcggacrgaagtgactaagaaatgtgcacacaaaactactgaagttatttttgtgtcccgggcaggaaacaggtgtgggcacaggggaaggagcwgcacagacataatgacctttctgtccagttcagcagtcaggaagaaygtggatgcagacagctctgctgacggctttttcctcttcactgcctgcctttccctccacttggcgacgaggtcttctggtttatgggatgcaaacagcaagccaaagatctgagtggctgtcagccacacccagctgtgaggatgccacaggtgagactggaca

SEQ ID NO: 81473 - DNA, 600 bp, Chicken  19866894374962_3
cagcagcagaaccccacagcagcgttgtgcagtcaccaccaaaggtggttctcagggaggccaacgaactggctcagcacaagttctgcctgcatcttgcagtcctgaagggaatctttgtgttgctcagaataagaccccagagaagccccctcccaccagcacagacagctgctcaaatgctttcagtgatcaggattaggcagcggacrgaagtgactaagaaatgtgcacacaaaactactgaagttatttttgtgtcccgggcaggaaacaggtgtgggcacaggggaaggagcwgcacagacataatgacctttctgtccagttcagcagtcaggaagaaygtggatgcagacagctctgctgacggctttttcctcttcactgcctgcctttccctccacttggcgacgaggtcttctggtttatgggatgcaaacagcaagccaaagatctgagtggctgtcagccacacccagctgtgaggatgccacaggtgagactggacatgatctaggggagagaaaacctctgtcagtacaggagccggtccggcaagagcagaaaaagcaccccatccctcctagagctaccaca

SEQ ID NO: 81474 - DNA, 600 bp, Chicken  19866894374962_4
gttctcagggaggccaacgaactggctcagcacaagttctgcctgcatcttgcagtcctgaagggaatctttgtgttgctcagaataagaccccagagaagccccctcccaccagcacagacagctgctcaaatgctttcagtgatcaggattaggcagcggacrgaagtgactaagaaatgtgcacacaaaactactgaagttatttttgtgtcccgggcaggaaacaggtgtgggcacaggggaaggagcwgcacagacataatgacctttctgtccagttcagcagtcaggaagaaygtggatgcagacagctctgctgacggctttttcctcttcactgcctgcctttccctccacttggcgacgaggtcttctggtttatgggatgcaaacagcaagccaaagatctgagtggctgtcagccacacccagctgtgaggatgccacaggtgagactggacatgatctaggggagagaaaacctctgtcagtacaggagccggtccggcaagagcagaaaaagcaccccatccctcctagagctaccacagcatacactgcagtaaaatggtgaaggaaacaaactgtgcccmtacr

SEQ ID NO: 81475 - DNA, 600 bp, Chicken  19866894374962_5
gaaygtggatgcagacagctctgctgacggctttttcctcttcactgcctgcctttccctccacttggcgacgaggtcttctggtttatgggatgcaaacagcaagccaaagatctgagtggctgtcagccacacccagctgtgaggatgccacaggtgagactggacatgatctaggggagagaaaacctctgtcagtacaggagccggtccggcaagagcagaaaaagcaccccatccctcctagagctaccacagcatacactgcagtaaaatggtgaaggaaacaaactgtgcccmtacrcttagaacataataaagttgttccyaggatctctgccgagccaaagcaaatccaggacttgccagggttaccttgtctctcactgagggcacctggcaggctgaaggcagaacccagccagaaacactcctgccatcagcaaataaagcaattgaaaacaagtcgacaaaatgacagtaaggcagcctgacactgtagaatctctctcatacggaaatcattggaatcagatgatctctgggccttaccgtgctggcagacacacagtatttacagcgccatttaccacatgtcat

SEQ ID NO: 81476 - DNA, 600 bp, Chicken  19866894374962_6
gtggatgcagacagctctgctgacggctttttcctcttcactgcctgcctttccctccacttggcgacgaggtcttctggtttatgggatgcaaacagcaagccaaagatctgagtggctgtcagccacacccagctgtgaggatgccacaggtgagactggacatgatctaggggagagaaaacctctgtcagtacaggagccggtccggcaagagcagaaaaagcaccccatccctcctagagctaccacagcatacactgcagtaaaatggtgaaggaaacaaactgtgcccmtacrcttagaacataataaagttgttccyaggatctctgccgagccaaagcaaatccaggacttgccagggttaccttgtctctcactgagggcacctggcaggctgaaggcagaacccagccagaaacactcctgccatcagcaaataaagcaattgaaaacaagtcgacaaaatgacagtaaggcagcctgacactgtagaatctctctcatacggaaatcattggaatcagatgatctctgggccttaccgtgctggcagacacacagtatttacagcgccatttaccacatgtcattgct

SEQ ID NO: 81477 - DNA, 600 bp, Chicken  19866894374962_7
gctttttcctcttcactgcctgcctttccctccacttggcgacgaggtcttctggtttatgggatgcaaacagcaagccaaagatctgagtggctgtcagccacacccagctgtgaggatgccacaggtgagactggacatgatctaggggagagaaaacctctgtcagtacaggagccggtccggcaagagcagaaaaagcaccccatccctcctagagctaccacagcatacactgcagtaaaatggtgaaggaaacaaactgtgcccmtacrcttagaacataataaagttgttccyaggatctctgccgagccaaagcaaatccaggacttgccagggttaccttgtctctcactgagggcacctggcaggctgaaggcagaacccagccagaaacactcctgccatcagcaaataaagcaattgaaaacaagtcgacaaaatgacagtaaggcagcctgacactgtagaatctctctcatacggaaatcattggaatcagatgatctctgggccttaccgtgctggcagacacacagtatttacagcgccatttaccacatgtcattgctggctgtgtgcatgatctcatcaggg

SEQ ID NO: 81478 - DNA, 600 bp, Chicken  19866894374963_1
acaaaggctttcccctttactggcaatgacataatttgtgcatttttcaaaggcatttcctcacagttcagatttcccatcttctgaatttagcttcttgtctctttttaaaacgtgtgcatctcaaattacaactccaaagcaatctcgagcagtgcctttccttgcatgtttgtgtaggaaattgtcttgcaggacggagagcagagtgggaaagaatctgcaacttcttccttttgatggaatagataaccttacccttctttacagactttgtatttggtcctcttcaagatacckggttatctccagccaagacgtgctcattstgtacgttgtgccaagtgtttcttgtctccagcacagtgaagcttatgttttggggggaactttttgcttatccaccaatgacaacttgtagctgctgggatgcccctgcagatcccttccctaaggacagacgtgtcgtcccctcctctgcactcactgtacttgacttctgcttccctctagcagaggatctggcctctgcttcctggcctctgtttgttgtttgtttgcattggggttttttttttggcaactttattgcagtacttt

SEQ ID NO: 81479 - DNA, 600 bp, Chicken  19866894374963_2
cataatttgtgcatttttcaaaggcatttcctcacagttcagatttcccatcttctgaatttagcttcttgtctctttttaaaacgtgtgcatctcaaattacaactccaaagcaatctcgagcagtgcctttccttgcatgtttgtgtaggaaattgtcttgcaggacggagagcagagtgggaaagaatctgcaacttcttccttttgatggaatagataaccttacccttctttacagactttgtatttggtcctcttcaagatacckggttatctccagccaagacgtgctcattstgtacgttgtgccaagtgtttcttgtctccagcacagtgaagcttatgttttggggggaactttttgcttatccaccaatgacaacttgtagctgctgggatgcccctgcagatcccttccctaaggacagacgtgtcgtcccctcctctgcactcactgtacttgacttctgcttccctctagcagaggatctggcctctgcttcctggcctctgtttgttgtttgtttgcattggggttttttttttggcaactttattgcagtactttccttgtcctgtcctaagttaatagcgatg

SEQ ID NO: 81480 - DNA, 599 bp, Chicken  19866894374964_1
  misc_feature (1)..(100): n is any nucleotide
nnnnnnnnnnnnnnnnnnnnnnnnnnnnnnnnnnnnnnnnnnnnnnnnnnnnnnnnnnnnnnnnnnnnnnnnnnnnnnnnnnnnnnnnnnnnnnnnnnnnaatgaagtgaatatatttagaggggtttcctcttttatcacagtcttttttagttcttatctcttcagtactcctgcaacttttggaaaatcataggggaacaggaaaattaaagaagagattgattgtaattctaacactcttaaaatggatgttcaagcttgagaaagttttcagacactcagggaaacagaggaagrcaaaagtagaaaccaatacacattcagtgatggagaaagaaaattgagaggtaatacagggaaaaacaaacacctgaacttcatgtttcgttttcaatacttaacactgaatgaaaataaaactttgaagttaaaaatataagtaataattggattttttttttagatactgttgctgtgaacatcagtgtgcatctacagtcatctaagtcacccttgactcaggagtttacttacagttaaacatacattacttgaaggcatgactagggtaggaaccccatgtgccttttgcaaaa

SEQ ID NO: 81481 - DNA, 600 bp, Chicken  19866894374972_1
aatacacaggattttggatgacatttttcgtgggactttgattccaaggatttttacggtatgataggtacatgatccaaactggcatattatggagatatatttgcccccagttgaaaataggtctcaagcaaaggatgataagcaaaactgcatccaacacagaaggaacaagaaattagaaatagctgaaaaacactttaaactcagtcctccagtatgtacagcgctgtattgtgacatttatcaagaaatctcatcaacccaaacttctgatgttcagcagcccatttgaagaaktccacttctgttaggacaaaatttgataggcaagtacagttctagctgcaccagtacaaatggaagaatatctgtatctgtcctgaatttggagttccttgttctataaatatcatacatttgctcacgggtatatgttggaatagctcattaaggttagtgtttcacaaataattaggaaagaactttgtggattacagattagagaaacttgtatattttgctttattgctaaagcattacgcctcttgtatataaaataaataaataaatccttagtagagttttacaaaattgcca

SEQ ID NO: 81482 - DNA, 600 bp, Chicken  19866894374993_1
gtagcatagatgatacagcacattgcatctgaaaaactgttcagtttattataggatattaaattctggccactgcactactggaactgaacttgatggtgtacttgctagacttgccccatcattaggaggatgctattatctgctagcaatatcagtttcattccatgtttctggtgagtgaacaaaaaagcctgcacagtaaaatggcaattctgcagtttatctgaagtcactcattacagcaatgaattgcttggtattacacaattaaggctgtatttaataaagtataatatytaataagacaaaacccagcactaacttaacaaaagtgagtccaaaaaaaaaaaattaggaagtcccagcccactccttataaactgatcattaactccccatcattgtttgaatgtgtggccactgtatattttatttaaacaatgtgccaagtgcaggatgtgctaaaatgcattaccgtcaactgcaacagcttggctggctggctgtgcataaattgtagtaattccagctgcttccttgctccactgtgtatcaaaaacctcacctttacttctgtttgttttaaacgaactaaaa

SEQ ID NO: 81483 - DNA, 599 bp, Chicken  19866894375001_1
  misc_feature (1)..(85): n is any nucleotide
nnnnnnnnnnnnnnnnnnnnnnnnnnnnnnnnnnnnnnnnnnnnnnnnnnnnnnnnnnnnnnnnnnnnnnnnnnnnnnnnnnnnntttacacagggagttctttttcttctgtctctctcctaaagtaatattcatatcaaagtgcgggtttcattttataaagctttgaagttgatccttttgacatttcacattttcatgtcacacttctaattatgaaaaaaatgaaaagtctcactcatcaccatttcatattttctatatgtccttagcagccttttcatttcttttggcaaackcagaaaagagacagagcaggagccttggattcacatgcagtgcaggttctgaacatggccacagctgtgaggcctcacctggcrcactgtgtccagatgtggagtcctcagtacaggagagacacagaccagcaggagagcgtccgaagggaaatggtgtcacaaagaaagagggcagcattacattggagataaggaagaggtttgttacactgaaggcaatgaggccctgcacaggttgcccagagaggcagtggtgccccatcgctgcagacagcccgaggtcaggggatgggctc

SEQ ID NO: 81484 - DNA, 599 bp, Chicken  19866894375001_2
  misc_feature (1)..(1): n is any nucleotide
ntttacacagggagttctttttcttctgtctctctcctaaagtaatattcatatcaaagtgcgggtttcattttataaagctttgaagttgatccttttgacatttcacattttcatgtcacacttctaattatgaaaaaaatgaaaagtctcactcatcaccatttcatattttctatatgtccttagcagccttttcatttcttttggcaaackcagaaaagagacagagcaggagccttggattcacatgcagtgcaggttctgaacatggccacagctgtgaggcctcacctggcrcactgtgtccagatgtggagtcctcagtacaggagagacacagaccagcaggagagcgtccgaagggaaatggtgtcacaaagaaagagggcagcattacattggagataaggaagaggtttgttacactgaaggcaatgaggccctgcacaggttgcccagagaggcagtggtgccccatcgctgcagacagcccgaggtcaggggatgggctctgagcactgatggagctgtgggtgtccctgtgcatggtgaggagtgggaccagggggtcttgaagggccccttccaactcaaac

SEQ ID NO: 81485 - DNA, 600 bp, Chicken  19866894375003_1
cccgaggagggctgtgctgtacacacattcttgtgcttatcaccgtttgtgggtctgcacggctcctgtctgtccccagaacacctttcccatgcagctgggtgcaggcacagtgcagagctgcaccatccctgcgctccccggctgcgctgcctgtgtgctggtcagcagcgggcgatgctctccctgcaggctgtggcaaccaggctgccatgcagggacgctacaaagaggctgtgcaggccttcaccgaggccataaagctgaaccccagggagcaccggtgagcagcgggctgcrgggcctgggcagcttgccctgagcctgcggtggtgaccgtgctgtccccccaggctctttgggaaccggtcgtactgctacgagaagctccagcaataccakgaggcactgagggacgcacagatggccctggagctccagcccaactggcccaaaggcttcttccgcaagggcaaggcgctgtgggggctgaaggtagygtggcaggctgaagggctgcagggctcaacacagccccgtgtcccctcgggcagtggctcagctgctctctgctcccagcgctacgccgaggccagggac

SEQ ID NO: 81486 - DNA, 514 bp, Chicken  19866894375003_2
tgcaggcacagtgcagagctgcaccatccctgcgctccccggctgcgctgcctgtgtgctggtcagcagcgggcgatgctctccctgcaggctgtggcaaccaggctgccatgcagggacgctacaaagaggctgtgcaggccttcaccgaggccataaagctgaaccccagggagcaccggtgagcagcgggctgcrgggcctgggcagcttgccctgagcctgcggtggtgaccgtgctgtccccccaggctctttgggaaccggtcgtactgctacgagaagctccagcaataccakgaggcactgagggacgcacagatggccctggagctccagcccaactggcccaaaggcttcttccgcaagggcaaggcgctgtgggggctgaaggtagygtggcaggctgaagggctgcagggctcaacacagccccgtgtcccctcgggcagtggctcagctgctctctgctcccagcgctacgccgaggccagggacaccttttaagaacctg

SEQ ID NO: 81487 - DNA, 416 bp, Chicken  19866894375003_3
aaccaggctgccatgcagggacgctacaaagaggctgtgcaggccttcaccgaggccataaagctgaaccccagggagcaccggtgagcagcgggctgcrgggcctgggcagcttgccctgagcctgcggtggtgaccgtgctgtccccccaggctctttgggaaccggtcgtactgctacgagaagctccagcaataccakgaggcactgagggacgcacagatggccctggagctccagcccaactggcccaaaggcttcttccgcaagggcaaggcgctgtgggggctgaaggtagygtggcaggctgaagggctgcagggctcaacacagccccgtgtcccctcgggcagtggctcagctgctctctgctcccagcgctacgccgaggccagggacaccttttaagaacctg

SEQ ID NO: 81488 - DNA, 599 bp, Chicken  19866894375004_1
  misc_feature (1)..(12): n is any nucleotide
nnnnnnnnnnnntcgttgctccaaacagcatgattaattcttctctgttaattgattctataaatgttcaatcctatcaactgacagggaagacttctggggcccgatcctaaaagattacagatttctcaaggattaagtattctgaagcatttaggctgtggtagaagtctcatggtttgcacttgaaaggctgaattaaaagtattcactgtcttatggcagtgtgactgcttaactaagcaaatgggtttttcaaaaggttttgaagcagataactgcaaagtagtctaataatgytcacaggtaatgtatataaataagttccaaacttaatcacgtgtcaagaattaaggcacgagaattcaatgtttgtagtcttttaaagcttcacctactgtccttgatgtggactagatagtgttaagggttggggacttacgcagggaattaacacattggttctatcaggtacacctttctaagctttgttcagtgcacttcaagggcttcagtaacctctttgaagcaacttgtaccctggtgcagttacataagggaaagacgaaggtgctgtgctgcttttgagaaatattgtc

SEQ ID NO: 81489 - DNA, 600 bp, Chicken  19866894375004_2
aggtaatgtatataaataagttccaaacttaatcacgtgtcaagaattaaggcacgagaattcaatgtttgtagtcttttaaagcttcacctactgtccttgatgtggactagatagtgttaagggttggggacttacgcagggaattaacacattggttctatcaggtacacctttctaagctttgttcagtgcacttcaagggcttcagtaacctctttgaagcaacttgtaccctggtgcagttacataagggaaagacgaaggtgctgtgctgcttttgagaaatattgtcatgcyaattgagactgaagaatatggagaggacagtggagtgtagacataaatggtcgcaaacttcagatatgcatcttcgtgtgtgtgaagaacttaggcattcttcattattttagtttcgtaccttatcattttgaaaggtgttatctagtgtagctgaggacagtgtcattcctagcatagagaactatcctaaaaactgtttcttgttggctttaaggcttggtgattgtcatggacagagactcccactgttgtttctttcatagcttcagcaagactgaacatctaggcattgttctt

SEQ ID NO: 81490 - DNA, 600 bp, Chicken  19866894375004_3
ctgaagaatatggagaggacagtggagtgtagacataaatggtcgcaaacttcagatatgcatcttcgtgtgtgtgaagaacttaggcattcttcattattttagtttcgtaccttatcattttgaaaggtgttatctagtgtagctgaggacagtgtcattcctagcatagagaactatcctaaaaactgtttcttgttggctttaaggcttggtgattgtcatggacagagactcccactgttgtttctttcatagcttcagcaagactgaacatctaggcattgttcttgaggcagmttggtagatccttttataggaggatggaagataagatttgctgggaattttggatgagatcagtgtcctgactgtccttgctacaaaggaggctacggttgatcactcccagtggtgtggaaatctgttccttrwgcttcagtgtaacatttagtgttaatctgtattagttgttacactgttaatggaactagtaactgagatgttactttgttgaaaacagtcttctcagatggggatgcctttgttataggctcctttttagtagtgacccagtcaataagtgggtttaagctatgt

SEQ ID NO: 81491 - DNA, 600 bp, Chicken  19866894375004_4
atctagtgtagctgaggacagtgtcattcctagcatagagaactatcctaaaaactgtttcttgttggctttaaggcttggtgattgtcatggacagagactcccactgttgtttctttcatagcttcagcaagactgaacatctaggcattgttcttgaggcagmttggtagatccttttataggaggatggaagataagatttgctgggaattttggatgagatcagtgtcctgactgtccttgctacaaaggaggctacggttgatcactcccagtggtgtggaaatctgttccttrwgcttcagtgtaacatttagtgttaatctgtattagttgttacactgttaatggaactagtaactgagatgttactttgttgaaaacagtcttctcagatggggatgcctttgttataggctcctttttagtagtgacccagtcaataagtgggtttaagctatgttatataaactagcatcgatgtccattcagctatttgggtactgcaacttctatctgatacattcatttaaaaaaaaattttttttttagaccttttcttttgagtgttgtctttcattactgattgtttatagt

SEQ ID NO: 81492 - DNA, 600 bp, Chicken  19866894375004_5
tctagtgtagctgaggacagtgtcattcctagcatagagaactatcctaaaaactgtttcttgttggctttaaggcttggtgattgtcatggacagagactcccactgttgtttctttcatagcttcagcaagactgaacatctaggcattgttcttgaggcagmttggtagatccttttataggaggatggaagataagatttgctgggaattttggatgagatcagtgtcctgactgtccttgctacaaaggaggctacggttgatcactcccagtggtgtggaaatctgttccttrwgcttcagtgtaacatttagtgttaatctgtattagttgttacactgttaatggaactagtaactgagatgttactttgttgaaaacagtcttctcagatggggatgcctttgttataggctcctttttagtagtgacccagtcaataagtgggtttaagctatgttatataaactagcatcgatgtccattcagctatttgggtactgcaacttctatctgatacattcatttaaaaaaaaattttttttttagaccttttcttttgagtgttgtctttcattactgattgtttatagtc

SEQ ID NO: 81493 - DNA, 600 bp, Chicken  19866894375010_1
ggctgacaccctttgcatgggatccaatggctgtcctgtgttggaatgctggcaggtacttcagtgagggctgacagcagagattagagtttggagggtccttgtggccttggcaaggtgatctcctaaggtggtcttggcgaaggagcctacagctttttctgtatgcttcagtgaagttatgaacctgccttttctatctgtacttgcggcgtgttcatctgaagataggttatgtgctgctacttcaacacagtgttttatctgctacagatgtgtgcacatcacagtgctctaccygaaggatgaattgcgtgtgcaggtgccattggtgccccagcaccagctagatcagtcrgatgtggcattgccttacatccctaacagaacccttacggagacattcttaaagcacttttttaagctcttcctgaatacattctagaagactaaaaatacgtggcttgtgatattacctctgtctattttgtgtgggaaaacacatggctgtatttttctgctaaatgttgcatattgtatgagttctcttgtctgttcttattagctcttctaaaatgcaaatttgcaattgattctcaa

SEQ ID NO: 81494 - DNA, 600 bp, Chicken  19866894375010_2
cttcagtgagggctgacagcagagattagagtttggagggtccttgtggccttggcaaggtgatctcctaaggtggtcttggcgaaggagcctacagctttttctgtatgcttcagtgaagttatgaacctgccttttctatctgtacttgcggcgtgttcatctgaagataggttatgtgctgctacttcaacacagtgttttatctgctacagatgtgtgcacatcacagtgctctaccygaaggatgaattgcgtgtgcaggtgccattggtgccccagcaccagctagatcagtcrgatgtggcattgccttacatccctaacagaacccttacggagacattcttaaagcacttttttaagctcttcctgaatacattctagaagactaaaaatacgtggcttgtgatattacctctgtctattttgtgtgggaaaacacatggctgtatttttctgctaaatgttgcatattgtatgagttctcttgtctgttcttattagctcttctaaaatgcaaatttgcaattgattctcaagcctcagrtgctgttgaaaacatctagtaggtatggatttatataggtartgttcatc

SEQ ID NO: 81495 - DNA, 600 bp, Chicken  19866894375010_3
aattgcgtgtgcaggtgccattggtgccccagcaccagctagatcagtcrgatgtggcattgccttacatccctaacagaacccttacggagacattcttaaagcacttttttaagctcttcctgaatacattctagaagactaaaaatacgtggcttgtgatattacctctgtctattttgtgtgggaaaacacatggctgtatttttctgctaaatgttgcatattgtatgagttctcttgtctgttcttattagctcttctaaaatgcaaatttgcaattgattctcaagcctcagrtgctgttgaaaacatctagtaggtatggatttatataggtartgttcatcactacttgtagcatatagaagcatagtggaacactgtttttacatgttggacatctgaaacagctttttgctcatcttcatgcctgtactttcacrtcttgcaatttggagagtttgggattaaaatgaagcaagaatttagtacaacataatccatttacacctacttccacagtcctttattacaatggctgactgaattatatgtgggtaggttttatcagtcagcatctttcctttgggatggatg

SEQ ID NO: 81496 - DNA, 600 bp, Chicken  19866894375010_4
atcagtcrgatgtggcattgccttacatccctaacagaacccttacggagacattcttaaagcacttttttaagctcttcctgaatacattctagaagactaaaaatacgtggcttgtgatattacctctgtctattttgtgtgggaaaacacatggctgtatttttctgctaaatgttgcatattgtatgagttctcttgtctgttcttattagctcttctaaaatgcaaatttgcaattgattctcaagcctcagrtgctgttgaaaacatctagtaggtatggatttatataggtartgttcatcactacttgtagcatatagaagcatagtggaacactgtttttacatgttggacatctgaaacagctttttgctcatcttcatgcctgtactttcacrtcttgcaatttggagagtttgggattaaaatgaagcaagaatttagtacaacataatccatttacacctacttccacagtcctttattacaatggctgactgaattatatgtgggtaggttttatcagtcagcatctttcctttgggatggatgttgatgataactttaaataccacttcaaagctttgccaatgt

SEQ ID NO: 81497 - DNA, 578 bp, Chicken  19866894375010_5
aatacgtggcttgtgatattacctctgtctattttgtgtgggaaaacacatggctgtatttttctgctaaatgttgcatattgtatgagttctcttgtctgttcttattagctcttctaaaatgcaaatttgcaattgattctcaagcctcagrtgctgttgaaaacatctagtaggtatggatttatataggtartgttcatcactacttgtagcatatagaagcatagtggaacactgtttttacatgttggacatctgaaacagctttttgctcatcttcatgcctgtactttcacrtcttgcaatttggagagtttgggattaaaatgaagcaagaatttagtacaacataatccatttacacctacttccacagtcctttattacaatggctgactgaattatatgtgggtaggttttatcagtcagcatctttcctttgggatggatgttgatgataactttaaataccacttcaaagctttgccaatgtatgtaatgctttggtagattagttgcacaggtacaaaaagctgggcatgttgcatttttttttaaataatttttttgaaatg

SEQ ID NO: 81498 - DNA, 599 bp, Chicken  19866894375012_1
  misc_feature (1)..(21): n is any nucleotide
nnnnnnnnnnnnnnnnnnnnntaattactgcatgtgtgctccgaggggctttgcgtttggcgcaggatttctgtaggtgggggaagctcaggccctgttcagcagcagcgccctctggctccctgcccagagctttgttcaggttggatattaggaacaatttcttctcagaaagagcggtgatgctgtggtgtagctgcccggcgaagtgatggggtcatcatcactggaggtgtttgagaaccgtggagatgtggcactgtgggtcgtggtcagtgggcacggtgggggtgggctggsgttggatgaccagtgagggtgacggagggtgacttgtgctgtccccaggtgctctgttctgcacctcctgattcacaccactgcctttgcataatgcacataaaaacccaccagcaacaacgcgccaacccgtcagaaactgggcttgtcagcaccagtgcaaggatggattgtttccttcattccagtgagtgccgagcgagtgctgaactccaaatgctttcgcttttgtgttttgtgtcgctggggtgtttgtgctgactcaggacagactgygataataataataagaggtttaa

SEQ ID NO: 81499 - DNA, 573 bp, Chicken  19866894375012_2
tgggcacggtgggggtgggctggsgttggatgaccagtgagggtgacggagggtgacttgtgctgtccccaggtgctctgttctgcacctcctgattcacaccactgcctttgcataatgcacataaaaacccaccagcaacaacgcgccaacccgtcagaaactgggcttgtcagcaccagtgcaaggatggattgtttccttcattccagtgagtgccgagcgagtgctgaactccaaatgctttcgcttttgtgttttgtgtcgctggggtgtttgtgctgactcaggacagactgygataataataataagaggtttaaatacttaatgttaaccattctgctggctgggtgaggacattgtgttttacagaaagctgtggcagggcacagtttgcagagcgctgtggggtgtttttctctttaaatgctaaaggtgggacacttgtttgcatgcttttagcacataaatgcttgttgtgagtggtggcatttgtttctttcacacatctgggctagaggagcagcacggaggcagtaacactcacgtatggggcacacagagctgttt

SEQ ID NO: 81500 - DNA, 600 bp, Chicken  19866894375028_1
cagcattgctctagtttggggctcttgttgctaatgtacccaggaggacttcctgagctgcatctattctgagccctctctgagccgcagctctgaggtgtctcagcaaacacgcgagcacagcgagccctgtgtcagcccccgggatccaaaatagccccgaccccagggatgaaaggagcccacaacacatccacaaagcattgcagtggagcatggggacctggtggccaatgccaccgtcagtgtgctgcttgtggaggtggacgtgccattcacacaggcactcagactgtgccrtcaatggaatcttgttcaggctctgcttcctcggtcctcatttaacatggaagctgctgtgaatttgatacctccagattcagactcattcaattgcggagcacgtagaagggggaagaggagaactcgctgggctggattttcaggtacactcagcccttctcaccaggttttccttctttttgctggctttccttattagagaaagcagagagtttggcacagccctacagccccccaccagcatgtcagcccccagcagccctgtgggtcactgcgggaaataacccacagctgcag

SEQ ID NO: 81501 - DNA, 600 bp, Chicken  19866894375028_2
agacatagcctgagcgtggtgtgcagtgctgtaagcttggagaacactcagccctgttttatggccctgagatgactgtagaacagtgcaaacatccccaggctgcctctatcttgcatggacctgcagctggagctacacagagagggggacagcgaggtgtgaggtacaggctgaggcttcagcccagcaataggcacagcagtgcctgtgggtggctcagactcatctctgacaagtaggttttccatactaataataatcaatctgtgcactgcctgctacctggctgggtggccrctgcctcagctctctgcatgtcagaggagaagagatgcagctatagcaaaggagctcacctggacctctctctgcccatttttgggccctgtagggcgcacacaggacagcgtacactgcagccacacagaatgaagtcctgatagaatgcatgaagtgaaatccaaaccccattaaacaggtcctgggcatcaaattgggctccctcaatggcctcagccatcgcctggctctgctctgtcaagttacactgcacaataaaaccatataggaagagagcaaacggacactgcctgattt

SEQ ID NO: 81502 - DNA, 600 bp, Chicken  19866894375029_1
aaaatgatttctggatacagatgcattacaattattttaatacactgccataaacttgctttaaatgcaaattagatataatttgtttttactgacttttgcttctgccagctgtggttcacttctatacgctgattattatgtcttaaaattaaggacttgcacaaatatgaatggtacattggagaatgtgatcgccatgaagcagaggcagcgctgttggaggagaacactgtgagtacaatttatctttaaactcatggtataaacttttagagaaaacatcctaaaactatccayagtarctcagktttttttgtaaattaaccacataatccatactaactttgatgtataatgcagtttgtatatgttgccaacatatgcacactaccagctagtccactaattgccaamatatacacaccaactaatccactaattaacacatcagacattactgacaaggttaaggacagaagcaaatatcaatattttactttgtaattaactacttgtcataaaaggatccccccaccttgctgttttgcagtcattattaatctccagctttgaaaggcacagmctggagggagcagg

SEQ ID NO: 81503 - DNA, 600 bp, Chicken  19866894375029_2
gatttctggatacagatgcattacaattattttaatacactgccataaacttgctttaaatgcaaattagatataatttgtttttactgacttttgcttctgccagctgtggttcacttctatacgctgattattatgtcttaaaattaaggacttgcacaaatatgaatggtacattggagaatgtgatcgccatgaagcagaggcagcgctgttggaggagaacactgtgagtacaatttatctttaaactcatggtataaacttttagagaaaacatcctaaaactatccayagtarctcagktttttttgtaaattaaccacataatccatactaactttgatgtataatgcagtttgtatatgttgccaacatatgcacactaccagctagtccactaattgccaamatatacacaccaactaatccactaattaacacatcagacattactgacaaggttaaggacagaagcaaatatcaatattttactttgtaattaactacttgtcataaaaggatccccccaccttgctgttttgcagtcattattaatctccagctttgaaaggcacagmctggagggagcagggtgag

SEQ ID NO: 81504 - DNA, 600 bp, Chicken  19866894375029_3
tggatacagatgcattacaattattttaatacactgccataaacttgctttaaatgcaaattagatataatttgtttttactgacttttgcttctgccagctgtggttcacttctatacgctgattattatgtcttaaaattaaggacttgcacaaatatgaatggtacattggagaatgtgatcgccatgaagcagaggcagcgctgttggaggagaacactgtgagtacaatttatctttaaactcatggtataaacttttagagaaaacatcctaaaactatccayagtarctcagktttttttgtaaattaaccacataatccatactaactttgatgtataatgcagtttgtatatgttgccaacatatgcacactaccagctagtccactaattgccaamatatacacaccaactaatccactaattaacacatcagacattactgacaaggttaaggacagaagcaaatatcaatattttactttgtaattaactacttgtcataaaaggatccccccaccttgctgttttgcagtcattattaatctccagctttgaaaggcacagmctggagggagcagggtgagcagaat

SEQ ID NO: 81505 - DNA, 600 bp, Chicken  19866894375029_4
ttcacttctatacgctgattattatgtcttaaaattaaggacttgcacaaatatgaatggtacattggagaatgtgatcgccatgaagcagaggcagcgctgttggaggagaacactgtgagtacaatttatctttaaactcatggtataaacttttagagaaaacatcctaaaactatccayagtarctcagktttttttgtaaattaaccacataatccatactaactttgatgtataatgcagtttgtatatgttgccaacatatgcacactaccagctagtccactaattgccaamatatacacaccaactaatccactaattaacacatcagacattactgacaaggttaaggacagaagcaaatatcaatattttactttgtaattaactacttgtcataaaaggatccccccaccttgctgttttgcagtcattattaatctccagctttgaaaggcacagmctggagggagcagggtgagcagaatgctcctgcaggcagaaggtgcaggkcagagtgctcggcccctaaaggaaggggcctcacctagggcaacatgggtatgataaaagtaattccattggagcttagtg

SEQ ID NO: 81506 - DNA, 600 bp, Chicken  19866894375029_5
ctaaaactatccayagtarctcagktttttttgtaaattaaccacataatccatactaactttgatgtataatgcagtttgtatatgttgccaacatatgcacactaccagctagtccactaattgccaamatatacacaccaactaatccactaattaacacatcagacattactgacaaggttaaggacagaagcaaatatcaatattttactttgtaattaactacttgtcataaaaggatccccccaccttgctgttttgcagtcattattaatctccagctttgaaaggcacagmctggagggagcagggtgagcagaatgctcctgcaggcagaaggtgcaggkcagagtgctcggcccctaaaggaaggggcctcacctagggcaacatgggtatgataaaagtaattccattggagcttagtggtttaaaaagatatagagtatggtcaacakaaggcataaaaccccttcagtctcctaaccacctgagatattgaaatcatacctacagggctgaagcacaggaggcccatttcagctcatcatcttccagtgatccaaactatgatgactggatttatttattccctta

SEQ ID NO: 81507 - DNA, 600 bp, Chicken  19866894375029_6
ccatactaactttgatgtataatgcagtttgtatatgttgccaacatatgcacactaccagctagtccactaattgccaamatatacacaccaactaatccactaattaacacatcagacattactgacaaggttaaggacagaagcaaatatcaatattttactttgtaattaactacttgtcataaaaggatccccccaccttgctgttttgcagtcattattaatctccagctttgaaaggcacagmctggagggagcagggtgagcagaatgctcctgcaggcagaaggtgcaggkcagagtgctcggcccctaaaggaaggggcctcacctagggcaacatgggtatgataaaagtaattccattggagcttagtggtttaaaaagatatagagtatggtcaacakaaggcataaaaccccttcagtctcctaaccacctgagatattgaaatcatacctacagggctgaagcacaggaggcccatttcagctcatcatcttccagtgatccaaactatgatgactggatttatttattcccttacttttaagaggtgaatgcagtgactacttttttttttgagggccccttta

SEQ ID NO: 81508 - DNA, 600 bp, Chicken  19866894375029_7
acatcagacattactgacaaggttaaggacagaagcaaatatcaatattttactttgtaattaactacttgtcataaaaggatccccccaccttgctgttttgcagtcattattaatctccagctttgaaaggcacagmctggagggagcagggtgagcagaatgctcctgcaggcagaaggtgcaggkcagagtgctcggcccctaaaggaaggggcctcacctagggcaacatgggtatgataaaagtaattccattggagcttagtggtttaaaaagatatagagtatggtcaacakaaggcataaaaccccttcagtctcctaaccacctgagatattgaaatcatacctacagggctgaagcacaggaggcccatttcagctcatcatcttccagtgatccaaactatgatgactggatttatttattcccttacttttaagaggtgaatgcagtgactacttttttttttgagggcccctttagcaccaaacctctcagctgcagtcttaggctaggtgtgcgcacccaaggagcaggaagatcatgtaggttaatggccagcaggggcttttgaagggatggagccccacagg

SEQ ID NO: 81509 - DNA, 600 bp, Chicken  19866894375032_1
ctgcctcaaactgaggagcccagaactggacagagtactccaggcatggcctcaccagggcagagcagagggagatcatttccctcaacctgctctctatgctctttttaatgcaccccaggatctcattggctttcttagccacaggggcacactgctgggtcacggccaacctgctatccaccaggatcctctatgttgttctctgcagagcttccagcagatcatcccccatcctgtactgatgcatgcggttattctgccctagatgtagggctctacactttccccttttgaatytcataaggttcctctctgcccgcctctcagcctaccattgtctcactgaatggcagcacagctttctggtgtgtcagccagttctcccagcgagtgtcattctatcccttcacccagtttattgatgaaggtgttgagttattcttcacagaccacatttaacttgtaagcagcaaaatatcagtctgtcatttctatccagtggcaatgcagacgtagcttgaagaatgctggctaataatatcaagtaggattataggactggatggcttgtacatacttgccaatcaatccatatct

SEQ ID NO: 81510 - DNA, 600 bp, Chicken  19866894375032_2
tcattctatcccttcacccagtttattgatgaaggtgttgagttattcttcacagaccacatttaacttgtaagcagcaaaatatcagtctgtcatttctatccagtggcaatgcagacgtagcttgaagaatgctggctaataatatcaagtaggattataggactggatggcttgtacatacttgccaatcaatccatatctctctagatatcccaggctcttttacatggcctctactatccccacctgggaaatgaattgctaatattgcagcagcttcataattctacacatcargctgaaaatacgtaaagtactyattcttggaagcaactgaaagagcattcttttttgtaaatatatggtacaraactgctgctgcaagcattgcaaccattcttttctttaaactgtgacttcttgcatatgacttgaccttactccttgacactggcacgaggcattgagaaataatcttcagaaagtctaaccaaccacataaaatgtacttggacataggtaagccaaagaaaggattcagtctcaaattaggatatgagaagaaagaaataggagcttgagttggacagttatgag

SEQ ID NO: 81511 - DNA, 600 bp, Chicken  19866894375032_3
ttattgatgaaggtgttgagttattcttcacagaccacatttaacttgtaagcagcaaaatatcagtctgtcatttctatccagtggcaatgcagacgtagcttgaagaatgctggctaataatatcaagtaggattataggactggatggcttgtacatacttgccaatcaatccatatctctctagatatcccaggctcttttacatggcctctactatccccacctgggaaatgaattgctaatattgcagcagcttcataattctacacatcargctgaaaatacgtaaagtactyattcttggaagcaactgaaagagcattcttttttgtaaatatatggtacaraactgctgctgcaagcattgcaaccattcttttctttaaactgtgacttcttgcatatgacttgaccttactccttgacactggcacgaggcattgagaaataatcttcagaaagtctaaccaaccacataaaatgtacttggacataggtaagccaaagaaaggattcagtctcaaattaggatatgagaagaaagaaataggagcttgagttggacagttatgagtaatttagtgtccatactcaca

SEQ ID NO: 81512 - DNA, 600 bp, Chicken  19866894375032_4
gcagcaaaatatcagtctgtcatttctatccagtggcaatgcagacgtagcttgaagaatgctggctaataatatcaagtaggattataggactggatggcttgtacatacttgccaatcaatccatatctctctagatatcccaggctcttttacatggcctctactatccccacctgggaaatgaattgctaatattgcagcagcttcataattctacacatcargctgaaaatacgtaaagtactyattcttggaagcaactgaaagagcattcttttttgtaaatatatggtacaraactgctgctgcaagcattgcaaccattcttttctttaaactgtgacttcttgcatatgacttgaccttactccttgacactggcacgaggcattgagaaataatcttcagaaagtctaaccaaccacataaaatgtacttggacataggtaagccaaagaaaggattcagtctcaaattaggatatgagaagaaagaaataggagcttgagttggacagttatgagtaatttagtgtccatactcacatgctgtatccttggaattatatgactgagacagtgctgttaactcattaca

SEQ ID NO: 81513 - DNA, 599 bp, Chicken  19866894375041_1
  misc_feature (1)..(116): n is any nucleotide
nnnnnnnnnnnnnnnnnnnnnnnnnnnnnnnnnnnnnnnnnnnnnnnnnnnnnnnnnnnnnnnnnnnnnnnnnnnnnnnnnnnnnnnnnnnnnnnnnnnnnnnnnnnnnnnnnnnnactaagcttggggaactgctgtatattaggaatcaaaaatcacagcaactgtcaataaaaatacttttccagaagccagattgttcaggataaacttttttggccactatcagaaattttctgtctagttcttactttctttgagcaagtgacccaggaaaactgcccaggtaatgtgatatgrtgctgaagccatctttagtacttcacaaagtagtrtgtagctcatatatgcagaagtgctgtttcaaaaatattagttgatgttacttgcttgctatatcagcctgtgctatcacttcatacttgatttaactsaagatgatgaacgcttcttagtgatcacagttatcctctgtcatacttagtaaggctatgttgcattctttgcagaaattaaatatgagaagtgtcatggccagatgcacaccatcacccagaagctgcatagataactaaataaattaaataattatttctttg

SEQ ID NO: 81514 - DNA, 599 bp, Chicken  19866894375041_2
  misc_feature (1)..(81): n is any nucleotide
nnnnnnnnnnnnnnnnnnnnnnnnnnnnnnnnnnnnnnnnnnnnnnnnnnnnnnnnnnnnnnnnnnnnnnnnnnnnnnnnnactaagcttggggaactgctgtatattaggaatcaaaaatcacagcaactgtcaataaaaatacttttccagaagccagattgttcaggataaacttttttggccactatcagaaattttctgtctagttcttactttctttgagcaagtgacccaggaaaactgcccaggtaatgtgatatgrtgctgaagccatctttagtacttcacaaagtagtrtgtagctcatatatgcagaagtgctgtttcaaaaatattagttgatgttacttgcttgctatatcagcctgtgctatcacttcatacttgatttaactsaagatgatgaacgcttcttagtgatcacagttatcctctgtcatacttagtaaggctatgttgcattctttgcagaaattaaatatgagaagtgtcatggccagatgcacaccatcacccagaagctgcatagataactaaataaattaaataattatttctttgtactcactgctatgggcactgtaacaacagctaag

SEQ ID NO: 81515 - DNA, 600 bp, Chicken  19866894375041_3
ctgtatattaggaatcaaaaatcacagcaactgtcaataaaaatacttttccagaagccagattgttcaggataaacttttttggccactatcagaaattttctgtctagttcttactttctttgagcaagtgacccaggaaaactgcccaggtaatgtgatatgrtgctgaagccatctttagtacttcacaaagtagtrtgtagctcatatatgcagaagtgctgtttcaaaaatattagttgatgttacttgcttgctatatcagcctgtgctatcacttcatacttgatttaactsaagatgatgaacgcttcttagtgatcacagttatcctctgtcatacttagtaaggctatgttgcattctttgcagaaattaaatatgagaagtgtcatggccagatgcacaccatcacccagaagctgcatagataactaaataaattaaataattatttctttgtactcactgctatgggcactgtaacaacagctaagctgcaagcgcaatctggggacagtctccttaatttttcttgttaatggttagcagctcaggctttaaaaagtattttagtgaaaacatatgcctgagaaa

SEQ ID NO: 81516 - DNA, 600 bp, Chicken  19866894375045_1
gacagtggtgtttggtgaccgatggttccatggcaccacagacactgggcagagcactcttcccaacctgatctactggtcagcaaccctcctcatggcaggggttggaactagatgaactttgaggtcccttccaatccaagccattccacgattctatgattccctacccagaaaactccaaacccaaaagctgctttctggcctcctgcttgaggcagcagggagtaccagggcagtgctccgtggcaaagaggcaacgtcaaggcgttcttggtcacgagccagctattaatccgygtattttagcaaaaacacatttatttcttgaggtttgtgcacacaatggaagcagggagcactggggcgggggctgctggggattagcttgctgtaagctgggcaagccaagctcccggcccagggaaagcttaattaaagttgaaggagaagtgtttccaagaaaataatacggggtatttaaatgggatatttttgttctgggcccagaatgtctcctttccctctcggtgttagctttaataaaacaaaatgagatctccaagaaaaacaaattggagctcttttaaaaggcgctgc

SEQ ID NO: 81517 - DNA, 600 bp, Chicken  19866894375051_1
aaacggcgctggctggacccgccgaggggtgctgggggacgggagggggcacgcaggcagcgaaggcacctcggatggtgccgcaaaatggagcccggtgatcccacaaccttcacaaaaggggaccttcagatgttcctgcctacacccacatcaaaaggcagcctctcgaggcggagaaggagggaaaccggggtgctgcgggctgaaaatagcagctctgcccgctctggctttaattacggcgagcagcccttcctcccgctcctcctcttcccagcttggaagaaggcccgcgckcaggcagcagcccaggtgaaagctccatcgcggcagcagggaggggagcagacaatggcggggtgattcattacaaaggcacacggccccgcgcgcagygctgccacatgggctgcgggactccggacagaggcagagctcccctcccgytccccgagatgctggacaccttccccctctcccagccctgatgggaaacagattcggaggaaaacgccagcacggcactgggctgtccaagaaagggagggctttgtgctccgcgcgagccagcagcctcgccatgcaccgcaaggagaa

SEQ ID NO: 81518 - DNA, 600 bp, Chicken  19866894375051_2
gatcccacaaccttcacaaaaggggaccttcagatgttcctgcctacacccacatcaaaaggcagcctctcgaggcggagaaggagggaaaccggggtgctgcgggctgaaaatagcagctctgcccgctctggctttaattacggcgagcagcccttcctcccgctcctcctcttcccagcttggaagaaggcccgcgckcaggcagcagcccaggtgaaagctccatcgcggcagcagggaggggagcagacaatggcggggtgattcattacaaaggcacacggccccgcgcgcagygctgccacatgggctgcgggactccggacagaggcagagctcccctcccgytccccgagatgctggacaccttccccctctcccagccctgatgggaaacagattcggaggaaaacgccagcacggcactgggctgtccaagaaagggagggctttgtgctccgcgcgagccagcagcctcgccatgcaccgcaaggagaaaaagcccttaaacgtggaattcctgtccacccgagagtttctttcatctgcaattagcacatgccgtactgggctccgtttaacactcattttcaccga

SEQ ID NO: 81519 - DNA, 600 bp, Chicken  19866894375051_3
acatcaaaaggcagcctctcgaggcggagaaggagggaaaccggggtgctgcgggctgaaaatagcagctctgcccgctctggctttaattacggcgagcagcccttcctcccgctcctcctcttcccagcttggaagaaggcccgcgckcaggcagcagcccaggtgaaagctccatcgcggcagcagggaggggagcagacaatggcggggtgattcattacaaaggcacacggccccgcgcgcagygctgccacatgggctgcgggactccggacagaggcagagctcccctcccgytccccgagatgctggacaccttccccctctcccagccctgatgggaaacagattcggaggaaaacgccagcacggcactgggctgtccaagaaagggagggctttgtgctccgcgcgagccagcagcctcgccatgcaccgcaaggagaaaaagcccttaaacgtggaattcctgtccacccgagagtttctttcatctgcaattagcacatgccgtactgggctccgtttaacactcattttcaccgatttaggattaaggggggatcagagcagggtactttctgttaatgaatctga

SEQ ID NO: 81520 - DNA, 600 bp, Chicken  19866894375054_1
ggtcaaatggaagaccagctttgtgatgggcaaaagtggacttttttgggcgtagcatatctgcacttgtatcaaatctcagtgtgactacacacttggaaattatgtgtgtctgtagatatcataaatatcacaagaaggaatagaagcccaagctctaattcctggcatcagattcttgtcacacactcctagcacactaaagaaacaggagtacatgggtcatattctcagagaagaaataccaatgcagccactgatggagcaataacactgcatcaatttatgctagctatagartctggactgatgtttatttttatgttgcgatataggttttcatttatgactgagattattttaaaacaaaccactgtcatctcccacacaatcagacaaaaatatcagtaggcgagagaactcacaggacactctcttcccctccttacccgtgtggtataagctgcctcagggtcatcttccaggacacgggacatgccgaagtcagacactttgcagaccaagttgctgttgaccagtatgtttcgagcagctagatcccgatgcacatagctcatgtcagacagatacttcattcct

SEQ ID NO: 81521 - DNA, 599 bp, Chicken  19866894375060_1
  misc_feature (1)..(58): n is any nucleotide
nnnnnnnnnnnnnnnnnnnnnnnnnnnnnnnnnnnnnnnnnnnnnnnnnnnnnnnnnnccccttgctcctcattgcaggcactcattccttttcttggcctatgcagggatgttttccttaactgacagaatgccagcagcacacacttcactgcagttccacagaaaaataatcatcatcttgtagctgcttctagttgttgagactgtctcatgaaggacctgcatgcttttccataggtttccagaacagctctgttttgtgtgcctagatccacgctctaggaaaggatccacacwgtaaagaaagttgcagccaaggaaatcattgtctggcagcaggagttgtgtgcacacaataaccaccttctttaaaaaacaataaaccaattgtacttctttccttcatttcttagtgaacagtgaactwgccttgtgaactacctgaaggcaggtagttcgtcccttgcagggaattccacagctgtagctgatgccagcagagcttttcaaatcrttttctgagcaatctaacatggtgcagctaggcacagtgctatgcatgtctagtatcacgtgtatctttgtttgcacaaacc

SEQ ID NO: 81522 - DNA, 600 bp, Chicken  19866894375060_2
atgccagcagcacacacttcactgcagttccacagaaaaataatcatcatcttgtagctgcttctagttgttgagactgtctcatgaaggacctgcatgcttttccataggtttccagaacagctctgttttgtgtgcctagatccacgctctaggaaaggatccacacwgtaaagaaagttgcagccaaggaaatcattgtctggcagcaggagttgtgtgcacacaataaccaccttctttaaaaaacaataaaccaattgtacttctttccttcatttcttagtgaacagtgaactwgccttgtgaactacctgaaggcaggtagttcgtcccttgcagggaattccacagctgtagctgatgccagcagagcttttcaaatcrttttctgagcaatctaacatggtgcagctaggcacagtgctatgcatgtctagtatcacgtgtatctttgtttgcacaaacccaaggatgtgtctgcactttttttacagagacctcatggataaaaacagacattcaaacagatcctcaccggcatcagctccagtgacgcatcagattagcaatctcatccgcagcaacagccaaacctcc

SEQ ID NO: 81523 - DNA, 600 bp, Chicken  19866894375060_3
aggacctgcatgcttttccataggtttccagaacagctctgttttgtgtgcctagatccacgctctaggaaaggatccacacwgtaaagaaagttgcagccaaggaaatcattgtctggcagcaggagttgtgtgcacacaataaccaccttctttaaaaaacaataaaccaattgtacttctttccttcatttcttagtgaacagtgaactwgccttgtgaactacctgaaggcaggtagttcgtcccttgcagggaattccacagctgtagctgatgccagcagagcttttcaaatcrttttctgagcaatctaacatggtgcagctaggcacagtgctatgcatgtctagtatcacgtgtatctttgtttgcacaaacccaaggatgtgtctgcactttttttacagagacctcatggataaaaacagacattcaaacagatcctcaccggcatcagctccagtgacgcatcagattagcaatctcatccgcagcaacagccaaacctccagtgatcccatcaggcaggtgagcctcgctgagagggaaaggtccaaagagcccgagcgagagcaccctgaccggctgagagagccg

SEQ ID NO: 81524 - DNA, 600 bp, Chicken  19866894375080_1
acttcaggtaactacaaaactcatccttcgaagcagtctaatgagagacattaaaagaagaaaattaattttatccttcagtgaaaattcgactcattttacctaacctcagatttgtaagaaataggtattaattcactggacagaaataggcaccctggcagtgtacgtcccattgcccactgcacttagatgagctgagttgcattggcttcatccactgacctcagagactgcctatgagtgagtttggctagatttagaggtctgagttttgaattgaaggcagaagattcctgmcttcacagtcccacaaacaagggatctggatcaatgaatctcaagagaaaacagttgttactgagaaattctcyacttccccaaaatggtcctgccaactttgaagaagacagaatgagacaacaccaaggcctataacaggcagaatgtgcagggttttttagctttccaccagctacactgaccctgtaacttcaacaggggcaatgctgggctccccactcctgcttatcagattgaggtaggctatcatattccctgtaacctggagaagagaggggaacagcctggagtgcygga

SEQ ID NO: 81525 - DNA, 600 bp, Chicken  19866894375080_2
ccttcagtgaaaattcgactcattttacctaacctcagatttgtaagaaataggtattaattcactggacagaaataggcaccctggcagtgtacgtcccattgcccactgcacttagatgagctgagttgcattggcttcatccactgacctcagagactgcctatgagtgagtttggctagatttagaggtctgagttttgaattgaaggcagaagattcctgmcttcacagtcccacaaacaagggatctggatcaatgaatctcaagagaaaacagttgttactgagaaattctcyacttccccaaaatggtcctgccaactttgaagaagacagaatgagacaacaccaaggcctataacaggcagaatgtgcagggttttttagctttccaccagctacactgaccctgtaacttcaacaggggcaatgctgggctccccactcctgcttatcagattgaggtaggctatcatattccctgtaacctggagaagagaggggaacagcctggagtgcyggagagagaaatttagaggattactccagaacagtctgaagagaggacaggagcggagggagaccttggtgactgct

SEQ ID NO: 81526 - DNA, 600 bp, Chicken  19866894375080_3
tgmcttcacagtcccacaaacaagggatctggatcaatgaatctcaagagaaaacagttgttactgagaaattctcyacttccccaaaatggtcctgccaactttgaagaagacagaatgagacaacaccaaggcctataacaggcagaatgtgcagggttttttagctttccaccagctacactgaccctgtaacttcaacaggggcaatgctgggctccccactcctgcttatcagattgaggtaggctatcatattccctgtaacctggagaagagaggggaacagcctggagtgcyggagagagaaatttagaggattactccagaacagtctgaagagaggacaggagcggagggagaccttggtgactgcttccctcctaacctctgagattttcattcccmcccagccctaccagggatggaagagggaaagcagaccacatggcaacacatgagtttaggttctaatttaaaattacgtatattccttcttattagtgggagaacgtagtaagtttaaaagttatgaactctactagcccagagtattataactggcgtggaacatctccaaaggtgttagacatatacctt

SEQ ID NO: 81527 - DNA, 600 bp, Chicken  19866894375080_4
gaagacagaatgagacaacaccaaggcctataacaggcagaatgtgcagggttttttagctttccaccagctacactgaccctgtaacttcaacaggggcaatgctgggctccccactcctgcttatcagattgaggtaggctatcatattccctgtaacctggagaagagaggggaacagcctggagtgcyggagagagaaatttagaggattactccagaacagtctgaagagaggacaggagcggagggagaccttggtgactgcttccctcctaacctctgagattttcattcccmcccagccctaccagggatggaagagggaaagcagaccacatggcaacacatgagtttaggttctaatttaaaattacgtatattccttcttattagtgggagaacgtagtaagtttaaaagttatgaactctactagcccagagtattataactggcgtggaacatctccaaaggtgttagacatatacctttggtcttgtaacatgcagctctttcaccatttcaatgtaatgtctcttccagattccttgctcaaaaggggttggaatgaagttgatgtaccaaccgaaacgcaggca

SEQ ID NO: 81528 - DNA, 600 bp, Chicken  19866894375085_1
ggatctgatcccagctcttctgatgcaccacacacagatccagcttctggacatcgctgtgggaacacaatgactacaaacttcgcagctccaggaacgattctttgggacaaaaggaatgcacaacagcagacaaacattcctcctgagcttccaggctgaccgcactgcagacacagacacacacacacacaggcaaaatccagcccatacggagttattccagcatgctatgagacaacttgcataagcttcacaggactctgaagtcacaccatgtatctgtcagagatgccataygtttccttcttgagaactggagaattattctgtgagatttcactgcccaaggaaacctctgtctggggcaggaaggggacaaagaccactgctggtcaggcaagaagctgtgaaggcaagcaaggaaggtgcccttcacttcatgcacagctatccagaaaaaagcatagcccagcaatcacttgaactggaaatgaaacgagagaaaccctcttggttgagccaacagccatctcagcaagaagtacttgaagtatcaaagatggggcagaactctccaggcttggattcagcacacat

SEQ ID NO: 81529 - DNA, 599 bp, Chicken  19866894375088_1
  misc_feature (1)..(70): n is any nucleotide
nnnnnnnnnnnnnnnnnnnnnnnnnnnnnnnnnnnnnnnnnnnnnnnnnnnnnnnnnnnnnnnnnnnnnnccccgtaatctcattgctccttatgcctgtaagtgaagcaagatggcatgcctgaaacaggctctacaacacactctccatggctgtacaacacggataaattccccgtgagtgaacaactatcgaattcaactgtacttctgttttcaaagattattcaatattaacatttcaattattcccaaatccgtgtgctgtacctatgggcacagctgtctagagataaaggrtttggaaggacagacaaataagttagttcaactaatgcaagtgcaagacaaactttctgggatgaaatcccttcctcaaagacacatggtttgcatamttccttttctttccaattgcattggttacctcagtaaaagttcttaactgtatctacaaaacagaataaaataaaacatgtaaagctgcattcacctctcctgagctccctgacagaagtgttacgttctgcagtgcactaaaaatacgtatttttartccaacaatttagaagcataaagtccccttccacacaagtgcc

SEQ ID NO: 81530 - DNA, 600 bp, Chicken  19866894375088_2
gtaagtgaagcaagatggcatgcctgaaacaggctctacaacacactctccatggctgtacaacacggataaattccccgtgagtgaacaactatcgaattcaactgtacttctgttttcaaagattattcaatattaacatttcaattattcccaaatccgtgtgctgtacctatgggcacagctgtctagagataaaggrtttggaaggacagacaaataagttagttcaactaatgcaagtgcaagacaaactttctgggatgaaatcccttcctcaaagacacatggtttgcatamttccttttctttccaattgcattggttacctcagtaaaagttcttaactgtatctacaaaacagaataaaataaaacatgtaaagctgcattcacctctcctgagctccctgacagaagtgttacgttctgcagtgcactaaaaatacgtatttttartccaacaatttagaagcataaagtccccttccacacaagtgccagaagctggtgagattctgccggagcactctataaatacgtggtctgtcaaacaggaaaagaaaaaaaaaagaaggaaaaaagctctttttatttaaat

SEQ ID NO: 81531 - DNA, 600 bp, Chicken  19866894375088_3
tccgtgtgctgtacctatgggcacagctgtctagagataaaggrtttggaaggacagacaaataagttagttcaactaatgcaagtgcaagacaaactttctgggatgaaatcccttcctcaaagacacatggtttgcatamttccttttctttccaattgcattggttacctcagtaaaagttcttaactgtatctacaaaacagaataaaataaaacatgtaaagctgcattcacctctcctgagctccctgacagaagtgttacgttctgcagtgcactaaaaatacgtatttttartccaacaatttagaagcataaagtccccttccacacaagtgccagaagctggtgagattctgccggagcactctataaatacgtggtctgtcaaacaggaaaagaaaaaaaaaagaaggaaaaaagctctttttatttaaataagttgcacaatccagcattgcaaacaatgcaacttccttcagagcctgccagacgaggtcccgagtcggaggatctgatttgcgatgacttctcaaatgaaaaatatttgctaagtgcaatgaatatggaaagatttctattcccagtacagcaatg

SEQ ID NO: 81532 - DNA, 600 bp, Chicken  19866894375093_1
gtgcactgcttggtcctggtgctccaacagcagcattagttttctcaggttaaccatcagctcaagtgcattatttttttttaagaagtgctgttctgttagacagtaataatattgactataagaagagcaatatataatagtgattgctctatgctttcctattctattaacgtgccagaaatcaaagcttgcaaagcctgtgggaaagaagccagtgaccattagccttccttttgttttaagcttttataactttaggagtttactttcaggcttgcaacctataagctgcagagytgaggctgaagtaaaatacagaaaagcagcaaatgtgtgacaagtttaaaacaagtcttccaaaatgccctggttgtctttcccctgccctaacaaaaaccaaaactaaacaaaataattatttcaaggcatttgacatttttttcctacttggagaaaatgttggagaaattattttcaaatagatgtgacggagagaatttcagatcttcaggaaaagtcttgtgaaatttccactaactttgcaccacagatgccatctgattttgtaacaaagagaaacctcctgttttcacagtg

SEQ ID NO: 81533 - DNA, 600 bp, Chicken  19866894375095_1
tggaatgtagtaggttacaccagcatgagcatcagtgtttttggtaaagacttgcaaatttgtagagaacaaatggtaatcatcgcttgatgtaaattaaaggagaaagctgagcttcagggactaccattaagcttgcttttaaggtctgatctggcaaaatgctgagtaaccttggctcccgctcaaatcagtggaagttgaatatcttctgcatagagctgaatcagcttgttctgatgatttattgcatttacaatttaaaattttccctgccattttgtcatgatcagatgacaygcggcagtgtctcactgagacatcaagtccagctgtgtatgctcccctgaagctcccaccctgcagtgcctaacaggacgcagttcccactctagtcataaaacatcaggcttatatgtgctcttcttcccttgccagccctgagagcccaagccacttctgtcctcctccctgcgaaggcttttccatgggtggaaactatcagtcctgcactcggctgctgctaccatggtgtctggtacaagcctgctcttggcttttaagtaactttccttcattcccctttggcatcagaaaacg

SEQ ID NO: 81534 - DNA, 600 bp, Chicken  19866894375103_1
tgttcaggcaagaaaactcgaggtagaggaataagaggcagaaagctctttttacagtgtactcatgtctcagtgtctggttgggcagtgatcagctcactgggaggtgtcatatagctgcctcaaaatctcttgttttatttttctttcttttacttattaagaaatccctatcttaacctatgcattttctcacttatcttttcctgttctctccactgtctcattgcagggtggggagtgagcaagtgacaatctgggtgcttagctgctagctagagtcagcctgccactgtgccyttttacttaaaaaacaaaaaactaacaacaacaacaaaagaaaaaacataaaaaaaaacaaaaagaagtttagaatcagacacaattattctttctacatgttacagcaactttctgcttttctcatacttttctagttagacagaagaaaaactgtgaataaacttattttctgttcatgaccaatcacttccaaaatatcttgggctatcttgctctgacttcacacctcgaatttgcctttgtaagcagcctaaactgagacagctgctacatccccctggcccttgcagagctaaa

SEQ ID NO: 81535 - DNA, 505 bp, Chicken  19866894375103_2
acttattttctgttcatgaccaatcacttccaaaatatcttgggctatcttgctctgacttcacacctcgaatttgcctttgtaagcagcctaaactgagacagctgctacatccccctggcccttgcagagctaaaactggggttattctgaaagcacccactgcccccccccccatctgctgacatctatcatgtgacatgtttctcattaggcaacatgaaacacatggcagtgtccatgctggggacagcatactgaaagctgtcagcacttaagctaaatatgctactgggagtragcagggcatagtggggagttttcagccctgctcttgagacacagcaaagatgtattcctacagatgtgtgtaagcacagcaagtatgaaatcaacatctggttcccagacaaaagcattcaatccactgcagatggattcacccaaagcacttcaagtagtgtgctgggtatccagtcctctaaatgactgcgtatgtgaagta

SEQ ID NO: 81536 - DNA, 599 bp, Chicken  19866894375107_1
  misc_feature (1)..(3): n is any nucleotide
nnntttaaaaaagataatcttatcttttaaagagtactttgtcgagaagcttgtgttttcttctgggctattctgcttataggcaaagatgaactgcagctgttttatggaaaatgaaatcgagtttctccctccattaaagaacatactaaaagatcatatgagtgtgacagacttgatggaaagacacatatcttctcggatttgccacactgtaggtacctgtaccccgtacattcatagccacgggcagtctctgctcggaagggatgaacatcactcaggatgaagccggctccmgctgccaccgccaccacctgccagctgttgtgccactctctcctgggctgatcagcaggcgtgccaccctgccccctgcagagagccacgtggacctctccatcccgcgtcagcacttctgcacagctggaagggaagcaggcaacaagaagtaatgtgttagcacagccagaaatcatgtaacacctgcaaggagctgcagcggtgctaggaaggtaggaactctgcaaggctgcagtgaggtgggggtcggcctctgttcccacgtaacagcaacaacacgagaggtgatggcctca

SEQ ID NO: 81537 - DNA, 600 bp, Chicken  19866894375107_2
tgggctgatcagcaggcgtgccaccctgccccctgcagagagccacgtggacctctccatcccgcgtcagcacttctgcacagctggaagggaagcaggcaacaagaagtaatgtgttagcacagccagaaatcatgtaacacctgcaaggagctgcagcggtgctaggaaggtaggaactctgcaaggctgcagtgaggtgggggtcggcctctgttcccacgtaacagcaacaacacgagaggtgatggcctcaagttgcaccacaggaggctcaggttggatattaggaaaaatttmttctccagaagagtggtcgggtactggcacaggctgcccagggggacagggagtcactgtctctataggtgttcaggaaatgtggtatttagggatacagtcagtgggcagcattggtggtaggtgcgtggttctactrtatgatcttaggggtctttttgatccttcacaattctgtgatctcagcagtcagtgagcacaggactaactctgctcaactcacctatggaagaagcgtgcgagcagctctctgttcttcaccaccccagccttcctcccacagtgagggaagttgaaata

SEQ ID NO: 81538 - DNA, 600 bp, Chicken  19866894375107_3
acacctgcaaggagctgcagcggtgctaggaaggtaggaactctgcaaggctgcagtgaggtgggggtcggcctctgttcccacgtaacagcaacaacacgagaggtgatggcctcaagttgcaccacaggaggctcaggttggatattaggaaaaatttmttctccagaagagtggtcgggtactggcacaggctgcccagggggacagggagtcactgtctctataggtgttcaggaaatgtggtatttagggatacagtcagtgggcagcattggtggtaggtgcgtggttctactrtatgatcttaggggtctttttgatccttcacaattctgtgatctcagcagtcagtgagcacaggactaactctgctcaactcacctatggaagaagcgtgcgagcagctctctgttcttcaccaccccagccttcctcccacagtgagggaagttgaaataaatgcagtcaaattctctttttgctggtaaaaaatagtccttcagcttggtgcagtccacagaaaacataacttcagctccttcaaaagtaagcaaacaccaagtctctcattatagagtattttaaataaaggcagca

SEQ ID NO: 81539 - DNA, 600 bp, Chicken  19866894375108_1
gagatctactaagataggcaggagggtgagttgaagactgggatggagccgagtggggacttttagtgctgcaggacatggcagctgtggcagccatagtgactgtctgaggatcaagatagatatctgggatagctcaagaagactggaatgtgtaaagagcccattttcacgatacagtcactgtcagctttccagtccactgggactaatggcaaaactcatctgaacctgaactgcaaacttcaggagccacctgagctgaggccacgggagtcctctggggtagagacaaacctyactttggcttctccttgtctttaaaccgggatcagtcaaccgtggcctatcaactcactgctaaatataacctagctgttgcataaatgcacaatttctttttcttaaatggcacaaactacctattggacttcccggatggaaacttaaacctctaagtgcattataataggaggaactgaattagtctgacagtrcctgctaagcctgggctttaagactaacaactaaaagcaggttacttacttgtttccacagcttcttttgtgattaaacataacagcattttctctttccagc

SEQ ID NO: 81540 - DNA, 600 bp, Chicken  19866894375108_2
gtccactgggactaatggcaaaactcatctgaacctgaactgcaaacttcaggagccacctgagctgaggccacgggagtcctctggggtagagacaaacctyactttggcttctccttgtctttaaaccgggatcagtcaaccgtggcctatcaactcactgctaaatataacctagctgttgcataaatgcacaatttctttttcttaaatggcacaaactacctattggacttcccggatggaaacttaaacctctaagtgcattataataggaggaactgaattagtctgacagtrcctgctaagcctgggctttaagactaacaactaaaagcaggttacttacttgtttccacagcttcttttgtgattaaacataacagcattttctctttccagccttatactctgaaataaaacactgcctgttgcacaagctcagcacaggtttttcttcctggttttccatctcacgtcctctcttccctctccagctgagagccagttcttggcagttcttttgtttcgccatatgtgcaattagctttaactccttgaaaagtagctatcagggagtgcagaagctttgaaatcagc

SEQ ID NO: 81541 - DNA, 599 bp, Chicken  19866894375111_1
  misc_feature (1)..(145): n is any nucleotide
nnnnnnnnnnnnnnnnnnnnnnnnnnnnnnnnnnnnnnnnnnnnnnnnnnnnnnnnnnnnnnnnnnnnnnnnnnnnnnnnnnnnnnnnnnnnnnnnnnnnnnnnnnnnnnnnnnnnnnnnnnnnnnnnnnnnnnnnnnnnnnnnntggatgttctcaagagcttagcaagtctgaacagaacacttcttggcaggaaatgtaagatgacgaaaccttatgttaagtttctaagaggctttctgaataagctgtaacaaattttagtatttcaaataagtaaatagcttttctatgtcctycttaagcctctccccttgtcatattcttactttgggtttctatttgtggaaggttttctgcctctttctccatttcaccacagtttgtttcacaaaagaccagttatgtcaaacargagggtgcatagggaccagagttgtcgtttttcgcttttttttttctctctttgtgattgttctgtgaatgctgtttcctccatttgtgaggaagcactcacatcctactagtctagagaactcaaggagaaacttgttataaaaatagtagtagtacactcttaaacctgttctatagaaaa

SEQ ID NO: 81542 - DNA, 599 bp, Chicken  19866894375111_2
  misc_feature (1)..(29): n is any nucleotide
nnnnnnnnnnnnnnnnnnnnnnnnnnnnntggatgttctcaagagcttagcaagtctgaacagaacacttcttggcaggaaatgtaagatgacgaaaccttatgttaagtttctaagaggctttctgaataagctgtaacaaattttagtatttcaaataagtaaatagcttttctatgtcctycttaagcctctccccttgtcatattcttactttgggtttctatttgtggaaggttttctgcctctttctccatttcaccacagtttgtttcacaaaagaccagttatgtcaaacargagggtgcatagggaccagagttgtcgtttttcgcttttttttttctctctttgtgattgttctgtgaatgctgtttcctccatttgtgaggaagcactcacatcctactagtctagagaactcaaggagaaacttgttataaaaatagtagtagtacactcttaaacctgttctatagaaaaatagggaaaacatctcccttctctctaaattggagaggtgtggatttgaaggatggactgttcgatggattaggaattggctggctggatgcagccaaacggttgtgatcaatggg

SEQ ID NO: 81543 - DNA, 600 bp, Chicken  19866894375111_3
ttagcaagtctgaacagaacacttcttggcaggaaatgtaagatgacgaaaccttatgttaagtttctaagaggctttctgaataagctgtaacaaattttagtatttcaaataagtaaatagcttttctatgtcctycttaagcctctccccttgtcatattcttactttgggtttctatttgtggaaggttttctgcctctttctccatttcaccacagtttgtttcacaaaagaccagttatgtcaaacargagggtgcatagggaccagagttgtcgtttttcgcttttttttttrtctctttgtgattgttctgtgaatgctgtttcctccatttgtgaggaagcactcacatcctactagtctagagaactcaaggagaaacttgttataaaaatagtagtagtacactcttaaacctgttctatagaaaaatagggaaaacatctcccttctctctaaattggagaggtgtggatttgaaggatggactgttcgatggattaggaattggctggctggatgcagccaaacggttgtgatcaatgggttctgtgtcagggtggaggctggtcacaagcggtgttcttcaacatc

SEQ ID NO: 81544 - DNA, 599 bp, Chicken  19866894375112_1
  misc_feature (1)..(65): n is any nucleotide
nnnnnnnnnnnnnnnnnnnnnnnnnnnnnnnnnnnnnnnnnnnnnnnnnnnnnnnnnnnnnnnnntagagaaacttgtagttcataactgctaccaggaggggggaaaactgcatcttatttctgattctatgggtataattgttttgatggtgttgaccaagtatttccatggcagagtgtatattgtcctcagttaggactcatatgtagcttttggtgatatttcagtacaaatctccctgaaggtattagtctcacactaatgtcagaagaatcaggacgacttggggtctggaaygcctctccagtctgaggaagctgggtttgttcagcctggrgaggagaaggctctggagggaccttattgtggcctttcaggacctaaaaaaggggcctacaggaaagctgggrtgagacatttacaagggcgtgtaggaacaggacaagagrtaatggttttaaactaaaagagggcagattgggattagatatagggaagaaattcttggctcttacggttgtaaggcagtggcacaggctgcctggagaagctgtggatgccctatccctggagacattcaaggccaggttggatgg

SEQ ID NO: 81545 - DNA, 599 bp, Chicken  19866894375112_2
  misc_feature (1)..(25): n is any nucleotide
nnnnnnnnnnnnnnnnnnnnnnnnntagagaaacttgtagttcataactgctaccaggaggggggaaaactgcatcttatttctgattctatgggtataattgttttgatggtgttgaccaagtatttccatggcagagtgtatattgtcctcagttaggactcatatgtagcttttggtgatatttcagtacaaatctccctgaaggtattagtctcacactaatgtcagaagaatcaggacgacttggggtctggaaygcctctccagtctgaggaagctgggtttgttcagcctggrgaggagaaggctctggagggaccttattgtggcctttcaggacctaaaaaaggggcctacaggaaagctgggrtgagacatttacaagggcgtgtaggaacaggacaagagrtaatggttttaaactaaaagagggcagattgggattagatatagggaagaaattcttggctcttacggttgtaaggcagtggcacaggctgcctggagaagctgtggatgccctatccctggagacattcaaggccaggttggatggggccctgagcaggctgatccagtggctggcagtgctgccc

SEQ ID NO: 81546 - DNA, 600 bp, Chicken  19866894375112_3
atcttatttctgattctatgggtataattgttttgatggtgttgaccaagtatttccatggcagagtgtatattgtcctcagttaggactcatatgtagcttttggtgatatttcagtacaaatctccctgaaggtattagtctcacactaatgtcagaagaatcaggacgacttggggtctggaaygcctctccagtctgaggaagctgggtttgttcagcctggrgaggagaaggctctggagggaccttattgtggcctttcaggacctaaaaaaggggcctacaggaaagctgggrtgagacatttacaagggcgtgtaggaacaggacaagagrtaatggttttaaactaaaagagggcagattgggattagatatagggaagaaattcttggctcttacggttgtaaggcagtggcacaggctgcctggagaagctgtggatgccctatccctggagacattcaaggccaggttggatggggccctgagcaggctgatccagtggctggcagtgctgcccatggcaaggggttagaactgggtggccctttaagttcccttctgagtcaaaccattgcataatactgactgtac

SEQ ID NO: 81547 - DNA, 600 bp, Chicken  19866894375112_4
tgttgaccaagtatttccatggcagagtgtatattgtcctcagttaggactcatatgtagcttttggtgatatttcagtacaaatctccctgaaggtattagtctcacactaatgtcagaagaatcaggacgacttggggtctggaaygcctctccagtctgaggaagctgggtttgttcagcctggrgaggagaaggctctggagggaccttattgtggcctttcaggacctaaaaaaggggcctacaggaaagctgggrtgagacatttacaagggcgtgtaggaacaggacaagagrtaatggttttaaactaaaagagggcagattgggattagatatagggaagaaattcttggctcttacggttgtaaggcagtggcacaggctgcctggagaagctgtggatgccctatccctggagacattcaaggccaggttggatggggccctgagcaggctgatccagtggctggcagtgctgcccatggcaaggggttagaactgggtggccctttaagttcccttctgagtcaaaccattgcataatactgactgtacatgcattcccctcatcttaatgaagatgcaccagcaaaa

SEQ ID NO: 81548 - DNA, 599 bp, Chicken  19866894375114_1
  misc_feature (1)..(124): n is any nucleotide
nnnnnnnnnnnnnnnnnnnnnnnnnnnnnnnnnnnnnnnnnnnnnnnnnnnnnnnnnnnnnnnnnnnnnnnnnnnnnnnnnnnnnnnnnnnnnnnnnnnnnnnnnnnnnnnnnnnnnnnnnnnnatggcatcagaaaacagcaggcattccagttcccatgatgaggaaagccagctagctgggctcacccacaaaataatcagacaggccagcgctattaatatcctgcaaaataatcagacgggccagtgctttttatatccagcagctttaatagcactggaacatcaaatgtgccyytgccaaggattgatctctgctttccaagctcctaccagctccccaagtcagctgtgagctgctggactcactgcaggtttcctgctaggctcrgggtgaggagtgatgctggtcccacgctcccagctaggctgaaggagcaatggaaggacccagatcctgtctgatggcagaaggtaaaaggaaatttcctgtaagcatctcatctgacttcagcttccctgctctggtgttattatttccatctctgccttaggcaagaggaatagagccaggagtaattatggtgggtcctaat

SEQ ID NO: 81549 - DNA, 599 bp, Chicken  19866894375114_2
  misc_feature (1)..(123): n is any nucleotide
nnnnnnnnnnnnnnnnnnnnnnnnnnnnnnnnnnnnnnnnnnnnnnnnnnnnnnnnnnnnnnnnnnnnnnnnnnnnnnnnnnnnnnnnnnnnnnnnnnnnnnnnnnnnnnnnnnnnnnnnnnnatggcatcagaaaacagcaggcattccagttcccatgatgaggaaagccagctagctgggctcacccacaaaataatcagacaggccagcgctattaatatcctgcaaaataatcagacgggccagtgctttttatatccagcagctttaatagcactggaacatcaaatgtgccyytgccaaggattgatctctgctttccaagctcctaccagctccccaagtcagctgtgagctgctggactcactgcaggtttcctgctaggctcrgggtgaggagtgatgctggtcccacgctcccagctaggctgaaggagcaatggaaggacccagatcctgtctgatggcagaaggtaaaaggaaatttcctgtaagcatctcatctgacttcagcttccctgctctggtgttattatttccatctctgccttaggcaagaggaatagagccaggagtaattatggtgggtcctaatt

SEQ ID NO: 81550 - DNA, 599 bp, Chicken  19866894375114_3
  misc_feature (1)..(30): n is any nucleotide
nnnnnnnnnnnnnnnnnnnnnnnnnnnnnnatggcatcagaaaacagcaggcattccagttcccatgatgaggaaagccagctagctgggctcacccacaaaataatcagacaggccagcgctattaatatcctgcaaaataatcagacgggccagtgctttttatatccagcagctttaatagcactggaacatcaaatgtgccyytgccaaggattgatctctgctttccaagctcctaccagctccccaagtcagctgtgagctgctggactcactgcaggtttcctgctaggctcrgggtgaggagtgatgctggtcccacgctcccagctaggctgaaggagcaatggaaggacccagatcctgtctgatggcagaaggtaaaaggaaatttcctgtaagcatctcatctgacttcagcttccctgctctggtgttattatttccatctctgccttaggcaagaggaatagagccaggagtaattatggtgggtcctaattgcagggtgataaataataatggaaaaggagagcagggagagaattyagctttgctaaaatcacctgtggaaagatgaataagtgaaatcaaaa

SEQ ID NO: 81551 - DNA, 557 bp, Chicken  19866894375114_4
agtcagctgtgagctgctggactcactgcaggtttcctgctaggctcrgggtgaggagtgatgctggtcccacgctcccagctaggctgaaggagcaatggaaggacccagatcctgtctgatggcagaaggtaaaaggaaatttcctgtaagcatctcatctgacttcagcttccctgctctggtgttattatttccatctctgccttaggcaagaggaatagagccaggagtaattatggtgggtcctaattgcagggtgataaataataatggaaaaggagagcagggagagaattyagctttgctaaaatcacctgtggaaagatgaataagtgaaatcaaaatacctcatctgcataacacacttggttcctctcatggcaaccactctcctgggtacaatgccatgtcagtgcccaacrccactgctttaatagtgctttcccttagcaactctgccaggtgacactgaggcagaagaataaggagagcagctgagctcaactacagcagatgggagaaagcccagcagcacagaagagttctgcttgctc

SEQ ID NO: 81552 - DNA, 432 bp, Chicken  19866894375114_5
cagaaggtaaaaggaaatttcctgtaagcatctcatctgacttcagcttccctgctctggtgttattatttccatctctgccttaggcaagaggaatagagccaggagtaattatggtgggtcctaattgcagggtgataaataataatggaaaaggagagcagggagagaattyagctttgctaaaatcacctgtggaaagatgaataagtgaaatcaaaatacctcatctgcataacacacttggttcctctcatggcaaccactctcctgggtacaatgccatgtcagtgcccaacrccactgctttaatagtgctttcccttagcaactctgccaggtgacactgaggcagaagaataaggagagcagctgagctcaactacagcagatgggagaaagcccagcagcacagaagagttctgcttgctc

SEQ ID NO: 81553 - DNA, 600 bp, Chicken  19866894375115_1
tcacaaatatatggacactctgtggctgctctcgttgggtcaagtagaggattgattacttcagatggtcttttgtttctgtacaaactgaggatgagtacacaaaccagggctagtcactgcaggataaatgaattctctaagtagcaataaatctactgccaccaataataaaagcactatttaagaaacttgagcttagaagactccagagaccctaaagtgatgtctcattggtgcagcaaaaagcacatgaatatcttctgagactgtacacattttaacagagagatggttcartgcctacaggtcctccatgaagtgatctccagaaaattttcaaccyrtttttgggagctgaaggacgtcaccaaacaaatgctaaccttaacaaaggtgcgtgaaatgaagaaagtatgacaagtgacacgctaggctgagataggaacaaactcttgcatttcttctaaatctctctagaatcaaaacagactgatgttgaaagcaggaaactcccaaatccagctccacgattggaggaagctggactgtacaacacttctccagatcagtagtatttcatattctctctcttcaatt

SEQ ID NO: 81554 - DNA, 600 bp, Chicken  19866894375115_2
gaggattgattacttcagatggtcttttgtttctgtacaaactgaggatgagtacacaaaccagggctagtcactgcaggataaatgaattctctaagtagcaataaatctactgccaccaataataaaagcactatttaagaaacttgagcttagaagactccagagaccctaaagtgatgtctcattggtgcagcaaaaagcacatgaatatcttctgagactgtacacattttaacagagagatggttcartgcctacaggtcctccatgaagtgatctccagaaaattttcaaccyrtttttgggagctgaaggacgtcaccaaacaaatgctaaccttaacaaaggtgcgtgaaatgaagaaagtatgacaagtgacacgctaggctgagataggaacaaactcttgcatttcttctaaatctctctagaatcaaaacagactgatgttgaaagcaggaaactcccaaatccagctccacgattggaggaagctggactgtacaacacttctccagatcagtagtatttcatattctctctcttcaattcagggtgaggaggaaagagttgggataaaccattatatattccaat

SEQ ID NO: 81555 - DNA, 600 bp, Chicken  19866894375115_3
aggattgattacttcagatggtcttttgtttctgtacaaactgaggatgagtacacaaaccagggctagtcactgcaggataaatgaattctctaagtagcaataaatctactgccaccaataataaaagcactatttaagaaacttgagcttagaagactccagagaccctaaagtgatgtctcattggtgcagcaaaaagcacatgaatatcttctgagactgtacacattttaacagagagatggttcartgcctacaggtcctccatgaagtgatctccagaaaattttcaaccyrtttttgggagctgaaggacgtcaccaaacaaatgctaaccttaacaaaggtgcgtgaaatgaagaaagtatgacaagtgacacgctaggctgagataggaacaaactcttgcatttcttctaaatctctctagaatcaaaacagactgatgttgaaagcaggaaactcccaaatccagctccacgattggaggaagctggactgtacaacacttctccagatcagtagtatttcatattctctctcttcaattcagggtgaggaggaaagagttgggataaaccattatatattccaatg

SEQ ID NO: 81556 - DNA, 599 bp, Chicken  19866894375119_1
  misc_feature (1)..(69): n is any nucleotide
nnnnnnnnnnnnnnnnnnnnnnnnnnnnnnnnnnnnnnnnnnnnnnnnnnnnnnnnnnnnnnnnnnnnncagagacagccccttcctaagaaggaaaactgagaagtgcctttccagtaaatcgaggaaaacaatttcatatttccaaaaggcactgaaatttgtccattgtaaacattggttttgcaaaaggacactttccctcagaaagctctccaaaggactctgctcagctctactcattatcaccctcttcccttccttccacattttatatagcactccatgttatcttgcacraatttgtcgtgtttctcccaaaatagtattatatttagagaggttacaaggaggcactaataaaattctggttatttaaagagcagaggataaatgtgacacacacactcccctaaatagaaagcagctggaggaatactaacaatgtcagtgttatgcgtaaactctgtttccccatagaaaactatggaaacagaaaaagaacccagaaaaattcactttgctcaagctgagacttattgctgctggttctgggtatagctgctgcaagagacagattgcttcatgtttccaagctt

SEQ ID NO: 81557 - DNA, 599 bp, Chicken  19866894375122_1
  misc_feature (1)..(81): n is any nucleotide
nnnnnnnnnnnnnnnnnnnnnnnnnnnnnnnnnnnnnnnnnnnnnnnnnnnnnnnnnnnnnnnnnnnnnnnnnnnnnnnnngaacttctagtgtttgtgtgtaacgtgtgcttttgggctgaagcatatgcttaggaattcttttcctgccctatcagtctttgcatttgtctaaaagcttcagctcttttacaagttgtgtgctgtgcacatgttttttcttctgttaagcatcaggtgtgttaaatgatttaaaatgtgcagtcacttatctaatcaggtgtactatttggaaaacayrtttccaaagtacttgcagctagctgttggatatcaatcactttgtattacgcagtgaatgcttttgattaaattcatcaaatcagcaatctaaaatgcatgtcgggagagttctgttaccttgtgcccatgtttgcacattgtttctaactatgcatttgaagactgtttccttcagtaactgaatttgtttactatcgacgttgggttcatcaaaaccaataggagttgtatgaagagtttgaagcttgaacctggtgttgcatctgctttgatttgccaggttgtccttcaaagct

SEQ ID NO: 81558 - DNA, 599 bp, Chicken  19866894375122_2
  misc_feature (1)..(80): n is any nucleotide
nnnnnnnnnnnnnnnnnnnnnnnnnnnnnnnnnnnnnnnnnnnnnnnnnnnnnnnnnnnnnnnnnnnnnnnnnnnnnnnngaacttctagtgtttgtgtgtaacgtgtgcttttgggctgaagcatatgcttaggaattcttttcctgccctatcagtctttgcatttgtctaaaagcttcagctcttttacaagttgtgtgctgtgcacatgttttttcttctgttaagcatcaggtgtgttaaatgatttaaaatgtgcagtcacttatctaatcaggtgtactatttggaaaacayrtttccaaagtacttgcagctagctgttggatatcaatcactttgtattacgcagtgaatgcttttgattaaattcatcaaatcagcaatctaaaatgcatgtcgggagagttctgttaccttgtgcccatgtttgcacattgtttctaactatgcatttgaagactgtttccttcagtaactgaatttgtttactatcgacgttgggttcatcaaaaccaataggagttgtatgaagagtttgaagcttgaacctggtgttgcatctgctttgatttgccaggttgtccttcaaagctc

SEQ ID NO: 81559 - DNA, 600 bp, Chicken  19866894375126_1
aagatgggaagttatatgaagttaaacccaatgctctattccttttcaggtatgactttaaaacaaatcacatcaggagggaattggtggcagcagctcattcaattaggaagaaacaattaaaggacagagagaggatgcccgaaggatcaggcagggaatgactcagcccatgttctcagatgaaatcatgtcaagaagtctttggcatctgaagttacggacaggcccacgagttttccttccatcaaatatgacactacatttaaaagacaagttttgttttttttgcaactggtraccagcaaaacgaagggggaaaatggtccattttcacasaagatgaactatttcacacccctgacatggctcaaaatgctaatctttaactttcctccttaaaatctcagctcaataccaatgcccaaagtcatcggttatgactcagcaatcagtgcatctaaatccaaaacggtttaactttgcattccacctggtttctccttttcctcagttttccattacttcattcttcatatattttccttcccatgattattgcacaaaaaccctatcactcatcccaggcttccatttctg

SEQ ID NO: 81560 - DNA, 600 bp, Chicken  19866894375126_2
tccttttcaggtatgactttaaaacaaatcacatcaggagggaattggtggcagcagctcattcaattaggaagaaacaattaaaggacagagagaggatgcccgaaggatcaggcagggaatgactcagcccatgttctcagatgaaatcatgtcaagaagtctttggcatctgaagttacggacaggcccacgagttttccttccatcaaatatgacactacatttaaaagacaagttttgttttttttgcaactggtraccagcaaaacgaagggggaaaatggtccattttcacasaagatgaactatttcacacccctgacatggctcaaaatgctaatctttaactttcctccttaaaatctcagctcaataccaatgcccaaagtcatcggttatgactcagcaatcagtgcatctaaatccaaaacggtttaactttgcattccacctggtttctccttttcctcagttttccattacttcattcttcatatattttccttcccatgattattgcacaaaaaccctatcactcatcccaggcttccatttctgttttctttcaaaacatttaaactttctccaacctgttca

SEQ ID NO: 81561 - DNA, 600 bp, Chicken  19866894375127_1
tcaatccaatagactttatatagacctaaaacccaccttggtggcttagctggtggacaaggtctttgtatgcgtactcaaagagcaagacaaggttatcaacaaggcttcagaaattgctgaggtttcttttggcataaccttgtatgttatagtagtaacaaaatactcagtgcatagccatgcattttgcagtactggcccagggtgtagttgtttttgtcacttagtgtcattcatttaatgtaaatactatacacttatgtaagaatatgttttaattgtatagaaaaagacggraaatattaagttataacatgcctaaggagctaaaaactgtaatgcacatacattgcagaaataaaaacttttttttcttgttattgtcccagatattacccctttggtggaatcaactagactaataagtacattgtgtgtaaatgcagtattaaaatatggtgtgactatttaaatgtacagtcatagagcgtccataccaatagaaagaagaacttaaatcacactaattatctygatatctgctggtcttagcagaaagagaaagcagcaaaggagtgtgtacaaactactttgtca

SEQ ID NO: 81562 - DNA, 589 bp, Chicken  19866894375127_2
catttaatgtaaatactatacacttatgtaagaatatgttttaattgtatagaaaaagacggraaatattaagttataacatgcctaaggagctaaaaactgtaatgcacatacattgcagaaataaaaacttttttttcttgttattgtcccagatattacccctttggtggaatcaactagactaataagtacattgtgtgtaaatgcagtattaaaatatggtgtgactatttaaatgtacagtcatagagcgtccataccaatagaaagaagaacttaaatcacactaattatctygatatctgctggtcttagcagaaagagaaagcagcaaaggagtgtgtacaaactactttgtcagctataggcattcacccctacaagtagacataaagtgcataggtagaatgagaacatgacacttctgtagttgcctgcaccatggactagataacaggtgctctcaatcactgcatatctgttcagtgtctttctaaggacactattttcaaaaccctgtctgaaagaaaagcccaaattccaggagtctttttaacagtaacccagtgatctgaagcacacattt

SEQ ID NO: 81563 - DNA, 600 bp, Chicken  19866894375145_1
accatctgacatcatgagtcaatgtaatacaataggaggcattacttttggagcagcccccttaattctttatgtattatgatgtcaatttggtgaaagatgaggatttaacgtaagagttttaaagtattttataggacacagtgatttaaaagggatgatttggtgttgaagataagaatctcagaatacagcccatactctctgaagtgtagtagagtaagtatagaggcagggaaagccaaatgtgggatttttgtttcatggtaaatattgagatgtcctaattgtcttctgccrtaagctgggtcgcaatgttgaagtgctgacatttttaattgtgtttgtagaatatatttatttccaaattgtaacgttattgattatatattctttataaagcaattagatttttagaaagtgattgacttggcaaataacactgatctaacatcatgccgtagaagctctgcactactacatctggatttcaagtggttctccaggagggtggaggacttcagccatgcttgctatcccagtattcatctcttacacaccttacagaatataaaatggcattaggtgcattttattata

SEQ ID NO: 81564 - DNA, 600 bp, Chicken  19866894375156_1
aaaagacatggaaaaggttgaggtgctcaagtgaaatctagtggttaaaaaaaacacacacagtcattttgatatgacataatgagtatactgcactttacttaaaaagatctgtaaatatttctttcagatattcagacacagaagttatctaaagacaatgaaagagtagtagtgagggctcaaaaaggacaaaattaaatatcaggttaagaggaaagtgccctcaagtattaaatctactgaaaaggttattcattattcttcattgcactgaagtagccaaatcattccataaastaaggttccttttgtttttaaataaggaaattcagtgatgtttatctttaagaaaaaatgtctaaaaatatctcaaatacactaaagaacagccaaaaccagatgcactttataacgaaggaccaggaaaagatcttatcaggcaggagatgttgcgcatacaagaactggtgttaagacttgtaaatcattgaactgcatcccgtcaggctccaaagactggcaacacagcacagggcagaagtacaaacaaatctgggagacttgatgaaatcccactatgcttttagtgaagtcaca

SEQ ID NO: 81565 - DNA, 599 bp, Chicken  19866894375168_1
  misc_feature (1)..(140): n is any nucleotide
nnnnnnnnnnnnnnnnnnnnnnnnnnnnnnnnnnnnnnnnnnnnnnnnnnnnnnnnnnnnnnnnnnnnnnnnnnnnnnnnnnnnnnnnnnnnnnnnnnnnnnnnnnnnnnnnnnnnnnnnnnnnnnnnnnnnnnnnnnnngtgtggagaaaagagagaggagagtatggaaaaaaaaaaatacagtaggagaggaagacagcagagaggagaagttagaagagccaaaagagggaagggagggaaggggtatcagggaggggattccaaaggtaggaaggaagagaaatgaagacagaarttcaccagaagaagagcagaagatgcttatctatttccaagcaggacaccatcagtccaatattgtcctctgtatccacaccctaaaaagcaaaacagccatggacagcaaactacaaagcctttggagcaatcaaacaaagctcgcagacatccacagtcagtgacatgctgtgagctgatgtctctgggcccagtgcacagcagcattttcttcagtgctttcatgcctcctgacagcaaacctctgctgccaaagcatccttcggccaaggaaactgtgccatgaagcacagtgct

SEQ ID NO: 81566 - DNA, 600 bp, Chicken  19866894375186_1
aaaaaagtatttttgttacttaaaacatcataatcgtgcattttctagggatgctgaaaggacatcttaacatttttgtccaagacctgttctctagtttgttttgcttagcagtattatgacaaaaagatcaaatgcaaaagtagagcaagtaaaaaatctctcttaagttttcaggaaattgaggacatgttcttttgtgggtcactttacctaggtgtattccttgtgtttcccttaccatgagcacatgtacccacaaccttttcttttaaacgtactctagcaaagttttccttwatgtagcttgcagcaagcagtcacatgaaatgtagtcatctgattgctctcttcttgttcccacatcctgtataaaggctaaaatttatacacacattcacatccattttcttcttccagacggactagtggagcatttctttaaagactctctcaagcagacaggtgatgctcagccagctggtttctcactcctttttttggcctctctggattgctatttttaaaaagcattttactaacctttctgattgtatttctgcttatggatgtgctgcagccctgctccacgcattcatg

SEQ ID NO: 81567 - DNA, 599 bp, Chicken  19866894375187_1
  misc_feature (1)..(63): n is any nucleotide
nnnnnnnnnnnnnnnnnnnnnnnnnnnnnnnnnnnnnnnnnnnnnnnnnnnnnnnnnnnnnnnttctacttcaacaagttcctttcaccacgtaggacaagttgcaaaaaaaaaaaaaaaaaaaaaaaaaagccatatctgaaaacctaatttatctaagatggtgtttcttaaagttagacccagaaatctgctgtcagctccttgaatgggggatcagtttttcagatgttctgcatgtccttaattctcttttaaaacacctgttcttaaaagttttgggtcaaggctttttccccyagtgaattacagacagtccttggcaaggactaaatcagctttattcacctccatcagaaggggggatgccagttkccatgcttctattccaagttacagggcagctgaggggacactctcttttttttttctataccaccaggtactgggatttatgatcacacaaaaaaactctgattatatttttaaaatcaaagttttaagctttatgagtccaggggattgcagtgcatgtgggagaatcaaggactgaaacaaacaaacaaatactcttctattaaattttgagggcttttttt

SEQ ID NO: 81568 - DNA, 532 bp, Chicken  19866894375187_2
ttctacttcaacaagttcctttcaccacgtaggacaagttgcaaaaaaaaaaaaaaaaaaaaaaaaaagccatatctgaaaacctaatttatctaagatggtgtttcttaaagttagacccagaaatctgctgtcagctccttgaatgggggatcagtttttcagatgttctgcatgtccttaattctcttttaaaacacctgttcttaaaagttttgggtcaaggctttttccccyagtgaattacagacagtccttggcaaggactaaatcagctttattcacctccatcagaagggkccatgcttctattccaagttacagggcagctgaggggacactctcttttttttttctataccaccaggtactgggatttatgatcacacaaaaaaactctgattatatttttaaaatcaaagttttaagctttatgagtccaggggattgcagtgcatgtgggagaatcaaggactgaaacaaacaaacaaatactcttctattaaattttgagggctttttttttttttca

SEQ ID NO: 81569 - DNA, 600 bp, Chicken  19866894375190_1
ttcataaaaagaagatatacaattaaagaaaagtcataatatctattcttaaagtctgcatttcttcttcttgtagaaaaaatgcacttcttaaaagttcataatttgcactcatcctctgagtccaatgtgaaaaaaatgattctagatacagataatcacagtcaatgattaagactgtctgctgtgttactaggcttctctagtgaggaaaatcaccatggctgctccaaaagtaataccttctattttacaatgttggtccacaacatcagaggcagatgctggtcgtatggcagyagaggttgaaccttcccaccaatatcccgttacattttgttgccatgtgacagatggcagcagagtggcactctgacaaaatggtgtctgacatggaagtgcagatgaagcaaaggtgtgccaccaaattgctctgygtggaaaaaattgcacccactgacattttatggatgcttgctgaacatttatggagaccaaacattggatgtgagcatagggaggtggtgagtggtgtgtttcagcaatggtgacagcgatgtgaaaaacaagccgcattccacagtgtcatgcaggttttta

SEQ ID NO: 81570 - DNA, 600 bp, Chicken  19866894375190_2
aatgattctagatacagataatcacagtcaatgattaagactgtctgctgtgttactaggcttctctagtgaggaaaatcaccatggctgctccaaaagtaataccttctattttacaatgttggtccacaacatcagaggcagatgctggtcgtatggcagyagaggttgaaccttcccaccaatatcccgttacattttgttgccatgtgacagatggcagcagagtggcactctgacaaaatggtgtctgacatggaagtgcagatgaagcaaaggtgtgccaccaaattgctctgygtggaaaaaattgcacccactgacattttatggatgcttgctgaacatttatggagaccaaacattggatgtgagcatagggaggtggtgagtggtgtgtttcagcaatggtgacagcgatgtgaaaaacaagccgcattccacagtgtcatgcaggtttttatgagcacagcatgcaggcctttgctggtgaaaatgtataggtaatggtggtgagtatgttgaaaaacagtgttctgcagctcagagtttgctctatcagatggcactattatgccctttgtatctgttgtagtttcc

SEQ ID NO: 81571 - DNA, 599 bp, Chicken  19866894375193_1
  misc_feature (1)..(127): n is any nucleotide
nnnnnnnnnnnnnnnnnnnnnnnnnnnnnnnnnnnnnnnnnnnnnnnnnnnnnnnnnnnnnnnnnnnnnnnnnnnnnnnnnnnnnnnnnnnnnnnnnnnnnnnnnnnnnnnnnnnnnnnnnnnnnnntagaaacatatgaagtgttaactgacaatataaattatattggcgtatgcttaagacattttaaaatgggcaaaaaatcattttttttcaatttacggatgtatatagatatgaattgcattcattcatagcatattttaatgacctttcttaccacattttatcaagatacrcattctcatacaacatctcctgtacttcgtgtcttcagaaagagacgctattgcatttttgctggcagaaaaacaaccattactctcttgtggaaaagtggcttcattcccaattctaatttcagagtggaactgattatgactgggttatgaacccacatcctatagagagccaataaaaacacaaataggaaaaaagtttttataaagaactttataataatatttttaatagaattttgctggcattttgyagttttgctagaatgtttacaactgtacaaatcttggaaacctaa

SEQ ID NO: 81572 - DNA, 600 bp, Chicken  19866894375193_2
atagcatattttaatgacctttcttaccacattttatcaagatacrcattctcatacaacatctcctgtacttcgtgtcttcagaaagagacgctattgcatttttgctggcagaaaaacaaccattactctcttgtggaaaagtggcttcattcccaattctaatttcagagtggaactgattatgactgggttatgaacccacatcctatagagagccaataaaaacacaaataggaaaaaagtttttataaagaactttataataatatttttaatagaattttgctggcattttgyagttttgctagaatgtttacaactgtacaaatcttggaaacctaaaagggttgcagacttaaacttcttgcacattttctgctcatgagagatttggcatttacataagtttttcagacactgttattacccttcaaaaatcatcagtatctaggaaataattcctgataaaacaacgtacgctctttcattgatttgttttcttcagtatgcgtaaaatgctgctagccagcttgttaaaatgccaatactctgttataaaaatggatgagggaagtatacgcagaatgaaaaaggaat

SEQ ID NO: 81573 - DNA, 600 bp, Chicken  19866894375200_1
attgaagtcatgagctatgaagtcacaactaaggtcaaaaagagcatattgtcacaatgacacggccttaacagaatttgaggagccatgggattgacccaatagaagaatgtaattgttgccatagaaaattgaagaaatacattctgttacagttttcctgtagttagaatttgttttttgtagataagagtttgttatagcaagataaaatttggtatctatttacacaggatgaaatacagagttctttcccttttactacagaaatatgaggaatagcaatatgcaatcttctgsaaggtgaatgctgccctacttccacacccaacttttcaatgaacctgaaaagcttgagtgaaaagctaargagtttgttaatcactggcacatggccatcaataaagtatagaaggttcccatggctcaaaaaagtctgccaatgcttcctatgagaccctgggcaagtcatttaatttctatttgtcctggctgcctttaatacaattacagtaaacagtgtattctttctaatcttagcacactgtctgtgttatgtttattgagaaaagatagagatagtagttgtatattgctaag

SEQ ID NO: 81574 - DNA, 600 bp, Chicken  19866894375200_2
acagaatttgaggagccatgggattgacccaatagaagaatgtaattgttgccatagaaaattgaagaaatacattctgttacagttttcctgtagttagaatttgttttttgtagataagagtttgttatagcaagataaaatttggtatctatttacacaggatgaaatacagagttctttcccttttactacagaaatatgaggaatagcaatatgcaatcttctgsaaggtgaatgctgccctacttccacacccaacttttcaatgaacctgaaaagcttgagtgaaaagctaargagtttgttaatcactggcacatggccatcaataaagtatagaaggttcccatggctcaaaaaagtctgccaatgcttcctatgagaccctgggcaagtcatttaatttctatttgtcctggctgcctttaatacaattacagtaaacagtgtattctttctaatcttagcacactgtctgtgttatgtttattgagaaaagatagagatagtagttgtatattgctaagcacttcagctgttgcttaaattcaaacgtttctccactttcagaagaacatgaaaaagaataaaaaatct

SEQ ID NO: 81575 - DNA, 600 bp, Chicken  19866894375203_1
cattgtgctccctaggcagaaagtggatccacttctatgggctaagctgttgcattgtctccagcttgctactccctcagtggcagtatttttacttgctagggactaaaaaatcattctgcagttatatgggaactggaaataaacaatccttgtccagaaagcttgcatgtaagaaaataaactcaatgtcaataaagtgttgttagaaacccaccagagattacatcttgaatggatttggttggcattgatacttggaaaggaaatagcttctttggcattagggaagattaaatmaaaacrcagatggaccagagctagacaggtgtattgcatgtaaaagatatcagaaaaaaatcccacagaaaattgcagaaatggaggaaaagtcattgaggctagcactgttaatggacttgagcacatggcctctcagaaaactgccttagaaatacagactgaggcaagaacttcatggcctgctgctgaagacaagtttgtatttgatgaagtgctttgcatcaaaggagttgaaggagttggagtgatgtgaaaactagggagggatacattagcaatatgtaaaaactgagaaaa

SEQ ID NO: 81576 - DNA, 600 bp, Chicken  19866894375203_2
gctccctaggcagaaagtggatccacttctatgggctaagctgttgcattgtctccagcttgctactccctcagtggcagtatttttacttgctagggactaaaaaatcattctgcagttatatgggaactggaaataaacaatccttgtccagaaagcttgcatgtaagaaaataaactcaatgtcaataaagtgttgttagaaacccaccagagattacatcttgaatggatttggttggcattgatacttggaaaggaaatagcttctttggcattagggaagattaaatmaaaacrcagatggaccagagctagacaggtgtattgcatgtaaaagatatcagaaaaaaatcccacagaaaattgcagaaatggaggaaaagtcattgaggctagcactgttaatggacttgagcacatggcctctcagaaaactgccttagaaatacagactgaggcaagaacttcatggcctgctgctgaagacaagtttgtatttgatgaagtgctttgcatcaaaggagttgaaggagttggagtgatgtgaaaactagggagggatacattagcaatatgtaaaaactgagaaaaaaagca

SEQ ID NO: 81577 - DNA, 599 bp, Chicken  19866894375205_1
  misc_feature (1)..(175): n is any nucleotide
nnnnnnnnnnnnnnnnnnnnnnnnnnnnnnnnnnnnnnnnnnnnnnnnnnnnnnnnnnnnnnnnnnnnnnnnnnnnnnnnnnnnnnnnnnnnnnnnnnnnnnnnnnnnnnnnnnnnnnnnnnnnnnnnnnnnnnnnnnnnnnnnnnnnnnnnnnnnnnnnnnnnnnnnnnnnnnncatcgttcctaagagatgccagatgagtgaagaaatgcaattaaagcaataggaaatgaagattggctcaaaacctgacagaggttctaccttttctaaatgttatttaacaaaaacttcaccaycaccaagaaaaaccagtttatctttyccctacagagtccattttgccaagttagccaggacatctttctgtctctggctctgttccacaaagcagatctgttactgtgagtcrctttcactaacaggtactgcacagaggctttgggaagcctaccactcatctgaatgagtgcttccctttcttagtggtcaaggcttccttcaaaattaggaaggacagtggtctcagagtgggartgagaacaattgcttggacagcagactctatctgacacaagcacaaagggaagagcagcat

SEQ ID NO: 81578 - DNA, 599 bp, Chicken  19866894375205_2
  misc_feature (1)..(149): n is any nucleotide
nnnnnnnnnnnnnnnnnnnnnnnnnnnnnnnnnnnnnnnnnnnnnnnnnnnnnnnnnnnnnnnnnnnnnnnnnnnnnnnnnnnnnnnnnnnnnnnnnnnnnnnnnnnnnnnnnnnnnnnnnnnnnnnnnnnnnnnnnnnnnnnnnnnnncatcgttcctaagagatgccagatgagtgaagaaatgcaattaaagcaataggaaatgaagattggctcaaaacctgacagaggttctaccttttctaaatgttatttaacaaaaacttcaccaycaccaagaaaaaccagtttatctttyccctacagagtccattttgccaagttagccaggacatctttctgtctctggctctgttccacaaagcagatctgttactgtgagtcrctttcactaacaggtactgcacagaggctttgggaagcctaccactcatctgaatgagtgcttccctttcttagtggtcaaggcttccttcaaaattaggaaggacagtggtctcagagtgggartgagaacaattgcttggacagcagactctatctgacacaagcacaaagggaagagcagcatggcaatctgcacaaatgttaagaaga

SEQ ID NO: 81579 - DNA, 599 bp, Chicken  19866894375205_3
  misc_feature (1)..(62): n is any nucleotide
nnnnnnnnnnnnnnnnnnnnnnnnnnnnnnnnnnnnnnnnnnnnnnnnnnnnnnnnnnnnnncatcgttcctaagagatgccagatgagtgaagaaatgcaattaaagcaataggaaatgaagattggctcaaaacctgacagaggttctaccttttctaaatgttatttaacaaaaacttcaccaycaccaagaaaaaccagtttatctttyccctacagagtccattttgccaagttagccaggacatctttctgtctctggctctgttccacaaagcagatctgttactgtgagtcrctttcactaacaggtactgcacagaggctttgggaagcctaccactcatctgaatgagtgcttccctttcttagtggtcaaggcttccttcaaaattaggaaggacagtggtctcagagtgggartgagaacaattgcttggacagcagactctatctgacacaagcacaaagggaagagcagcatggcaatctgcacaaatgttaagaagaggatttgagggcagaaaaaggctccaaaacacaaggaagtagaagaactttatcacaatgcaaagatggtatgmgaaaccccagrac

SEQ ID NO: 81580 - DNA, 600 bp, Chicken  19866894375205_4
tggctcaaaacctgacagaggttctaccttttctaaatgttatttaacaaaaacttcaccaycaccaagaaaaaccagtttatctttyccctacagagtccattttgccaagttagccaggacatctttctgtctctggctctgttccacaaagcagatctgttactgtgagtcrctttcactaacaggtactgcacagaggctttgggaagcctaccactcatctgaatgagtgcttccctttcttagtggtcaaggcttccttcaaaattaggaaggacagtggtctcagagtgggartgagaacaattgcttggacagcagactctatctgacacaagcacaaagggaagagcagcatggcaatctgcacaaatgttaagaagaggatttgagggcagaaaaaggctccaaaacacaaggaagtagaagaactttatcacaatgcaaagatggtatgmgaaaccccagracaccatcggctcagtgactttgtggatgagaaaaatagggactttcatgtcttttatagatggattagaatgatgagaggaaaagggatatgaaagacacratggatttgaagaaaggttatactga

SEQ ID NO: 81581 - DNA, 600 bp, Chicken  19866894375205_5
gttactgtgagtcrctttcactaacaggtactgcacagaggctttgggaagcctaccactcatctgaatgagtgcttccctttcttagtggtcaaggcttccttcaaaattaggaaggacagtggtctcagagtgggartgagaacaattgcttggacagcagactctatctgacacaagcacaaagggaagagcagcatggcaatctgcacaaatgttaagaagaggatttgagggcagaaaaaggctccaaaacacaaggaagtagaagaactttatcacaatgcaaagatggtatgmgaaaccccagracaccatcggctcagtgactttgtggatgagaaaaatagggactttcatgtcttttatagatggattagaatgatgagaggaaaagggatatgaaagacacratggatttgaagaaaggttatactgaaaaacttaaaacggagaagagaattaaaaaaatggtgaccttctgcataaatttcaatttagttattgaatataaccacataacgagactatatattaatggttattcctatgggaagcaagataaaaacattattgatgtcctacatgcagactgtatgt

SEQ ID NO: 81582 - DNA, 600 bp, Chicken  19866894375205_6
tcrctttcactaacaggtactgcacagaggctttgggaagcctaccactcatctgaatgagtgcttccctttcttagtggtcaaggcttccttcaaaattaggaaggacagtggtctcagagtgggartgagaacaattgcttggacagcagactctatctgacacaagcacaaagggaagagcagcatggcaatctgcacaaatgttaagaagaggatttgagggcagaaaaaggctccaaaacacaaggaagtagaagaactttatcacaatgcaaagatggtatgmgaaaccccagracaccatcggctcagtgactttgtggatgagaaaaatagggactttcatgtcttttatagatggattagaatgatgagaggaaaagggatatgaaagacacratggatttgaagaaaggttatactgaaaaacttaaaacggagaagagaattaaaaaaatggtgaccttctgcataaatttcaatttagttattgaatataaccacataacgagactatatattaatggttattcctatgggaagcaagataaaaacattattgatgtcctacatgcagactgtatgtatttgtcacta

SEQ ID NO: 81583 - DNA, 600 bp, Chicken  19866894375205_7
gaaggacagtggtctcagagtgggartgagaacaattgcttggacagcagactctatctgacacaagcacaaagggaagagcagcatggcaatctgcacaaatgttaagaagaggatttgagggcagaaaaaggctccaaaacacaaggaagtagaagaactttatcacaatgcaaagatggtatgmgaaaccccagracaccatcggctcagtgactttgtggatgagaaaaatagggactttcatgtcttttatagatggattagaatgatgagaggaaaagggatatgaaagacacratggatttgaagaaaggttatactgaaaaacttaaaacggagaagagaattaaaaaaatggtgaccttctgcataaatttcaatttagttattgaatataaccacataacgagactatatattaatggttattcctatgggaagcaagataaaaacattattgatgtcctacatgcagactgtatgtatttgtcactacgtgagaccacaaaatgtttatttttaaagttctttattatggttacaacttgcagcctttaacatatactttggacatttataacgcatacctgaaataag

SEQ ID NO: 81584 - DNA, 600 bp, Chicken  19866894375205_8
gaaataagactatgtgcccagagatctgcatttgccgggcagagtaaatgcctagagaggtccttccctgcttccccttctgctgtcatgacagatgtcctactggtactgcacctggtgtctgtgtacctcacacatggaagaaatgaacaagtaagaggaagcaccctgcagaaagtctctgcgcttagtcctactttcatgcttattttgcattgctgcaatatgtctgccatgagaggggtttcacttgatttagtttaggagaggaatcaacctcacaatgtgtctcaaggccaytgaayccacctaccagtgcataaacccctaatgtttctgacttgcatttcaaatgtttgttcaaaggcaaaatatttgcttcagagccctcagaatatgtggctgaaatacttctactgtattcctacagtaatgggtcagcaagttttcaccacagatcatcatcttaaaggcatatgagattgtttgcaaacaagtgggggaaaaaaaaccaaacaaactcagcgaccttcagtgggacaactatcaataaacactctttgaccagaagagggaacagaaaaggaagagggggaaagg

SEQ ID NO: 81585 - DNA, 600 bp, Chicken  19866894375205_9
aagactatgtgcccagagatctgcatttgccgggcagagtaaatgcctagagaggtccttccctgcttccccttctgctgtcatgacagatgtcctactggtactgcacctggtgtctgtgtacctcacacatggaagaaatgaacaagtaagaggaagcaccctgcagaaagtctctgcgcttagtcctactttcatgcttattttgcattgctgcaatatgtctgccatgagaggggtttcacttgatttagtttaggagaggaatcaacctcacaatgtgtctcaaggccaytgaayccacctaccagtgcataaacccctaatgtttctgacttgcatttcaaatgtttgttcaaaggcaaaatatttgcttcagagccctcagaatatgtggctgaaatacttctactgtattcctacagtaatgggtcagcaagttttcaccacagatcatcatcttaaaggcatatgagattgtttgcaaacaagtgggggaaaaaaaaccaaacaaactcagcgaccttcagtgggacaactatcaataaacactctttgaccagaagagggaacagaaaaggaagagggggaaaggaaggg

SEQ ID NO: 81586 - DNA, 600 bp, Chicken  19866894375208_1
actttattagctgagttagtacttggcctatacactgagcctgctggaaagtgacagtgattatcgtattacaaggctgtgtgctagcagctcaaccagggtgccaaacaacctttaggtggtagtattttttttctgtatttcttggtttgagtcagtaacaaagaagagaaactgttatcatttcttggagttatgcatacatacgtacttgaagcaactgtgtaacattgaaacacgatatctgtgaaattatgaatttgtaacagtcagtaaaacagcagactccagtacccaatrtgaagtggtaaggtttgttgaagygctgacctaccttggctgtatttcatatacctccctgcactgtcagttccattaaagtatgaccactggtgccatcttcaygctaggctttcacattattgcagaataacctgaagaagttctttagaaataactttggcaggtggagaggatgtrtacctgagttgagtargctctaatttcagagtatcaaaccctttcattcagccttcaaaatatttcttggaattgtcactttaacatatgcctgcttctctcttcactctgattcagcaa

SEQ ID NO: 81587 - DNA, 600 bp, Chicken  19866894375208_2
ggcctatacactgagcctgctggaaagtgacagtgattatcgtattacaaggctgtgtgctagcagctcaaccagggtgccaaacaacctttaggtggtagtattttttttctgtatttcttggtttgagtcagtaacaaagaagagaaactgttatcatttcttggagttatgcatacatacgtacttgaagcaactgtgtaacattgaaacacgatatctgtgaaattatgaatttgtaacagtcagtaaaacagcagactccagtacccaatrtgaagtggtaaggtttgttgaagygctgacctaccttggctgtatttcatatacctccctgcactgtcagttccattaaagtatgaccactggtgccatcttcaygctaggctttcacattattgcagaataacctgaagaagttctttagaaataactttggcaggtggagaggatgtrtacctgagttgagtargctctaatttcagagtatcaaaccctttcattcagccttcaaaatatttcttggaattgtcactttaacatatgcctgcttctctcttcactctgattcagcaaagttcctcactgaagcaggatgtg

SEQ ID NO: 81588 - DNA, 600 bp, Chicken  19866894375208_3
aaacaacctttaggtggtagtattttttttctgtatttcttggtttgagtcagtaacaaagaagagaaactgttatcatttcttggagttatgcatacatacgtacttgaagcaactgtgtaacattgaaacacgatatctgtgaaattatgaatttgtaacagtcagtaaaacagcagactccagtacccaatrtgaagtggtaaggtttgttgaagygctgacctaccttggctgtatttcatatacctccctgcactgtcagttccattaaagtatgaccactggtgccatcttcaygctaggctttcacattattgcagaataacctgaagaagttctttagaaataactttggcaggtggagaggatgtrtacctgagttgagtargctctaatttcagagtatcaaaccctttcattcagccttcaaaatatttcttggaattgtcactttaacatatgcctgcttctctcttcactctgattcagcaaagttcctcactgaagcaggatgtggtatattttaaaattgaaggcccaatttaatatcagtgtgattgaatcaggagtgacattcttggcaggatgacagtgtta

SEQ ID NO: 81589 - DNA, 600 bp, Chicken  19866894375208_4
tcatttcttggagttatgcatacatacgtacttgaagcaactgtgtaacattgaaacacgatatctgtgaaattatgaatttgtaacagtcagtaaaacagcagactccagtacccaatrtgaagtggtaaggtttgttgaagygctgacctaccttggctgtatttcatatacctccctgcactgtcagttccattaaagtatgaccactggtgccatcttcaygctaggctttcacattattgcagaataacctgaagaagttctttagaaataactttggcaggtggagaggatgtrtacctgagttgagtargctctaatttcagagtatcaaaccctttcattcagccttcaaaatatttcttggaattgtcactttaacatatgcctgcttctctcttcactctgattcagcaaagttcctcactgaagcaggatgtggtatattttaaaattgaaggcccaatttaatatcagtgtgattgaatcaggagtgacattcttggcaggatgacagtgttatacattaattattttagagactaaaattccatgtgaaagttgtggttcatgacccgtagtcctttctgctctaac

SEQ ID NO: 81590 - DNA, 600 bp, Chicken  19866894375208_5
tgcatacatacgtacttgaagcaactgtgtaacattgaaacacgatatctgtgaaattatgaatttgtaacagtcagtaaaacagcagactccagtacccaatrtgaagtggtaaggtttgttgaagygctgacctaccttggctgtatttcatatacctccctgcactgtcagttccattaaagtatgaccactggtgccatcttcaygctaggctttcacattattgcagaataacctgaagaagttctttagaaataactttggcaggtggagaggatgtrtacctgagttgagtargctctaatttcagagtatcaaaccctttcattcagccttcaaaatatttcttggaattgtcactttaacatatgcctgcttctctcttcactctgattcagcaaagttcctcactgaagcaggatgtggtatattttaaaattgaaggcccaatttaatatcagtgtgattgaatcaggagtgacattcttggcaggatgacagtgttatacattaattattttagagactaaaattccatgtgaaagttgtggttcatgacccgtagtcctttctgctctaacctggttttaaggaaag

SEQ ID NO: 81591 - DNA, 600 bp, Chicken  19866894375213_1
tttttaataaagtttgggttaaggcagttgagcaaagctgggctgagaaaatgagattatattcaacttctgaatgctgttctctgtgttttccacctcaggctctcaggagcaatttatgctagaaagatgtttaaacactgctgttatttctgagcctcactcttggctacgagtttcacatctctcttatggttaaatgcacctctttcttatggttaaataaaacattatcttttgtaactttgcaaacacactgaccagtatttgcccactcagtcgtgtgaacacaacttataytcaaatctattgttaggttctggggattcccatctygaaaccagggtatcacctgtccctctcctccctgcccactgaatgatttgcagtattactttaattagccaagtgggaatctccccaaattgcactcaactgagtgttgttcagccctaaaatgtgctttattttagtgttgcatgagattaaatgagaaatctcttatgccaaatctgatgctgtcagattcttctttttttcctaataacaaaactattactccagcactgcttcatgggggcattttacacaactgctgcc

SEQ ID NO: 81592 - DNA, 600 bp, Chicken  19866894375213_2
gctgggctgagaaaatgagattatattcaacttctgaatgctgttctctgtgttttccacctcaggctctcaggagcaatttatgctagaaagatgtttaaacactgctgttatttctgagcctcactcttggctacgagtttcacatctctcttatggttaaatgcacctctttcttatggttaaataaaacattatcttttgtaactttgcaaacacactgaccagtatttgcccactcagtcgtgtgaacacaacttataytcaaatctattgttaggttctggggattcccatctygaaaccagggtatcacctgtccctctcctccctgcccactgaatgatttgcagtattactttaattagccaagtgggaatctccccaaattgcactcaactgagtgttgttcagccctaaaatgtgctttattttagtgttgcatgagattaaatgagaaatctcttatgccaaatctgatgctgtcagattcttctttttttcctaataacaaaactattactccagcactgcttcatgggggcattttacacaactgctgccttaaagaggtctcacattcccagagaaaaaaacacc

SEQ ID NO: 81593 - DNA, 600 bp, Chicken  19866894375216_1
gtaaatcgcatgcacctgagctcccctgggttggccctgccttcccaccaggtgctcaattactgtttcaggctgtgacttagcatttccactaaaggaacactgaagtacactaagggacaagaatcaaagctttagcattcacacagacatttatgtgtgaggacatccatctttcaaaaacacctggtcaggtattcctagaatcacataagtatgttttgctcaagagggagaaacaagaaagaagggcttgtcaaagatccgaatgaatacaggaaaacatgaccagtttcaaayagaaaatatattacttctgaaaccaatarttgcattygctttgtattttgccacatgaaaaatacaaggctttcacacactccaaaagctatgtggacctgaattttttgtaggctgtcaggaaaacactacttctagaagaaataacgatagcttttcaagaattagtgttcaataaaaaacttatcataggattagtggactaacttcaacaatccaaatctctgtcatagtcacacccttttagagctcagttctgtaaccacgctcttgtcttattgagctgtgaaactgcatttc

SEQ ID NO: 81594 - DNA, 600 bp, Chicken  19866894375216_2
gttggccctgccttcccaccaggtgctcaattactgtttcaggctgtgacttagcatttccactaaaggaacactgaagtacactaagggacaagaatcaaagctttagcattcacacagacatttatgtgtgaggacatccatctttcaaaaacacctggtcaggtattcctagaatcacataagtatgttttgctcaagagggagaaacaagaaagaagggcttgtcaaagatccgaatgaatacaggaaaacatgaccagtttcaaayagaaaatatattacttctgaaaccaatarttgcattygctttgtattttgccacatgaaaaatacaaggctttcacacactccaaaagctatgtggacctgaattttttgtaggctgtcaggaaaacactacttctagaagaaataacgatagcttttcaagaattagtgttcaataaaaaacttatcataggattagtggactaacttcaacaatccaaatctctgtcatagtcacacccttttagagctcagttctgtaaccacgctcttgtcttattgagctgtgaaactgcatttctatgggaaatgaaagagtccactctccat

SEQ ID NO: 81595 - DNA, 600 bp, Chicken  19866894375216_3
tgccttcccaccaggtgctcaattactgtttcaggctgtgacttagcatttccactaaaggaacactgaagtacactaagggacaagaatcaaagctttagcattcacacagacatttatgtgtgaggacatccatctttcaaaaacacctggtcaggtattcctagaatcacataagtatgttttgctcaagagggagaaacaagaaagaagggcttgtcaaagatccgaatgaatacaggaaaacatgaccagtttcaaayagaaaatatattacttctgaaaccaatarttgcattygctttgtattttgccacatgaaaaatacaaggctttcacacactccaaaagctatgtggacctgaattttttgtaggctgtcaggaaaacactacttctagaagaaataacgatagcttttcaagaattagtgttcaataaaaaacttatcataggattagtggactaacttcaacaatccaaatctctgtcatagtcacacccttttagagctcagttctgtaaccacgctcttgtcttattgagctgtgaaactgcatttctatgggaaatgaaagagtccactctccatctcttact

SEQ ID NO: 81596 - DNA, 600 bp, Chicken  19866894375229_1
ttagccaaggctttggtgaagacataagtgttaattattgcctccctagagttgttccatcccagtattttaaaaaagaaatcttttttgtgtctctgcgtaacatatgtgttctcaagaggtacagaggaaaagactgaaacactgatatgttttccatttctccccttcactattatccagaaagggcagagcatatgtagcttgattgcatttcagtttaattagcattttacctttatttccattatcgtggaaggtcatttataataacagcagcaattgggctcgcagctgccrtaagatcccataagcaacggcaatcacgttctcccctggcttcctgctatcctttgtcagagagggtattttctgccttgctcacacagaaatactgctggcttccccgtatggaagataacagttttcagaaagagttcccagtttctagacaaaccktgtagttatttgtgctccgcatacacacagtctggaaaaaaccatgtgcagtaatgtcattgtgagttagcttgttgacttcgtgtcattggatactgagagaaacagtcaagctatttttaaaaggaaatgttagccaat

SEQ ID NO: 81597 - DNA, 600 bp, Chicken  19866894375229_2
tttctccccttcactattatccagaaagggcagagcatatgtagcttgattgcatttcagtttaattagcattttacctttatttccattatcgtggaaggtcatttataataacagcagcaattgggctcgcagctgccrtaagatcccataagcaacggcaatcacgttctcccctggcttcctgctatcctttgtcagagagggtattttctgccttgctcacacagaaatactgctggcttccccgtatggaagataacagttttcagaaagagttcccagtttctagacaaaccktgtagttatttgtgctccgcatacacacagtctggaaaaaaccatgtgcagtaatgtcattgtgagttagcttgttgacttcgtgtcattggatactgagagaaacagtcaagctatttttaaaaggaaatgttagccaatcctgtaaacaccacctgcaagaaccagcagaggagttcaaggttctcagaacctaggctgtgggcatggatgattagattttctaagagaagaaatttgcttcgcagaagctttgccagtttacctttctgtcttcctgcactcccacatctctttcac

SEQ ID NO: 81598 - DNA, 600 bp, Chicken  19866894375236_1
cccaagagctcagtggcacgtgggaccctgagattactcttgcaggagcattggctcccaaagattggtgctgcttttctcttcataatgctgtgcacaaggcaataaaaaacaagcagcagagtttcagtgaatgaaaatacgacccattcaagaagggaatgctcgcttgtctgtccttggcagagaggtggcgagcctggtgtcccaacatctgtcagtgcaagtgagagttaaaagagacaaatgcccttgttgtacacagtcagtagcttcagagagggggactctgcgctacarcctggtcttcagtgggctcctagccctgagcagctggggcccctctccctccatagctcttcctagacaacccctttctgcaggcacttgggcttgtggaagagaagccaggcaagcaggatcactgataccagcacaagggagcayagaaccatcagccccacatagctgccataggaaagaggaggtgcaggaggctcctccgcaggaatcatgttggtcaggttcagcatgtagcccagggtccagcctgcatcgctgctgccgatctgaaatggagaggagcagaatcagagacgg

SEQ ID NO: 81599 - DNA, 600 bp, Chicken  19866894375236_2
cattcaagaagggaatgctcgcttgtctgtccttggcagagaggtggcgagcctggtgtcccaacatctgtcagtgcaagtgagagttaaaagagacaaatgcccttgttgtacacagtcagtagcttcagagagggggactctgcgctacarcctggtcttcagtgggctcctagccctgagcagctggggcccctctccctccatagctcttcctagacaacccctttctgcaggcacttgggcttgtggaagagaagccaggcaagcaggatcactgataccagcacaagggagcayagaaccatcagccccacatagctgccataggaaagaggaggtgcaggaggctcctccgcaggaatcatgttggtcaggttcagcatgtagcccagggtccagcctgcatcgctgctgccgatctgaaatggagaggagcagaatcagagacggaaggtgccagggcagtatcatccctgtggaagatgggcaaagctgtgtagcagaagtggcaatcaacacacctttccaaggaagtggatccttttccagttttctgtagtgaattcatagccattttccagtagggagaggatgtag

SEQ ID NO: 81600 - DNA, 600 bp, Chicken  19866894375242_1
aactgaagtcttggaataaatttgatgctgaggaaattcttatcaggagaagcccccaaaagacagaacgcatagtgtgagaaagatctagcaagcaacagctcaaaattgcctgtggcttacctgctctcgttttattagctctcttccacagcactgcagctgctgccaatgtggtaatatttacatatcatagtatgcttcaaacagaaacaagatgacatcaacatgtctcatggaagagtatgaaggttcgatgcattggtgagcaggcacaaccatagactggaaaatttaggratattttgttgtggtttatagccaaatgataatgcagaggctaatgaattggataccaaaacattttaatcacagacaaaagccagttttacaaaatgaattacttgtctgttctgcagaagagatgactacggtgaggagggagtctaggtgagtaaaactagcatctagccatgacatgcacagtcacgattctggggttgggggtccttgagtcctgtccctaagcaaatctgagcactgtcagttacaggattcagtagagaaaaacagattctcagatgccttattaaaattcac

SEQ ID NO: 81601 - DNA, 563 bp, Chicken  19866894375243_1
taacctttccaacttagaagcatcctagctttattaatgaaaatattcatgaccaaggaatgatggactcctcagaaagagagaataaaacatacattagggaaatctatccagaccattgtcatcccttctagctcaatagaaacatcttcactgtaaatagttttaaaggaaagccatgacttcatctttaaggactaagaactcttaaaaagaagaaaaattctacttattctgaagatgcatccttaaagactaagaaatgacaaaaagatgggagctttgcaaaggtagtgtgcycattcatcctcaaattctgcaaaatccttaaaggcacagtgagcaaaaaataaaaggaaaactgctgatacaggcatcttttctgtctgagctgatttcagtggaaagctacaacattctaaggcttgaaatggacagaaatacatggggattaattcatcatactccattttttttttccctaacaaatcctattttttcatcatcatgaaaactacactgggatttgtatgcctcatctgctggttttcacctactcttca

SEQ ID NO: 81602 - DNA, 600 bp, Chicken  19866894375244_1
atctctttcaggtaaatcaaaagaataggaggaggagaaccctgtaatatgatccagggattttccaggctctttgatctcacctgaaagtatttttcttgttgttttcccccatgcacacatagttttgtttccaatggcccagaaagctttatctctgtgtctaggcactttgtcttgtgtatggttgtctgcctgactcctaagggatcaaagcagctgaggggagctctgaatagggattgagcctgaagtatacatgggacctggtccattcaagcctctgaaaatgtgaacccmtgctgagagacagcatagaragtatagcagggcagtgactgtcttccaggagctctggattagtgttgcaattgcatagcatcttctaatgcaggaaaataactggctatgccaaaagaggctagtccaagacattagtgattagtgctcaacttcagtctatgtcttagttgtggtcattagttgccttccccagaataaatcctatggtatcaatgctttgctattggtaaagcttcaatagtagaaaatgcaaaaacatgatgcaaaccctgacctttctgatgttctcatacctgt

SEQ ID NO: 81603 - DNA, 600 bp, Chicken  19866894375244_2
aagaataggaggaggagaaccctgtaatatgatccagggattttccaggctctttgatctcacctgaaagtatttttcttgttgttttcccccatgcacacatagttttgtttccaatggcccagaaagctttatctctgtgtctaggcactttgtcttgtgtatggttgtctgcctgactcctaagggatcaaagcagctgaggggagctctgaatagggattgagcctgaagtatacatgggacctggtccattcaagcctctgaaaatgtgaacccmtgctgagagacagcatagaragtatagcagggcagtgactgtcttccaggagctctggattagtgttgcaattgcatagcatcttctaatgcaggaaaataactggctatgccaaaagaggctagtccaagacattagtgattagtgctcaacttcagtctatgtcttagttgtggtcattagttgccttccccagaataaatcctatggtatcaatgctttgctattggtaaagcttcaatagtagaaaatgcaaaaacatgatgcaaaccctgacctttctgatgttctcatacctgtgtcactcaaaatcatggtaa

SEQ ID NO: 81604 - DNA, 600 bp, Chicken  19866894375244_3
ggcgtattccaatctagtcaccttgtgtaaacctggaaatacaagtgccaccttcctaagggtttgctggtcttcatcaaactcgtaatttagttttctctaatcagatgcacttgtattaatcaaccactagatagagctgtgctaaatagaaagtgcctctctatgaagttttacgctgaaattcatgttttctgtagtacagaggcaaaataaggattaattgttgcacaagacaaatacgataaggaggatatttttctccattaacataaaatttgccctttcctttaattatayaatggggatcatgaacagttttctgagtatacctcttagtaaatcttcagtgaacagttcaacatagttcctatgtattaattattaaataagctctatctttaaactgccacaacarttattttttaatcgagcgttcatcacagaactatttctcatccctgtgaatgggaaccttaaaagtgaaaattttattagcttttctttctcttttgttttgccactctggtgctgaccagcattcatgtatccgtcaaagagtcataaccataagaaaaaggaattaaatgtagtatctaa

SEQ ID NO: 81605 - DNA, 600 bp, Chicken  19866894375244_4
ttaatcaaccactagatagagctgtgctaaatagaaagtgcctctctatgaagttttacgctgaaattcatgttttctgtagtacagaggcaaaataaggattaattgttgcacaagacaaatacgataaggaggatatttttctccattaacataaaatttgccctttcctttaattatayaatggggatcatgaacagttttctgagtatacctcttagtaaatcttcagtgaacagttcaacatagttcctatgtattaattattaaataagctctatctttaaactgccacaacarttattttttaatcgagcgttcatcacagaactatttctcatccctgtgaatgggaaccttaaaagtgaaaattttattagcttttctttctcttttgttttgccactctggtgctgaccagcattcatgtatccgtcaaagagtcataaccataagaaaaaggaattaaatgtagtatctaatgtaattctgaagtaaaggaaggtgtgttctatttaatgatttctgaactctttttttactgctgtactcatttatagtaggaaatttacttttgacttagtactagagatgagttta

SEQ ID NO: 81606 - DNA, 599 bp, Chicken  19866894375245_1
  misc_feature (1)..(47): n is any nucleotide
nnnnnnnnnnnnnnnnnnnnnnnnnnnnnnnnnnnnnnnnnnnnnnncctggccctgcctgccgccgctggctgtgctgggggaggcatccgctgcgtcctgtgtagaagttttacatcttgtctcataaaaaaaaaaccaaaatgctccctgattaaaccaatcttaacgctcttttttttttctttttaaattgtttttaaaaaatgggaaaatgtgagtcatcggatgtgctgtgttgctgtgagactggaggtttaacctgtatctgatcctgttgcttttttcgttgcatttttsgttgctttttttctkagccacaagcctttttagcagcaggtttttattatgctggacttccagttgtcacacaacagtgtgatggtttcatggactctgttatctcttcactgtggaggtgctgctccattagtagctgccttaatgtctaattacacttttggaggggttacctctaaactctcctcagaagataaaacgttcaatctgagacaggccaatctgtgctgagggaaatcatttaccatctgtgttattcgattggtattcgattttcctagttttggawggattggcag

SEQ ID NO: 81607 - DNA, 599 bp, Chicken  19866894375245_2
  misc_feature (1)..(32): n is any nucleotide
nnnnnnnnnnnnnnnnnnnnnnnnnnnnnnnncctggccctgcctgccgccgctggctgtgctgggggaggcatccgctgcgtcctgtgtagaagttttacatcttgtctcataaaaaaaaaaccaaaatgctccctgattaaaccaatcttaacgctcttttttttttctttttaaattgtttttaaaaaatgggaaaatgtgagtcatcggatgtgctgtgttgctgtgagactggaggtttaacctgtatctgatcctgttgcttttttcgttgcatttttsgttgctttttttctkagccacaagcctttttagcagcaggtttttattatgctggacttccagttgtcacacaacagtgtgatggtttcatggactctgttatctcttcactgtggaggtgctgctccattagtagctgccttaatgtctaattacacttttggaggggttacctctaaactctcctcagaagataaaacgttcaatctgagacaggccaatctgtgctgagggaaatcatttaccatctgtgttattcgattggtattcgattttcctagttttggawggattggcagctgttgttttttctt

SEQ ID NO: 81608 - DNA, 600 bp, Chicken  19866894375245_3
ttgcatttttsgttgctttttttctkagccacaagcctttttagcagcaggtttttattatgctggacttccagttgtcacacaacagtgtgatggtttcatggactctgttatctcttcactgtggaggtgctgctccattagtagctgccttaatgtctaattacacttttggaggggttacctctaaactctcctcagaagataaaacgttcaatctgagacaggccaatctgtgctgagggaaatcatttaccatctgtgttattcgattggtattcgattttcctagttttggawggattggcagctgttgttttttcttactgtgatgtcctctgttgtcatgactgcatttgcaactgtctctctgaggacaaggcatctacaacatacctcctaaaaaactcctttaacttctagcacygtgtctcttttaagccagcagattaaagctgcagaaggatagatctgacaaaacagctctgtcaaagcggagtgatctcttcagcaaagcacaggtgacatttgctgctagactttttttttttttagtatacaaaccccttttcaactgtgtactgtttgaaggaaaagaga

SEQ ID NO: 81609 - DNA, 600 bp, Chicken  19866894375245_4
aggtgctgctccattagtagctgccttaatgtctaattacacttttggaggggttacctctaaactctcctcagaagataaaacgttcaatctgagacaggccaatctgtgctgagggaaatcatttaccatctgtgttattcgattggtattcgattttcctagttttggawggattggcagctgttgttttttcttactgtgatgtcctctgttgtcatgactgcatttgcaactgtctctctgaggacaaggcatctacaacatacctcctaaaaaactcctttaacttctagcacygtgtctcttttaagccagcagattaaagctgcagaaggatagatctgacaaaacagctctgtcaaagcggagtgatctcttcagcaaagcacaggtgacatttgctgctagactttttttttttttagtatacaaaccccttttcaactgtgtactgtttgaaggaaaagagaaataacaacagaactaaaatgaaaccacttagccatagcacagagcgtggtggaaaagacagacagtaggaccagcagccacgccatcatttaggagaccttgccattgcttggcttcccaccttct

SEQ ID NO: 81610 - DNA, 600 bp, Chicken  19866894375247_1
cctgtcctgcccggcggagcaaagcgcggggctgccgtcaccccgagcgacctcatttcccaatattccctctcattgttaattgcagccgggctccaaaggaatcctgggcccgccctcagccaaatgggcaccgcttcaatgctcgggctggctttccattttgctttaatgagctgaaatcccgcagccatgagctgcagctgccgcggtgctgggctcctggcccctgctcagcctcactacagctgtatgctgccgctggtggcccaggggctgagtgggtcctcgcaggtccgratgsggctatttgggcccatcccatagcaacttctstcgtttcttacagggcaagtacgaagaaaggttcctgaaggatgaaaccatctcgcagcagatcaattctgttgagtccctcgcagggctgcacctcgctcccgaggaggggaagcccgagcagctcctgcagaggaagctgagcccgcggagccgccctccctccaagcccaccattgtgcggggggtcacctactacaaggctcagtcctccgagtccgacaatgacatcgaggagcaacgtgagtcaggcccacggctgcc

SEQ ID NO: 81611 - DNA, 600 bp, Chicken  19866894375247_2
tcctgcccggcggagcaaagcgcggggctgccgtcaccccgagcgacctcatttcccaatattccctctcattgttaattgcagccgggctccaaaggaatcctgggcccgccctcagccaaatgggcaccgcttcaatgctcgggctggctttccattttgctttaatgagctgaaatcccgcagccatgagctgcagctgccgcggtgctgggctcctggcccctgctcagcctcactacagctgtatgctgccgctggtggcccaggggctgagtgggtcctcgcaggtccgratgsggctatttgggcccatcccatagcaacttctstcgtttcttacagggcaagtacgaagaaaggttcctgaaggatgaaaccatctcgcagcagatcaattctgttgagtccctcgcagggctgcacctcgctcccgaggaggggaagcccgagcagctcctgcagaggaagctgagcccgcggagccgccctccctccaagcccaccattgtgcggggggtcacctactacaaggctcagtcctccgagtccgacaatgacatcgaggagcaacgtgagtcaggcccacggctgccacct

SEQ ID NO: 81612 - DNA, 600 bp, Chicken  19866894375247_3
gtcaccccgagcgacctcatttcccaatattccctctcattgttaattgcagccgggctccaaaggaatcctgggcccgccctcagccaaatgggcaccgcttcaatgctcgggctggctttccattttgctttaatgagctgaaatcccgcagccatgagctgcagctgccgcggtgctgggctcctggcccctgctcagcctcactacagctgtatgctgccgctggtggcccaggggctgagtgggtcctcgcaggtccgratgsggctatttgggcccatcccatagcaacttctstcgtttcttacagggcaagtacgaagaaaggttcctgaaggatgaaaccatctcgcagcagatcaattctgttgagtccctcgcagggctgcacctcgctcccgaggaggggaagcccgagcagctcctgcagaggaagctgagcccgcggagccgccctccctccaagcccaccattgtgcggggggtcacctactacaaggctcagtcctccgagtccgacaatgacatcgaggagcaacgtgagtcaggcccacggctgccacctgcaccctgagcaggctgctgcggagaggggga

SEQ ID NO: 81613 - DNA, 490 bp, Chicken  19866894375247_4
cgtggccgaagcagggtgtattgatctacagtggcagaaccaactggtaaatcatcactgaaaagagcagtgtgagcatccggcctctgacctgcgcatggggagcagcgtggtggtggtattgcatggaaaacgtatggtagctgaggaaacaagtccctgccacagtcagaaatacagaatcaacgcctctccagaaaggaaacgcgagttgatgatgtatgcaagcactgcaaatgtgtctgatgtcactgcagggacatgtgctgcagggctcagaggggagccagcatccctccstccatgcagggtgccccggggcacggmgaggcagggtcccagtaaattgggtgcacaaagcagcacrcagcctttgggtgcaaggctggctcagcagccaggtcaggtcagtgcagccctgcaaggacccaggagatctcagatccctttctctggctgggaattagggaaaaaaaatggcagatggctt

SEQ ID NO: 81614 - DNA, 463 bp, Chicken  19866894375247_5
acagtggcagaaccaactggtaaatcatcactgaaaagagcagtgtgagcatccggcctctgacctgcgcatggggagcagcgtggtggtggtattgcatggaaaacgtatggtagctgaggaaacaagtccctgccacagtcagaaatacagaatcaacgcctctccagaaaggaaacgcgagttgatgatgtatgcaagcactgcaaatgtgtctgatgtcactgcagggacatgtgctgcagggctcagaggggagccagcatccctccstccatgcagggtgccccggggcacggmgaggcagggtcccagtaaattgggtgcacaaagcagcacrcagcctttgggtgcaaggctggctcagcagccaggtcaggtcagtgcagccctgcaaggacccaggagatctcagatccctttctctggctgggaattagggaaaaaaaatggcagatggctt

SEQ ID NO: 81615 - DNA, 423 bp, Chicken  19866894375247_6
cagtgtgagcatccggcctctgacctgcgcatggggagcagcgtggtggtggtattgcatggaaaacgtatggtagctgaggaaacaagtccctgccacagtcagaaatacagaatcaacgcctctccagaaaggaaacgcgagttgatgatgtatgcaagcactgcaaatgtgtctgatgtcactgcagggacatgtgctgcagggctcagaggggagccagcatccctccstccatgcagggtgccccggggcacggmgaggcagggtcccagtaaattgggtgcacaaagcagcacrcagcctttgggtgcaaggctggctcagcagccaggtcaggtcagtgcagccctgcaaggacccaggagatctcagatccctttctctggctgggaattagggaaaaaaaatggcagatggctt

SEQ ID NO: 81616 - DNA, 600 bp, Chicken  19866894375254_1
gttctgtttttctctgatggtgagtgaagaacctgtaggacttgagacataaaatcctcatacaacttcactctccctatatcacctatctcctatggaagcaagttaaccatcacacagaatgggataatccatggctagaagaaccctctctagatataacataaaattacgtgataatttttggaaagcatatacagaattcttagtttacttagaatcatagaatcacagaatccttagagttagaagggacttttaaaggccatctagtccaactcccctgcagtaaacagggayatgcacagctaccatcaggttgcccagggcctgatccagcctggccttgaaagtctccagggatggggcatcagctacatctctgggcaacctgtgccagtgcctcaccaccctcaytgtaaaagacttttttcttttatctaacctaaatctaccctcttttaagcttgaaaccatttccccttgttctattaccacagacactgctaaagagtctgtctccttctttcttgtagctcccctttagatactgaatggccactaataggtcacctcacctggagaagaggctctcttgtc

SEQ ID NO: 81617 - DNA, 600 bp, Chicken  19866894375254_2
cagaatgggataatccatggctagaagaaccctctctagatataacataaaattacgtgataatttttggaaagcatatacagaattcttagtttacttagaatcatagaatcacagaatccttagagttagaagggacttttaaaggccatctagtccaactcccctgcagtaaacagggayatgcacagctaccatcaggttgcccagggcctgatccagcctggccttgaaagtctccagggatggggcatcagctacatctctgggcaacctgtgccagtgcctcaccaccctcaytgtaaaagacttttttcttttatctaacctaaatctaccctcttttaagcttgaaaccatttccccttgttctattaccacagacactgctaaagagtctgtctccttctttcttgtagctcccctttagatactgaatggccactaataggtcacctcacctggagaagaggctctcttgtccaggctgaacagccccagctctctcagtctgtcctcataggagaggtgttccatcccctggagcatttttgtacgccctcctctggatgtggtccaacagctccatgtccctcctct

SEQ ID NO: 81618 - DNA, 587 bp, Chicken  19866894375266_1
tgtgacggagcgtccctctcctctctgctggttgtgtgcttttgcacctccctgtggcacaaacccatctcatgtcaccttggttcaggacagagacaagaggagagctgcagagctctgggggctgcttgcagaaggattgccaggctggcagcagggagagctgggggtcacacggggaagggaagcactgcctgcgctgtcctctccttgccttccagctgctatgtgctcccatcacaggtgtgcgctgaccccagggctacacatatgtgtgttcctacagcctgaccccatgcrgccccttggataagacgtggcactgggaatcctgccagcttrcagcacacctgggttcccgggctgaaggacccctcagccccctcccatccggcagaggacctccagaccccatgatcacagcgagcgtgctgggggggctctgagcatcctgcctagtgcagctgtggggctggaggaggcatggttgcataaacaagctgcattctgtgggccctggatccagagagcaccctcgaaaggacccccaatcctcccagctgcagaggggttgggtgggggggggg

SEQ ID NO: 81619 - DNA, 545 bp, Chicken  19866894375266_2
tgcacctccctgtggcacaaacccatctcatgtcaccttggttcaggacagagacaagaggagagctgcagagctctgggggctgcttgcagaaggattgccaggctggcagcagggagagctgggggtcacacggggaagggaagcactgcctgcgctgtcctctccttgccttccagctgctatgtgctcccatcacaggtgtgcgctgaccccagggctacacatatgtgtgttcctacagcctgaccccatgcrgccccttggataagacgtggcactgggaatcctgccagcttrcagcacacctgggttcccgggctgaaggacccctcagccccctcccatccggcagaggacctccagaccccatgatcacagcgagcgtgctgggggggctctgagcatcctgcctagtgcagctgtggggctggaggaggcatggttgcataaacaagctgcattctgtgggccctggatccagagagcaccctcgaaaggacccccaatcctcccagctgcagaggggttgggtgggggggggg

SEQ ID NO: 81620 - DNA, 600 bp, Chicken  19866894375267_1
tgggctttgaagcagcactgctggctgcccgaggaatggaagctaaccctttcattctggatgatatctctggttgttctggattcagtgctttttacagcatctatcaacccagatcactgtccacaccaaatgagcatcatgaattcctcttggagaagcaggatattgctttcaagagattcccagcccacctggggatgcactgggtggtggatgctgccttgtccgttcggaacctcttcatcaactatgcggggtccttctctccctctttgatccgtaccattgtgctgaagrtcccagtgtcaaagtacatcaataggcctttccccaactcagaacatgaggccagacactccttccagttcaatgcctgtacagccctgctggatggagaagtgggcctcagctctttcacagagagcagcatccacaggcaggagctgagggaactgctccacaaagtggtggtggagcaccctgaagataatgtggctaattttgacaaaatgtacgggagaggtggcagtgctgctgaagagtggcgacgtcctgacaggcaaatgtgatactttctatgggcactggaggaagcct

SEQ ID NO: 81621 - DNA, 599 bp, Chicken  19866894375270_1
  misc_feature (1)..(7): n is any nucleotide
nnnnnnntgaagtgcttctgtgccgacatgtgcacgtcagcctgtctggcagcagctgtgtctcgcttaccttgcactcgtaccaatcctcaacttccttgcggttgcgcgctatcagtgtttcatactggcatctcaaatcctccaagatctgcctgagatctggcccagggcaggcgttgacctccacactcacatctccagtagactgctttctcagacagttcatttcctggaaatacagcccagattagacaccacaaaggagcagaggtgctgagagcagtgctcgctgcgagyggcgcctcccaacacagctgtgaagtgcagcgatgctgcagatctgttgggtaactgaaagcacggtcctgtaggtgaaaagttctgtgccagggctctgcagagcagcagcagccrcccagcctacctcctcgtggttcttcttcaggcagcagagctcctcccgcagmgactccagctgtgcctccaggtcggacctgcagagcgtcagctggtccaggacctggcgcagcccgttgatgtccgcctccacgctctggcgcagggccagctccgtctcgtacctgagagagaaagca

SEQ ID NO: 81622 - DNA, 600 bp, Chicken  19866894375270_2
gtgtttcatactggcatctcaaatcctccaagatctgcctgagatctggcccagggcaggcgttgacctccacactcacatctccagtagactgctttctcagacagttcatttcctggaaatacagcccagattagacaccacaaaggagcagaggtgctgagagcagtgctcgctgcgagyggcgcctcccaacacagctgtgaagtgcagcgatgctgcagatctgttgggtaactgaaagcacggtcctgtaggtgaaaagttctgtgccagggctctgcagagcagcagcagccrcccagcctacctcctcgtggttcttcttcaggcagcagagctcctcccgcagmgactccagctgtgcctccaggtcggacctgcagagcgtcagctggtccaggacctggcgcagcccgttgatgtccgcctccacgctctggcgcagggccagctccgtctcgtacctgagagagaaagcaagcagaaaatgagaaccctatctccccttatgcaaagatctcctcttgccatctacgtgctctgtactggggttttgctgtctaagctgaatgcactgtgtattagatttctgcgctg

SEQ ID NO: 81623 - DNA, 556 bp, Chicken  19866894375270_3
gggcaggcgttgacctccacactcacatctccagtagactgctttctcagacagttcatttcctggaaatacagcccagattagacaccacaaaggagcagaggtgctgagagcagtgctcgctgcgagyggcgcctcccaacacagctgtgaagtgcagcgatgctgcagatctgttgggtaactgaaagcacggtcctgtaggtgaaaagttctgtgccagggctctgcagagcagcagcagccrcccagcctacctcctcgtggttcttcttcaggcagcagagctcctcccgcagmgactccagctgtgcctccaggtcggacctgcagagcgtcagctggtccaggacctggcgcagcccgttgatgtccgcctccacgctctggcgcagggccagctccgtctcgtacctgagagagaaagcaagcagaaaatgagaaccctatctccccttatgcaaagatctcctcttgccatctacgtgctctgtactggggttttgctgtctaagctgaatgcactgtgtattagatttctgcgctgcattttgat

SEQ ID NO: 81624 - DNA, 600 bp, Chicken  19866894375294_1
tgtccctggggtgtacttctgctcttcgagggggccagcagccgaaaggaagaggcagaggatgtgaactcccatgtttgagcacaaagagagagagggacccattcatttctatcctcagtgttcctcagcaggcaaggagatcaccttgagttaaagagtaaaatattcatgaaggggtaaggcagagtgggtataagtcaagtcgggtttctccgcactgaaccccacagtgagagtgtctgcagactttgctgttgttgtttccttctcggcacgtaggtgcgttcttcagatccrtgtgggagttgcttatgtgacttccaggtataaaagttctggctccagagaggctgcttcacataccgtggcaaggaacacaaatacttcagtggcaatggcacgtgggagagagccataaccatcactatgcacgtaggactggaagggaccacctatgtcatggggctcagtcayggactcctcacaaacaccttccctaggctggtcaggcacagctacttggttacttccttgttattctcacagctgctaccccttgctaccscttgggagctagatcttagagatggtctgtac

SEQ ID NO: 81625 - DNA, 600 bp, Chicken  19866894375294_2
gggtaaggcagagtgggtataagtcaagtcgggtttctccgcactgaaccccacagtgagagtgtctgcagactttgctgttgttgtttccttctcggcacgtaggtgcgttcttcagatccrtgtgggagttgcttatgtgacttccaggtataaaagttctggctccagagaggctgcttcacataccgtggcaaggaacacaaatacttcagtggcaatggcacgtgggagagagccataaccatcactatgcacgtaggactggaagggaccacctatgtcatggggctcagtcayggactcctcacaaacaccttccctaggctggtcaggcacagctacttggttacttccttgttattctcacagctgctaccccttgctaccscttgggagctagatcttagagatggtctgtactgtaaactctattgttagggaaagagagaattactttcaattatgatagtttcttcacagccacacgtagctatggagagcaagcaagccataggtacaggggaaggagcaggaaataatttctttttttttttttaatttgccagcagacccatcatatcatgaacctattcttag

SEQ ID NO: 81626 - DNA, 553 bp, Chicken  19866894375294_3
ttctcggcacgtaggtgcgttcttcagatccrtgtgggagttgcttatgtgacttccaggtataaaagttctggctccagagaggctgcttcacataccgtggcaaggaacacaaatacttcagtggcaatggcacgtgggagagagccataaccatcactatgcacgtaggactggaagggaccacctatgtcatggggctcagtcayggactcctcacaaacaccttccctaggctggtcaggcacagctacttggttacttccttgttattctcacagctgctaccccttgctaccscttgggagctagatcttagagatggtctgtactgtaaactctattgttagggaaagagagaattactttcaattatgatagtttcttcacagccacacgtagctatggagagcaagcaagccataggtacaggggaaggagcaggaaataatttctttttttttttttaatttgccagcagacccatcatatcatgaacctattcttagtgatggcttgaaaagaggtagttcagaggtgtgccttgtggcta

SEQ ID NO: 81627 - DNA, 600 bp, Chicken  19866894375306_1
ctaacttgatgttaaaataaaaaattctctatgcaatgattaattaaatacaaggaatccaggaggcatagcactaaggcacatcattctacttttagtgggccacagtatatgtttgttatcaaatatacatttctgtagcagaagctgagacagcagcaggacattgcaactactgaaatgagcaccttagtgggaacatacttctgtttttcatattgcctacaaacccatgttccatggtgctttcacttgcatttcaggaagccatcgaaaaacaaaaacaaaaacaaaaaaacmcaaacaaacaaaaaaaaaacaacccaaaacctctgatctcgctttcatcaataagtaattcagaatgacaccagcaccctgagatgcccgcctccaggggcatgtcaaagtgccctggctgtcttagggcaaggaaaatggtgtggcttgcacctacattctcaatgtctccagacctttggtgaccagcttctcacatctgatcctgaatttctgcaaagtccaagcagaccttcacttgccaggaccttaagcaatgttacagaatcagagaatcacagaataacccgcagttagaag

SEQ ID NO: 81628 - DNA, 600 bp, Chicken  19866894375307_1
aggttctcaatgccttctttacatctgtctttaaaagtcagaccagatatcctcaggtttctccactctctgacctggcagccttggctggggagcagactaaacctcccacaattcaggaggaaacagtcagagacctgctactccaagtggactgccacaagtccatgggaccggatgagattcacccgagtgtgctgagggaactggcggaggtgatagccaagctgctttccatcatctataagtgctccttgttgactggagaggtcccagaagactggaggcttgccaatgtgrctcccatctacaagaagggctgcagggaggatccggggaactacaggcctgttagctttacctcggtgccggggaaatttatgaagcagattgtcttgagggagatcacgcggcttgtgcaggacaactgggggatcaggcctagccagcatgggttcacaaagggcaggtcctgcttgaccaacctgatctccttctatgatctagtgacctgtctggtggatgagggtaaggctgttgttctggtctacctagacttcagcaaagcctttgacactgtctcccacagtattctcctgc

SEQ ID NO: 81629 - DNA, 600 bp, Chicken  19866894375311_1
aacaaacaaactaatgcattgcatataacctagtatgatgaagcattcattgtgaagctttattagaatatttaactaaccttccttcccgtatctctatggtcatagaacgagacactacatccctggaagccagatctttagctacaggtgcatatctctccataaacctttcaccttgactgttaattagaatacctccctctccacgacatccttctgttatgaggcagccagccccatagatacctgcaaagaaagaaaatagccatcaaataaaagatttgagagtgtcctaaygaagacaagcaagattgcaggagcaaggtaatgcaaacaagtcacatggctagatttttttctaycttagtatcacctaataataactgtcacctgtagccacttaaaaacaagtacagctattcctatcaagcattcttactggaaagtgagcaagttcatttggaagacttgtggtatctaaaacattacaaccagaagagatctgcacctatcaatacataaggagaattttacagagattttgtagacctttatcaattactttgttcaagatttcaaagtaaaccaaaattgatc

SEQ ID NO: 81630 - DNA, 600 bp, Chicken  19866894375311_2
gaatatttaactaaccttccttcccgtatctctatggtcatagaacgagacactacatccctggaagccagatctttagctacaggtgcatatctctccataaacctttcaccttgactgttaattagaatacctccctctccacgacatccttctgttatgaggcagccagccccatagatacctgcaaagaaagaaaatagccatcaaataaaagatttgagagtgtcctaaygaagacaagcaagattgcaggagcaaggtaatgcaaacaagtcacatggctagatttttttctaycttagtatcacctaataataactgtcacctgtagccacttaaaaacaagtacagctattcctatcaagcattcttactggaaagtgagcaagttcatttggaagacttgtggtatctaaaacattacaaccagaagagatctgcacctatcaatacataaggagaattttacagagattttgtagacctttatcaattactttgttcaagatttcaaagtaaaccaaaattgatcatctcaagttctgcttattcatctttcttgcctcttctcctgaactaagacagcacaaaatggct

SEQ ID NO: 81631 - DNA, 600 bp, Chicken  19866894375325_1
ctggtgtatgtaagtaagttttggggaggcagcaggatttgctattgtacagcgtttcaaggctaagtcattgtgctgcactgctgccctcatagcgagccatatggcagggtcctactgtgcaagtacttccctaaggttcctgttcacagatggagcaacggaaccaaaaggcctgctgtgcaggagttcagtcaggttttgtaactgcattgccaggcaaccatttcagtcgcctttctgtttgacctgtttttctagctcccggtgagctctgtgaaacaagtttactcttagttsatttcatacaattgttagtttaccattcttcatttcaagaaattaacgtgagggaaatacttttgctactccgccataatgagtggtctgcttgccatggccctacagcaggaggaggagccatcctttygcatgagtttcactgtgatgatggttgtactaacagttactgcagagcagcttgggcagcgtcaagctacacaccacttcattgtgaaactgaattgctttgggggcctgggagatagcaattccagcacctggaacagatgatatttgagctcctagcagtacagtgtg

SEQ ID NO: 81632 - DNA, 600 bp, Chicken  19866894375325_2
tccctaaggttcctgttcacagatggagcaacggaaccaaaaggcctgctgtgcaggagttcagtcaggttttgtaactgcattgccaggcaaccatttcagtcgcctttctgtttgacctgtttttctagctcccggtgagctctgtgaaacaagtttactcttagttsatttcatacaattgttagtttaccattcttcatttcaagaaattaacgtgagggaaatacttttgctactccgccataatgagtggtctgcttgccatggccctacagcaggaggaggagccatcctttygcatgagtttcactgtgatgatggttgtactaacagttactgcagagcagcttgggcagcgtcaagctacacaccacttcattgtgaaactgaattgctttgggggcctgggagatagcaattccagcacctggaacagatgatatttgagctcctagcagtacagtgtgaagctttttattgcagcttagtcgtagataacatttaaaatgtctagcgagaaagagcgtgtgggattagggagtgtctcaatagcggtactgtaacacagctaggcgtttcagagcaagaaactgtacc

SEQ ID NO: 81633 - DNA, 600 bp, Chicken  19866894375338_1
tttgttcactcggagtaagcaatcagttttacccgggggagaaaaaatacttcctaattgcatgcaagcacaccaagattgagctttaaagtaaggcttagagaagtgtataggcaactgaacatgaccttggataaggaaaacatttgagcattcttaactaactataagcactgcaatgcacactagctataatgtgtgtgtatgtgtgtgcatgtgagcatgcacatggcatatatcttacagtgccaaaacactaaattcctatggcaagatgcaactaataagtagcagaggggrtgggataatttttaacatatagttgtatctgtatatacccatcaaggcaacaataaagaattaatgttataattaatattatgttacaggagagaagcagctgtgatagtcacatcatttatcagaggaagccatgggtctttgatctaagaaaaacaaagaaaattacctactgttattttcaacaaactgtttaaaccgattagatattttgaacttccattcctattgagggaaacactatccttacagttggcttgttaacaaaaaacagtgtaacactttggggaatatattctc

SEQ ID NO: 81634 - DNA, 599 bp, Chicken  19866894375346_1
  misc_feature (1)..(247): n is any nucleotide
nnnnnnnnnnnnnnnnnnnnnnnnnnnnnnnnnnnnnnnnnnnnnnnnnnnnnnnnnnnnnnnnnnnnnnnnnnnnnnnnnnnnnnnnnnnnnnnnnnnnnnnnnnnnnnnnnnnnnnnnnnnnnnnnnnnnnnnnnnnnnnnnnnnnnnnnnnnnnnnnnnnnnnnnnnnnnnnnnnnnnnnnnnnnnnnnnnnnnnnnnnnnnnnnnnnnnnnnnnnnnnnnnnnnnnnnnnnnnnnnnnnnnnncagcacggatagccccagctgaattatccaggacagctactctgcctcccttyccattgctcccaccagcaggactgtgtaacgtgatgctgctgacctgaggaagggatgctgatggtactcaaatcaggcagaggtagctggatggtttagtgatgcttctcatgttttggcatcttgtggggttatccatcatctcccatagcccttgctgatgcagcgtgtcattgctctgtcattttggggagcaatttggagggcctcatctgctggaaggaattggtgcagtgcaaaggaacgtcccagctgccactctgctcttctgtgtaggtcatctcttgctttgctatac

SEQ ID NO: 81635 - DNA, 599 bp, Chicken  19866894375347_1
  misc_feature (1)..(16): n is any nucleotide
nnnnnnnnnnnnnnnnaaaagaggacaggagatattctggttaagagactacaacctctttacattatataaaagatacaaacactgcagtatacttttacatttataaaagcacacatatattacaacagccccctcctaaggactgcacattaccggatctcactgaagcacagttatccctgacccaatgctcagtgcagtgagaccacagttactgctcagaggaaagagtcgtgtcttctgtgtacaggtaaagcatcagcacaaagctatttaatgccaaaatataagggaatrgagttcttgtgagttctctttgtacacatwgtagttttaggtagaataattgtaaaaatatctttggaaawgaaataacttctttgatgagagctgtttacctaccgatcaaatgtctgtaagggagctgatggtctctaagattcacgtgagcgatgtgaccaacacggctaaaaccagaggtgacatcctggccttcaggaaggactgctcgtaggatctcctctgacttgaaattctcataagtcagctccaaattgtacttggacacctcaggactaacgtgaagctgttttaat

SEQ ID NO: 81636 - DNA, 600 bp, Chicken  19866894375347_2
gatattctggttaagagactacaacctctttacattatataaaagatacaaacactgcagtatacttttacatttataaaagcacacatatattacaacagccccctcctaaggactgcacattaccggatctcactgaagcacagttatccctgacccaatgctcagtgcagtgagaccacagttactgctcagaggaaagagtcgtgtcttctgtgtacaggtaaagcatcagcacaaagctatttaatgccaaaatataagggaatrgagttcttgtgagttctctttgtacacatwgtagttttaggtagaataattgtaaaaatatctttggaaawgaaataacttctttgatgagagctgtttacctaccgatcaaatgtctgtaagggagctgatggtctctaagattcacgtgagcgatgtgaccaacacggctaaaaccagaggtgacatcctggccttcaggaaggactgctcgtaggatctcctctgacttgaaattctcataagtcagctccaaattgtacttggacacctcaggactaacgtgaagctgttttaatacctctttctccgactctcccaatgagaatt

SEQ ID NO: 81637 - DNA, 600 bp, Chicken  19866894375347_3
aaagatacaaacactgcagtatacttttacatttataaaagcacacatatattacaacagccccctcctaaggactgcacattaccggatctcactgaagcacagttatccctgacccaatgctcagtgcagtgagaccacagttactgctcagaggaaagagtcgtgtcttctgtgtacaggtaaagcatcagcacaaagctatttaatgccaaaatataagggaatrgagttcttgtgagttctctttgtacacatwgtagttttaggtagaataattgtaaaaatatctttggaaawgaaataacttctttgatgagagctgtttacctaccgatcaaatgtctgtaagggagctgatggtctctaagattcacgtgagcgatgtgaccaacacggctaaaaccagaggtgacatcctggccttcaggaaggactgctcgtaggatctcctctgacttgaaattctcataagtcagctccaaattgtacttggacacctcaggactaacgtgaagctgttttaatacctctttctccgactctcccaatgagaattccggtattttatgaggatccaatataacaagtttactgtcc

SEQ ID NO: 81638 - DNA, 599 bp, Chicken  19866894375349_1
  misc_feature (1)..(88): n is any nucleotide
nnnnnnnnnnnnnnnnnnnnnnnnnnnnnnnnnnnnnnnnnnnnnnnnnnnnnnnnnnnnnnnnnnnnnnnnnnnnnnnnnnnnnnnncctgctgcaaaggggtatattgttggcagatacttaatgatctgaaaattgagatgaagtaaaaatatacagatagccatattgactttagtggcagaatgatgagttgattctcagcctctggaatgcatggatgaaaccttatgccagtacctaaacacatctacagttgtaattgcagccccattcagttaaaaaaaacaaacacacamaaaaaaaacaacccaccctatttgtcaaaatatattctctttggacaataaaaccatgaaaaatcatgtaattatgctatctttcatctttaagtacacaggtttagagtctataggaataatctcactgcactgacccactagtgccaaataatgctttcttactgtgtttctctttttcttactcagtttaccaagataaatgtgcagagttaaaaaaaaaaaaaagccttcttctaaccttcttctaagacagtaaaagaaatgaatttactctttcttttcagcttcatgaacat

SEQ ID NO: 81639 - DNA, 599 bp, Chicken  19866894375364_1
  misc_feature (1)..(33): n is any nucleotide
nnnnnnnnnnnnnnnnnnnnnnnnnnnnnnnnnattgcttctggaaatattgtacttgaagacattttcacatcagctgaatgtgttcaagtatcatcataacgtggtgtttacaccagattaataccatgtgctgtgtgggaattatgtcaggttataaatggaaatacagtacacaatctgaaattcaggaatatggtagagtctaatttcttttaaagtgctgttaatcaagaagagcacaagtacacaggtctgaataacagcgctctcagtttacgctggtatagtgagggtagracccaattccatctgccctcaagtttcgttaaacaagtcataaaaatatcaccagttacaattatttctgcataatagtagtggactaatgaattcattaaagcagacaggaktgctkctagaaaaccatggtgagctctccaatctgatgagaattctttttctagctttttttctcccaaaatggcgccacttctccatggctcctctaggcctcatgtgatgctgtcaacacatttcaactcaacgctgaaagcacttgtttaatctgcattttgctcactgcataaatagtttaa

SEQ ID NO: 81640 - DNA, 600 bp, Chicken  19866894375364_2
caccagattaataccatgtgctgtgtgggaattatgtcaggttataaatggaaatacagtacacaatctgaaattcaggaatatggtagagtctaatttcttttaaagtgctgttaatcaagaagagcacaagtacacaggtctgaataacagcgctctcagtttacgctggtatagtgagggtagracccaattccatctgccctcaagtttcgttaaacaagtcataaaaatatcaccagttacaattatttctgcataatagtagtggactaatgaattcattaaagcagacaggaktgctkctagaaaaccatggtgagctctccaatctgatgagaattctttttctagctttttttctcccaaaatggcgccacttctccatggctcctctaggcctcatgtgatgctgtcaacacatttcaactcaacgctgaaagcacttgtttaatctgcattttgctcactgcataaatagtttaacagttgtcgagagggtcagaaataggaataaaagcacaaaaaagtgggagaagacgtgaagaatgcagcagcagaatgagactaaattgaaaactgagttaaaaacagatgagg

SEQ ID NO: 81641 - DNA, 600 bp, Chicken  19866894375364_3
gattaataccatgtgctgtgtgggaattatgtcaggttataaatggaaatacagtacacaatctgaaattcaggaatatggtagagtctaatttcttttaaagtgctgttaatcaagaagagcacaagtacacaggtctgaataacagcgctctcagtttacgctggtatagtgagggtagracccaattccatctgccctcaagtttcgttaaacaagtcataaaaatatcaccagttacaattatttctgcataatagtagtggactaatgaattcattaaagcagacaggaktgctkctagaaaaccatggtgagctctccaatctgatgagaattctttttctagctttttttctcccaaaatggcgccacttctccatggctcctctaggcctcatgtgatgctgtcaacacatttcaactcaacgctgaaagcacttgtttaatctgcattttgctcactgcataaatagtttaacagttgtcgagagggtcagaaataggaataaaagcacaaaaaagtgggagaagacgtgaagaatgcagcagcagaatgagactaaattgaaaactgagttaaaaacagatgaggaatta

SEQ ID NO: 81642 - DNA, 600 bp, Chicken  19866894375368_1
gaagagtaattcatagaagataacttggatggaactcatggatctggatactgcctttgaacatattggtaggaactccattaacttcagaggatgtgatgcatggaaaggcaaggaactagatctgaaagtgccatacagtaaaatctgtacttaacatattgtcagtgctgtcaggatatggttcttccctctaaccaagagggagggaaaattcctctctttatggccatacaggccattttttttttaccaactctgaccacagtacaaaccaaaggaaattttacttcagacacmatctatagtcaacatttcaagtattcctctatgtcatattcctctagtagctgaatctatgtcatattcctgtagtagctgaatctactataattattatcacagaaatcaagaagctgacctyatgaatggcctatggaatcttgtccacattttcaactatgtcaattaattaaaagacattacattactctctccaaaaagccttgctctgctcagaaacaaaacagtgtatatctgtttccaaagagaaataattttacccyattcttccctcaatcatttgagagcatttactga

SEQ ID NO: 81643 - DNA, 600 bp, Chicken  19866894375368_2
ctgaaagtgccatacagtaaaatctgtacttaacatattgtcagtgctgtcaggatatggttcttccctctaaccaagagggagggaaaattcctctctttatggccatacaggccattttttttttaccaactctgaccacagtacaaaccaaaggaaattttacttcagacacmatctatagtcaacatttcaagtattcctctatgtcatattcctctagtagctgaatctatgtcatattcctgtagtagctgaatctactataattattatcacagaaatcaagaagctgacctyatgaatggcctatggaatcttgtccacattttcaactatgtcaattaattaaaagacattacattactctctccaaaaagccttgctctgctcagaaacaaaacagtgtatatctgtttccaaagagaaataattttacccyattcttccctcaatcatttgagagcatttactgaattcacggtttccatctcttgtttcgtttagcattttggcttaggcaatgaagatgaaagtctgtttctcagaacattcttaatatttaattttgaaaaagcagttaaatacaaaatgcaactt

SEQ ID NO: 81644 - DNA, 600 bp, Chicken  19866894375368_3
agtacaaaccaaaggaaattttacttcagacacmatctatagtcaacatttcaagtattcctctatgtcatattcctctagtagctgaatctatgtcatattcctgtagtagctgaatctactataattattatcacagaaatcaagaagctgacctyatgaatggcctatggaatcttgtccacattttcaactatgtcaattaattaaaagacattacattactctctccaaaaagccttgctctgctcagaaacaaaacagtgtatatctgtttccaaagagaaataattttacccyattcttccctcaatcatttgagagcatttactgaattcacggtttccatctcttgtttcgtttagcattttggcttaggcaatgaagatgaaagtctgtttctcagaacattcttaatatttaattttgaaaaagcagttaaatacaaaatgcaacttactttgtatttctggtaatatgtttcattctctgtgtccaccagcaaagttgctaacttttttcgctgcacagccaaccagctcacggtctctgttactttaccctagtaattagagcagaaaatttcttgtttctgttttg

SEQ ID NO: 81645 - DNA, 600 bp, Chicken  19866894375375_1
gctgctaaaacttgcataatatattcttctgtgtctaaatccctaagagattgaataactgttttctttttcaccccaagtgactatgcgactgtatgagtcactcctgttacgatagaggaattgcaatctttgtgcctttccagttttctttggccaggaatttattttataggacacctctgttcaatctgttccaagtccttatatgtcaccagaaatattttcactgactttggttctcttcagatcatgtgctttggcttggaggctgctttaagttattggtaaaacagatgkagaaaygttcatctttatccagtggtattactgagctatttaattacttatggaagcattagtgaaacttaaatatattgagtatttaaataacagcaacaatcaaaaaaaaaaggttatagtaattattaaatatacagatatatgtatgctggagggagtattttgtacaaaagatctgcagcgacagctgtgaatgaaccatgagaaggactagcaacagatggctggtaaaaaggaggacagagtgaaaggtgtccttttgtaataggtgaacatgatatccctgcaagcagcatg

SEQ ID NO: 81646 - DNA, 600 bp, Chicken  19866894375375_2
aaaacttgcataatatattcttctgtgtctaaatccctaagagattgaataactgttttctttttcaccccaagtgactatgcgactgtatgagtcactcctgttacgatagaggaattgcaatctttgtgcctttccagttttctttggccaggaatttattttataggacacctctgttcaatctgttccaagtccttatatgtcaccagaaatattttcactgactttggttctcttcagatcatgtgctttggcttggaggctgctttaagttattggtaaaacagatgkagaaaygttcatctttatccagtggtattactgagctatttaattacttatggaagcattagtgaaacttaaatatattgagtatttaaataacagcaacaatcaaaaaaaaaaggttatagtaattattaaatatacagatatatgtatgctggagggagtattttgtacaaaagatctgcagcgacagctgtgaatgaaccatgagaaggactagcaacagatggctggtaaaaaggaggacagagtgaaaggtgtccttttgtaataggtgaacatgatatccctgcaagcagcatgggatgt

SEQ ID NO: 81647 - DNA, 600 bp, Chicken  19866894375376_1
gtggggaaaaaacagattattgtttgcagggcttctttattgggtcattgtactttcaatctctagaatgagaagcatgctataaatataaaacaactgttttggggaagcctttatttgtttctgagctagtctacatcttcagtaagtgatattagagtaatccaatctccttctctgcaaatttgtttttggtgtttgacttggagagcaaagaatcccttcccctgttcttctgcaaacagaacttccatctaattcatggagggctcgtctgtattaagagtgtgtgcagatcastcaggatttcagtgtttggcccttacagccttcattgacttctcaaggacagttgccagagcagctgccaaaatgccaccgttcaaagagcaggagaacatctcctttttggagacaaaggtcttcaagactgcagagcattttgctgttccragttctgctcaagcatgtaatgtgctgagctcagtgagctggaaatgcctgtttgaggtgatgtttcagcaagcagtttgcctcttgtagctaggtcagaagacctttgccttgatctagtgacaagaaggctgaattgttgtcacc

SEQ ID NO: 81648 - DNA, 600 bp, Chicken  19866894375376_2
attagagtaatccaatctccttctctgcaaatttgtttttggtgtttgacttggagagcaaagaatcccttcccctgttcttctgcaaacagaacttccatctaattcatggagggctcgtctgtattaagagtgtgtgcagatcastcaggatttcagtgtttggcccttacagccttcattgacttctcaaggacagttgccagagcagctgccaaaatgccaccgttcaaagagcaggagaacatctcctttttggagacaaaggtcttcaagactgcagagcattttgctgttccragttctgctcaagcatgtaatgtgctgagctcagtgagctggaaatgcctgtttgaggtgatgtttcagcaagcagtttgcctcttgtagctaggtcagaagacctttgccttgatctagtgacaagaaggctgaattgttgtcacctctcatgtctttcctctgatgtcagtaagtgctgctattatgatgccaggagtttgagaagcaggtgccatgtggacacaagcccacactgcaaagacatgtggggctggggaggagcaaacagcccctgtgtcatatcagatgctctctggg

SEQ ID NO: 81649 - DNA, 599 bp, Chicken  19866894375381_1
  misc_feature (1)..(38): n is any nucleotide
nnnnnnnnnnnnnnnnnnnnnnnnnnnnnnnnnnnnnncccaaatggtttcccacagtcgtggtctttcatggccagcggtgatggaactgggccaccagcagttgcctaagacaggttgacatggccctgtggcccgagacacagaaagctgtgcaccaagtcaatgtggtgcagcagcacactgagggcacaaaaggagacattgaaactggttccacacctaatgcagagtttggggcacatttcctggctcttctgctgctttttaggcttgtcagccacactgtaggaaaacaaraatcatgggaaataaaaaagactaagtaaaaatggcatcaaagcaaacgtaaacaaaaatactttttcaaacctctctggaacaccagagcagacacagcactcaacagtattttgctcaaaaagcaggggyttgagcctgcaaactcttacctgtggctttgtctgtacgtatctccactgaacaaaccactgcagtgtgtatgagcagtaatgctgctgggctcagtggagcacactctcatgcagggtatggccaggatcagggcctagcttttttttcttccccatttacattta

SEQ ID NO: 81650 - DNA, 600 bp, Chicken  19866894375381_2
ggcccgagacacagaaagctgtgcaccaagtcaatgtggtgcagcagcacactgagggcacaaaaggagacattgaaactggttccacacctaatgcagagtttggggcacatttcctggctcttctgctgctttttaggcttgtcagccacactgtaggaaaacaaraatcatgggaaataaaaaagactaagtaaaaatggcatcaaagcaaacgtaaacaaaaatactttttcaaacctctctggaacaccagagcagacacagcactcaacagtattttgctcaaaaagcaggggyttgagcctgcaaactcttacctgtggctttgtctgtacgtatctccactgaacaaaccactgcagtgtgtatgagcagtaatgctgctgggctcagtggagcacactctcatgcagggtatggccaggatcagggcctagcttttttttcttccccatttacatttaatgagaatttgcaacctcccccaccccagtaaaaatctaaaagaacaacaccttctattctgtgtctagccaaaaaaraggcttctttatgtactaaaacaaaggagtttttaatgacgcagatatcatgctc

SEQ ID NO: 81651 - DNA, 367 bp, Chicken  19866894375381_3
tggaacaccagagcagacacagcactcaacagtattttgctcaaaaagcaggggyttgagcctgcaaactcttacctgtggctttgtctgtacgtatctccactgaacaaaccactgcagtgtgtatgagcagtaatgctgctgggctcagtggagcacactctcatgcagggtatggccaggatcagggcctagcttttttttcttccccatttacatttaatgagaatttgcaacctcccccaccccagtaaaaatctaaaagaacaacaccttctattctgtgtctagccaaaaaaraggcttctttatgtactaaaacaaaggagtttttaatgacgcagatatcatgctcagatgatagggg

SEQ ID NO: 81652 - DNA, 556 bp, Chicken  19866894375387_1
tttggtggctcctttaattacatggattctgagaagaccacctttttcctttagctacgatgtgttgtattaaacttatttatgaaggagaaatgctgcagcattaagtgtagatgattccgcttcctctgacacgctgtagaatggctcatttctttgatcatccaaatcatagaatagcttagttttgaaggtatcttaaatccagccctggtccaatctcctgctgaggacagggctccccccaccagctcaggctgctcagagccctatccaacctggccttgagctgctccaggratggggcacccacagcttctcygggcagctgtgccagctcctcaccagccaaatccaggggataaaaaaactttgttccttctccttgatagtttctaaacacaatgcttatcataatgcacttgattcaatctcttttctaaacccaacatggtttacggaagaactgaggaggctgcacttgcagggcaaattatagcacctgttcccaaatcctgttatctgagtgatgatataatgtctgaggaccacattt

SEQ ID NO: 81653 - DNA, 534 bp, Chicken  19866894375387_2
tggattctgagaagaccacctttttcctttagctacgatgtgttgtattaaacttatttatgaaggagaaatgctgcagcattaagtgtagatgattccgcttcctctgacacgctgtagaatggctcatttctttgatcatccaaatcatagaatagcttagttttgaaggtatcttaaatccagccctggtccaatctcctgctgaggacagggctccccccaccagctcaggctgctcagagccctatccaacctggccttgagctgctccaggratggggcacccacagcttctcygggcagctgtgccagctcctcaccagccaaatccaggggataaaaaaactttgttccttctccttgatagtttctaaacacaatgcttatcataatgcacttgattcaatctcttttctaaacccaacatggtttacggaagaactgaggaggctgcacttgcagggcaaattatagcacctgttcccaaatcctgttatctgagtgatgatataatgtctgaggaccacattt

SEQ ID NO: 81654 - DNA, 600 bp, Chicken  19866894375389_1
catttggaataaagacttcagaaattgtaaccatcctccagttaacatagcagtaaggaccagggcatgtgccacagtagtatcactaaaaataatgatgatgaaggtggttcatttccagctccctcttggctggtggcaaaatattctagagtgcaaactgggttgcttgacactgagacaaaacctgcaggagttcttgctaagttgttggttctgcctggtggatgctacactgtgggaacaacgtattattaccctgtgaataattactccaacaaataccaatttcttgtaaaygttcacgttttagtgatgttttgtgtccaactacccacaattccctacagtgacacagaagagacaaaggcttttgctacaaatcttccccacttcagtggttagttacctggtctcgctccttctccacctcttctagctgtatcatcacagtgttcatacggtgcttatacatctcacagtcttttcctagagttgaacacttcaactccaaatcttctttctcttcaagatactgaaaacagcagtctgttagctaccactgcccttagaggtcttctgggtaccagcctgacatat

SEQ ID NO: 81655 - DNA, 600 bp, Chicken  19866894375392_1
agtatataaacaatggcatatattcagttgtatttaaaacttctacatgttcaggcttgtaagatgaagatctttcgaactttaaaacttgtgatttttaacattgatattttagatgagaaatgtaagtaacagttttgtttgccttgttcttaaaagcaaagtacatttagtttttcttcagtttatgaaggatggtcacaagctcaacattctgtttaaagtcatgcacactagctttggctatgaatagaagcagcttgcatgttcacattttaatatgacactgcatgatttctrgaagcttttttggctttactgttagacctgatgagtttattctggtctttttcagttccttttaactggccagatgcatgatacaaggccatatgtttataggcaaatgctttgacacgggaataatactgtctaamatgttttggtgtttttatttagggaccagagaaaatactcctgtggttctttagggcttttttggttgtgtggttttttagggattgtttttgttttcaaatttgaatcagatgaattacatgctattgcttctttctaatgagatgtatatttaactcacta

SEQ ID NO: 81656 - DNA, 600 bp, Chicken  19866894375392_2
ttgtttgccttgttcttaaaagcaaagtacatttagtttttcttcagtttatgaaggatggtcacaagctcaacattctgtttaaagtcatgcacactagctttggctatgaatagaagcagcttgcatgttcacattttaatatgacactgcatgatttctrgaagcttttttggctttactgttagacctgatgagtttattctggtctttttcagttccttttaactggccagatgcatgatacaaggccatatgtttataggcaaatgctttgacacgggaataatactgtctaamatgttttggtgtttttatttagggaccagagaaaatactcctgtggttctttagggcttttttggttgtgtggttttttagggattgtttttgttttcaaatttgaatcagatgaattacatgctattgcttctttctaatgagatgtatatttaactcactattttgcatagtgtcctttaatcataggtataactcatagtaaatttgtaaaacctgatattacctgcttgtttcttcagacagaaaatgcataaaacatcggtctagtactataatgtatatactataaatcacatt

SEQ ID NO: 81657 - DNA, 599 bp, Chicken  19866894375394_1
  misc_feature (1)..(61): n is any nucleotide
nnnnnnnnnnnnnnnnnnnnnnnnnnnnnnnnnnnnnnnnnnnnnnnnnnnnnnnnnnnnnaaaactcagcaaacaaaggcattctccaacttctcttctcatgctctatttgggttccccatgttttgctgtatcccgcaggtacgaagctccagttgtaacagccatggtacagaactctcactaattttcattgccaagctttgcctgaacatcaaagcagttccaccatacaccttatggcacacaccagtcttgggaccacagactgttttatacttatgattctatgactataygagtatttctgtattgamtattcacaacacagaacaacaattcacrtgaagatccttacacataaatttaaaacattaaaacatttaatacggactcggctgaggtctctgacctcaagaaaagctgmcagtgaaaagcgccattagtaaaacagctaaatctccataagagcattgagaacaatcccttccttttccctccccattttttctgatacaccgtaaagccatttcaattgcattttaagccagattcccgaatttgattgcccagcaggatgcagtactgcttggtggac

SEQ ID NO: 81658 - DNA, 599 bp, Chicken  19866894375394_2
  misc_feature (1)..(43): n is any nucleotide
nnnnnnnnnnnnnnnnnnnnnnnnnnnnnnnnnnnnnnnnnnnaaaactcagcaaacaaaggcattctccaacttctcttctcatgctctatttgggttccccatgttttgctgtatcccgcaggtacgaagctccagttgtaacagccatggtacagaactctcactaattttcattgccaagctttgcctgaacatcaaagcagttccaccatacaccttatggcacacaccagtcttgggaccacagactgttttatacttatgattctatgactataygagtatttctgtattgamtattcacaacacagaacaacaattcacrtgaagatccttacacataaatttaaaacattaaaacatttaatacggactcggctgaggtctctgacctcaagaaaagctgmcagtgaaaagcgccattagtaaaacagctaaatctccataagagcattgagaacaatcccttccttttccctccccattttttctgatacaccgtaaagccatttcaattgcattttaagccagattcccgaatttgattgcccagcaggatgcagtactgcttggtggacagatgctctgagctatgc

SEQ ID NO: 81659 - DNA, 599 bp, Chicken  19866894375394_3
  misc_feature (1)..(15): n is any nucleotide
nnnnnnnnnnnnnnnaaaactcagcaaacaaaggcattctccaacttctcttctcatgctctatttgggttccccatgttttgctgtatcccgcaggtacgaagctccagttgtaacagccatggtacagaactctcactaattttcattgccaagctttgcctgaacatcaaagcagttccaccatacaccttatggcacacaccagtcttgggaccacagactgttttatacttatgattctatgactataygagtatttctgtattgamtattcacaacacagaacaacaattcacrtgaagatccttacacataaatttaaaacattaaaacatttaatacggactcggctgaggtctctgacctcaagaaaagctgmcagtgaaaagcgccattagtaaaacagctaaatctccataagagcattgagaacaatcccttccttttccctccccattttttctgatacaccgtaaagccatttcaattgcattttaagccagattcccgaatttgattgcccagcaggatgcagtactgcttggtggacagatgctctgagctatgccccatgctcaaatctttgctatccrctt

SEQ ID NO: 81660 - DNA, 600 bp, Chicken  19866894375394_4
gctgtatcccgcaggtacgaagctccagttgtaacagccatggtacagaactctcactaattttcattgccaagctttgcctgaacatcaaagcagttccaccatacaccttatggcacacaccagtcttgggaccacagactgttttatacttatgattctatgactataygagtatttctgtattgamtattcacaacacagaacaacaattcacrtgaagatccttacacataaatttaaaacattaaaacatttaatacggactcggctgaggtctctgacctcaagaaaagctgmcagtgaaaagcgccattagtaaaacagctaaatctccataagagcattgagaacaatcccttccttttccctccccattttttctgatacaccgtaaagccatttcaattgcattttaagccagattcccgaatttgattgcccagcaggatgcagtactgcttggtggacagatgctctgagctatgccccatgctcaaatctttgctatccrcttcaaagaggaatactcttctgaagaaacgcctccatctgcacagaagcacacaatcatagtgaaataacactttcttgacatct

SEQ ID NO: 81661 - DNA, 580 bp, Chicken  19866894375394_5
cacrtgaagatccttacacataaatttaaaacattaaaacatttaatacggactcggctgaggtctctgacctcaagaaaagctgmcagtgaaaagcgccattagtaaaacagctaaatctccataagagcattgagaacaatcccttccttttccctccccattttttctgatacaccgtaaagccatttcaattgcattttaagccagattcccgaatttgattgcccagcaggatgcagtactgcttggtggacagatgctctgagctatgccccatgctcaaatctttgctatccrcttcaaagaggaatactcttctgaagaaacgcctccatctgcacagaagcacacaatcatagtgaaataacactttcttgacatctgcagcacttaaaggtttttgcttctgttgctaatttcaaggactcacaaatacatcttttatgtgttagctactttacagctatagattggtcttcaaatacttctgtgaaataaaattctgttattttggcatatatcaacaaaactatctcctggattcctgttcccagggatctgagccttcttttcaaga

SEQ ID NO: 81662 - DNA, 599 bp, Chicken  19866894375398_1
  misc_feature (1)..(94): n is any nucleotide
nnnnnnnnnnnnnnnnnnnnnnnnnnnnnnnnnnnnnnnnnnnnnnnnnnnnnnnnnnnnnnnnnnnnnnnnnnnnnnnnnnnnnnnnnnnnnncatccattgctttaacagattgcatcatgcattgtgtctgctgatggagcttggtgcttggagacgttggaggtggccaacttcatagaatcacaggctggttgggttggaagggacttcacagcccacccacccaacccctgccatgggttggctgccccccaccagctcaggctgcccagggcccacccaacccagccctgagygcctgcagggatggagcacccacagctctctgggcagctgtgccagggcctcaccaccctccaagtaaagaccttcctcctaaaatctaatctcactctcccctcttttggtttaaaactgccctccttgtcctgtcactgtcttcatgtgtaaaatgtcagtccccctactgtttataagaagctccttcaagtgctggaaggctgcactgaggtctccctgaagccttcttcactccaggctggacaagtccagctctctcaacctttcttcataagagagatgcttcaggcctctg

SEQ ID NO: 81663 - DNA, 599 bp, Chicken  19866894375401_1
  misc_feature (1)..(170): n is any nucleotide
nnnnnnnnnnnnnnnnnnnnnnnnnnnnnnnnnnnnnnnnnnnnnnnnnnnnnnnnnnnnnnnnnnnnnnnnnnnnnnnnnnnnnnnnnnnnnnnnnnnnnnnnnnnnnnnnnnnnnnnnnnnnnnnnnnnnnnnnnnnnnnnnnnnnnnnnnnnnnnnnnnnnnnnnnnattttggaagagtgaatagtccagaaaacaaagatttaactacaaagaaagaaatgtttcttacattgcaggctagcaaaacatggctttttatccagaatattaatgtgcacatctctggcaaatttaytgaaagattcacttygcatttaatcagaaaatgttaatgaagtaaccttctaactttgatttgcctgttgggttataagcaagaatttctgagtgataataayctttgtctggggcatgaggaggaaattgaaatcaagttctccagcaatttaaaatgtttwaaaaagtttttaaatatgtaactaacatctttctgttaaggctgaacagatgcttttgactggaggtttgaaatctctccttccacatgcacgaagaagaataattcattgcarcagacttcgtattagtaatatc

SEQ ID NO: 81664 - DNA, 599 bp, Chicken  19866894375401_2
  misc_feature (1)..(155): n is any nucleotide
nnnnnnnnnnnnnnnnnnnnnnnnnnnnnnnnnnnnnnnnnnnnnnnnnnnnnnnnnnnnnnnnnnnnnnnnnnnnnnnnnnnnnnnnnnnnnnnnnnnnnnnnnnnnnnnnnnnnnnnnnnnnnnnnnnnnnnnnnnnnnnnnnnnnnnnnnnnattttggaagagtgaatagtccagaaaacaaagatttaactacaaagaaagaaatgtttcttacattgcaggctagcaaaacatggctttttatccagaatattaatgtgcacatctctggcaaatttaytgaaagattcacttygcatttaatcagaaaatgttaatgaagtaaccttctaactttgatttgcctgttgggttataagcaagaatttctgagtgataataayctttgtctggggcatgaggaggaaattgaaatcaagttctccagcaatttaaaatgtttwaaaaagtttttaaatatgtaactaacatctttctgttaaggctgaacagatgcttttgactggaggtttgaaatctctccttccacatgcacgaagaagaataattcattgcarcagacttcgtattagtaatatctctggaatggcagaa

SEQ ID NO: 81665 - DNA, 599 bp, Chicken  19866894375401_3
  misc_feature (1)..(67): n is any nucleotide
nnnnnnnnnnnnnnnnnnnnnnnnnnnnnnnnnnnnnnnnnnnnnnnnnnnnnnnnnnnnnnnnnnnattttggaagagtgaatagtccagaaaacaaagatttaactacaaagaaagaaatgtttcttacattgcaggctagcaaaacatggctttttatccagaatattaatgtgcacatctctggcaaatttaytgaaagattcacttygcatttaatcagaaaatgttaatgaagtaaccttctaactttgatttgcctgttgggttataagcaagaatttctgagtgataataayctttgtctggggcatgaggaggaaattgaaatcaagttctccagcaatttaaaatgtttwaaaaagtttttaaatatgtaactaacatctttctgttaaggctgaacagatgcttttgactggaggtttgaaatctctccttccacatgcacgaagaagaataattcattgcarcagacttcgtattagtaatatctctggaatggcagaaggtaaggcgacctaacagctctgtgtggagacagattctgttttggattcatagcaatagttttacatatattttttcttttcctgtt

SEQ ID NO: 81666 - DNA, 599 bp, Chicken  19866894375401_4
  misc_feature (1)..(7): n is any nucleotide
nnnnnnnattttggaagagtgaatagtccagaaaacaaagatttaactacaaagaaagaaatgtttcttacattgcaggctagcaaaacatggctttttatccagaatattaatgtgcacatctctggcaaatttaytgaaagattcacttygcatttaatcagaaaatgttaatgaagtaaccttctaactttgatttgcctgttgggttataagcaagaatttctgagtgataataayctttgtctggggcatgaggaggaaattgaaatcaagttctccagcaatttaaaatgtttwaaaaagtttttaaatatgtaactaacatctttctgttaaggctgaacagatgcttttgactggaggtttgaaatctctccttccacatgcacgaagaagaataattcattgcarcagacttcgtattagtaatatctctggaatggcagaaggtaaggcgacctaacagctctgtgtggagacagattctgttttggattcatagcaatagttttacatatattttttcttttcctgttcacaatgtttacaaaggaaagwaggattctcaaaagcaatgaagtaaatgagaagaaatg

SEQ ID NO: 81667 - DNA, 571 bp, Chicken  19866894375401_5
gtgcacatctctggcaaatttaytgaaagattcacttygcatttaatcagaaaatgttaatgaagtaaccttctaactttgatttgcctgttgggttataagcaagaatttctgagtgataataayctttgtctggggcatgaggaggaaattgaaatcaagttctccagcaatttaaaatgtttwaaaaagtttttaaatatgtaactaacatctttctgttaaggctgaacagatgcttttgactggaggtttgaaatctctccttccacatgcacgaagaagaataattcattgcarcagacttcgtattagtaatatctctggaatggcagaaggtaaggcgacctaacagctctgtgtggagacagattctgttttggattcatagcaatagttttacatatattttttcttttcctgttcacaatgtttacaaaggaaagwaggattctcaaaagcaatgaagtaaatgagaagaaatgtcaagttgacttacattcttaacttgcgtggatgtttttaaaatcacattatatctacctgacattgtgttcttaaatcacaaagc

SEQ ID NO: 81668 - DNA, 424 bp, Chicken  19866894375401_6
gaaattgaaatcaagttctccagcaatttaaaatgtttwaaaaagtttttaaatatgtaactaacatctttctgttaaggctgaacagatgcttttgactggaggtttgaaatctctccttccacatgcacgaagaagaataattcattgcarcagacttcgtattagtaatatctctggaatggcagaaggtaaggcgacctaacagctctgtgtggagacagattctgttttggattcatagcaatagttttacatatattttttcttttcctgttcacaatgtttacaaaggaaagwaggattctcaaaagcaatgaagtaaatgagaagaaatgtcaagttgacttacattcttaacttgcgtggatgtttttaaaatcacattatatctacctgacattgtgttcttaaatcacaaagc

SEQ ID NO: 81669 - DNA, 600 bp, Chicken  19866894375404_1
tgaaaaatcttccctaggcaactccaagtacagggtataccctgaaatgtgtgtaactggttagattcctgttgggacagggatccaaagctgaagatcttactggatattcctcctaatacatcactgagagatgctactctgttgtaagcttcccagatgagattctggagtttggatggagctactctggggtactgaaccagaataaactaataacagcacagatctgacttctgcaaagccccaggcacttgaagaaccagcatacacagctcttccgcagagcagaacctaggrgagccaattctctgctaaagagatgcagtgtccaaacaacctccaacagaccagatctatttgtgagcagctggaagcaaaagctgtttatactgtttaccaaaattctactttttaatcatgcttttaaaatcaagttaaattaatttgaagcagaagctaaaatgtttggctcaaatgcagattgaaaccagttaacttcctcagccattgtttttcattcacatcttcggcagggacaacgaccttaaatgttgcaatacaactgatgaagctggctgctgaggtatgtggaacaca

SEQ ID NO: 81670 - DNA, 600 bp, Chicken  19866894375418_1
tcaacatgtaattttgatctaaaataatgtaaaagaattactttcctcacttttcttttccagcacgcatagcggtttaataagctagatgttgtagaccagtatctcccagttttgggggaataaaatttctcctgacacattacataatttacacaagaatggtagcaatggcatacatgtctaactatagatacacaagtgggaagaaaaagatgcattatttttaggaggcagaagaaatgcataattgcactgttggattgccctgttctagaaattgttaagccaagaatacawctccaaccatttcaaaagcactgatctccaaggaaccatttcagtgacttactgaagaactcataagatgcagtgatgcctcaggtagtttctttcttcaagcacagttatggtcaataccaaaattagcacagaggttctgctggtgcttggcttctgccaaaacaatatggactgagaaggraagagtgcgattgggctgtcactgcttctggtttcatatgacccagttggactaagctggttctgaagttgcctgttttatgaaaaatcacttgccaaagtttcccttttcagaag

SEQ ID NO: 81671 - DNA, 600 bp, Chicken  19866894375418_2
taactatagatacacaagtgggaagaaaaagatgcattatttttaggaggcagaagaaatgcataattgcactgttggattgccctgttctagaaattgttaagccaagaatacawctccaaccatttcaaaagcactgatctccaaggaaccatttcagtgacttactgaagaactcataagatgcagtgatgcctcaggtagtttctttcttcaagcacagttatggtcaataccaaaattagcacagaggttctgctggtgcttggcttctgccaaaacaatatggactgagaaggraagagtgcgattgggctgtcactgcttctggtttcatatgacccagttggactaagctggttctgaagttgcctgttttatgaaaaatcacttgccaaagtttcccttttcagaagcataatttgtatcagaactggcatgcagctgccaatgctatttccaatcaaaactctaccaaattcttcatctgctaatgggggacatattctttgtagctaattatctgctgctttccagccatgctcctctctgaaactaattataaaacttctctggtttgtaagaactaaaaattacttc

SEQ ID NO: 81672 - DNA, 600 bp, Chicken  19866894375425_1
acgtctttcctccatatagaggggagatttaggctgggtgtgaggaaggactgcttgcagggaggcggtgaggcactgcacagagtgcccacaggtggtgctgccccgtcctgcacacagccaaggctggggacggggctgggagcactgcgggggctgtggtgtccccgtgcactgcagggctgcactgatggctgcgggggtccctttcctgctcaaactgcttttggtgctgtgataaactgctgcttcaggacggctttgtcatgaggctgtgctgccatgcttagtcagctgttkcacctcttctgtttttctctccgtattctgcttctcctccgtgccttcacagttctgctgctcagccttgtctgtaagggacacagggttgaattcagatgtctgtgcagccttaggcatgctttcagctcttgtttttcgctggctagcgagatgaatcatgtctgttctaagggggatgtttgctttgtcaccttcaacacacttagtgtggtttatagcaatgcaaacaatgcaacttcctgatgataagcagcatccacgctggatgccgtgtagccatagggataagctcttcca

SEQ ID NO: 81673 - DNA, 600 bp, Chicken  19866894375437_1
ctttccaacaccgtgttctatgttttttatctcattcatttatcctttcatattcagatcacaagcttctcagagcagcaaaagcacattatttcttctgcttaacaagtcatagaaatttcaagagctgtataaatacataataatcaataatcataatgatatcgcattaagattcaaatctacaacctcagcagctactgtgagagaagtaatttataaagattccatgtacagaactttgctaaagctctgtaacaagattaacttaaagaatctcttatagttactgattatctrctggagttaagagctatctagcatatacctatctggarttgctttgtraagcygaaacaccatggtctgatacaaaaatcagtatagtgaaagtgaaaggatttaggtgcctacacataggtcttcaaggccacagtagatgctcctgggtatgcactgaactggtggttccagcttcatgtgggcatggacttcaggaagtgccatgtcctgartgccccacatcagtgtctcaggtgmactctacctctaaaacaacacttgcaatctgtgcttagggaaccaagtttctcatgctgg

SEQ ID NO: 81674 - DNA, 600 bp, Chicken  19866894375437_2
tttatcctttcatattcagatcacaagcttctcagagcagcaaaagcacattatttcttctgcttaacaagtcatagaaatttcaagagctgtataaatacataataatcaataatcataatgatatcgcattaagattcaaatctacaacctcagcagctactgtgagagaagtaatttataaagattccatgtacagaactttgctaaagctctgtaacaagattaacttaaagaatctcttatagttactgattatctrctggagttaagagctatctagcatatacctatctggarttgctttgtraagcygaaacaccatggtctgatacaaaaatcagtatagtgaaagtgaaaggatttaggtgcctacacataggtcttcaaggccacagtagatgctcctgggtatgcactgaactggtggttccagcttcatgtgggcatggacttcaggaagtgccatgtcctgartgccccacatcagtgtctcaggtgmactctacctctaaaacaacacttgcaatctgtgcttagggaaccaagtttctcatgctggtaccttcagctcagcagtggtcttgatctttgaatcta

SEQ ID NO: 81675 - DNA, 600 bp, Chicken  19866894375437_3
catattcagatcacaagcttctcagagcagcaaaagcacattatttcttctgcttaacaagtcatagaaatttcaagagctgtataaatacataataatcaataatcataatgatatcgcattaagattcaaatctacaacctcagcagctactgtgagagaagtaatttataaagattccatgtacagaactttgctaaagctctgtaacaagattaacttaaagaatctcttatagttactgattatctrctggagttaagagctatctagcatatacctatctggarttgctttgtraagcygaaacaccatggtctgatacaaaaatcagtatagtgaaagtgaaaggatttaggtgcctacacataggtcttcaaggccacagtagatgctcctgggtatgcactgaactggtggttccagcttcatgtgggcatggacttcaggaagtgccatgtcctgartgccccacatcagtgtctcaggtgmactctacctctaaaacaacacttgcaatctgtgcttagggaaccaagtttctcatgctggtaccttcagctcagcagtggtcttgatctttgaatctaaatgtraaac

SEQ ID NO: 81676 - DNA, 600 bp, Chicken  19866894375437_4
tcagatcacaagcttctcagagcagcaaaagcacattatttcttctgcttaacaagtcatagaaatttcaagagctgtataaatacataataatcaataatcataatgatatcgcattaagattcaaatctacaacctcagcagctactgtgagagaagtaatttataaagattccatgtacagaactttgctaaagctctgtaacaagattaacttaaagaatctcttatagttactgattatctrctggagttaagagctatctagcatatacctatctggarttgctttgtraagcygaaacaccatggtctgatacaaaaatcagtatagtgaaagtgaaaggatttaggtgcctacacataggtcttcaaggccacagtagatgctcctgggtatgcactgaactggtggttccagcttcatgtgggcatggacttcaggaagtgccatgtcctgartgccccacatcagtgtctcaggtgmactctacctctaaaacaacacttgcaatctgtgcttagggaaccaagtttctcatgctggtaccttcagctcagcagtggtcttgatctttgaatctaaatgtraaactctaa

SEQ ID NO: 81677 - DNA, 600 bp, Chicken  19866894375437_5
tttataaagattccatgtacagaactttgctaaagctctgtaacaagattaacttaaagaatctcttatagttactgattatctrctggagttaagagctatctagcatatacctatctggarttgctttgtraagcygaaacaccatggtctgatacaaaaatcagtatagtgaaagtgaaaggatttaggtgcctacacataggtcttcaaggccacagtagatgctcctgggtatgcactgaactggtggttccagcttcatgtgggcatggacttcaggaagtgccatgtcctgartgccccacatcagtgtctcaggtgmactctacctctaaaacaacacttgcaatctgtgcttagggaaccaagtttctcatgctggtaccttcagctcagcagtggtcttgatctttgaatctaaatgtraaactctaaaccaatctgcttacaaatggtactgaactgagtmtctcatcaagctgaagaactccaaggatgattcctttgatgttgactttgcagtaagcttttactcttggaagtgtaaaattatagaagaaaacagaatgaaaatgagttaaaggtgataaatacctg

SEQ ID NO: 81678 - DNA, 600 bp, Chicken  19866894375437_6
tttgctaaagctctgtaacaagattaacttaaagaatctcttatagttactgattatctrctggagttaagagctatctagcatatacctatctggarttgctttgtraagcygaaacaccatggtctgatacaaaaatcagtatagtgaaagtgaaaggatttaggtgcctacacataggtcttcaaggccacagtagatgctcctgggtatgcactgaactggtggttccagcttcatgtgggcatggacttcaggaagtgccatgtcctgartgccccacatcagtgtctcaggtgmactctacctctaaaacaacacttgcaatctgtgcttagggaaccaagtttctcatgctggtaccttcagctcagcagtggtcttgatctttgaatctaaatgtraaactctaaaccaatctgcttacaaatggtactgaactgagtmtctcatcaagctgaagaactccaaggatgattcctttgatgttgactttgcagtaagcttttactcttggaagtgtaaaattatagaagaaaacagaatgaaaatgagttaaaggtgataaatacctggtgtcagaagtataacagaggtgac

SEQ ID NO: 81679 - DNA, 600 bp, Chicken  19866894375437_7
tgtraagcygaaacaccatggtctgatacaaaaatcagtatagtgaaagtgaaaggatttaggtgcctacacataggtcttcaaggccacagtagatgctcctgggtatgcactgaactggtggttccagcttcatgtgggcatggacttcaggaagtgccatgtcctgartgccccacatcagtgtctcaggtgmactctacctctaaaacaacacttgcaatctgtgcttagggaaccaagtttctcatgctggtaccttcagctcagcagtggtcttgatctttgaatctaaatgtraaactctaaaccaatctgcttacaaatggtactgaactgagtmtctcatcaagctgaagaactccaaggatgattcctttgatgttgactttgcagtaagcttttactcttggaagtgtaaaattatagaagaaaacagaatgaaaatgagttaaaggtgataaatacctggtgtcagaagtataacagaggtgacaatcagggagcagataacgagaataacaagtaaggcaattgcaattcctttccagtttctttgtggaggattactccccaccagctcctagaaatattaaagga

SEQ ID NO: 81680 - DNA, 600 bp, Chicken  19866894375437_8
tgaaagtgaaaggatttaggtgcctacacataggtcttcaaggccacagtagatgctcctgggtatgcactgaactggtggttccagcttcatgtgggcatggacttcaggaagtgccatgtcctgartgccccacatcagtgtctcaggtgmactctacctctaaaacaacacttgcaatctgtgcttagggaaccaagtttctcatgctggtaccttcagctcagcagtggtcttgatctttgaatctaaatgtraaactctaaaccaatctgcttacaaatggtactgaactgagtmtctcatcaagctgaagaactccaaggatgattcctttgatgttgactttgcagtaagcttttactcttggaagtgtaaaattatagaagaaaacagaatgaaaatgagttaaaggtgataaatacctggtgtcagaagtataacagaggtgacaatcagggagcagataacgagaataacaagtaaggcaattgcaattcctttccagtttctttgtggaggattactccccaccagctcctagaaatattaaaggaaagcaaaagtttagaaaaggcactgaaagaatgaaacaaactg

SEQ ID NO: 81681 - DNA, 600 bp, Chicken  19866894375445_1
ataccgaatgaaagatatacacagaaacatatttcttttggaaacggaccaaatgaacatctggtcgcctggttatctggaaaaatccatcagaggataatgacagcaccgtcagatgcaccaatgtaattaatactatgtttcaatgggcttaaacatgtaaagtgctgaatgctgctattagatgcatccacagatcctacctatttcagtgaagagtgaaccactaataactgggaagatagtccagggaaaggatgacgcactgttgataagcattcaatgctagctggagtcagrcagcaggacagaacagaaggacagctggtctgactctatactgtatttaaaccaatgttttaaaatgatcaataatggcttttaaaactaaactctgcagatggacgcaggaaagaatacaaaacttcaggctggtgctgctgcacaatgtgaaaactgctttattttggctttgtttagttttgttttataaagctgacaactgcccacatgaaagtgaacttcaaacacaagtggtgttcatggtggacttcaacaagaaaacaagattttacaacacttaggatggtcactgtgttg

SEQ ID NO: 81682 - DNA, 600 bp, Chicken  19866894375445_2
cactaaaaaaattcacctgcaaggaaaattcatctgcagtgaaaatgctccctaaacgagttatttgctggtacctctgcactgtccagcacagactaatacaaccacagaaatactcacggatgggaactctaacctttctgctgcacactcccacaggaccatcacgaacaattgacaagccatgcctctgtccaaccagcacttggaaacctagaaggaactccagacaacctctttcagtactcctctgtcttcctgggggaaaagtttctcttagcattcactttgaaccttccyaaggcacctgtggtcattgtcccatgttacactgtctgccacagagcagtttggctatgtccttttcctaccacccttgtggttgtcctctgcgtgtacagacaagaaatgacagagcaaaatcctacaaggcatattgtcttaaacactcttcatctgaggtaaagcttaaaaactttgaagaattaacacttttctacccatctctgtgttctatatttatttctccccgtgtaaataagctagcataaacatacgataaagtaattcttatgaaacatccaaatgagttatttagac

SEQ ID NO: 81683 - DNA, 600 bp, Chicken  19866894375452_1
acagcaattaccataacacagggttatggtaagtcacatcccaaactgatgttccatacttgtttttgtacgttggaaaggagtaacgttgctcacagcaacgggaagcatttgctgggctagatgtgttgtgcagttccctgtcccagagccatctatgtagcccagtgctccctgtggtcacatgtaaaattgtcagcaacgctgcctttccatgcaaaaatctctaagtcagaagctgtgggtgtggaaaaaggaaaaataaaaaagtcaacgctttccttcttccctccctgctaygtacagtgaacagctgggacaaaagcagcctcagtgagtgctcacttgtgtttgagcacaattacaaaattgccattytaatttccaccaacaaagatacaacctgycatggtattatkctgcctgtgagttgactagggaactgtttcaactgaataaagtggtaatgaaggtctaaatgctatcccattacccctcattgcagattataacttagtctggtcaacaccaccaaactatgctggctataggctgacaaatgcttttgttgcttgtgtgctttctgcagatctccatggt

SEQ ID NO: 81684 - DNA, 600 bp, Chicken  19866894375452_2
aggagtaacgttgctcacagcaacgggaagcatttgctgggctagatgtgttgtgcagttccctgtcccagagccatctatgtagcccagtgctccctgtggtcacatgtaaaattgtcagcaacgctgcctttccatgcaaaaatctctaagtcagaagctgtgggtgtggaaaaaggaaaaataaaaaagtcaacgctttccttcttccctccctgctaygtacagtgaacagctgggacaaaagcagcctcagtgagtgctcacttgtgtttgagcacaattacaaaattgccattytaatttccaccaacaaagatacaacctgycatggtattatkctgcctgtgagttgactagggaactgtttcaactgaataaagtggtaatgaaggtctaaatgctatcccattacccctcattgcagattataacttagtctggtcaacaccaccaaactatgctggctataggctgacaaatgcttttgttgcttgtgtgctttctgcagatctccatggtgaggtgagctgttctagcccaaagtgcactgcgacagactgtgcatgatctgcccagcagggcctgtccaccagtgag

SEQ ID NO: 81685 - DNA, 600 bp, Chicken  19866894375452_3
gcatttgctgggctagatgtgttgtgcagttccctgtcccagagccatctatgtagcccagtgctccctgtggtcacatgtaaaattgtcagcaacgctgcctttccatgcaaaaatctctaagtcagaagctgtgggtgtggaaaaaggaaaaataaaaaagtcaacgctttccttcttccctccctgctaygtacagtgaacagctgggacaaaagcagcctcagtgagtgctcacttgtgtttgagcacaattacaaaattgccattytaatttccaccaacaaagatacaacctgycatggtattatkctgcctgtgagttgactagggaactgtttcaactgaataaagtggtaatgaaggtctaaatgctatcccattacccctcattgcagattataacttagtctggtcaacaccaccaaactatgctggctataggctgacaaatgcttttgttgcttgtgtgctttctgcagatctccatggtgaggtgagctgttctagcccaaagtgcactgcgacagactgtgcatgatctgcccagcagggcctgtccaccagtgagcaccaccaggcctttctgaacaccacagc

SEQ ID NO: 81686 - DNA, 600 bp, Chicken  19866894375452_4
ctagatgtgttgtgcagttccctgtcccagagccatctatgtagcccagtgctccctgtggtcacatgtaaaattgtcagcaacgctgcctttccatgcaaaaatctctaagtcagaagctgtgggtgtggaaaaaggaaaaataaaaaagtcaacgctttccttcttccctccctgctaygtacagtgaacagctgggacaaaagcagcctcagtgagtgctcacttgtgtttgagcacaattacaaaattgccattytaatttccaccaacaaagatacaacctgycatggtattatkctgcctgtgagttgactagggaactgtttcaactgaataaagtggtaatgaaggtctaaatgctatcccattacccctcattgcagattataacttagtctggtcaacaccaccaaactatgctggctataggctgacaaatgcttttgttgcttgtgtgctttctgcagatctccatggtgaggtgagctgttctagcccaaagtgcactgcgacagactgtgcatgatctgcccagcagggcctgtccaccagtgagcaccaccaggcctttctgaacaccacagcaggacctgcatg

SEQ ID NO: 81687 - DNA, 600 bp, Chicken  19866894375453_1
agagcagtgtaatcccatgagacacattttatgcaagtctgaatgaactttagggtcactagagaacaagatgcaatttgttggtcccagtgatcaacattctaggagtgacaaatggtacaactagaatgtataaaagtattttttacaagttgctccagggagcataagaaaccagtgtttccttctttactgcagcgtgttccttccacaggaaaggtcccattattatgtcagcgttgtttatcaactctgtgtagaaggagaaagttgaaggtttcattctgtttctccagccaytgagacctagaaacaatacagacctgtasgtctgtcatactctctcagtatctccctcccaaggrgaggcctcatgtagcctgctaaaaaccattaggtttcagcactgctccagagcccrgtgctgtggctgctcacagtggcaacaaattcattcctgtaaatggattcagtagtgcaaagatcatgggaagttgtatccttttggttttaattttccccctaaggacaatttgttccaattagtgcctccgctagcaattattattgcacagtgctctgatttacttctgtctgaac

SEQ ID NO: 81688 - DNA, 600 bp, Chicken  19866894375453_2
tatgcaagtctgaatgaactttagggtcactagagaacaagatgcaatttgttggtcccagtgatcaacattctaggagtgacaaatggtacaactagaatgtataaaagtattttttacaagttgctccagggagcataagaaaccagtgtttccttctttactgcagcgtgttccttccacaggaaaggtcccattattatgtcagcgttgtttatcaactctgtgtagaaggagaaagttgaaggtttcattctgtttctccagccaytgagacctagaaacaatacagacctgtasgtctgtcatactctctcagtatctccctcccaaggrgaggcctcatgtagcctgctaaaaaccattaggtttcagcactgctccagagcccrgtgctgtggctgctcacagtggcaacaaattcattcctgtaaatggattcagtagtgcaaagatcatgggaagttgtatccttttggttttaattttccccctaaggacaatttgttccaattagtgcctccgctagcaattattattgcacagtgctctgatttacttctgtctgaaccagctgaatcaaaatcagagtttcacatg

SEQ ID NO: 81689 - DNA, 600 bp, Chicken  19866894375453_3
acaagatgcaatttgttggtcccagtgatcaacattctaggagtgacaaatggtacaactagaatgtataaaagtattttttacaagttgctccagggagcataagaaaccagtgtttccttctttactgcagcgtgttccttccacaggaaaggtcccattattatgtcagcgttgtttatcaactctgtgtagaaggagaaagttgaaggtttcattctgtttctccagccaytgagacctagaaacaatacagacctgtasgtctgtcatactctctcagtatctccctcccaaggrgaggcctcatgtagcctgctaaaaaccattaggtttcagcactgctccagagcccrgtgctgtggctgctcacagtggcaacaaattcattcctgtaaatggattcagtagtgcaaagatcatgggaagttgtatccttttggttttaattttccccctaaggacaatttgttccaattagtgcctccgctagcaattattattgcacagtgctctgatttacttctgtctgaaccagctgaatcaaaatcagagtttcacatgcaacacaatacaaatctagcatagtgcaatttccct

SEQ ID NO: 81690 - DNA, 600 bp, Chicken  19866894375453_4
aactagaatgtataaaagtattttttacaagttgctccagggagcataagaaaccagtgtttccttctttactgcagcgtgttccttccacaggaaaggtcccattattatgtcagcgttgtttatcaactctgtgtagaaggagaaagttgaaggtttcattctgtttctccagccaytgagacctagaaacaatacagacctgtasgtctgtcatactctctcagtatctccctcccaaggrgaggcctcatgtagcctgctaaaaaccattaggtttcagcactgctccagagcccrgtgctgtggctgctcacagtggcaacaaattcattcctgtaaatggattcagtagtgcaaagatcatgggaagttgtatccttttggttttaattttccccctaaggacaatttgttccaattagtgcctccgctagcaattattattgcacagtgctctgatttacttctgtctgaaccagctgaatcaaaatcagagtttcacatgcaacacaatacaaatctagcatagtgcaatttccctagagaagatttcttgttagggctcactagagtgttttctagaaaaggctttttctc

SEQ ID NO: 81691 - DNA, 600 bp, Chicken  19866894375454_1
gtcttaactgagaactaaaaacttaagaatcctgagcaacagtgacaacattctaatttctgttaagcttacctgaactttccacattagaatactctataaaatagacatgcacaaaccctagcctaactatccttacctacttttcagggcatgcacggaataaaagatgatgtcttcctaagtgttccttgtgtactgggcagcagtggcatcactgatgtagtgaagatgatcctaaaacctgatgaagaggagaaaataaagaagagcgcagatacactctggggaattcagaargaactacagttttaaagttgtccaagcaattcactgcagttgaacggtttagtggtttgtcttaatgttgcactttccaagtaggtcaaatcctttggtgtatgtatctcaactagaaaacaaactaaaacctgaacaaacgagtttcctaagggtggccattaggaaactattctagggttttccctgttctcagacacttgtattcttagccagagctccagccacctagtattgtacagtgaagtggtgtgacatcaatccagcattgaaagcagcactgcctttccctcaccttgt

SEQ ID NO: 81692 - DNA, 590 bp, Chicken  19866894375456_1
aacttaaagaatgttgcattattattttttttattccctgtcttataaatcagaatttgctttggaaatgcccccgtatgtaacataaatgtcctcatctgttacataaagaaacggtcgtgccaatactcgtacatttttatgagcctgtttaggttgtttagagcaagcaaatgcatcgcattgttctctcccaagtaaataatcctttccaacagctgtgatgtgtcgtatctttcccaatcctgcccctctaacaactgcggtaaaatacagaatcatttttttgcctattttttkkggtaaaactaaacgactgttggtttgttgccatttctttggccattcttttgctcacagcaagttccttgaagaagttggaatgtttccatggcatggccagctccttccagctgatgcctcctgaacaaagttggtgacttttgacttcaagcagctgatgatcactaaaatctacagtgttttgtgcaccatgtccaccgtcttcaagataaaaatccctactgggggataaacctttaaaggagaagaaagcagggacagtggactcttgtgttcagcacagcagt

SEQ ID NO: 81693 - DNA, 589 bp, Chicken  19866894375456_2
acttaaagaatgttgcattattattttttttattccctgtcttataaatcagaatttgctttggaaatgcccccgtatgtaacataaatgtcctcatctgttacataaagaaacggtcgtgccaatactcgtacatttttatgagcctgtttaggttgtttagagcaagcaaatgcatcgcattgttctctcccaagtaaataatcctttccaacagctgtgatgtgtcgtatctttcccaatcctgcccctctaacaactgcggtaaaatacagaatcatttttttgcctattttttkkggtaaaactaaacgactgttggtttgttgccatttctttggccattcttttgctcacagcaagttccttgaagaagttggaatgtttccatggcatggccagctccttccagctgatgcctcctgaacaaagttggtgacttttgacttcaagcagctgatgatcactaaaatctacagtgttttgtgcaccatgtccaccgtcttcaagataaaaatccctactgggggataaacctttaaaggagaagaaagcagggacagtggactcttgtgttcagcacagcagt

SEQ ID NO: 81694 - DNA, 599 bp, Chicken  19866894375457_1
  misc_feature (1)..(129): n is any nucleotide
nnnnnnnnnnnnnnnnnnnnnnnnnnnnnnnnnnnnnnnnnnnnnnnnnnnnnnnnnnnnnnnnnnnnnnnnnnnnnnnnnnnnnnnnnnnnnnnnnnnnnnnnnnnnnnnnnnnnnnnnnnnnnnnnnaagggaaactaagacctgatgtaacaaggaagatttttatggaaagggtagtgaggcactggaacaagctgcccagagaggtgatggattctccatccttgcagacatttgaggtcaggctggagagggctctgagcaatctgatctagctgtaggtgtctctgttcattrcagaggagttggactaggtgacgtttsagaggcctttccactcaaatggttctcttttgggacagggaggggttaggtgtagaaagcaaggaaggaaatgagggactggtgatgatttctcccatgcagtagtatcttagacattctctgatgtgctgtcactttcataaatgaaaaagaaagatgaatttttctatccggtatgtattctasctctcaaaatgtccatggagtcccttagtcacttcagaacttgctgrgaaactaactcctgtatttctggcagaaaaattcttgga

SEQ ID NO: 81695 - DNA, 599 bp, Chicken  19866894375457_2
  misc_feature (1)..(102): n is any nucleotide
nnnnnnnnnnnnnnnnnnnnnnnnnnnnnnnnnnnnnnnnnnnnnnnnnnnnnnnnnnnnnnnnnnnnnnnnnnnnnnnnnnnnnnnnnnnnnnnnnnnnnnaagggaaactaagacctgatgtaacaaggaagatttttatggaaagggtagtgaggcactggaacaagctgcccagagaggtgatggattctccatccttgcagacatttgaggtcaggctggagagggctctgagcaatctgatctagctgtaggtgtctctgttcattrcagaggagttggactaggtgacgtttsagaggcctttccactcaaatggttctcttttgggacagggaggggttaggtgtagaaagcaaggaaggaaatgagggactggtgatgatttctcccatgcagtagtatcttagacattctctgatgtgctgtcactttcataaatgaaaaagaaagatgaatttttctatccggtatgtattctasctctcaaaatgtccatggagtcccttagtcacttcagaacttgctgrgaaactaactcctgtatttctggcagaaaaattcttggatgttttcttttycctggacaatttctt

SEQ ID NO: 81696 - DNA, 600 bp, Chicken  19866894375457_3
tggattctccatccttgcagacatttgaggtcaggctggagagggctctgagcaatctgatctagctgtaggtgtctctgttcattrcagaggagttggactaggtgacgtttsagaggcctttccactcaaatggttctcttttgggacagggaggggttaggtgtagaaagcaaggaaggaaatgagggactggtgatgatttctcccatgcagtagtatcttagacattctctgatgtgctgtcactttcataaatgaaaaagaaagatgaatttttctatccggtatgtattctasctctcaaaatgtccatggagtcccttagtcacttcagaacttgctgrgaaactaactcctgtatttctggcagaaaaattcttggatgttttcttttycctggacaatttcttttaacagtcataattcacatataattgggaaactctcactagctgtagcctctgtctatgtgggattaaatatgaatgttcacagtgtaggcaaatcaatcagaagaaaaaaaaaaaatgttgcagtaattcttgttagagtgaacagagcccttgtcagcagccaatgaaacagaatcctccagaa

SEQ ID NO: 81697 - DNA, 600 bp, Chicken  19866894375457_4
ctgagcaatctgatctagctgtaggtgtctctgttcattrcagaggagttggactaggtgacgtttsagaggcctttccactcaaatggttctcttttgggacagggaggggttaggtgtagaaagcaaggaaggaaatgagggactggtgatgatttctcccatgcagtagtatcttagacattctctgatgtgctgtcactttcataaatgaaaaagaaagatgaatttttctatccggtatgtattctasctctcaaaatgtccatggagtcccttagtcacttcagaacttgctgrgaaactaactcctgtatttctggcagaaaaattcttggatgttttcttttycctggacaatttcttttaacagtcataattcacatataattgggaaactctcactagctgtagcctctgtctatgtgggattaaatatgaatgttcacagtgtaggcaaatcaatcagaagaaaaaaaaaaaatgttgcagtaattcttgttagagtgaacagagcccttgtcagcagccaatgaaacagaatcctccagaaagtatttcattttcatccatagaatctcaactgaatttgcaattatt

SEQ ID NO: 81698 - DNA, 593 bp, Chicken  19866894375457_5
gactaggtgacgtttsagaggcctttccactcaaatggttctcttttgggacagggaggggttaggtgtagaaagcaaggaaggaaatgagggactggtgatgatttctcccatgcagtagtatcttagacattctctgatgtgctgtcactttcataaatgaaaaagaaagatgaatttttctatccggtatgtattctasctctcaaaatgtccatggagtcccttagtcacttcagaacttgctgrgaaactaactcctgtatttctggcagaaaaattcttggatgttttcttttycctggacaatttcttttaacagtcataattcacatataattgggaaactctcactagctgtagcctctgtctatgtgggattaaatatgaatgttcacagtgtaggcaaatcaatcagaagaaaaaaaaaaaatgttgcagtaattcttgttagagtgaacagagcccttgtcagcagccaatgaaacagaatcctccagaaagtatttcattttcatccatagaatctcaactgaatttgcaattattgtattaagtaacctagatctgcctcaaatataatgggagtcaga

SEQ ID NO: 81699 - DNA, 600 bp, Chicken  19866894375461_1
aatgtagcttttaaagggcatttgtatcactgagggatgctagtcctgacccacagaagcccaggcttgttttccagctagaaggttatgttttctcccccgtgaaatatgcagctcttgccacaggttctacctcgtttccatggatccctgagacattctctaaatagagaatgacattagccaagttcagtgatttctctaacctcactgtagacgggtaagaataagagctgtgctgtcattagtcctgatggattcattgtctgcctgaacgttaatcaaaagaaatgaggatcrgatatgcaaaagaaagcatttggctgtctcagaatattgtgttttgtactagtggattaagaaaaccatcatgattcagcaaaggacgtgtctatttagttaaattaaacagaatctgcacaatccaaacataccgtgttgaggctaagtaaccaggagacattcaaaacacatagcgaagaaagagccttagcagctgatgctgtgatataaaggtggagctttgtaagtaccctgcaagaactgtggggccataaacactgcaatattatatctatttagaaaaaaaaatatgagaca

SEQ ID NO: 81700 - DNA, 600 bp, Chicken  19866894375461_2
ctgcaagaactgtggggccataaacactgcaatattatatctatttagaaaaaaaaatatgagacagaattcaatgatgaccttatctgagctacaaattcttgtcaattattatatgcttgtggggacatgtttatagatggcagaaagtccttctcatttgtcctcagagacagcactgatattgcccagctaagaaatacattatacagctacgaaagaggcaatttgatttcatgagcgcatcgttattattttaagaataatttaatgtaggcagagaaaagtaaaacctatatraaaaaaagaaagaagttttcagcatgtgcagtaccagccccgtggttcttactttctcctgggctctttatttatttgggggagagcgggactgttttatttttgtagaatcatagaatggcttgggttggaacagatattaaggctcccctcagttccagtccccccagctcagrctgcccagggccccatcccacccagccttgagcatctccagggatgggtacccacagctctctgggcagctgtgccagggcctcagcgccctctgagtaaagcgttccctccccattgacccca

SEQ ID NO: 81701 - DNA, 600 bp, Chicken  19866894375461_3
cactgatattgcccagctaagaaatacattatacagctacgaaagaggcaatttgatttcatgagcgcatcgttattattttaagaataatttaatgtaggcagagaaaagtaaaacctatataaaaaaaagaaagaagttttcagcatgtgcagtaccagccccgtggttcttactttctcctgggctctttatttatttgggggagagcgggactgttttatttttgtagaatcatagaatggcttgggttggaacagatattaaggctcccctcagttccagtccccccagctcagrctgcccagggccccatcccacccagccttgagcatctccagggatgggtacccacagctctctgggcagctgtgccagggcctcagcgccctctgagtaaagcgttccctccccattgaccccactgggagtttcacttcccctaaagtactgaggagtctgattctcaagcgtgattcgggtgctgatgttgctctatgtgtgatgtgcatgacatgctgagcacaccctgacgccttctctctgttgccaccacagacgagccaagctcctggagcgctcccgctgccgcctccccag

SEQ ID NO: 81702 - DNA, 600 bp, Chicken  19866894375467_1
tttggctacaagatttaagactcctccttgaaaatatgtttgatccattttgcatgcaataaaatacagtttaggattaatggtaagaataagactatagatggttttaccaaaagaagaaacttattgcagttgttcttctgcatcgttgattgtattgcttttatgatatgaatgtaatggtgatgatttaaaaaaaaaaggggatcagtcatgtttaaatcatttaacttaacgaggtgctaaagttatgagtccagttgtccagggcttagaacgaggtagaaaattagtaccaargaatatataaatcactrtgtacagctgactagcctatttttttgactaaagggaaggaggcagttggtcacgtaaactgaaaatttcagctaagcatatcatggtataaatgctttacagctgagttgtatatcctactctaaaaagtacattgggataaatccctttcatacctggatctgaagaggacaaaagtctaagtcctactaacaagttaagcatagaaaacccagagggaaagctcaattgcatttttatttattttttaatcctgaaaaaccctaaataattcaatttcat

SEQ ID NO: 81703 - DNA, 600 bp, Chicken  19866894375467_2
agactcctccttgaaaatatgtttgatccattttgcatgcaataaaatacagtttaggattaatggtaagaataagactatagatggttttaccaaaagaagaaacttattgcagttgttcttctgcatcgttgattgtattgcttttatgatatgaatgtaatggtgatgatttaaaaaaaaaaggggatcagtcatgtttaaatcatttaacttaacgaggtgctaaagttatgagtccagttgtccagggcttagaacgaggtagaaaattagtaccaargaatatataaatcactrtgtacagctgactagcctatttttttgactaaagggaaggaggcagttggtcacgtaaactgaaaatttcagctaagcatatcatggtataaatgctttacagctgagttgtatatcctactctaaaaagtacattgggataaatccctttcatacctggatctgaagaggacaaaagtctaagtcctactaacaagttaagcatagaaaacccagagggaaagctcaattgcatttttatttattttttaatcctgaaaaaccctaaataattcaatttcatcagcgttaagaactgac

SEQ ID NO: 81704 - DNA, 600 bp, Chicken  19866894375476_1
tcaatttattacttctgttgtctcatagagtgcatcaaataatttttacgttgaatgaatgaacgtctcatggatcttggaagtgattgaagagaaaatgcttttattcattttaatcactaccgcatagatagagaattgggcagtaaaataaacaaacatgatttgctcactacttgtgtttgatacaagtctagctgcaacacaggcaataaaaatgatttagtagccatgaatgtgaagaaaaatcaagttctggttatgacaccggtgtaacatatggagggctacacagataaygtccctgaagcagctgtattggaggaatagctgtctctagaaaaaacagatgtgaaagttgcttagtatacttgaagcctgcaactagaagctactgacagcctgcagacaggataaagtatttcggacacttatctctgtgatacaactaatactctttgcagagttttcaagagtctgttaaactcagtgtaaaatgattttcttccattacataaattcttgggcccaagaaagaccaagattttacaaattaatcacattagggacatcttacataatattaagacattcaaggag

SEQ ID NO: 81705 - DNA, 600 bp, Chicken  19866894375479_1
tcttgtttgtcttttctctctacccagtcaccaattcccacaaaacctgcaggaaatgaaatgtcacatctcttacctcttttgtcaaatgcagtaaaaattggccctctcattcaaaatattcagagggcagagacataagtggaacagaagtggcgctgcattactgcttattcgtattaggtgaggggtggaggattatatcactagccctcgaaattgtagaagaatcgagtttctttgacataaatcaggcttgtccttgacacttgccttgacaagaaagtagagcaatataaraagagatgagtaccaacccacctgcctccttcccgcacttcttggcacagcgctacatggttactgctggcctccccaccaacaacagctctcagatttctgactctccactgcttattcttcgtccccggctcttgcccacagctgcctcttggagtatagcatagctaaaagctgggcagtgcaagtctcactcttgctgtcaaagcacgctttctgtgctgtttttgttactgctgctaagagctacctttccctcctattgattaaaaagctttttgctctaaggcttacaaaaga

SEQ ID NO: 81706 - DNA, 600 bp, Chicken  19866894375488_1
acaagcattcagatacgaatgatttctatttctcttttaagcattaattttaactttcttaaattattaaaggcattcaatctgtattaaggctacggcttgcaaggataaaagaccaaagcaagatgatttcttgcatagaggaacacgaacagaagtgcactacaacagagcaggtgattccacgttcagtttttaatcaggaggaaatgttagcatataccccacaaattaagcctgcctcacaccttaaacttctccattcggctctacaaatgaacacgaacttttcaaaagaayattgaagawattaggaatatcggctcaatctgcacaatttctctacgattcaacaaagagggaaagactcgacacgacatccaycatgagacatccaggatcaaaatctcagggtctacatacaaaacaaggtaaaattctgggtgccaatgtcattcaatacataacaaggtattttgccacagggtagtctcacgaaagaattcccaccttaatatcctcatttctctcacttacatgtatgctggagaaagtggcgatgacctggatgttttaagcacaggaactgggaatttccag

SEQ ID NO: 81707 - DNA, 600 bp, Chicken  19866894375488_2
cagatacgaatgatttctatttctcttttaagcattaattttaactttcttaaattattaaaggcattcaatctgtattaaggctacggcttgcaaggataaaagaccaaagcaagatgatttcttgcatagaggaacacgaacagaagtgcactacaacagagcaggtgattccacgttcagtttttaatcaggaggaaatgttagcatataccccacaaattaagcctgcctcacaccttaaacttctccattcggctctacaaatgaacacgaacttttcaaaagaayattgaagawattaggaatatcggctcaatctgcacaatttctctacgattcaacaaagagggaaagactcgacacgacatccaycatgagacatccaggatcaaaatctcagggtctacatacaaaacaaggtaaaattctgggtgccaatgtcattcaatacataacaaggtattttgccacagggtagtctcacgaaagaattcccaccttaatatcctcatttctctcacttacatgtatgctggagaaagtggcgatgacctggatgttttaagcacaggaactgggaatttccagatagcagga

SEQ ID NO: 81708 - DNA, 600 bp, Chicken  19866894375488_3
tattaaggctacggcttgcaaggataaaagaccaaagcaagatgatttcttgcatagaggaacacgaacagaagtgcactacaacagagcaggtgattccacgttcagtttttaatcaggaggaaatgttagcatataccccacaaattaagcctgcctcacaccttaaacttctccattcggctctacaaatgaacacgaacttttcaaaagaayattgaagawattaggaatatcggctcaatctgcacaatttctctacgattcaacaaagagggaaagactcgacacgacatccaycatgagacatccaggatcaaaatctcagggtctacatacaaaacaaggtaaaattctgggtgccaatgtcattcaatacataacaaggtattttgccacagggtagtctcacgaaagaattcccaccttaatatcctcatttctctcacttacatgtatgctggagaaagtggcgatgacctggatgttttaagcacaggaactgggaatttccagatagcaggagagctcgttttccatttcaatggcatgttgtcaccacggtactacaataacagtaaacagcgtttccataacaga

SEQ ID NO: 81709 - DNA, 600 bp, Chicken  19866894375490_1
ctgctgtgttttctcatgaaaatcacgttagcatgatcttcctgattaatgtgcctcagcacttataattacttcatgctgcatatcaaaggaacatttaaaggaaaccacaaatgaaaaagaaaattaaaacgcagctcaaatttgttcgggtcactggaaggatctaccactgtgagtgtgaaatattgatggtttgtcattgttaattattcaagctgacattttaactccaagctgagaaactgggaggggaaaagaatttgttagtgggaaaaaaaacaaccaaccgtatcctgraatttacagctctgcatttctagataattcttccttccacrtgattgcctttctctaccctaaaataagccttgttgagctattacttcacagtattcaaaagaggctcggaattcaagctatttagctaactagagagctgcagggtaatttttaagatattacttacaatataataccttcactaaatgcacttccaagttctgaacaaatgatcaataaagccartagaatcrcagaatgagtgcagccacataggaaataacagccaaatatgaggacaagtcagataagcaacat

SEQ ID NO: 81710 - DNA, 600 bp, Chicken  19866894375490_2
ctgattaatgtgcctcagcacttataattacttcatgctgcatatcaaaggaacatttaaaggaaaccacaaatgaaaaagaaaattaaaacgcagctcaaatttgttcgggtcactggaaggatctaccactgtgagtgtgaaatattgatggtttgtcattgttaattattcaagctgacattttaactccaagctgagaaactgggaggggaaaagaatttgttagtgggaaaaaaaacaaccaaccgtatcctgraatttacagctctgcatttctagataattcttccttccacrtgattgcctttctctaccctaaaataagccttgttgagctattacttcacagtattcaaaagaggctcggaattcaagctatttagctaactagagagctgcagggtaatttttaagatattacttacaatataataccttcactaaatgcacttccaagttctgaacaaatgatcaataaagccartagaatcrcagaatgagtgcagccacataggaaataacagccaaatatgaggacaagtcagataagcaacatatctcatctcacccatgtgaaacccatattcttcacatacc

SEQ ID NO: 81711 - DNA, 600 bp, Chicken  19866894375490_3
aactccaagctgagaaactgggaggggaaaagaatttgttagtgggaaaaaaaacaaccaaccgtatcctgraatttacagctctgcatttctagataattcttccttccacrtgattgcctttctctaccctaaaataagccttgttgagctattacttcacagtattcaaaagaggctcggaattcaagctatttagctaactagagagctgcagggtaatttttaagatattacttacaatataataccttcactaaatgcacttccaagttctgaacaaatgatcaataaagccartagaatcrcagaatgagtgcagccacataggaaataacagccaaatatgaggacaagtcagataagcaacatatctcatctcacccatgtgaaacccatattcttcacataccctcagatatccagttcaaagctgtcatttttttttcagctaacattcataccagctgttctttaaaacaacagagctacttgcactaaaggaagtgatattttgatataaagcctttgaatcagatcctgacctagagtaaactggcctagacccattgatttcrttaaggctattccaatttaaac

SEQ ID NO: 81712 - DNA, 600 bp, Chicken  19866894375490_4
gctgagaaactgggaggggaaaagaatttgttagtgggaaaaaaaacaaccaaccgtatcctgraatttacagctctgcatttctagataattcttccttccacrtgattgcctttctctaccctaaaataagccttgttgagctattacttcacagtattcaaaagaggctcggaattcaagctatttagctaactagagagctgcagggtaatttttaagatattacttacaatataataccttcactaaatgcacttccaagttctgaacaaatgatcaataaagccartagaatcrcagaatgagtgcagccacataggaaataacagccaaatatgaggacaagtcagataagcaacatatctcatctcacccatgtgaaacccatattcttcacataccctcagatatccagttcaaagctgtcatttttttttcagctaacattcataccagctgttctttaaaacaacagagctacttgcactaaaggaagtgatattttgatataaagcctttgaatcagatcctgacctagagtaaactggcctagacccattgatttcrttaaggctattccaatttaaacatcctgag

SEQ ID NO: 81713 - DNA, 600 bp, Chicken  19866894375490_5
aacaaatgatcaataaagccartagaatcrcagaatgagtgcagccacataggaaataacagccaaatatgaggacaagtcagataagcaacatatctcatctcacccatgtgaaacccatattcttcacataccctcagatatccagttcaaagctgtcatttttttttcagctaacattcataccagctgttctttaaaacaacagagctacttgcactaaaggaagtgatattttgatataaagcctttgaatcagatcctgacctagagtaaactggcctagacccattgatttcrttaaggctattccaatttaaacatcctgagagttcaaaaacaaaggcaaaacactacaattgaaatcagatttcacattcatttgaactctatacatccattcttttgtttatgaaagtactggtctcaaggggagttttagaagggcagtaatccaggaccaggctataggtatctgcatagatacagactcaaccatccatgtgatttctctgaatcttcttttctgactcatcatagcaaatacatgacacttgagagatttgcctaccaaacacaaagaagtcagctccctcatcc

SEQ ID NO: 81714 - DNA, 600 bp, Chicken  19866894375494_1
gatgagctttgacttcactgttgtcccttagaagatctcattattctaatgggtactattaaagccacttccacacacagcctgggtataaattaggcgttactgcttgttggggaaggaactgagaaccaaacaatgcagctagggtaagttcttctgcatccatgtcatcaatattgtgatctgtgttgctcatcccaattcaaaatttgaacaaggaaaggtgcaaagtgtagcaacaaagatgatcaatgcttctgcataagggactgctgaatacatgtggatccttcatcttgraaaagaggccatatagaagtttatcacagaatgacagaatatcccaagttaagaggaacccataaggatcaccaagtccaactcctggctccacacaacaccacccaaaaatcagaccatttgtctgagtgcgttgcccagagacaactgagaagaatatgacaagtgtcttaaaaaccacaagtggcagagacaatgtggctgtgcagcgcctttatttccaaatcaaagctgaaagacttgggatgaacccaacagggagagctttgcactgaggttgagctgtggcacaccctggca

SEQ ID NO: 81715 - DNA, 600 bp, Chicken  19866894375495_1
aagtattgtcttaaaattaacggtgttttgagtgcactgacttgttagatattggtgatgcagcacgggttgagattggttcccagtagatgtgaaaagtctcctttcaggtggtgtgaggcaccagctgcccatagatcagcacagagagtggaaaacacaagtaggactgagtgttaaagagttgttggagcatcatcaccagctgggaattttgtcgcagcaatgggacttaatctagagggggtgtatgaaatcatggtgatcttagaaggtcttttccacccttcaagtccaacygtcaacccatcgccactgcagctgctaatggactttggaataagaaaaacagcaattgctgccagtctgtctcagttcagaatgtgacttcattttagactgaggacagcagcttcaggatgaaaatattcatagaggagaaaagccagaaagcctaaaaaaattgctgtttgagctaattgcccaaataatggtggatgtgctccccctgttggccgacagtgacagacaatcccttcaaacttgctgtgttaaaaagtattactttctgtgcttgctgatgggagaatgccaacatta

SEQ ID NO: 81716 - DNA, 599 bp, Chicken  19866894375500_1
  misc_feature (1)..(74): n is any nucleotide
nnnnnnnnnnnnnnnnnnnnnnnnnnnnnnnnnnnnnnnnnnnnnnnnnnnnnnnnnnnnnnnnnnnnnnnnnntcgcgtgttaataagtctgtgcttaatactgagcagtttttactctaattttggctttaaaaattggctacctcgggcatcagtggcacagtctccactgatttcccactgctttcaattgtaccagattttcctgtgcagttttgcaggctggaaattgttaagtgctaagtaactggcagcctccaaatcaaattcctgtttcagaggttgaacacattttatygaaggaacaactggaagtgagcactgtgtcaccagttatggccttctgcatccactcatcagttacaccaccaagcaccgtacatacgtggtctaatcagttcctccctttgtaaagacttctttttgtgactttggaagttaaaacaaacaaacaaaccgacaaaaccaacgcaagcctctatttcactgcatgacccagcatccctggcatgacttcagtcccacctcagtggcaatcaacgccctcactgcagcaagtgacaatctggggatactaaatcaagagaaatsatgact

SEQ ID NO: 81717 - DNA, 600 bp, Chicken  19866894375500_2
ttttatygaaggaacaactggaagtgagcactgtgtcaccagttatggccttctgcatccactcatcagttacaccaccaagcaccgtacatacgtggtctaatcagttcctccctttgtaaagacttctttttgtgactttggaagttaaaacaaacaaacaaaccgacaaaaccaacgcaagcctctatttcactgcatgacccagcatccctggcatgacttcagtcccacctcagtggcaatcaacgccctcactgcagcaagtgacaatctggggatactaaatcaagagaaatsatgacttccaacattttgatttgcatctttctcatcgtgaggaaacgggctgtgcgttcctgtgctgcctgtcaccccccacctaacagttttaagctcagcaattatttccagttggaatcaatagagggacgtacggctccaaacctcagaattccacatttctcaggcactggggagtggctggcggagatgctcagcgctgagcaccctgaggaagggctcaggatgtgctcagccactctattagactgcagagaacgcatatgcgacggggagtgggcgcagcgtgttccccgc

SEQ ID NO: 81718 - DNA, 600 bp, Chicken  19866894375505_1
gacaacataagggaaaagctctcctagatgagatgcaatacaccgtatgatagaagatatgcagcagttcttccaaacacacaagaaaaatatttacatatttttatgtataattacatatttataagtgctttgaggaagacggaagagccggcctaccttctccattgcagtcagagcatacagactgcatctgctgaaccatgccaggagccagctgtctgatcatgatacgtacacctctaccccgacaagcattacatttctgaacagctccagccttccctccttgactaggakagaaagcaccagttgattaaaaccaagccttccagaaacatacaacagtatatttacagcagtaggttaacatgcctgattgcactgccaatgagtcaggtgtccccgctggcaaacacaaacactcacacatacacacacacactcccaagtagttcaaatcccatgaaattacaattaaactattttccagtctgagagcagactccagttaaatactgaagaagatctgacatagaagatacttcattatatcacatatcaacaaagcaaccagagaattcggaagcagaactgaac

SEQ ID NO: 81719 - DNA, 600 bp, Chicken  19866894375505_2
ataagtgctttgaggaagacggaagagccggcctaccttctccattgcagtcagagcatacagactgcatctgctgaaccatgccaggagccagctgtctgatcatgatacgtacacctctaccccgacaagcattacatttctgaacagctccagccttccctccttgactaggakagaaagcaccagttgattaaaaccaagccttccagaaacatacaacagtatatttacagcagtaggttaacatgcctgattgcactgccaatgagtcaggtgtccccgctggcaaacacaaakactcacacatacacacacacactcccaagtagttcaaatcccatgaaattacaattaaactattttccagtctgagagcagactccagttaaatactgaagaagatctgacatagaagatacttcattatatcacatatcaacaaagcaaccagagaattcggaagcagaactgaacttacccattacatgcactacagaggacattcttgctaagttgtagtttagttgtctttccattatataaatcttctaaagagactctgaaaaataaagtgttttctcctgtgttaccatttaa

SEQ ID NO: 81720 - DNA, 600 bp, Chicken  19866894375505_3
taagtgctttgaggaagacggaagagccggcctaccttctccattgcagtcagagcatacagactgcatctgctgaaccatgccaggagccagctgtctgatcatgatacgtacacctctaccccgacaagcattacatttctgaacagctccagccttccctccttgactaggakagaaagcaccagttgattaaaaccaagccttccagaaacatacaacagtatatttacagcagtaggttaacatgcctgattgcactgccaatgagtcaggtgtccccgctggcaaacacaaackctcacacatacacacacacactcccaagtagttcaaatcccatgaaattacaattaaactattttccagtctgagagcagactccagttaaatactgaagaagatctgacatagaagatacttcattatatcacatatcaacaaagcaaccagagaattcggaagcagaactgaacttacccattacatgcactacagaggacattcttgctaagttgtagtttagttgtctttccattatataaatcttctaaagagactctgaaaaataaagtgttttctcctgtgttaccatttaac

SEQ ID NO: 81721 - DNA, 600 bp, Chicken  19866894375505_4
aagtgctttgaggaagacggaagagccggcctaccttctccattgcagtcagagcatacagactgcatctgctgaaccatgccaggagccagctgtctgatcatgatacgtacacctctaccccgacaagcattacatttctgaacagctccagccttccctccttgactaggakagaaagcaccagttgattaaaaccaagccttccagaaacatacaacagtatatttacagcagtaggttaacatgcctgattgcactgccaatgagtcaggtgtccccgctggcaaacacaaacaktcacacatacacacacacactcccaagtagttcaaatcccatgaaattacaattaaactattttccagtctgagagcagactccagttaaatactgaagaagatctgacatagaagatacttcattatatcacatatcaacaaagcaaccagagaattcggaagcagaactgaacttacccattacatgcactacagaggacattcttgctaagttgtagtttagttgtctttccattatataaatcttctaaagagactctgaaaaataaagtgttttctcctgtgttaccatttaaca

SEQ ID NO: 81722 - DNA, 600 bp, Chicken  19866894375505_5
agtgctttgaggaagacggaagagccggcctaccttctccattgcagtcagagcatacagactgcatctgctgaaccatgccaggagccagctgtctgatcatgatacgtacacctctaccccgacaagcattacatttctgaacagctccagccttccctccttgactaggakagaaagcaccagttgattaaaaccaagccttccagaaacatacaacagtatatttacagcagtaggttaacatgcctgattgcactgccaatgagtcaggtgtccccgctggcaaacacaaacackcacacatacacacacacactcccaagtagttcaaatcccatgaaattacaattaaactattttccagtctgagagcagactccagttaaatactgaagaagatctgacatagaagatacttcattatatcacatatcaacaaagcaaccagagaattcggaagcagaactgaacttacccattacatgcactacagaggacattcttgctaagttgtagtttagttgtctttccattatataaatcttctaaagagactctgaaaaataaagtgttttctcctgtgttaccatttaacaa

SEQ ID NO: 81723 - DNA, 600 bp, Chicken  19866894375508_1
tatggattgggaaagtgtaaaggaagaaaagactagggctaagtgaggttttttactgaggttttttaaattttactacacatcatagctcagtgttaaacacctgctttacactttggtatcctaacaaggtttaattacaaaagaggcacaacctccctgcagaaattctacttgtaacttctaatgagcaataaacaatcctttataaatcaatatgtgagaaattaaatatgattgcctggacttggttggcctcatagctaatggaactataaaatacatgattaattagaaagrtgttttacaaaggttaatttgtttatttttcaaattatcttctgagatcaaataatggctaaaaaagtcctatatcagtcattagccaataatatttctgaagattcagaatagtcttggacagcaactagagctgacagttaaatctgaacattctattctggaaaacttgcattatgttcataaaaatgaacaattttactccatttctcattaytcagaaatgttttactastttgatgaaattaatataagcagagtgcttctaatctgaactttacaaccgatattgcttatgag

SEQ ID NO: 81724 - DNA, 600 bp, Chicken  19866894375508_2
atgtgagaaattaaatatgattgcctggacttggttggcctcatagctaatggaactataaaatacatgattaattagaaagrtgttttacaaaggttaatttgtttatttttcaaattatcttctgagatcaaataatggctaaaaaagtcctatatcagtcattagccaataatatttctgaagattcagaatagtcttggacagcaactagagctgacagttaaatctgaacattctattctggaaaacttgcattatgttcataaaaatgaacaattttactccatttctcattaytcagaaatgttttactastttgatgaaattaatataagcagagtgcttctaatctgaactttacaaccgatattgcttatgagaaaatacatgaattttaatgattagcaagttaaataaataaattaagcagcaaagaacatgatacaactactgaacctaagctggttaatggatttaatacttaaaggtgacattatgcagttcacaatattgaacatgtgcaggacaactttcaggatttaggctcacggtaccttaaatttttattcaacaaggtttaattttaacgtttccaga

SEQ ID NO: 81725 - DNA, 600 bp, Chicken  19866894375508_3
gattgcctggacttggttggcctcatagctaatggaactataaaatacatgattaattagaaagrtgttttacaaaggttaatttgtttatttttcaaattatcttctgagatcaaataatggctaaaaaagtcctatatcagtcattagccaataatatttctgaagattcagaatagtcttggacagcaactagagctgacagttaaatctgaacattctattctggaaaacttgcattatgttcataaaaatgaacaattttactccatttctcattaytcagaaatgttttactastttgatgaaattaatataagcagagtgcttctaatctgaactttacaaccgatattgcttatgagaaaatacatgaattttaatgattagcaagttaaataaataaattaagcagcaaagaacatgatacaactactgaacctaagctggttaatggatttaatacttaaaggtgacattatgcagttcacaatattgaacatgtgcaggacaactttcaggatttaggctcacggtaccttaaatttttattcaacaaggtttaattttaacgtttccagaaaaatctccttatctgtt

SEQ ID NO: 81726 - DNA, 600 bp, Chicken  19866894375509_1
aactttcttgacctctgttttcctccaaatattctctaggtggtctacagctttcctgaagccaaacttggatgcattgtcacatctaacatctcatcatggctgaggagagcaagagcagctgtcttacttgcaaccattctgtttagacatcccagcattgtgtttaaagctacttcctcttcaccataaggaggaaatacttgatgtgctaaggagattgaacgttttgtttgcgatacacgacatgaaatgggatttagtttatgttttcacattctcttccacttcagctgcaaygctggggcagactgacaatgaaaaagctgctattcctggctcccacgggggccttcaggcttctaaaatgaacgtttagacacaggacattcatttgcattgaggagaggacaacgcattgctacaatctcactctctccctcattccccagraaackattggtacctgtatgccctgtttggtgttccctgaagtaccccattgtcttctatttgtgccttcagctctgccagctgtrctgctagttctctttccaactgctgaaccttctcagtagaagagatgtggtatacttcatc

SEQ ID NO: 81727 - DNA, 600 bp, Chicken  19866894375509_2
cccagcattgtgtttaaagctacttcctcttcaccataaggaggaaatacttgatgtgctaaggagattgaacgttttgtttgcgatacacgacatgaaatgggatttagtttatgttttcacattctcttccacttcagctgcaaygctggggcagactgacaatgaaaaagctgctattcctggctcccacgggggccttcaggcttctaaaatgaacgtttagacacaggacattcatttgcattgaggagaggacaacgcattgctacaatctcactctctccctcattccccagraaackattggtacctgtatgccctgtttggtgttccctgaagtaccccattgtcttctatttgtgccttcagctctgccagctgtrctgctagttctctttccaactgctgaaccttctcagtagaagagatgtggtatacttcatccatgttgstccttctcaagaataaatcacctgtgaactctggaccaggagaaccattcatgtaaatagcacaaattcccaatcctacagatatcyctatacaatgtatatataaacaacacatagaatattcattaaggagataattattcag

SEQ ID NO: 81728 - DNA, 600 bp, Chicken  19866894375509_3
cattgtgtttaaagctacttcctcttcaccataaggaggaaatacttgatgtgctaaggagattgaacgttttgtttgcgatacacgacatgaaatgggatttagtttatgttttcacattctcttccacttcagctgcaaygctggggcagactgacaatgaaaaagctgctattcctggctcccacgggggccttcaggcttctaaaatgaacgtttagacacaggacattcatttgcattgaggagaggacaacgcattgctacaatctcactctctccctcattccccagraaackattggtacctgtatgccctgtttggtgttccctgaagtaccccattgtcttctatttgtgccttcagctctgccagctgtrctgctagttctctttccaactgctgaaccttctcagtagaagagatgtggtatacttcatccatgttgstccttctcaagaataaatcacctgtgaactctggaccaggagaaccattcatgtaaatagcacaaattcccaatcctacagatatcyctatacaatgtatatataaacaacacatagaatattcattaaggagataattattcagcattt

SEQ ID NO: 81729 - DNA, 600 bp, Chicken  19866894375509_4
tacacgacatgaaatgggatttagtttatgttttcacattctcttccacttcagctgcaaygctggggcagactgacaatgaaaaagctgctattcctggctcccacgggggccttcaggcttctaaaatgaacgtttagacacaggacattcatttgcattgaggagaggacaacgcattgctacaatctcactctctccctcattccccagraaackattggtacctgtatgccctgtttggtgttccctgaagtaccccattgtcttctatttgtgccttcagctctgccagctgtrctgctagttctctttccaactgctgaaccttctcagtagaagagatgtggtatacttcatccatgttgstccttctcaagaataaatcacctgtgaactctggaccaggagaaccattcatgtaaatagcacaaattcccaatcctacagatatcyctatacaatgtatatataaacaacacatagaatattcattaaggagataattattcagcatttcctttaatgagaggaattttaatagctggaacagaacagagtgaaaggggtttttcccattttgattgctagcctgaggaa

SEQ ID NO: 81730 - DNA, 600 bp, Chicken  19866894375509_5
agactgacaatgaaaaagctgctattcctggctcccacgggggccttcaggcttctaaaatgaacgtttagacacaggacattcatttgcattgaggagaggacaacgcattgctacaatctcactctctccctcattccccagraaackattggtacctgtatgccctgtttggtgttccctgaagtaccccattgtcttctatttgtgccttcagctctgccagctgtrctgctagttctctttccaactgctgaaccttctcagtagaagagatgtggtatacttcatccatgttgstccttctcaagaataaatcacctgtgaactctggaccaggagaaccattcatgtaaatagcacaaattcccaatcctacagatatcyctatacaatgtatatataaacaacacatagaatattcattaaggagataattattcagcatttcctttaatgagaggaattttaatagctggaacagaacagagtgaaaggggtttttcccattttgattgctagcctgaggaaaacaggagggaaccattctgggccaaaatttttcaagaaccccatccccctgcatttcactaacaaatc

SEQ ID NO: 81731 - DNA, 560 bp, Chicken  19866894375509_6
tgcattgaggagaggacaacgcattgctacaatctcactctctccctcattccccagraaackattggtacctgtatgccctgtttggtgttccctgaagtaccccattgtcttctatttgtgccttcagctctgccagctgtrctgctagttctctttccaactgctgaaccttctcagtagaagagatgtggtatacttcatccatgttgstccttctcaagaataaatcacctgtgaactctggaccaggagaaccattcatgtaaatagcacaaattcccaatcctacagatatcyctatacaatgtatatataaacaacacatagaatattcattaaggagataattattcagcatttcctttaatgagaggaattttaatagctggaacagaacagagtgaaaggggtttttcccattttgattgctagcctgaggaaaacaggagggaaccattctgggccaaaatttttcaagaaccccatccccctgcatttcactaacaaatcatatcccctcctttcttcatccagtttgttaaggacactctagaaag

SEQ ID NO: 81732 - DNA, 600 bp, Chicken  19866894375517_1
agttttctgttgtatttggggagggggttcaatttatttcctcatttatttattttactgctgtttttttgctttgatctaaatgaggaaaagtttctagttcagttatttcttcttcataggcctttgataatcactggatatacagaacaactactcacagtattccttccagcaatatatgtgaaaattttccatccttttgattaggcttgcatgcgtgctgttagaagcttcaccttgtcagaagagtgttccttttcacctgaaatttgcgtggcttttcactataggcagacktatgggagacaatcatcattgtcccttcctgactttctctgttgggtgctttgatatttagtaaataggattatgtgtttatgctagttaagatgaaaaatatttgtctcctctaacccaagtaaatgacctcacttggcacaacttctgttgttcagtctgtaagtttaaaaaactttatttcctttgagaacagaaaaatatgttgtgctaataggactgttttttcatcatttttatccacattattataattattaaaatcctcttttctttgttggtaattttaacatgccatgc

SEQ ID NO: 81733 - DNA, 600 bp, Chicken  19866894375521_1
tcccattctatatcttgaactaaataaaggatttcttcagttatgtatgagtagatacccatagctgctttcagctatggtagctcaccccagcctgctcactgtccttccccctcttctatcctcctaatttcttgttcaatctttccatccgtcttcagcatctgggaaaacagcttgattcctgactcatcctgtgccctggctcaaaagcctggtgctaatgcatgttcatgctgctgatgctgcaggcaagttgggtcctttgatatcgatagggctctagtgtaacggtagggragataagctgtcattagtcmggttttaaaaagcactcctttaactatgcagaaaagtgctgctgtggttgaaataactaagagactggasraagagagaacattttgtttttcagcttcaggatcaaaagacgttttactaaattgctgtaactgcttatgccagagaggcattggccctgtgaggcagtttcatgagggttcttacctcagatcagcctatccatgcagctcctgaatccaaacctgattctggtgtgccacccagaacacttgtttctaaatttctgtaattcaagct

SEQ ID NO: 81734 - DNA, 600 bp, Chicken  19866894375521_2
taaataaaggatttcttcagttatgtatgagtagatacccatagctgctttcagctatggtagctcaccccagcctgctcactgtccttccccctcttctatcctcctaatttcttgttcaatctttccatccgtcttcagcatctgggaaaacagcttgattcctgactcatcctgtgccctggctcaaaagcctggtgctaatgcatgttcatgctgctgatgctgcaggcaagttgggtcctttgatatcgatagggctctagtgtaacggtagggragataagctgtcattagtcmggttttaaaaagcactcctttaactatgcagaaaagtgctgctgtggttgaaataactaagagactggasraagagagaacattttgtttttcagcttcaggatcaaaagacgttttactaaattgctgtaactgcttatgccagagaggcattggccctgtgaggcagtttcatgagggttcttacctcagatcagcctatccatgcagctcctgaatccaaacctgattctggtgtgccacccagaacacttgtttctaaatttctgtaattcaagctctgccatctctctgtctcca

SEQ ID NO: 81735 - DNA, 600 bp, Chicken  19866894375521_3
cagcctgctcactgtccttccccctcttctatcctcctaatttcttgttcaatctttccatccgtcttcagcatctgggaaaacagcttgattcctgactcatcctgtgccctggctcaaaagcctggtgctaatgcatgttcatgctgctgatgctgcaggcaagttgggtcctttgatatcgatagggctctagtgtaacggtagggragataagctgtcattagtcmggttttaaaaagcactcctttaactatgcagaaaagtgctgctgtggttgaaataactaagagactggasraagagagaacattttgtttttcagcttcaggatcaaaagacgttttactaaattgctgtaactgcttatgccagagaggcattggccctgtgaggcagtttcatgagggttcttacctcagatcagcctatccatgcagctcctgaatccaaacctgattctggtgtgccacccagaacacttgtttctaaatttctgtaattcaagctctgccatctctctgtctccatatatgtgagttggtactgagctgatcagtggaagggtggtagggaagaagtggtggcactgggctgtgt

SEQ ID NO: 81736 - DNA, 600 bp, Chicken  19866894375521_4
agcctgctcactgtccttccccctcttctatcctcctaatttcttgttcaatctttccatccgtcttcagcatctgggaaaacagcttgattcctgactcatcctgtgccctggctcaaaagcctggtgctaatgcatgttcatgctgctgatgctgcaggcaagttgggtcctttgatatcgatagggctctagtgtaacggtagggragataagctgtcattagtcmggttttaaaaagcactcctttaactatgcagaaaagtgctgctgtggttgaaataactaagagactggasraagagagaacattttgtttttcagcttcaggatcaaaagacgttttactaaattgctgtaactgcttatgccagagaggcattggccctgtgaggcagtttcatgagggttcttacctcagatcagcctatccatgcagctcctgaatccaaacctgattctggtgtgccacccagaacacttgtttctaaatttctgtaattcaagctctgccatctctctgtctccatatatgtgagttggtactgagctgatcagtggaagggtggtagggaagaagtggtggcactgggctgtgtt

SEQ ID NO: 81737 - DNA, 600 bp, Chicken  19866894375525_1
tactctatctgaggttttaaagtgtgtggtgtcccaagtttgtttcttaaagcaatctgaagaactttaaaacattacttgtgttcatataatagtctgaggtatactctccagtccagatgacttttttttgctatttctatgggtctgtgaataattacctattcacttgtctgaggaagcgtgagagttgttgatctaagaatatttatgaagttcaaacactctcagaagtattttgggattacaacagatggtgaatgcattactcaaaagtgatgaatccccaggtgatctatrmacaccattttgttaccgtggatgtcaataaggagccagtagtttcttgaggtgatcttgttaatttcaaatacaagttttacagtttatctgtcaggctctgaagagcaattaaattcacctgtgctcatcaaaagacttaatgagcatcataagttttgatgataacactgttcttttgttctttaggtagtatcatctgctaagaggggtatagatttaagcacataaatgtcacgttttcagaataaatgggctttcttgcagggaagcctttcaagttctgacttcattttatat

SEQ ID NO: 81738 - DNA, 600 bp, Chicken  19866894375525_2
actctatctgaggttttaaagtgtgtggtgtcccaagtttgtttcttaaagcaatctgaagaactttaaaacattacttgtgttcatataatagtctgaggtatactctccagtccagatgacttttttttgctatttctatgggtctgtgaataattacctattcacttgtctgaggaagcgtgagagttgttgatctaagaatatttatgaagttcaaacactctcagaagtattttgggattacaacagatggtgaatgcattactcaaaagtgatgaatccccaggtgatctatrmacaccattttgttaccgtggatgtcaataaggagccagtagtttcttgaggtgatcttgttaatttcaaatacaagttttacagtttatctgtcaggctctgaagagcaattaaattcacctgtgctcatcaaaagacttaatgagcatcataagttttgatgataacactgttcttttgttctttaggtagtatcatctgctaagaggggtatagatttaagcacataaatgtcacgttttcagaataaatgggctttcttgcagggaagcctttcaagttctgacttcattttatatc

SEQ ID NO: 81739 - DNA, 600 bp, Chicken  19866894375541_1
aatgtggctctttctaaagggaaagtgcatgaatttgggggtctgattatttgttttcttggtgcagagaaagatctggtgtgttcacttgcaaataacacatgacgattgccaattgatttcactccattcaaatatttgctcagcgaaatggtaataggaattctctacaaaaggtgtatccttgatatcaaaacttaatttatgcttaatttggctctgctgttgccacatctgattgcttcctgtatgcagaagggcatgaaaacctgctgtggaggtggtgaatgtgtgtctgtycttagttctcacctcccccctggctgagcaggaaggtggtcctgaagctgggctctcctcctgtctcctcgcttgctttgttgaccttagaaaagccagttactaatttgtgcacaagctgcgaataggtggttaccttccttccataaaatgttttgtgatttggagatgaaaaacaccggttgatatttatactgttatggctttagttagaaatttcaaatgaggagagtgaggctctgttctttctcagccacccgtgttcatgagttcagataaacactgctgtagcaaaaggag

SEQ ID NO: 81740 - DNA, 599 bp, Chicken  19866894375544_1
  misc_feature (1)..(92): n is any nucleotide
nnnnnnnnnnnnnnnnnnnnnnnnnnnnnnnnnnnnnnnnnnnnnnnnnnnnnnnnnnnnnnnnnnnnnnnnnnnnnnnnnnnnnnnnnnnnatttctggtaacatttagctgatacaactgtatatagcgtgggcagttatatactcagcacgatagtgagtttttacagcaacagatgaataactagaaattggttctaaatttgggatgatagctttctttcaaatatatgatcacatctaagggtaagatgtcagctgtttacttgttgctcattttgtttgaattgaggtagtcyagcaattttgagtgagcccttykmccctttaaaaggcaaagaggcagggaaccatgaagtgccttstagggttcatatggtaaagccttagtgcatttattccctgagctgggcctccttctctttctgtttactttcgtttaccttgtcccctgtataggtcagtactttagaatttcatctgtgttaaaaaaaaaaaaagctatgcaggcaaagaaacacctggttatttaggtaagccttcttagcagtaggaatcctcctctcctcaggagaactgttgcttcaaaattttctaa

SEQ ID NO: 81741 - DNA, 569 bp, Chicken  19866894375544_10
ttaaaaaaaaaaaatgaaacagagtactgttagatctttcctagtctgcatcgagtayttatttgtgaactgcgtattttaagaagttagtttctgacaaaatgaatttagttttcctacatcatacccttgtatacactatttccaagaacattttcaaagcttgttactgtattttaactagtagagactgagaatgacctggaaacgtcaaacatatttttaagtctggaaggagtgagtttcagcttctaggctgatcagaaatcaagaatggtagaaatactcagttttgtctcytcttttttgttttcctcttaccagactggttaggctgaacaataaaacagtgtgatttaaaatcttgctgtcttgtatgtggaactatcaaaattgaagtcagtcaatgatcagaaccaattgctattacattcaaattttaaggtattttaggaagtacaatatataggatcaaataagaacactagaaatcaagccagacagggaatagatgtgcagactcatgatgaaccatgaatgcatatattggcagtatttcctgcaagctg

SEQ ID NO: 81742 - DNA, 599 bp, Chicken  19866894375544_2
  misc_feature (1)..(70): n is any nucleotide
nnnnnnnnnnnnnnnnnnnnnnnnnnnnnnnnnnnnnnnnnnnnnnnnnnnnnnnnnnnnnnnnnnnnnnatttctggtaacatttagctgatacaactgtatatagcgtgggcagttatatactcagcacgatagtgagtttttacagcaacagatgaataactagaaattggttctaaatttgggatgatagctttctttcaaatatatgatcacatctaagggtaagatgtcagctgtttacttgttgctcattttgtttgaattgaggtagtcyagcaattttgagtgagcccttykmccctttaaaaggcaaagaggcagggaaccatgaagtgccttstagggttcatatggtaaagccttagtgcatttattccctgagctgggcctccttctctttctgtttactttcgtttaccttgtcccctgtataggtcagtactttagaatttcatctgtgttaaaaaaaaaaaaagctatgcaggcaaagaaacacctggttatttaggtaagccttcttagcagtaggaatcctcctctcctcaggagaactgttgcttcaaaattttctaacaaagcctactttcaaaaatga

SEQ ID NO: 81743 - DNA, 599 bp, Chicken  19866894375544_3
  misc_feature (1)..(69): n is any nucleotide
nnnnnnnnnnnnnnnnnnnnnnnnnnnnnnnnnnnnnnnnnnnnnnnnnnnnnnnnnnnnnnnnnnnnnatttctggtaacatttagctgatacaactgtatatagcgtgggcagttatatactcagcacgatagtgagtttttacagcaacagatgaataactagaaattggttctaaatttgggatgatagctttctttcaaatatatgatcacatctaagggtaagatgtcagctgtttacttgttgctcattttgtttgaattgaggtagtcyagcaattttgagtgagcccttykmccctttaaaaggcaaagaggcagggaaccatgaagtgccttstagggttcatatggtaaagccttagtgcatttattccctgagctgggcctccttctctttctgtttactttcgtttaccttgtcccctgtataggtcagtactttagaatttcatctgtgttaaaaaaaaaaaaagctatgcaggcaaagaaacacctggttatttaggtaagccttcttagcagtaggaatcctcctctcctcaggagaactgttgcttcaaaattttctaacaaagcctactttcaaaaatgaa

SEQ ID NO: 81744 - DNA, 599 bp, Chicken  19866894375544_4
  misc_feature (1)..(68): n is any nucleotide
nnnnnnnnnnnnnnnnnnnnnnnnnnnnnnnnnnnnnnnnnnnnnnnnnnnnnnnnnnnnnnnnnnnnatttctggtaacatttagctgatacaactgtatatagcgtgggcagttatatactcagcacgatagtgagtttttacagcaacagatgaataactagaaattggttctaaatttgggatgatagctttctttcaaatatatgatcacatctaagggtaagatgtcagctgtttacttgttgctcattttgtttgaattgaggtagtcyagcaattttgagtgagcccttykmccctttaaaaggcaaagaggcagggaaccatgaagtgccttstagggttcatatggtaaagccttagtgcatttattccctgagctgggcctccttctctttctgtttactttcgtttaccttgtcccctgtataggtcagtactttagaatttcatctgtgttaaaaaaaaaaaaagctatgcaggcaaagaaacacctggttatttaggtaagccttcttagcagtaggaatcctcctctcctcaggagaactgttgcttcaaaattttctaacaaagcctactttcaaaaatgaag

SEQ ID NO: 81745 - DNA, 599 bp, Chicken  19866894375544_5
  misc_feature (1)..(26): n is any nucleotide
nnnnnnnnnnnnnnnnnnnnnnnnnnatttctggtaacatttagctgatacaactgtatatagcgtgggcagttatatactcagcacgatagtgagtttttacagcaacagatgaataactagaaattggttctaaatttgggatgatagctttctttcaaatatatgatcacatctaagggtaagatgtcagctgtttacttgttgctcattttgtttgaattgaggtagtcyagcaattttgagtgagcccttykmccctttaaaaggcaaagaggcagggaaccatgaagtgccttstagggttcatatggtaaagccttagtgcatttattccctgagctgggcctccttctctttctgtttactttcgtttaccttgtcccctgtataggtcagtactttagaatttcatctgtgttaaaaaaaaaaaaagctatgcaggcaaagaaacacctggttatttaggtaagccttcttagcagtaggaatcctcctctcctcaggagaactgttgcttcaaaattttctaacaaagcctactttcaaaaatgaaggcactgaagttaaactttgggctcagattaaaattggtttct

SEQ ID NO: 81746 - DNA, 600 bp, Chicken  19866894375544_6
caaagcctactttcaaaaatgaaggcactgaagttaaactttgggctcagattaaaattggtttcttggtaaagaatagtgcccaacccaaaatctctggcactaataatggtcattaaattccaatcaatttctctaatttgttactcaactttcctgcatatgaatttagttttttaggcaccttggaaaaggttcttatcaaacaaacagtaattactagaaataactgcaagattatatcctccagcctgaggtttctattgcctcaggaagagtgtaatcacagaaagtatccawctttccacgcagtttaagtttcttggaacagagaggaagccagtggaaaagcttctgtttctaatctgcagatgcagtttaggacttgtctatctgttctggatatatattcctttgtgcacgttcaggagaattctgtactgtcatctgctgaatgtaaagacttatttctgtggtgagtgtctgaaatggaacaactcctgacaagagagagaatgaacagttggcatcatggatttgaattagaaatatctcagaacaattaaatgtagacattctttcatgattaaaaaaaaaaaa

SEQ ID NO: 81747 - DNA, 600 bp, Chicken  19866894375544_7
ggaaaagcttctgtttctaatctgcagatgcagtttaggacttgtctatctgttctggatatatattcctttgtgcacgttcaggagaattctgtactgtcatctgctgaatgtaaagacttatttctgtggtgagtgtctgaaatggaacaactcctgacaagagagagaatgaacagttggcatcatggatttgaattagaaatatctcagaacaattaaatgtagacattctttcatgattaaaaaaaaaaaatgaaacagagtactgttagatctttcctagtctgcatcgagtayttatttgtgaactgcgtattttaagaagttagtttctgacaaaatgaatttagttttcctacatcatacccttgtatacactatttccaagaacattttcaaagcttgttactgtattttaactagtagagactgagaatgacctggaaacgtcaaacatatttttaagtctggaaggagtgagtttcagcttctaggctgatcagaaatcaagaatggtagaaatactcagttttgtctcttcttttttgttttcctcttaccagactggttaggctgaacaataaaacagtgtgattt

SEQ ID NO: 81748 - DNA, 571 bp, Chicken  19866894375544_8
gattaaaaaaaaaaaatgaaacagagtactgttagatctttcctagtctgcatcgagtayttatttgtgaactgcgtattttaagaagttagtttctgacaaaatgaatttagttttcctacatcatacccttgtatacactatttccaagaacattttcaaagcttgttactgtattttaactagtagagactgagaatgacctggaaacgtcaaacatatttttaagtctggaaggagtgagtttcagcttctaggctgatcagaaatcaagaatggtagaaatactcagttttgtcycttcttttttgttttcctcttaccagactggttaggctgaacaataaaacagtgtgatttaaaatcttgctgtcttgtatgtggaactatcaaaattgaagtcagtcaatgatcagaaccaattgctattacattcaaattttaaggtattttaggaagtacaatatataggatcaaataagaacactagaaatcaagccagacagggaatagatgtgcagactcatgatgaaccatgaatgcatatattggcagtatttcctgcaagctg

SEQ ID NO: 81749 - DNA, 570 bp, Chicken  19866894375544_9
attaaaaaaaaaaaatgaaacagagtactgttagatctttcctagtctgcatcgagtayttatttgtgaactgcgtattttaagaagttagtttctgacaaaatgaatttagttttcctacatcatacccttgtatacactatttccaagaacattttcaaagcttgttactgtattttaactagtagagactgagaatgacctggaaacgtcaaacatatttttaagtctggaaggagtgagtttcagcttctaggctgatcagaaatcaagaatggtagaaatactcagttttgtctyttcttttttgttttcctcttaccagactggttaggctgaacaataaaacagtgtgatttaaaatcttgctgtcttgtatgtggaactatcaaaattgaagtcagtcaatgatcagaaccaattgctattacattcaaattttaaggtattttaggaagtacaatatataggatcaaataagaacactagaaatcaagccagacagggaatagatgtgcagactcatgatgaaccatgaatgcatatattggcagtatttcctgcaagctg

SEQ ID NO: 81750 - DNA, 600 bp, Chicken  19866894375547_1
ttccctctgggtggttctgaacaaggggcacttggccccttcccctgagacattcctcattaactgagctctctcccccctctctgcaagcctaacactttgtgcagaaatttgaccttgagctcaagatgccttcatcagagaaacctacatcctaattggaataatatcacaaaacatataaccctacaacctcctccttccaacaccacattcaggtcttgaaaaccacagaaccacgaccggctcccacgggggagatgctgctgctctgcccaagctatctacagacaaggtaaytttattctcatatgagctcacagcctgaaaaggagctggatgcttttagatcaaagtagcattttgatgctaagagagagacataaaataccatcgggaattacttttattatcactaggggccagacagaaatttcatcccatatacaatgtcacacaatgtcccactgcactataataggaaagaatataaaaaaaataagattgcactactggactaagatatcacagaaacatgttttatatgaacccaccaatatattgattttgttaggtgcttgtaataaacaaaagagttaa

SEQ ID NO: 81751 - DNA, 530 bp, Chicken  19866894375553_1
agaaggctcaaacaaccacagccattgaggcagactgctccgtgcagtgccgtcctgctttatctcacacttggatccagggatttaccttgctgggtttcactgagttgttgcagagccacgtcctctgctcagctgatggagctgttggtgcagaattgcccttaaactctctaccttccacttcccatcagcctaacaggaggaaaaagcgctctcctaatgtttataaatcgctctggataggaaaagtgctgcatggtattaatacatttattagccaccgagctgcgaggcccraagacagccagtgatgtataaatacccagcacaacttttaaaaatgcaaaactcgattaacaatttaagaccgtctgcgctgaatattaaagcacgcccgaagttccctctgctgatggccaaacccaaccgtgggcgccctgcaacccctccgaagagcccctgccatctgctgagccccatcctatgcagggcagagctgccttccccacctgcttcttagcagcacc

SEQ ID NO: 81752 - DNA, 599 bp, Chicken  19866894375558_1
  misc_feature (1)..(215): n is any nucleotide
nnnnnnnnnnnnnnnnnnnnnnnnnnnnnnnnnnnnnnnnnnnnnnnnnnnnnnnnnnnnnnnnnnnnnnnnnnnnnnnnnnnnnnnnnnnnnnnnnnnnnnnnnnnnnnnnnnnnnnnnnnnnnnnnnnnnnnnnnnnnnnnnnnnnnnnnnnnnnnnnnnnnnnnnnnnnnnnnnnnnnnnnnnnnnnnnnnnnnnnnnnnnnnnnnnnnnnnctgcatatttgccttggagatggctacacagcttggcgtttattttggcttacactttcctgtgttgtaatggtaattgccaagyagcatgattagcagctgtcatatttctgttggtaaagatccttyccacaaaaacagagcaatgatgctttgtaccctcttcccagctgtgcctgagagctgtggcacaygtgtcccagacatccacccaagcatctcagacccctacaggtttcagcaattaagccatagaaatagttttgttaatgggaaagaaaaagttgtactcatcctaatagttcaaatctgatgagcagcatcttgaaagaaaaatcatacagtagtctaaatcgtagtcatagactggtttggaagggacca

SEQ ID NO: 81753 - DNA, 599 bp, Chicken  19866894375558_2
  misc_feature (1)..(171): n is any nucleotide
nnnnnnnnnnnnnnnnnnnnnnnnnnnnnnnnnnnnnnnnnnnnnnnnnnnnnnnnnnnnnnnnnnnnnnnnnnnnnnnnnnnnnnnnnnnnnnnnnnnnnnnnnnnnnnnnnnnnnnnnnnnnnnnnnnnnnnnnnnnnnnnnnnnnnnnnnnnnnnnnnnnnnnnnnnnctgcatatttgccttggagatggctacacagcttggcgtttattttggcttacactttcctgtgttgtaatggtaattgccaagyagcatgattagcagctgtcatatttctgttggtaaagatccttyccacaaaaacagagcaatgatgctttgtaccctcttcccagctgtgcctgagagctgtggcacaygtgtcccagacatccacccaagcatctcagacccctacaggtttcagcaattaagccatagaaatagttttgttaatgggaaagaaaaagttgtactcatcctaatagttcaaatctgatgagcagcatcttgaaagaaaaatcatacagtagtctaaatcgtagtcatagactggtttggaagggaccaatgttgtctctgaacagcacatcccttttgcctttcaatctgaa

SEQ ID NO: 81754 - DNA, 599 bp, Chicken  19866894375558_3
  misc_feature (1)..(106): n is any nucleotide
nnnnnnnnnnnnnnnnnnnnnnnnnnnnnnnnnnnnnnnnnnnnnnnnnnnnnnnnnnnnnnnnnnnnnnnnnnnnnnnnnnnnnnnnnnnnnnnnnnnnnnnnnnctgcatatttgccttggagatggctacacagcttggcgtttattttggcttacactttcctgtgttgtaatggtaattgccaagyagcatgattagcagctgtcatatttctgttggtaaagatccttyccacaaaaacagagcaatgatgctttgtaccctcttcccagctgtgcctgagagctgtggcacaygtgtcccagacatccacccaagcatctcagacccctacaggtttcagcaattaagccatagaaatagttttgttaatgggaaagaaaaagttgtactcatcctaatagttcaaatctgatgagcagcatcttgaaagaaaaatcatacagtagtctaaatcgtagtcatagactggtttggaagggaccaatgttgtctctgaacagcacatcccttttgcctttcaatctgaagttaaatttagcctcaaattgcttaagggggctgcaaataatttcaactgtgatagcagctgcca

SEQ ID NO: 81755 - DNA, 600 bp, Chicken  19866894375564_1
agaggaaaattccagagactgtatcagtgagtcaagctacttctggctgcttggttcagaatcttactcttgttctgcaagattatttacttcagataaagtcccaccacaagagacaacacatcgtctcacatgtattaagattacttggaggcatggaaacaacgacgtccacttgtgggctgtctgaactctttctgaaacaagctggtatacctgcatacacacaagttccaaatgcttttgcaatgtaagcactgaacagatttcagaaattgtactgcaattatcatttctctsaaagcatacagcaggttaatttttgtccttattcattttgtacaacckttggccagtaacatccactgctcatgcaacaatggaatcacttcacaaactgaaagcaaaggagggctcctgcaagagacagacagacatattttgtgcattttctggactctgcagttcatactgaagcttttgtaaaggacccacctagagttccccttccttcatgaaaagctcttcaattctgtgaattaacattcctgtaacaccaaagttcctcgcagaacagatacttaaaatctcttcagaaaa

SEQ ID NO: 81756 - DNA, 600 bp, Chicken  19866894375564_2
gcttggttcagaatcttactcttgttctgcaagattatttacttcagataaagtcccaccacaagagacaacacatcgtctcacatgtattaagattacttggaggcatggaaacaacgacgtccacttgtgggctgtctgaactctttctgaaacaagctggtatacctgcatacacacaagttccaaatgcttttgcaatgtaagcactgaacagatttcagaaattgtactgcaattatcatttctctsaaagcatacagcaggttaatttttgtccttattcattttgtacaacckttggccagtaacatccactgctcatgcaacaatggaatcacttcacaaactgaaagcaaaggagggctcctgcaagagacagacagacatattttgtgcattttctggactctgcagttcatactgaagcttttgtaaaggacccacctagagttccccttccttcatgaaaagctcttcaattctgtgaattaacattcctgtaacaccaaagttcctcgcagaacagatacttaaaatctcttcagaaaaaaaaaaaaaaaaaatagatggaacccatggcttcaagctatgccaggg

SEQ ID NO: 81757 - DNA, 600 bp, Chicken  19866894375571_1
tccctttaactttacatttttgggtcagtaagtaagtgtgtatttgttgctctgagtattctgaactgtgctgattgcaatgtgcacagaggtaggaaatagcattctgacaaagttagactggtgtgaaggccagctgcttgggagctgtacataccattactcttattcacttttctcttactgttagcactccctgctgactaggtcactaaaccagttactccattcctcctccacttgtttttaaaaccttacaactgtgtttttcttaaaacagttttctctctcccttcccartcaacaccgtctcaacactagcctatgcactgattgtttcaagatccttgccacttctgaccacaacttttctccctccgtctgttcagcctgcccaaactattgccatgaaaatrttttccatttctcacctctctgagaatgttgctctgcttctgaaacctcaacatagacctatttccaccctaaaattcaaaygtgtttcttttctcagctctaaataacttcactgctacttggatctgacctcatctcctctcggaaagccagtcagtctccagtgttgggagtgtctttgtt

SEQ ID NO: 81758 - DNA, 600 bp, Chicken  19866894375571_2
tagactggtgtgaaggccagctgcttgggagctgtacataccattactcttattcacttttctcttactgttagcactccctgctgactaggtcactaaaccagttactccattcctcctccacttgtttttaaaaccttacaactgtgtttttcttaaaacagttttctctctcccttcccartcaacaccgtctcaacactagcctatgcactgattgtttcaagatccttgccacttctgaccacaacttttctccctccgtctgttcagcctgcccaaactattgccatgaaaatrttttccatttctcacctctctgagaatgttgctctgcttctgaaacctcaacatagacctatttccaccctaaaattcaaaygtgtttcttttctcagctctaaataacttcactgctacttggatctgacctcatctcctctcggaaagccagtcagtctccagtgttgggagtgtctttgttggggagcagggtgtattgtaactgatttccctctttctccatcagcagagtgctctgaatctaaatgtactgcagaagaaattactccagtcacctccctggtttgttttcggaag

SEQ ID NO: 81759 - DNA, 600 bp, Chicken  19866894375571_3
gctgactaggtcactaaaccagttactccattcctcctccacttgtttttaaaaccttacaactgtgtttttcttaaaacagttttctctctcccttcccartcaacaccgtctcaacactagcctatgcactgattgtttcaagatccttgccacttctgaccacaacttttctccctccgtctgttcagcctgcccaaactattgccatgaaaatrttttccatttctcacctctctgagaatgttgctctgcttctgaaacctcaacatagacctatttccaccctaaaattcaaaygtgtttcttttctcagctctaaataacttcactgctacttggatctgacctcatctcctctcggaaagccagtcagtctccagtgttgggagtgtctttgttggggagcagggtgtattgtaactgatttccctctttctccatcagcagagtgctctgaatctaaatgtactgcagaagaaattactccagtcacctccctggtttgttttcggaagtgcctgcacatatttataaaacaatcaccaaaaaacattaaggtccagatctacgtaaacaactacatacaatttccaccaa

SEQ ID NO: 81760 - DNA, 600 bp, Chicken  19866894375579_1
gtccggacagcatccctatattctccccaggtgatacacccttatttctacagctggtacaatcccttctcttcctgcctcccctgcctgctttcttattctgagggacagagagctcttgtgctctcagaaaggcatccttaaagagtagccagctttcttccagtcctttgtctctaaggtcagcttcccaggaggtctcgacaaacaattccttaaacaacctaaagttcccagagttcagggtcctgaccccactttttgccaggcccccattcctcgagatcacaagcggaaaayaggatttgcatattacgtagatcaaaaagcaagatattttcaaagcagggagggaagtggggaagtttgttcatacatataagcatgttgatgtcagcaatgacaagaaaagtaattggtagtggaatggcaacctagcaaccagtaccttcatgaaattagttgtacgtgctgtgagtttgttaatagtccttatggagccaaaatgctgtatcaaacaggaataatttctctttaaattggctcccaggagtggctattagtttatatgtgggaaaccaattttgctgtaggattctt

SEQ ID NO: 81761 - DNA, 599 bp, Chicken  19866894375595_1
  misc_feature (1)..(58): n is any nucleotide
nnnnnnnnnnnnnnnnnnnnnnnnnnnnnnnnnnnnnnnnnnnnnnnnnnnnnnnnnnccataagtaattcacaatatctgtacaaagaagtccttgccaagccctggcaaccgttgtggaagcaaaacctacacagcttagagacaaaacaaagaaaaaagtctacagatcatatctaacacatgcattagcaaggctgcatttaaacagaacagaccactagtttactttcatgaattttattaagtagaaaaggaattagtatatatttagggtagcactgcaccaaagcagaccawtacagctttagtaggaagtatggtgatctaaatggagttacaatgaaaatcagcaggtacagttaccaaacactgaatggaaagatggtcaggttataaaagattgatacaagaagttactgtataccagctttaaaagaaatgaagacrgattttgctaataatacwaarctgagcacagatacagaagaacttaagactcgctccatggaagctactccatatgctcaaggargtcctttcacttctatcctaaacattttaaacaccacatcaaccttaccacaacctgctacaca

SEQ ID NO: 81762 - DNA, 600 bp, Chicken  19866894375595_2
caaagaaaaaagtctacagatcatatctaacacatgcattagcaaggctgcatttaaacagaacagaccactagtttactttcatgaattttattaagtagaaaaggaattagtatatatttagggtagcactgcaccaaagcagaccawtacagctttagtaggaagtatggtgatctaaatggagttacaatgaaaatcagcaggtacagttaccaaacactgaatggaaagatggtcaggttataaaagattgatacaagaagttactgtataccagctttaaaagaaatgaagacrgattttgctaataatacwaarctgagcacagatacagaagaacttaagactcgctccatggaagctactccatatgctcaaggargtcctttcacttctatcctaaacattttaaacaccacatcaaccttaccacaacctgctacacagtgtaagaagctkcttttgattacagctccctatagcatgtgcctctaattaaaagtttcagggttttgtgttgtgttggtctttttttgtttccttttaaaaactaaagaaacatggtaggacagtataccaattccctcactctgaaaa

SEQ ID NO: 81763 - DNA, 600 bp, Chicken  19866894375595_3
gatcatatctaacacatgcattagcaaggctgcatttaaacagaacagaccactagtttactttcatgaattttattaagtagaaaaggaattagtatatatttagggtagcactgcaccaaagcagaccawtacagctttagtaggaagtatggtgatctaaatggagttacaatgaaaatcagcaggtacagttaccaaacactgaatggaaagatggtcaggttataaaagattgatacaagaagttactgtataccagctttaaaagaaatgaagacrgattttgctaataatacwaarctgagcacagatacagaagaacttaagactcgctccatggaagctactccatatgctcaaggargtcctttcacttctatcctaaacattttaaacaccacatcaaccttaccacaacctgctacacagtgtaagaagctkcttttgattacagctccctatagcatgtgcctctaattaaaagtttcagggttttgtgttgtgttggtctttttttgtttccttttaaaaactaaagaaacatggtaggacagtataccaattccctcactctgaaaacaattcatggataatagc

SEQ ID NO: 81764 - DNA, 600 bp, Chicken  19866894375595_4
catatctaacacatgcattagcaaggctgcatttaaacagaacagaccactagtttactttcatgaattttattaagtagaaaaggaattagtatatatttagggtagcactgcaccaaagcagaccawtacagctttagtaggaagtatggtgatctaaatggagttacaatgaaaatcagcaggtacagttaccaaacactgaatggaaagatggtcaggttataaaagattgatacaagaagttactgtataccagctttaaaagaaatgaagacrgattttgctaataatacwaarctgagcacagatacagaagaacttaagactcgctccatggaagctactccatatgctcaaggargtcctttcacttctatcctaaacattttaaacaccacatcaaccttaccacaacctgctacacagtgtaagaagctkcttttgattacagctccctatagcatgtgcctctaattaaaagtttcagggttttgtgttgtgttggtctttttttgtttccttttaaaaactaaagaaacatggtaggacagtataccaattccctcactctgaaaacaattcatggataatagcacc

SEQ ID NO: 81765 - DNA, 600 bp, Chicken  19866894375595_5
gaattttattaagtagaaaaggaattagtatatatttagggtagcactgcaccaaagcagaccawtacagctttagtaggaagtatggtgatctaaatggagttacaatgaaaatcagcaggtacagttaccaaacactgaatggaaagatggtcaggttataaaagattgatacaagaagttactgtataccagctttaaaagaaatgaagacrgattttgctaataatacwaarctgagcacagatacagaagaacttaagactcgctccatggaagctactccatatgctcaaggargtcctttcacttctatcctaaacattttaaacaccacatcaaccttaccacaacctgctacacagtgtaagaagctkcttttgattacagctccctatagcatgtgcctctaattaaaagtttcagggttttgtgttgtgttggtctttttttgtttccttttaaaaactaaagaaacatggtaggacagtataccaattccctcactctgaaaacaattcatggataatagcaccagaaatacaaaggaaagagaaaggtctttaaaaagctaacaattcaagactcatttcatgtagt

SEQ ID NO: 81766 - DNA, 600 bp, Chicken  19866894375595_6
aggaagtatggtgatctaaatggagttacaatgaaaatcagcaggtacagttaccaaacactgaatggaaagatggtcaggttataaaagattgatacaagaagttactgtataccagctttaaaagaaatgaagacrgattttgctaataatacwaarctgagcacagatacagaagaacttaagactcgctccatggaagctactccatatgctcaaggargtcctttcacttctatcctaaacattttaaacaccacatcaaccttaccacaacctgctacacagtgtaagaagctkcttttgattacagctccctatagcatgtgcctctaattaaaagtttcagggttttgtgttgtgttggtctttttttgtttccttttaaaaactaaagaaacatggtaggacagtataccaattccctcactctgaaaacaattcatggataatagcaccagaaatacaaaggaaagagaaaggtctttaaaaagctaacaattcaagactcatttcatgtagtctaactcttaagaggtcctcagttatgtggggtttggcagaggctttgataatagagctcataacacacactgagtt

SEQ ID NO: 81767 - DNA, 600 bp, Chicken  19866894375598_1
aaaataggcatgatcgttctttttattttgacaagttctaatgagtaacattccctacattaaaagacgtctctcctcttccactgttttctttcacgctttcctactgtgtatctttttcttttcaatcaggttcaatatagcaatcgatgtcttcacgatatcttcctgttacttcttaatcttagtcttgtttcacattttccctttattaagccttcccctcccccccccccccaacacacagctcacacttttgtcactacaaaagtgtaacatggtgagcggagaagatgaagmctactactctctcagtaacgaattcctccctaactccagtcagccccagacatctggtacagatttaagttttcatgaaattagaagctctgtaaaggtggaatttcagcttctataatctatattttgccacacacaaaatgtggtatatcatgtagtgacagtaaygtgaggtagtaaagctacatatcaactagtaatgtacctagcagygctgttctgacagatgtcactttaaattgcagtttgtagtgtatttgaataagctacacataattaggattaactttgctatcccca

SEQ ID NO: 81768 - DNA, 600 bp, Chicken  19866894375598_2
ctgttacttcttaatcttagtcttgtttcacattttccctttattaagccttcccctcccccccccccccaacacacagctcacacttttgtcactacaaaagtgtaacatggtgagcggagaagatgaagmctactactctctcagtaacgaattcctccctaactccagtcagccccagacatctggtacagatttaagttttcatgaaattagaagctctgtaaaggtggaatttcagcttctataatctatattttgccacacacaaaatgtggtatatcatgtagtgacagtaaygtgaggtagtaaagctacatatcaactagtaatgtacctagcagygctgttctgacagatgtcactttaaattgcagtttgtagtgtatttgaataagctacacataattaggattaactttgctatccccatagtcgtgactgattcatgattagtatgtatgtgctttagtgttacttaagagaaggatcaagtggtgttaattggtgaggcactggcacaggttgcccagagaggaggtggatgccctgtccttggagacactgaaggtcaggctggatggggctctgagcaacctg

SEQ ID NO: 81769 - DNA, 600 bp, Chicken  19866894375598_3
aagccttcccctcccccccccccccaacacacagctcacacttttgtcactacaaaagtgtaacatggtgagcggagaagatgaagmctactactctctcagtaacgaattcctccctaactccagtcagccccagacatctggtacagatttaagttttcatgaaattagaagctctgtaaaggtggaatttcagcttctataatctatattttgccacacacaaaatgtggtatatcatgtagtgacagtaaygtgaggtagtaaagctacatatcaactagtaatgtacctagcagygctgttctgacagatgtcactttaaattgcagtttgtagtgtatttgaataagctacacataattaggattaactttgctatccccatagtcgtgactgattcatgattagtatgtatgtgctttagtgttacttaagagaaggatcaagtggtgttaattggtgaggcactggcacaggttgcccagagaggaggtggatgccctgtccttggagacactgaaggtcaggctggatggggctctgagcaacctggtctagctgtgggtgtccctggtcattgctggggagtgggactag

SEQ ID NO: 81770 - DNA, 599 bp, Chicken  19866894375604_1
  misc_feature (1)..(163): n is any nucleotide
nnnnnnnnnnnnnnnnnnnnnnnnnnnnnnnnnnnnnnnnnnnnnnnnnnnnnnnnnnnnnnnnnnnnnnnnnnnnnnnnnnnnnnnnnnnnnnnnnnnnnnnnnnnnnnnnnnnnnnnnnnnnnnnnnnnnnnnnnnnnnnnnnnnnnnnnnnnnnnnnnnnacccctaaatttaggtacatgcagaaaatatatgaagatgaatgtgaatgtccactggaattgttcaaagcagtggcttgtattgattatgccatcatttatccgatctcagtaattccagtgtattccagtacttygtgttagtaaatacctttgcaaagctgacctcagtcttggtttgacatactttgaaagactgcrggaaggttagtgggaagcacatatgttgatcagttaaattaaagcatatctcaaaaggtatctaaaatgaaaatctgtctttgggtactatcttgtctgttgatactacacaactgtgctcataaacctctgttgaatcagcaagaacataatttattcatatcctgttaatattccactcttgtcattgtgcctcccacctcttgaaaactgaatacagtgtttggacagccgt

SEQ ID NO: 81771 - DNA, 599 bp, Chicken  19866894375604_2
  misc_feature (1)..(99): n is any nucleotide
nnnnnnnnnnnnnnnnnnnnnnnnnnnnnnnnnnnnnnnnnnnnnnnnnnnnnnnnnnnnnnnnnnnnnnnnnnnnnnnnnnnnnnnnnnnnnnnnnnnacccctaaatttaggtacatgcagaaaatatatgaagatgaatgtgaatgtccactggaattgttcaaagcagtggcttgtattgattatgccatcatttatccgatctcagtaattccagtgtattccagtacttygtgttagtaaatacctttgcaaagctgacctcagtcttggtttgacatactttgaaagactgcrggaaggttagtgggaagcacatatgttgatcagttaaattaaagcatatctcaaaaggtatctaaaatgaaaatctgtctttgggtactatcttgtctgttgatactacacaactgtgctcataaacctctgttgaatcagcaagaacataatttattcatatcctgttaatattccactcttgtcattgtgcctcccacctcttgaaaactgaatacagtgtttggacagccgttggtaatcctgtatatttgctgttatctaatgacagttgacttaaagcattactaaacctttaa

SEQ ID NO: 81772 - DNA, 600 bp, Chicken  19866894375609_1
ggatcgggagcggttgcccgggggcgggggttcggcggtaccaccgctgcgatgagttccccgatctcagcccacggctgtcagagaaagggagaggaacgcggcccccggaacccaaggagaacccatggggagttcaaggtgaccccaaatggaaccgaaggggcacacccggagcacacctttccccgccccatacctgccgccccgccgtgcaccgctccccgccgccgacgccgcttccgagtgccttctctggcctcgccgctcccttatagccgcgccccgggggggggaggrggcacggggaggtgccgggggtatcccggggtaggggccgggccgcgctgaaccaccccacgccgaatgagttcggtgctgccgcccccagagccccttctcctgtccctgcggggatcccgacttctgccgggggtggggggggaccctcggaatgctggggccaaagagagcgccctacagaagctctgcgcaccccgacccgtctgtcacaaggtgggggccccccgacccatcagcacgaggtggagagaggagggggccgtgtgtgcgtccccgtgcccagagctgcatctgccg

SEQ ID NO: 81773 - DNA, 600 bp, Chicken  19866894375612_1
tgcaacatttatagtatcagggaaatttactgtccctgtactgggtgctgcattgctgatcctctcacacaaagaacacacgctccaactactgacacaagatgggctgtgaggaaaaggggtccaaacaggtgaaacacttcagtgcagaacatgtcagtgtcaaagatacctgaaggaaggcttcttggaactgattttgacttccatcacattccccgttttttaaacatgactgaaaagattataagagtttgtcacctccattcaaatgccacctataagaaggaatgccctacygagtacacttctacacaatctgtagcagatctctgcttgcgatgagatgcttacttccaacagcccattctgcacaggaggtcacatcagataaccacagggtcccatctggctttagcatctgtgaatcaaggatcggatacttccgccactaatataacaagcaagagctagtctgtcttgtagaatgactgccaagagggtttctttttcacaagcatttccttacattacaggaacatacatgcatgtgctgcagagaaattaaataataaattatcatcaaggaaagttagggag

SEQ ID NO: 81774 - DNA, 600 bp, Chicken  19866894375612_2
atgcttacttccaacagcccattctgcacaggaggtcacatcagataaccacagggtcccatctggctttagcatctgtgaatcaaggatcggatacttccgccactaatataacaagcaagagctagtctgtcttgtagaatgactgccaagagggtttctttttcacaagcatttccttacattacaggaacatacatgcatgtgctgcagagaaattaaataataaattatcatcaaggaaagttagggagttgacataaaaaccactaagaccagctgcacataactagaaatctyaagtttgtttgaacaacctcaggaaacaaactcaactgagttcataccatgagtaggaggaactgcacgtgggagagcacaggacagctgtagtggaagaaaatggatcctggagattccacaggcattatataggcctttcagccataacattgtatgtaatacaggaatatgcagcactgtctcttcaaaagaaatgtaaaaccagctgtcagcccttgctttaggtaagtacaggagacaacatgacatatataaaatagccctaggtggtttacactcatayaagatacgagtcta

SEQ ID NO: 81775 - DNA, 600 bp, Chicken  19866894375612_3
taactagaaatctyaagtttgtttgaacaacctcaggaaacaaactcaactgagttcataccatgagtaggaggaactgcacgtgggagagcacaggacagctgtagtggaagaaaatggatcctggagattccacaggcattatataggcctttcagccataacattgtatgtaatacaggaatatgcagcactgtctcttcaaaagaaatgtaaaaccagctgtcagcccttgctttaggtaagtacaggagacaacatgacatatataaaatagccctaggtggtttacactcatayaagatacgagtctacactataygatctacatgaagggaagattaagaaagttgacagttcatctcctttttacaaaatcagggccaaaatgttgtgatttttgcccgtctacaaccaagcaagcacagactgccctgttttcaaagtaaaatctagttaacaaaagcatacaggtttgtccctggtctgcccgttagaarctcaagtgtgtatttgtcaattttcccagcccaactaatacttgcccaacaaaagtattagttacctcgttacacgggcaatttttacttatgtaataat

SEQ ID NO: 81776 - DNA, 600 bp, Chicken  19866894375612_4
ttgaacaacctcaggaaacaaactcaactgagttcataccatgagtaggaggaactgcacgtgggagagcacaggacagctgtagtggaagaaaatggatcctggagattccacaggcattatataggcctttcagccataacattgtatgtaatacaggaatatgcagcactgtctcttcaaaagaaatgtaaaaccagctgtcagcccttgctttaggtaagtacaggagacaacatgacatatataaaatagccctaggtggtttacactcatayaagatacgagtctacactataygatctacatgaagggaagattaagaaagttgacagttcatctcctttttacaaaatcagggccaaaatgttgtgatttttgcccgtctacaaccaagcaagcacagactgccctgttttcaaagtaaaatctagttaacaaaagcatacaggtttgtccctggtctgcccgttagaarctcaagtgtgtatttgtcaattttcccagcccaactaatacttgcccaacaaaagtattagttacctcgttacacgggcaatttttacttatgtaataatttaatgggtaattattccatat

SEQ ID NO: 81777 - DNA, 487 bp, Chicken  19866894375612_5
ttcaaaagaaatgtaaaaccagctgtcagcccttgctttaggtaagtacaggagacaacatgacatatataaaatagccctaggtggtttacactcatayaagatacgagtctacactataygatctacatgaagggaagattaagaaagttgacagttcatctcctttttacaaaatcagggccaaaatgttgtgatttttgcccgtctacaaccaagcaagcacagactgccctgttttcaaagtaaaatctagttaacaaaagcatacaggtttgtccctggtctgcccgttagaarctcaagtgtgtatttgtcaattttcccagcccaactaatacttgcccaacaaaagtattagttacctcgttacacgggcaatttttacttatgtaataatttaatgggtaattattccatattacttggctcgtgcccttagaagcattgaactcatagctaaatatcttcttggattccctttgca

SEQ ID NO: 81778 - DNA, 600 bp, Chicken  19866894375613_1
tgctctgtgtgcaaatttgaaacatggtttggaaggttgattatagagaatatgtcgctgagttacccatgaaatacttccccaaatgcctttactggtttttatattgcactatactgtactacgaccccatcataaagttattacttgtgacctttgctggacagcctttgtttgttgcccgttgctctttctcaagacttgggctccatctcatgctgactcccttacagggagtgcctagccaggatgctttggacacactatctactctgcgtgcaggtactggtggggggactkaaataaaatgagaggccaaccttggtgttctgatttgcttttgaggattaaaggacatgctttagaggggaaatattggtggtaggtggatagttggactagatgatgttaagaggtcttttccaaccataatgattctatgattttataattctattttaattccaggtgaatatataataaattcaggaagcaattaaaatatacttctgcataagagttaactaatattcattccctgttaaattgactcatattccagatgtctaagagatctgttagttaaaaaaccttgttgca

SEQ ID NO: 81779 - DNA, 600 bp, Chicken  19866894375616_1
tgtatagctgggatagagatggtttgggacactcctgtgcaggaagctttaacagcagctcttggaattagttgagtaacacctctagaacatactgttggagtcattcagctggctccatcccttgaattttgtcaagtatttttcatttaaagctagctatacactgtaactagtaaacatccttgtgaacagatggtgtattagtattagaagtgtttgtaagagagtttcattagccagatgagctcaagtaatcttactgactgccagactatgtaacttctaaaattgttcctratttatttcaccaggttacagtaggtactgatggagggaggcagctttgctgtagaaatcctgtgtaagcttttccccagcttaaactttacatgtgaatttgatgctaagcactgttttcaagatgtaaaatataattgacttatgggaattctggatgtacratttgcctctagtgaatttttttccatctgtctttgttttgttaagaaatatcaatttcttaattattgctgattgcttcttttatttcaaagaccaagtgaagggtctagtgggatagagttgagaagggtgcag

SEQ ID NO: 81780 - DNA, 600 bp, Chicken  19866894375616_2
cactgtaactagtaaacatccttgtgaacagatggtgtattagtattagaagtgtttgtaagagagtttcattagccagatgagctcaagtaatcttactgactgccagactatgtaacttctaaaattgttcctratttatttcaccaggttacagtaggtactgatggagggaggcagctttgctgtagaaatcctgtgtaagcttttccccagcttaaactttacatgtgaatttgatgctaagcactgttttcaagatgtaaaatataattgacttatgggaattctggatgtacratttgcctctagtgaatttttttccatctgtctttgttttgttaagaaatatcaatttcttaattattgctgattgcttcttttatttcaaagaccaagtgaagggtctagtgggatagagttgagaagggtgcagtaaaccaactcagtgattttggtgatttttttttaattaagtagaattacagaagccatttattagactcataatacacacttcctgcatggaaaaactgtaatcttcatcttgtcttaattcctcatagcacaccagcacataaaccacttttttatggctgg

SEQ ID NO: 81781 - DNA, 600 bp, Chicken  19866894375619_1
cttgatccttaatgggctgtagttttcagtgctgggagctcttaagtttaacaaaagcttgtgagccagattccagtcaaaaagttttactgtattgttagagccaaggaacatatcccagacagggcaaataactctttctgcagccaggaagagtccagcagaaatacagagtaactagtattaatcagccaaatcatatattagacacagttttagggcagcagttgcccaaaatgtaagttaaaggcaggtcctgcctgaccaacatgatcttctatgattgagtgaccctcctgrtggatgaaggaaaagctgttgatgtaatctactagacttcagcaaagcctgtgacactgtttcccacagtattctggagaagctgtcagcccatggcttggacaggtacactctgctgggtaaagaaactcttaaaccagcactmtttgctgggccaaacccagagagtggtggtaaatggagttaaatccagctggcaaccagtcacaagtggtgttccccagggtcaatactggggcctgttctgtttaacatctttgctgatgacctggatggggatattaagtgcaccctcaataa

SEQ ID NO: 81782 - DNA, 558 bp, Chicken  19866894375619_2
gccaggaagagtccagcagaaatacagagtaactagtattaatcagccaaatcatatattagacacagttttagggcagcagttgcccaaaatgtaagttaaaggcaggtcctgcctgaccaacatgatcttctatgattgagtgaccctcctgrtggatgaaggaaaagctgttgatgtaatctactagacttcagcaaagcctgtgacactgtttcccacagtattctggagaagctgtcagcccatggcttggacaggtacactctgctgggtaaagaaactcttaaaccagcactmtttgctgggccaaacccagagagtggtggtaaatggagttaaatccagctggcaaccagtcacaagtggtgttccccagggtcaatactggggcctgttctgtttaacatctttgctgatgacctggatggggatattaagtgcaccctcaataagttttcagatgatactaagttgggatagtcggagtagaaagtcacatcagtaggacctgggcaggctggattgctgggctgaggcccaccggatgaggttcag

SEQ ID NO: 81783 - DNA, 600 bp, Chicken  19866894375625_1
gccctgcccagggttggcagggctcattgagagacctttaaactaggtttaaagggagaaggaaatgaaaccaagctcagtagagatgatcttggggcagcatgcaagggttgggggtgagataatagcccatctgaagtgcctctacaccacaccaacacatgtagcatgggcaacaggcagaaagaactagaagccagtgtacagcaggaaaactgtgacatagttgccatcagcaaaacatggtgggattattctcatgactggagtgctgcaatggataaacgcttcagaagataygggcaaggaaggagagattatgggaggtggctctatatgttagggagtgtttcaattttgcggagctcaatgctgggggtgataaggttaagtccttatgggtaaggatcaaggggaaggccaaaaagactgatgtcctggtagagatctctttacagaccacccaatcaggatgaagaracaagtgaagcattctacaggcagcttgcagacatcgcacaattgcttgctcttgtccacataggggacttcagcataccagatgtttgctggaaatgcaatacagcagagaggaaacag

SEQ ID NO: 81784 - DNA, 600 bp, Chicken  19866894375625_2
cagaaagaactagaagccagtgtacagcaggaaaactgtgacatagttgccatcagcaaaacatggtgggattattctcatgactggagtgctgcaatggataaacgcttcagaagataygggcaaggaaggagagattatgggaggtggctctatatgttagggagtgtttcaattttgcggagctcaatgctgggggtgataaggttaagtccttatgggtaaggatcaaggggaaggccaaaaagactgatgtcctggtagagatctctttacagaccacccaatcaggatgaagaracaagtgaagcattctacaggcagcttgcagacatcgcacaattgcttgctcttgtccacataggggacttcagcataccagatgtttgctggaaatgcaatacagcagagaggaaacagtctaggaaattgctggagtgtgtgacaataatttcctgacacagctggcaagagagcctaccacgggttgtgccccactagacctgctgtatataagcagagaagtactgggtggaagacatagtggctggaagttgtcttgggtatagcaaccagaaagtgattgaattcctgattctt

SEQ ID NO: 81785 - DNA, 600 bp, Chicken  19866894375629_1
aagttcaaaagtacatgtttacatcaaagtcattacagctgactcaataatttggcaagatgaaatgtttaaaagaaaataagtggttaaagtaactattgaggctgtagggttttgttatcagtttatgtcataccataaaccataaaatgaccttaaatattgaaggaaaagacatgcataaatgataaaacataggcagccaagagcaccaggattctggataacaatttacagcagcaaatactcttgaactgtttaacttttacatggtttcagaacgggagaaagtctaactcygcagcaaagcagactttaaccctagaaaaaacttttcaaaatcatgaggctcyttcatcatccctcgcctgaggttttttttttcctgttcagttcttttctgtttgagttatgaaaagtttgagggttgcttttcccactccccttcacttgaactttgcaggcgctctcatgggcataaatcttccagttttgcttgaaaatgagttaataggtaaaagtgacaagcgtccttaacagcttcctttctacagggttgtaacactgtgagctagaatacacatgtctacattgcccata

SEQ ID NO: 81786 - DNA, 600 bp, Chicken  19866894375629_2
ggcaagatgaaatgtttaaaagaaaataagtggttaaagtaactattgaggctgtagggttttgttatcagtttatgtcataccataaaccataaaatgaccttaaatattgaaggaaaagacatgcataaatgataaaacataggcagccaagagcaccaggattctggataacaatttacagcagcaaatactcttgaactgtttaacttttacatggtttcagaacgggagaaagtctaactcygcagcaaagcagactttaaccctagaaaaaacttttcaaaatcatgaggctcyttcatcatccctcgcctgaggttttttttttcctgttcagttcttttctgtttgagttatgaaaagtttgagggttgcttttcccactccccttcacttgaactttgcaggcgctctcatgggcataaatcttccagttttgcttgaaaatgagttaataggtaaaagtgacaagcgtccttaacagcttcctttctacagggttgtaacactgtgagctagaatacacatgtctacattgcccatatacacccaccaaagtctgagcatcctgcactcaaggacagcaataaatcctga

SEQ ID NO: 81787 - DNA, 600 bp, Chicken  19866894375629_3
aacatggacagaaaaatgaggaccaattatgcttacattgtcacagaagaggaaaacagcctaacacacacaccgcatatctactgtggattgcaggggtgttgacggcttgatatcccacagccaccacattataaagcagacagagcttggatcgcctaagtccatcatctccgcagcacaaataccttagagccatcttctctgcttggcatcagcagtcaccaagcaggaacaaatggatgcgtgctggcagcagcccttttgcttggcagcttcagcacagggagatcacaaacyrttgcaaagatgtmtatttacccagcttcaaagcattgcacagctctggaggctaaaaagatgagatctattctgtaacagtgtagtcaccttgagggactgcttctgcagctatgggggcagaacttgactctcgtttcagtgaaattcagtgctcatgctgcactggcagcctgtatgataggaccagagatcacaygtgatcctttactattgggaggtagaattaaggtcccctcttaattctgaacacacttccagaagctggggaaagtgaatatagatggcaggttggagagc

SEQ ID NO: 81788 - DNA, 600 bp, Chicken  19866894375629_4
acatggacagaaaaatgaggaccaattatgcttacattgtcacagaagaggaaaacagcctaacacacacaccgcatatctactgtggattgcaggggtgttgacggcttgatatcccacagccaccacattataaagcagacagagcttggatcgcctaagtccatcatctccgcagcacaaataccttagagccatcttctctgcttggcatcagcagtcaccaagcaggaacaaatggatgcgtgctggcagcagcccttttgcttggcagcttcagcacagggagatcacaaacyrttgcaaagatgtmtatttacccagcttcaaagcattgcacagctctggaggctaaaaagatgagatctattctgtaacagtgtagtcaccttgagggactgcttctgcagctatgggggcagaacttgactctcgtttcagtgaaattcagtgctcatgctgcactggcagcctgtatgataggaccagagatcacaygtgatcctttactattgggaggtagaattaaggtcccctcttaattctgaacacacttccagaagctggggaaagtgaatatagatggcaggttggagagct

SEQ ID NO: 81789 - DNA, 600 bp, Chicken  19866894375629_5
aatgaggaccaattatgcttacattgtcacagaagaggaaaacagcctaacacacacaccgcatatctactgtggattgcaggggtgttgacggcttgatatcccacagccaccacattataaagcagacagagcttggatcgcctaagtccatcatctccgcagcacaaataccttagagccatcttctctgcttggcatcagcagtcaccaagcaggaacaaatggatgcgtgctggcagcagcccttttgcttggcagcttcagcacagggagatcacaaacyrttgcaaagatgtmtatttacccagcttcaaagcattgcacagctctggaggctaaaaagatgagatctattctgtaacagtgtagtcaccttgagggactgcttctgcagctatgggggcagaacttgactctcgtttcagtgaaattcagtgctcatgctgcactggcagcctgtatgataggaccagagatcacaygtgatcctttactattgggaggtagaattaaggtcccctcttaattctgaacacacttccagaagctggggaaagtgaatatagatggcaggttggagagctggcagaacaatcc

SEQ ID NO: 81790 - DNA, 600 bp, Chicken  19866894375629_6
cttctctgcttggcatcagcagtcaccaagcaggaacaaatggatgcgtgctggcagcagcccttttgcttggcagcttcagcacagggagatcacaaacyrttgcaaagatgtmtatttacccagcttcaaagcattgcacagctctggaggctaaaaagatgagatctattctgtaacagtgtagtcaccttgagggactgcttctgcagctatgggggcagaacttgactctcgtttcagtgaaattcagtgctcatgctgcactggcagcctgtatgataggaccagagatcacaygtgatcctttactattgggaggtagaattaaggtcccctcttaattctgaacacacttccagaagctggggaaagtgaatatagatggcaggttggagagctggcagaacaatccattgtttcactaagcagcaacacaggtgccacaagaatggagttctatgcagtaagaacatctgtttcaccaaaaatccagctaaagtgacaygagaaaagtttctctgttccagatttaacatggacttatgactatgtacagcctaaccttttcctgcatcccaccctccaaggcatatccct

SEQ ID NO: 81791 - DNA, 446 bp, Chicken  19866894375629_7
gcagctatgggggcagaacttgactctcgtttcagtgaaattcagtgctcatgctgcactggcagcctgtatgataggaccagagatcacaygtgatcctttactattgggaggtagaattaaggtcccctcttaattctgaacacacttccagaagctggggaaagtgaatatagatggcaggttggagagctggcagaacaatccattgtttcactaagcagcaacacaggtgccacaagaatggagttctatgcagtaagaacatctgtttcaccaaaaatccagctaaagtgacaygagaaaagtttctctgttccagatttaacatggacttatgactatgtacagcctaaccttttcctgcatcccaccctccaaggcatatccctccacagtcccttcccatctctccataggattttacacttccacaagccaaagaa

SEQ ID NO: 81792 - DNA, 600 bp, Chicken  19866894375636_1
tacctgccccaaaaaaacaaattttgagcagatgttgggaaagtgagacaagaatactttcttgtttataaccattcaaaaaataaatgcaccatttctttttgcttaggaaataggaacaggacacatccaaaaaggcaaacattaatatcggagccaactgcagtacttactcaagttgcaaagcttgatttctggactgatggcagtcagtatttaagcgctggcaggaaaaaggagcttcaagaaagaactgaggagggtgaagagatgaagatggacagtctgtataaagtgagytctaagcagcgcagggtgaaaaacaacagcgaaagagcaaagcaaataaaaaataaaatgggaaaaaatatccagatggccacccatctccatgtttatcagacacaagtttaattatcagtgtaatttagaatcactggaggttatcatgtcaatataattcagcagttgcaaacattgtttgaaagacagtcattggaggatccagaaaaggtcgtcattttttttttttccccatgttatttcattgtctgaatgttcattcacactgaaaaatgttattacttacagcaaaataaa

SEQ ID NO: 81793 - DNA, 600 bp, Chicken  19866894375648_1
taacagcaagatcacagagaccagagtatctcccagagatgactataatttgttacgtgggttaataatagaaaagacatgaagttatgaagagcttaattttcttcccgcttgaactgctgtcactccatgtatgcctgacaggacaagaggtaaccgtcttaaattgcaccaaggaaggttcaggttggatattaggaaaatttcttaaaaagagtagtaatgcactggcacagctgcccagggaggtgatggtgtcattgtccttggaggtgttcaagaaccatagatatgtggcasggagggacactgttagtaggcatggtgggacgggttgatggttggacttgatgtttttagtggtcttttccagccttcataattctatgattctatgattctattcagcagagcacttacaagcttaatttaaacatgagcagaagtcccaccaacgtatcgcctcttccgcaaagagaagccctgaggctgcctgggaagccagacagggctcactgagagtctgcaggtgcctgcacgacgtttgccaaagggtgttgggctgaaggaggtgtttcagagctggatcccaagcagagc

SEQ ID NO: 81794 - DNA, 600 bp, Chicken  19866894375649_1
caatcagaagaaacctctactcagtcaccatgattgcaaggagtttatggccacatatttaatcttcctgctctgtaatagataagttatgctttcttgtgatttgtgcacaaagagttttctcaatcttttcctgcactataaagaacagaagtaccatttctgccttgctaagcgaagcattaataggaatgtcagcagcaagatggaacatgtaataaatactaaggtttaacattttaaagatttatgctacagagaatatagttctagattatgagataagattattatctttcrttacataaaatgatgaggaaatggtttgatgacaggaatttctttttacagcattatattcagggagacctgagctcaacagaaaaataagaagtatagaatagcattagacagttgtcttaacaacgacaaactaaacagggaaccacaaataacagaagctgctaacacacatcggttcatcatttacagagaggagtattaacaaataatttttcagtgcataaagaaacaagcttgattccgaggtcaactagcaaacaggaaagcttctctaagggagaagaaacagcagttgtt

SEQ ID NO: 81795 - DNA, 599 bp, Chicken  19866894375654_1
  misc_feature (1)..(119): n is any nucleotide
nnnnnnnnnnnnnnnnnnnnnnnnnnnnnnnnnnnnnnnnnnnnnnnnnnnnnnnnnnnnnnnnnnnnnnnnnnnnnnnnnnnnnnnnnnnnnnnnnnnnnnnnnnnnnnnnnnnnnnnaattactcccccgggtgctctttatttattttcatgttaaatcttattctcgatggatccccaatacatttatcaaaatcttatcaaaaaccatctggtttccagcagccacctgaaaggcacacattttccacacggccccatcagcattcgcagcacagcgcccgaacagcagcaccakcagcagagccagcgccatctgcggggccagctcacggcccgggcctgggcacaacgcgtggccaccagctcctgcgaaccaggagcaatgaggagcgctgtgttagggacacgcagtgcctaggatgcggtgagtggaagaagaaaaacacgagggcatgtacgaagcaggcttccaagttcggtcccctctgctttaaattgcctgagcacgctccaacagcgcttaatattagcgctcgtaatatattcggcttctcgccctctttaaatatccatgccataggcaatgcttatatg

SEQ ID NO: 81796 - DNA, 600 bp, Chicken  19866894375654_2
ggagcaatgaggagcgctgtgttagggacacgcagtgcctaggatgcggtgagtggaagaagaaaaacacgagggcatgtacgaagcaggcttccaagttcggtcccctctgctttaaattgcctgagcacgctccaacagcgcttaatattagcgctcgtaatatattcggcttctcgccctctttaaatatccatgccataggcaatgcttatatgaaataattcgtaactgcagcctgcacttttctcaagcatcttttttgttctccctaggccgcctcctcccctccatactgcrcagcagctacacggatgcaatttatatattcctctgtggatttttatctctgatgtatatactgaaatcgcttgccaataatgtttgtaataaaataccagattgcaaagtgtaccgacacgcgtgtcaatatcacaataaattattaatagttaatcacgtgaagttaattccgtaaaagatttctaatgcacaaggatcttaagctgtcccttattgacaattaccctgtctccttactgatttacatactctcacaacatacatgcatgctacttctacagcatactatcttcagac

SEQ ID NO: 81797 - DNA, 599 bp, Chicken  19866894375664_1
  misc_feature (1)..(194): n is any nucleotide
nnnnnnnnnnnnnnnnnnnnnnnnnnnnnnnnnnnnnnnnnnnnnnnnnnnnnnnnnnnnnnnnnnnnnnnnnnnnnnnnnnnnnnnnnnnnnnnnnnnnnnnnnnnnnnnnnnnnnnnnnnnnnnnnnnnnnnnnnnnnnnnnnnnnnnnnnnnnnnnnnnnnnnnnnnnnnnnnnnnnnnnnnnnnnnnnnnccccagagccatcgtagagcagccccagagcagccccatcattgtccacaggcccggtggcagcagcagttccaccacaagcagtgcgttgggtaaaggcagctcycaggtgtggctctgctccaaagctgccccaaagtgctcctgaagccctcccataggcgtcttttaactgtcccacaaccctgtgaggcttccccacatcccagcacatccacccaagtacctgtggggtgtgcgagaaacgctcwcatccctgatgttccaccaggcacagctctcagtgcagcagcaaagctcattcctgattgctgtggcattactgcactatgctctgtgagctccttctgctcctgtagctctcctcccatggcacccactgctctcctgttcccccttggctgg

SEQ ID NO: 81798 - DNA, 581 bp, Chicken  19866894375664_2
  misc_feature (1)..(49): n is any nucleotide
nnnnnnnnnnnnnnnnnnnnnnnnnnnnnnnnnnnnnnnnnnnnnnnnnccccagagccatcgtagagcagccccagagcagccccatcattgtccacaggcccggtggcagcagcagttccaccacaagcagtgcgttgggtaaaggcagctcycaggtgtggctctgctccaaagctgccccaaagtgctcctgaagccctcccataggcgtcttttaactgtcccacaaccctgtgaggcttccccacatcccagcacatccacccaagtacctgtggggtgtgcgagaaacgctcwcatccctgatgttccaccaggcacagctctcagtgcagcagcaaagctcattcctgattgctgtggcattactgcactatgctctgtgagctccttctgctcctgtagctctcctcccatggcacccactgctctcctgttcccccttggctgggcactgcaggctcacagtctccaccacgcatccgctgtgcagtttttccaggtgtcgtctatggccaacgcgttcctttcgggctgattgtgtgcttttctatgcagacaggcaggcaggatttcgt

SEQ ID NO: 81799 - DNA, 498 bp, Chicken  19866894375667_1
cctcactgagacagggattacagatgtttccaattctaacccaggctccgtatttgcattggatgcatttctcaaacgtctttttctcatgtgtgaaccacgagaaatacaccaatattttggaaatccctcttcttagctagtctctgttctactgcttgcatcctagattatggcatgtcaggtatgctctcccaactgccaagaagcataattttaaggcgcataagatgctttccatggctctagacagataaagcatgtacaggcaaggaactacgtgtgcacagcagttcagargatacctaatgtccattagagtaagttagggaacagcctgactaaaacaaaatcaagaaggctaggaattgtaggaagaaactctcatgccttagtaatggtacaatgctagacataatctgctctttactgcttttataaaaaagtcagtagtaagatgtaatcattaatcagaagtctccacttgctatttgggcc

SEQ ID NO: 81800 - DNA, 599 bp, Chicken  19866894375691_1
  misc_feature (1)..(56): n is any nucleotide
nnnnnnnnnnnnnnnnnnnnnnnnnnnnnnnnnnnnnnnnnnnnnnnnnnnnnnnntttctcgtgtgtgttgtagggttatgccttgtctgcttatttgtacctacactgtgatgacaaaacaagtatggccactatgtaataaggatattcactttggaaagtgggccgtgtgctattaatggagggcaagggaaactctttcaaatgctaatcaccaaactctagatgtttctagatgaaagttctgacttccagacatcgactcgtatgtcacatcttactagttattgttgtaccmtgtgctttttctcttactctccaagtgatcatgtgttagacatgttaggcatagttgacttggagtagttcccttggtgtataatgatctggggttttgctctttaagggagtaggagaactagactttaacatgcaaagatgtttcgaaacaggaaatccttcttttacttaccactgcacacctgatcctaaaggaacagcgtactctttgttcctgttcacttaggctgtctggtttctctatttgtaggggatctccgagcctgtacttactgccgcaaaatagccttaagctat

SEQ ID NO: 81801 - DNA, 600 bp, Chicken  19866894375693_1
cctgcaaaaccctgtgcgtgatccctctgagcccacatagacaccataaggactgctggttgaagaaatcccagggacagccacggcttgataagataatccaggagagagggaggcaagcgggtgtcagacaaagggcagcacgcgatgcatcatgcggcacagcgcgagctgcatggagctgtggccagctgctgagggcaagccacagacaaaagatgaattgaacctaaataatagcccttggggaggagcagaatcaccacgccttgaagagcaacacattgagtctgtcaaccycttgacaaacaccaaatgccagtgattcccaaacgtacaagaggcgagcagtactggctaaccttctggaggataagaagggatttaaagagctcagcttgaaaagtaaatcctcaaaaagagttggtatccaaggtgtatgctggatacctgagtactgacctgacagcagcagagctgagagctgaacaaagcttatttgacaatctgacatggtcccatcaggtctggatttactgagatatggtgaagtatttgcagaaggccatataacwgcctctccctacctacagccctgtg

SEQ ID NO: 81802 - DNA, 509 bp, Chicken  19866894375693_2
agcaacacattgagtctgtcaaccycttgacaaacaccaaatgccagtgattcccaaacgtacaagaggcgagcagtactggctaaccttctggaggataagaagggatttaaagagctcagcttgaaaagtaaatcctcaaaaagagttggtatccaaggtgtatgctggatacctgagtactgacctgacagcagcagagctgagagctgaacaaagcttatttgacaatctgacatggtcccatcaggtctggatttactgagatatggtgaagtatttgcagaaggccatataacwgcctctccctacctacagccctgtgtttaaaattcagtaactcatagactgaaaggttaggaatagctttttactaacgctgaggtatgatttcacagtaccaatggggctggcactttgtttcaaggaattacacagcacagactccatcaccgtgatttagcttccaaatggcttaagagcagacctagaccatgggcatgggcaaa

SEQ ID NO: 81803 - DNA, 600 bp, Chicken  19866894375713_1
ctatttgtcatttcatttccatttatttcctgcattccgctgctatacaggatgctcagttcttgcctactcatttctccattcactaaacatctacagggcacctttaggactgatgctgatggcatgtgagacatccattccaattcttgaaagattaaaacaaaaaaatggcaattatttacaaaccaaatttcttccaaagttttccatgagtgttacgtgggacctcttaaagagacaacacagaactacagctatacaaagggaaacaaacaaacgtgaaaaccagtagaaacrcatcctgaaaggacttctctacacagcagccaaacaacttgcacattcctcagggaaaaataaaaacaaacaaaacagagaaacaaaacaaagaaaccccaaataagaaaaacaaccaacaagacaaagaccatctgttacttataaagtgcttcgcatggacaaggagagcaattttccttgtgcttttcctatgggctcaagaarcatattgtagactaacgggtaatgaatcttcacaaaaataagttcactttaagcaaagaaattcctaacagttatattttagcagttttctgc

SEQ ID NO: 81804 - DNA, 600 bp, Chicken  19866894375713_2
ttccatgagtgttacgtgggacctcttaaagagacaacacagaactacagctatacaaagggaaacaaacaaacgtgaaaaccagtagaaacrcatcctgaaaggacttctctacacagcagccaaacaacttgcacattcctcagggaaaaataaaaacaaacaaaacagagaaacaaaacaaagaaaccccaaataagaaaaacaaccaacaagacaaagaccatctgttacttataaagtgcttcgcatggacaaggagagcaattttccttgtgcttttcctatgggctcaagaarcatattgtagactaacgggtaatgaatcttcacaaaaataagttcactttaagcaaagaaattcctaacagttatattttagcagttttctgctagcatgacctcgtggaaggaaattagggcttttaacaagctctatgaaacaaatgactcttgaactacctgtacacagtcgctcagataatagcttctttcaagagaatatctatttccagtatgccctacgcttacgaaccaggcactgcctacacaagggctgacacaacgcacggggcggctttgccctcctggagctcacac

SEQ ID NO: 81805 - DNA, 600 bp, Chicken  19866894375730_1
tcatggcttaagaaatcaagatactactgagttttagaagactgagttgttttaggagtgcttaacttattaccagcgtatctctgtcttccaagttaactgtacacagtgtaatacagttagtacaagctcattttaaagaagttaagagctgctatatgctgttattataacacgctcagtaaagacaagagccttaagttttctacattaaatcatccttgattgttaggccaaaattattcacagcacaaactaaaagacacgtgcatgtgatcagaagttcatcctgcttgcaartatactgatagacagtgtaactacactgtactaagactgatactgttatttgccatgttcagacttaatagtatattttgcttgtaaactctgttgtatcgggatttagtttttataatttttgtatgcttagtgtgaactcagttattaagcttgctacagaatgtttctgaaatattgttacctgttagaacagaataatggatctcatgcttaaatgcacccaaacaaaataaaggcacttacattgccagtgctcatatcagcttttgactccccacctgagggaagaaatatgaa

SEQ ID NO: 81806 - DNA, 600 bp, Chicken  19866894375737_1
tgtttatttaatcaatgcccacagtattcttcaaatactgaacatgaaacagttctgggaataccagctctaaaaggtcaaaaactgacagataacatatttattaagtgatcacaacaggaaagggctttaaaatatccatttctcagtatgactcacagtgtgttctattacttccttacaatgtgtaacatttcacaaatacagagtattaataagcttctgaaaatttagattcttttcaccaaaaagatcaaaatagaaagaacatacagctgtaaggagggcagaggaacactyagtgaaacaacgcaagtataccatgcagaggtatctggataagaataacagtaaaagaagaaacacaaaaccagccttatgttttacttcagtgttcttgaagtacagtgactcattacactgtaaatctatgaaagtataattgtgcataaaactgtgataatggatattgactaaatacagagaayaccaagaaaagccttgcactttgcagagattcagacataactgaaagacaaaaggcaaaacatgatgatatttgaaatttttacaaaagccaatgaaaatcaatggraaata

SEQ ID NO: 81807 - DNA, 600 bp, Chicken  19866894375737_2
taacatttcacaaatacagagtattaataagcttctgaaaatttagattcttttcaccaaaaagatcaaaatagaaagaacatacagctgtaaggagggcagaggaacactyagtgaaacaacgcaagtataccatgcagaggtatctggataagaataacagtaaaagaagaaacacaaaaccagccttatgttttacttcagtgttcttgaagtacagtgactcattacactgtaaatctatgaaagtataattgtgcataaaactgtgataatggatattgactaaatacagagaayaccaagaaaagccttgcactttgcagagattcagacataactgaaagacaaaaggcaaaacatgatgatatttgaaatttttacaaaagccaatgaaaatcaatggraaataatcaaaagtttaactaaaaatgagcaagcctcagatgtacacaagaggatcacttctcagtctgctaggaagcactatgagattgtatcttatccagaagttgcagtctaagataatagactcaagaataaactaagcatttatgttttatatacacacacatacatattgacaactatatcaacagc

SEQ ID NO: 81808 - DNA, 600 bp, Chicken  19866894375737_3
cactyagtgaaacaacgcaagtataccatgcagaggtatctggataagaataacagtaaaagaagaaacacaaaaccagccttatgttttacttcagtgttcttgaagtacagtgactcattacactgtaaatctatgaaagtataattgtgcataaaactgtgataatggatattgactaaatacagagaayaccaagaaaagccttgcactttgcagagattcagacataactgaaagacaaaaggcaaaacatgatgatatttgaaatttttacaaaagccaatgaaaatcaatggraaataatcaaaagtttaactaaaaatgagcaagcctcagatgtacacaagaggatcacttctcagtctgctaggaagcactatgagattgtatcttatccagaagttgcagtctaagataatagactcaagaataaactaagcatttatgttttatatacacacacatacatattgacaactatatcaacagcaccacgtattgtgtgcaagaacagattgcaaacttgaggttgtgatgataaatccttacaaaaataatccagttacacaaagaagtcaatccaaatttatcttattg

SEQ ID NO: 81809 - DNA, 599 bp, Chicken  19866894375738_1
  misc_feature (1)..(32): n is any nucleotide
nnnnnnnnnnnnnnnnnnnnnnnnnnnnnnnnttgcataggagtaatgagcacatgaacgatgtggctgcaaggccatttaggattacttaagccacgctgctgttgtaattcagcagatgctttaagccagctcctgaggcactgcagctactacaaggagccgtcctgccctgcttttgtctgcaactgctcgttctcacgagtgtcactgcatggtcctacaggtgcttgtgctggcacaggcaacagagcagctggagagaacaaacaacagctgtaggtgggagagggaagaacracttctgatggtgatagtgctgacacaggctagtttagagtatttgtcaaacaacagcctaaattactctatcaggtaggaggcagaaggttgtaccgagataatgatagtgctactattctgaagcagcagctgttgctcatgatttgcagaactcrgaaccatacacattgtgtattctgtgcttgccacggttttagagtccagaagtttttaactacttaaaaagggtgctgggggaggaagaggagtagcacttcaggtctgctttgcttccagacagttaggtaattccattt

SEQ ID NO: 81810 - DNA, 480 bp, Chicken  19866894375738_2
ggagccgtcctgccctgcttttgtctgcaactgctcgttctcacgagtgtcactgcatggtcctacaggtgcttgtgctggcacaggcaacagagcagctggagagaacaaacaacagctgtaggtgggagagggaagaacracttctgatggtgatagtgctgacacaggctagtttagagtatttgtcaaacaacagcctaaattactctatcaggtaggaggcagaaggttgtaccgagataatgatagtgctactattctgaagcagcagctgttgctcatgatttgcagaactcrgaaccatacacattgtgtattctgtgcttgccacggttttagagtccagaagtttttaactacttaaaaagggtgctgggggaggaagaggagtagcacttcaggtctgctttgcttccagacagttaggtaattccatttacaattactgggaaaaaagatactgcttttaagtgctta

SEQ ID NO: 81811 - DNA, 599 bp, Chicken  19866894375741_1
  misc_feature (1)..(172): n is any nucleotide
nnnnnnnnnnnnnnnnnnnnnnnnnnnnnnnnnnnnnnnnnnnnnnnnnnnnnnnnnnnnnnnnnnnnnnnnnnnnnnnnnnnnnnnnnnnnnnnnnnnnnnnnnnnnnnnnnnnnnnnnnnnnnnnnnnnnnnnnnnnnnnnnnnnnnnnnnnnnnnnnnnnnnnnnnnnntccttgtcctcttcatctgactcatttttgtcttcaccccaatcaagagtaagaggctcatcatcaaattttactgctggttgactccagtcaaattgtgctgaagattcagcagtatcctccaaagmaaaggaagctgaaattggctttgaccagtctatatcaccacttccagctttggaatctgaaacaccagcctgcattggaggactagatgcatctttctctgtagctacagcagatttttttcttacttttgggattttggaaagaacttcaagagctagcacgggacaacccactttaaagtgagcatttgcagtagtgaagaataattttctttcwataagattaattttatcaacaaaacttttctcagtttttagacctaaggtggccaaagtcccttctggtgagctgaagtatc

SEQ ID NO: 81812 - DNA, 600 bp, Chicken  19866894375741_2
agagtaagaggctcatcatcaaattttactgctggttgactccagtcaaattgtgctgaagattcagcagtatcctccaaagmaaaggaagctgaaattggctttgaccagtctatatcaccacttccagctttggaatctgaaacaccagcctgcattggaggactagatgcatctttctctgtagctacagcagatttttttcttacttttgggattttggaaagaacttcaagagctagcacgggacaacccactttaaagtgagcatttgcagtagtgaagaataattttctttcwataagattaattttatcaacaaaacttttctcagtttttagacctaaggtggccaaagtcccttctggtgagctgaagtatcttcggatcagcagaggatgggtccgaagataattgtaaaaactgaataccacaggattgcatgacttgacaataactagggaattaagcagataagacatttattaaccatggatttcatgttactgtgatttgcattatttcctgcattacaaagattgctcaaagtacaaaaacaaagatagtatagttgccaaaacaaagcaaaagaactactta

SEQ ID NO: 81813 - DNA, 599 bp, Chicken  19866894375747_1
  misc_feature (1)..(204): n is any nucleotide
nnnnnnnnnnnnnnnnnnnnnnnnnnnnnnnnnnnnnnnnnnnnnnnnnnnnnnnnnnnnnnnnnnnnnnnnnnnnnnnnnnnnnnnnnnnnnnnnnnnnnnnnnnnnnnnnnnnnnnnnnnnnnnnnnnnnnnnnnnnnnnnnnnnnnnnnnnnnnnnnnnnnnnnnnnnnnnnnnnnnnnnnnnnnnnnnnnnnnnnnnnnngggtccgtctcaggactgctgctgttcacatcttcatcaacaacacagatgatggcattgagtgcaccctcatcagtttgctgatggcactgagcygagtgctgcagtggatacaacagaaggaagggacgccatccagagggacctgggcgggctcacagartgggaccacgtgaatctcatgagattcaacaaggccatgtgaggatactgcacttgggtcagagcaatcctgggtatgagtaaagacgtgagaagatctcmctgagagcagtgctgtggaggagttggtggttctggtggatgaaaagccgcacacgaggcagcagtgtccatttggggtctggaaagccaacggcatcctgggctgcaccaacagaggggtggcagcgggc

SEQ ID NO: 81814 - DNA, 599 bp, Chicken  19866894375747_2
  misc_feature (1)..(137): n is any nucleotide
nnnnnnnnnnnnnnnnnnnnnnnnnnnnnnnnnnnnnnnnnnnnnnnnnnnnnnnnnnnnnnnnnnnnnnnnnnnnnnnnnnnnnnnnnnnnnnnnnnnnnnnnnnnnnnnnnnnnnnnnnnnnnnnnnnnnnnnnngggtccgtctcaggactgctgctgttcacatcttcatcaacaacacagatgatggcattgagtgcaccctcatcagtttgctgatggcactgagcygagtgctgcagtggatacaacagaaggaagggacgccatccagagggacctgggcgggctcacagartgggaccacgtgaatctcatgagattcaacaaggccatgtgaggatactgcacttgggtcagagcaatcctgggtatgagtaaagacgtgagaagatctcmctgagagcagtgctgtggaggagttggtggttctggtggatgaaaagccgcacacgaggcagcagtgtccatttggggtctggaaagccaacggcatcctgggctgcaccaacagaggggtggcagcgggcagggagggggactgtcccctctgctctgccctcgtgaggccccacctgcaggactgcgtccaggcct

SEQ ID NO: 81815 - DNA, 599 bp, Chicken  19866894375747_3
  misc_feature (1)..(36): n is any nucleotide
nnnnnnnnnnnnnnnnnnnnnnnnnnnnnnnnnnnngggtccgtctcaggactgctgctgttcacatcttcatcaacaacacagatgatggcattgagtgcaccctcatcagtttgctgatggcactgagcygagtgctgcagtggatacaacagaaggaagggacgccatccagagggacctgggcgggctcacagartgggaccacgtgaatctcatgagattcaacaaggccatgtgaggatactgcacttgggtcagagcaatcctgggtatgagtaaagacgtgagaagatctcmctgagagcagtgctgtggaggagttggtggttctggtggatgaaaagccgcacacgaggcagcagtgtccatttggggtctggaaagccaacggcatcctgggctgcaccaacagaggggtggcagcgggcagggagggggactgtcccctctgctctgccctcgtgaggccccacctgcaggactgcgtccaggcctggggcccccagcacaggaagggtgcggagctgctggagcggggccagaggagggcacggagatgctcccagggctgcacacctctgctatggagacgggct

SEQ ID NO: 81816 - DNA, 599 bp, Chicken  19866894375749_1
  misc_feature (1)..(180): n is any nucleotide
nnnnnnnnnnnnnnnnnnnnnnnnnnnnnnnnnnnnnnnnnnnnnnnnnnnnnnnnnnnnnnnnnnnnnnnnnnnnnnnnnnnnnnnnnnnnnnnnnnnnnnnnnnnnnnnnnnnnnnnnnnnnnnnnnnnnnnnnnnnnnnnnnnnnnnnnnnnnnnnnnnnnnnnnnnnnnnnnnnnnaaccttggtgtaattgcagtttcatgctctcctattaggtggcaatcttgaacttcctcctcgagcagtatgttacacactggtgtgaagtctgtggaggagctgctgcggatctcccaragcccacaggaatagcactgcgagcagaaggtctgtacagcgtggggctctgggtgtgtggagaggtcgagattgtatactgtgtactgactgggagagctctttgagaacagtgctgtggagaaggacttggtggttctggtggatgaaaagscgcacacgaggcagcagtgtccatttggggtctggaaagccaacggcatcctgggctgcaccaacagaggggtggcagcgggcagggaggggactgtcccctctgctctgccctcgtgaggccccacctgcaggactgygtccag

SEQ ID NO: 81817 - DNA, 599 bp, Chicken  19866894375749_2
  misc_feature (1)..(26): n is any nucleotide
nnnnnnnnnnnnnnnnnnnnnnnnnnaaccttggtgtaattgcagtttcatgctctcctattaggtggcaatcttgaacttcctcctcgagcagtatgttacacactggtgtgaagtctgtggaggagctgctgcggatctcccaragcccacaggaatagcactgcgagcagaaggtctgtacagcgtggggctctgggtgtgtggagaggtcgagattgtatactgtgtactgactgggagagctctttgagaacagtgctgtggagaaggacttggtggttctggtggatgaaaagscgcacacgaggcagcagtgtccatttggggtctggaaagccaacggcatcctgggctgcaccaacagaggggtggcagcgggcagggaggggactgtcccctctgctctgccctcgtgaggccccacctgcaggactgygtccaggcctggggcccccagcacaggaagggtgcggagctgctggagcggggccagaggagggcacggagatgctcccagggctgcacacctctgctayggagacgggctgaggagctgggggtgttcagcctggagaagagaaggctgtggggagacc

SEQ ID NO: 81818 - DNA, 600 bp, Chicken  19866894375749_3
ctcccaragcccacaggaatagcactgcgagcagaaggtctgtacagcgtggggctctgggtgtgtggagaggtcgagattgtatactgtgtactgactgggagagctctttgagaacagtgctgtggagaaggacttggtggttctggtggatgaaaagscgcacacgaggcagcagtgtccatttggggtctggaaagccaacggcatcctgggctgcaccaacagaggggtggcagcgggcagggaggggactgtcccctctgctctgccctcgtgaggccccacctgcaggactgygtccaggcctggggcccccagcacaggaagggtgcggagctgctggagcggggccagaggagggcacggagatgctcccagggctgcacacctctgctayggagacgggctgaggagctgggggtgttcagcctggagaagagaaggctgtggggagacctcattgcggccttctggtatttatarggagattataagcaggagagaaataagctttttacagtaggtaatgttgggacaggagggaatagagggaggatttagatgtcaggggaagtttttccctgggagggcagtgag

SEQ ID NO: 81819 - DNA, 575 bp, Chicken  19866894375749_4
ggagagctctttgagaacagtgctgtggagaaggacttggtggttctggtggatgaaaagscgcacacgaggcagcagtgtccatttggggtctggaaagccaacggcatcctgggctgcaccaacagaggggtggcagcgggcagggaggggactgtcccctctgctctgccctcgtgaggccccacctgcaggactgygtccaggcctggggcccccagcacaggaagggtgcggagctgctggagcggggccagaggagggcacggagatgctcccagggctgcacacctctgctayggagacgggctgaggagctgggggtgttcagcctggagaagagaaggctgtggggagacctcattgcggccttctggtatttatarggagattataagcaggagagaaataagctttttacagtaggtaatgttgggacaggagggaatagagggaggatttagatgtcaggggaagtttttccctgggagggcagtgaggccctggcacaggctgccctgagcggctctagatggttcagcctgggaagtgctcaaggccaggttggatgagca

SEQ ID NO: 81820 - DNA, 489 bp, Chicken  19866894375749_5
tggggtctggaaagccaacggcatcctgggctgcaccaacagaggggtggcagcgggcagggaggggactgtcccctctgctctgccctcgtgaggccccacctgcaggactgygtccaggcctggggcccccagcacaggaagggtgcggagctgctggagcggggccagaggagggcacggagatgctcccagggctgcacacctctgctayggagacgggctgaggagctgggggtgttcagcctggagaagagaaggctgtggggagacctcattgcggccttctggtatttatarggagattataagcaggagagaaataagctttttacagtaggtaatgttgggacaggagggaatagagggaggatttagatgtcaggggaagtttttccctgggagggcagtgaggccctggcacaggctgccctgagcggctctagatggttcagcctgggaagtgctcaaggccaggttggatgagca

SEQ ID NO: 81821 - DNA, 600 bp, Chicken  19866894375753_1
agaaaagcatggaagtgatccaggactgaggaataatttggtttattactttaagaaaatttgaaattagaaaacaaaacaaaacaaaaaaaaccccacaaattcagtactcaaatcaaatgaggagctcttttgcctggtgttgcctctgcattttgatttgtgagtgcatcaacagtgataatattaacttttcagtgtgttcatcatagcaatgaaccttttgagtgtttgatactctttaggataatgacgctaggtaacatggtattatttaatcaatatgaaaattgaagtttygttttcaagtgtaagagggcagaataattgctctgaataactgcacataatattatttaatcttgtaatgtgaagttcaatggacctgagattagatttccagctgtgttttgatttaagatcacttgcaggacactccattcttcctcactcttctttttggttcagctttttcctcttcagacaaagcagagtattggaataaagaataaagaatatagtattttggttgcaaagcagaatatttacctgtgttttgagaggaaaaggatttattttatacttgtgaaaagatagaac

SEQ ID NO: 81822 - DNA, 599 bp, Chicken  19866894375754_1
  misc_feature (1)..(51): n is any nucleotide
nnnnnnnnnnnnnnnnnnnnnnnnnnnnnnnnnnnnnnnnnnnnnnnnnnnccgtttgctctttcctgttttctgtttccaggttcctttgctattgctggttaaacactcgagctctcaacggagctccctgatcagacgcggggtctcctttgctgcagcactttccctgagcgagattcagctccaggctggcacaagcctttgagcagctgcctcacttctctccttcaagattatttccagaccgcctattttagctgttcagctccaaccatgcagctcctgcagaaatgggcractggggggtaggaggggggggcacaaaggcagatccagtttgctggygccagcctaaccatgtccatggggacacaaccctgctgggatggtcccttctctccctgcacagcccatgtcctgcagcccccactgctgwgcaagctgccagcatcccaagcagcactgcgttctgaacatcttggatccttccgctcagagcagcttttgcgtttgtgcaaaggaagcaatgtaaccagatttgtgtccctatccatcatcctaattaatcactgtagtctaaaatgcattcttactct

SEQ ID NO: 81823 - DNA, 599 bp, Chicken  19866894375754_2
  misc_feature (1)..(3): n is any nucleotide
nnnccgtttgctctttcctgttttctgtttccaggttcctttgctattgctggttaaacactcgagctctcaacggagctccctgatcagacgcggggtctcctttgctgcagcactttccctgagcgagattcagctccaggctggcacaagcctttgagcagctgcctcacttctctccttcaagattatttccagaccgcctattttagctgttcagctccaaccatgcagctcctgcagaaatgggcractggggggtaggaggggggggcacaaaggcagatccagtttgctggygccagcctaaccatgtccatggggacacaaccctgctgggatggtcccttctctccctgcacagcccatgtcctgcagcccccactgctgwgcaagctgccagcatcccaagcagcactgcgttctgaacatcttggatccttccgctcagagcagcttttgcgtttgtgcaaaggaagcaatgtaaccagatttgtgtccctatccatcatcctaattaatcactgtagtctaaaatgcattcttactctttgatgcttttacatacttaggagccrgggtgayctgctttgggtagg

SEQ ID NO: 81824 - DNA, 600 bp, Chicken  19866894375754_3
cgcggggtctcctttgctgcagcactttccctgagcgagattcagctccaggctggcacaagcctttgagcagctgcctcacttctctccttcaagattatttccagaccgcctattttagctgttcagctccaaccatgcagctcctgcagaaatgggcractggggggtaggaggggggggcacaaaggcagatccagtttgctggygccagcctaaccatgtccatggggacacaaccctgctgggatggtcccttctctccctgcacagcccatgtcctgcagcccccactgctgwgcaagctgccagcatcccaagcagcactgcgttctgaacatcttggatccttccgctcagagcagcttttgcgtttgtgcaaaggaagcaatgtaaccagatttgtgtccctatccatcatcctaattaatcactgtagtctaaaatgcattcttactctttgatgcttttacatacttaggagccrgggtgayctgctttgggtagggtttctataagctcctcagcttaacgttggtgagtgcaccgccccaaggctgggagtataagcatgcacttatcccaccaaagctggtggga

SEQ ID NO: 81825 - DNA, 600 bp, Chicken  19866894375754_4
aaggcagatccagtttgctggygccagcctaaccatgtccatggggacacaaccctgctgggatggtcccttctctccctgcacagcccatgtcctgcagcccccactgctgwgcaagctgccagcatcccaagcagcactgcgttctgaacatcttggatccttccgctcagagcagcttttgcgtttgtgcaaaggaagcaatgtaaccagatttgtgtccctatccatcatcctaattaatcactgtagtctaaaatgcattcttactctttgatgcttttacatacttaggagccrgggtgayctgctttgggtagggtttctataagctcctcagcttaacgttggtgagtgcaccgccccaaggctgggagtataagcatgcacttatcccaccaaagctggtgggagagcaccccataagaaccttttttgttgtgcgcctctaacccttgacttaggaacacttcccccattaatgctttatctctgcatttatgaagcttaagataactcagagctcttctggtgcaatgccaaattccagcataaaatatcgaaatgtcttgtatggcgcaaagctttatctgcaggctg

SEQ ID NO: 81826 - DNA, 600 bp, Chicken  19866894375754_5
atccagtttgctggygccagcctaaccatgtccatggggacacaaccctgctgggatggtcccttctctccctgcacagcccatgtcctgcagcccccactgctgwgcaagctgccagcatcccaagcagcactgcgttctgaacatcttggatccttccgctcagagcagcttttgcgtttgtgcaaaggaagcaatgtaaccagatttgtgtccctatccatcatcctaattaatcactgtagtctaaaatgcattcttactctttgatgcttttacatacttaggagccrgggtgayctgctttgggtagggtttctataagctcctcagcttaacgttggtgagtgcaccgccccaaggctgggagtataagcatgcacttatcccaccaaagctggtgggagagcaccccataagaaccttttttgttgtgcgcctctaacccttgacttaggaacacttcccccattaatgctttatctctgcatttatgaagcttaagataactcagagctcttctggtgcaatgccaaattccagcataaaatatcgaaatgtcttgtatggcgcaaagctttatctgcaggctggagatgt

SEQ ID NO: 81827 - DNA, 600 bp, Chicken  19866894375767_1
cttagcggggaagaacacacgtctgaactcggaactatttgtaggagaaaacacacaacgctatttttattacttttaaggcttgtaaaaaagtacgctgaaaattgcaggtgtgagcaattactgcgtgaggaaataaagcacccaacagaccccactgctaaaaaaggcaaatgatctgaaggtagatacaccctcctggcccttcctcgttcgtgtcaagaaaatgacatctaatttaaaaagcattcccaatgattctgttaaccctgacaaggagaaaaaaatcacggtacagcrgcaaatctgtcctttattccctgacaggtaaattaaaacaaatatccttttgaaaggaaaacatattaagtgtattttaatttgctggacgaatgtacgcgtacagtaacgcttgtattgcaacaaacagtcgtacatttttatcattgcttttgctttcctatttctttattaattaattgagacggttttcctgcagcttcctctttgaacagcaacgcgtgcggctcccggcagcgccgggtttggggctttggcttttttgacgttggtgattctgaaacccaatttctggcttta

SEQ ID NO: 81828 - DNA, 600 bp, Chicken  19866894375770_1
gtcaaggaactggctttaaatttcaccttgtaacctgactttctccaatatgacatctctgaatttaaatgagaggaaaaaaatcaagaagctgcattttcttacttgtatatatcaagatttcagcacattcttctaagcagaatgtcttaaattatcaacttagatgttgcaggagtgattttgtggggaaatgctgccatttaccattcacagtacatgaaagtattgcagttcattagtaagtgttattttactagagttacttcaatgtattaaaaaaaccttcttctgactccmctactgtgctatgacacatcatttgtatggaactcatattctgtgcttgaattccaaacaaagatctcatctagtttcaagaatattttttaagtatttattttaaaatgaaagatgtgcttgtttttcatgtgtttaacaacacaacaggccttatcaactctctctaatgaaaaatgggaattttctttcttactagtatgataaatatgatagaaaaccttagctattacaaagcaaatgtttttttaatacaaaaatctctatagcaactgagatgggaacaattccagtaaatta

SEQ ID NO: 81829 - DNA, 600 bp, Chicken  19866894375773_1
cataagattggaaggtacagaaatcaaatacagataaaactttggattagtatttacagggctaaacgtaattagtttttacatgcacagaacactttcaatctggccattgaaacatatacagggaagggcataataagggatacagtggcaagataaggaatcaaaagattcatacttcagaatggcttcttttcattctgagctctcaaaaaaatcagtatatggaaatgtatacatttaatatataatttaacatttgttcttgtttgtctacttaagctttcttcatccaagtcyaatttttttccatggatagggatgtacagctccctttgragatgatggagatttcataaaggctggatatatgaaaatccatgtctgaaactttcctgtattaatactgtatgtcttttggtggtttgcttttgcaaagcttttgtattcaacagaagaatgtactctgtaggaagaagggtgtttttttggcatggactgacccctccagtgctgatggaagaggttactgctggttatttgttaggcagtctgacaaatttggctgctctgctgtgagcgtggtttaagcactttgtt

SEQ ID NO: 81830 - DNA, 600 bp, Chicken  19866894375773_2
ctttggattagtatttacagggctaaacgtaattagtttttacatgcacagaacactttcaatctggccattgaaacatatacagggaagggcataataagggatacagtggcaagataaggaatcaaaagattcatacttcagaatggcttcttttcattctgagctctcaaaaaaatcagtatatggaaatgtatacatttaatatataatttaacatttgttcttgtttgtctacttaagctttcttcatccaagtcyaatttttttccatggatagggatgtacagctccctttgragatgatggagatttcataaaggctggatatatgaaaatccatgtctgaaactttcctgtattaatactgtatgtcttttggtggtttgcttttgcaaagcttttgtattcaacagaagaatgtactctgtaggaagaagggtgtttttttggcatggactgacccctccagtgctgatggaagaggttactgctggttatttgttaggcagtctgacaaatttggctgctctgctgtgagcgtggtttaagcactttgttaatttggttataaagattggctaaatggagctttgacta

SEQ ID NO: 81831 - DNA, 600 bp, Chicken  19866894375774_1
tgtcctgcagactggctgctgctgcaggtgccaacccaggcggtgctggagggcgatgctctgaccctgcgctgcagagcctgggaaaacgcaaagatcagcgatgtgcagttcttccatgatgggaaactgctgcaggacagacgtggggacaaactgctgctgtcccctgcacagcagcggcacagcggccgctaccactgcgaagcctacgtgtcctacatcattgcaaaatggcaaacctcactccaaagcgatctcgtggtgcgaggtgagcccgagcagggatggctttggggyggggtcgccgcagccgtgctgctgtcacctccccctgctcggttccttcccagagctcttctcagtgccacagctgagcgtggagggtccccggaacgccccccgagggcagcgctctgaccctgctctgttccacccacggcaacgcgctgcggccccacctctccctgcagtacttcttctaccgggatgggctgatggtggtggggccacagtcgggccccccagcaccgggtgccagagctgctgctgtcccactcggggtcctacagctgccaggtgcagatgggcagcgtgctg

SEQ ID NO: 81832 - DNA, 599 bp, Chicken  19866894375778_1
  misc_feature (1)..(91): n is any nucleotide
nnnnnnnnnnnnnnnnnnnnnnnnnnnnnnnnnnnnnnnnnnnnnnnnnnnnnnnnnnnnnnnnnnnnnnnnnnnnnnnnnnnnnnnnnnnttttgggcacactgtaaaggtgtgaagagcatagagctactctgacttgtccttggttgcttgtagacctcttttgtcctggcataaatccagtgcaaggggtgaacgaaggagcaaggctgtgaatagagcaggacagaatagggaatgatgatggaggcttcctctgcactgggatgtttttcagtggtctgtctctcagatttctyggctgtatgatgacagtaaattgggctgttagtcttcagcatctgttgtttgggggaaactcraggtcgtgacatgattgtgcttaacatacttttctggttgcygggctgtatctttatgattgattgtatatcagcagtgaaaaaagtgaaaattattttattaacttaggatgatagcttctgctgtaaaattgattctagtgtagtgatttaccaccatcctcttcttgatttccccccccccccccgacatttaaatgaggtaagatgtaatctctatttttaacatattgcat

SEQ ID NO: 81833 - DNA, 599 bp, Chicken  19866894375778_2
  misc_feature (1)..(28): n is any nucleotide
nnnnnnnnnnnnnnnnnnnnnnnnnnnnttttgggcacactgtaaaggtgtgaagagcatagagctactctgacttgtccttggttgcttgtagacctcttttgtcctggcataaatccagtgcaaggggtgaacgaaggagcaaggctgtgaatagagcaggacagaatagggaatgatgatggaggcttcctctgcactgggatgtttttcagtggtctgtctctcagatttctyggctgtatgatgacagtaaattgggctgttagtcttcagcatctgttgtttgggggaaactcraggtcgtgacatgattgtgcttaacatacttttctggttgcygggctgtatctttatgattgattgtatatcagcagtgaaaaaagtgaaaattattttattaacttaggatgatagcttctgctgtaaaattgattctagtgtagtgatttaccaccatcctcttcttgatttccccccccccccccgacatttaaatgaggtaagatgtaatctctatttttaacatattgcattttcttgttttcatgtgaaagattgggatgaatggttgctccatgtgcatgcaaacacatgaa

SEQ ID NO: 81834 - DNA, 600 bp, Chicken  19866894375778_3
taaaggtgtgaagagcatagagctactctgacttgtccttggttgcttgtagacctcttttgtcctggcataaatccagtgcaaggggtgaacgaaggagcaaggctgtgaatagagcaggacagaatagggaatgatgatggaggcttcctctgcactgggatgtttttcagtggtctgtctctcagatttctyggctgtatgatgacagtaaattgggctgttagtcttcagcatctgttgtttgggggaaactcraggtcgtgacatgattgtgcttaacatacttttctggttgcygggctgtatctttatgattgattgtatatcagcagtgaaaaaagtgaaaattattttattaacttaggatgatagcttctgctgtaaaattgattctagtgtagtgatttaccaccatcctcttcttgatttccccccccccccccgacatttaaatgaggtaagatgtaatctctatttttaacatattgcattttcttgttttcatgtgaaagattgggatgaatggttgctccatgtgcatgcaaacacatgaagtgcttgctgagatgtctatggtatttacagcagcaaggatta

SEQ ID NO: 81835 - DNA, 600 bp, Chicken  19866894375783_1
aaggaagctaagcatcacaggtttcatggttctggctttttgttttgttttttaaactgatgttgaagtttcaagctttgcgtgcgacattcttatgaaaagaactgagaaacaacttcatttatagcagcaaatttcacactaaatatagctgcacccactgcagaaagccactgtggtctgttgcacataaacacatcccactggcttcaattcaaccacaaaaacttggttcaggtttgtacttgacaatgaggtgctcagctgtagcagcatgcaagtaggagaaagaaggcacayaggttttcatagcaaataaaattctctactttatacaatcaattacagtatacttctgtgtttctctgggttatgtgaatcactgtgggccaatataacagaagtgcaagcaattcctctgtgctttcagaaccagtctgatatattgttattctgataaaagctgcatccaatttgtctctaggctcagagtattccacttcatctctatctatacattaaataagttgttctttgtacttttctagcttgcgcatttatatacaagatccatacatatggatcttctcttggttgaca

SEQ ID NO: 81836 - DNA, 600 bp, Chicken  19866894375796_1
tttttatatgtcctgatagcaatggaggggggggggggggtgtcggaattgctttaggctgaaagagggaagatctagattaaacattaggaagaaattcttcactcaggatgtagtgaggtcctggcacagctgctgggagaagctgtggtaccccatccctgaaggtgctctaggccaggttggatggggccctgggcagctgagctgctgggtggcagccctgcccgtggctggggttaggtgggctttaaggtcctctccaccccaatccattgtgtgattctatgaactctgcaraactgtgatggtctgtttagtgtgtcaggaaaggtaagtgctgcagaaggtgaattatctactaaaatgctgtattgccatagcatcacttcagtgtctctgcatggtggggaatccacttcccaggccctttatgcatcaaaagagcagaagtatgcaatgtagtttctagtgacttttcttatatcaaacttggttatataacagcatctttgttgtaaagtagtggagtgatttaccatgcataaaataggtaatttcgtaacctagctgtgaaatctatggagcaaaaaattctcc

SEQ ID NO: 81837 - DNA, 600 bp, Chicken  19866894375801_1
gtaccttagttccagatcctttccttttcattcagtgagtactttgaagagtgaaacactgtttctggtagtccttgcaagatattcaaagctctgactttggcatccacgtcaccaaacagaatgtccctgctacaggcagaatggtgctcctgctggtcagcccacagctagctgcatgagatggtgaacctgtttgtaaggtggaatgagggtaagacttgtgacaacagaaacaacagtgatgcaattcctggactggtgccacgtcactggaagcgctggtggctagtgcttcartgcagggccaaggcactcaagaaccgggaaatgaaaagtaatatatctggcttttgactatgatcagcaaaaatatatgtggaggtgcatggatcagcaagcaaactcctacctgaactcagccataaaaaggaagtgtaggggtggaagaaagggcagatgacaaggagactggtgctaaatgagatgggggaactggtcacaaaggagatggaaaggccacagcactcagtccctcctttatatctgactttgctggcgaaatcagcctttaggagtcccaggtctctgagactcata

SEQ ID NO: 81838 - DNA, 600 bp, Chicken  19866894375805_1
aaacgaggcataatttcaatttaccctccgtgcaagaacagatttcttttttcctttaatagccaaaagcaggagcaaagcacatgaaaaggaggtaatgcagtaaaatgaggcactcttctctgctcaagtttgtaggcattgctgcaatatgcttcactgtagcagaaaaatagactcttctcacagcattttggctgctgcaacccccagctggactacaaacatgcactgaaggccagagaaacaaagaataatgaaaacaaattattatctttaaaaggttgaaaaaaatcaacratttgaatgcagcaaacatgttcattttaatttaagactgctataggtggaccagtgagcttattacagtctcascatagacagatgtgttcagggcaaccccaaatgtttctgcaggcaggtaaacacactcaaagtgagtttaagaataaagccttgggagcagatctgtatctrtaataggagaaatatgctccatttccaagaacattaacaaaaagacrtttgcttggggttgatgggtacaccaccttcagccagagcaacgtgtgttctaaccctgaccataagggatgcctg

SEQ ID NO: 81839 - DNA, 600 bp, Chicken  19866894375805_2
caaagcacatgaaaaggaggtaatgcagtaaaatgaggcactcttctctgctcaagtttgtaggcattgctgcaatatgcttcactgtagcagaaaaatagactcttctcacagcattttggctgctgcaacccccagctggactacaaacatgcactgaaggccagagaaacaaagaataatgaaaacaaattattatctttaaaaggttgaaaaaaatcaacratttgaatgcagcaaacatgttcattttaatttaagactgctataggtggaccagtgagcttattacagtctcascatagacagatgtgttcagggcaaccccaaatgtttctgcaggcaggtaaacacactcaaagtgagtttaagaataaagccttgggagcagatctgtatctrtaataggagaaatatgctccatttccaagaacattaacaaaaagacrtttgcttggggttgatgggtacaccaccttcagccagagcaacgtgtgttctaaccctgaccataagggatgcctggtgccactgaggtattttggtgccaccaggcacccaggacagttgccagggcatcagaacaagcagaatgcggga

SEQ ID NO: 81840 - DNA, 600 bp, Chicken  19866894375805_3
ctcttctcacagcattttggctgctgcaacccccagctggactacaaacatgcactgaaggccagagaaacaaagaataatgaaaacaaattattatctttaaaaggttgaaaaaaatcaacratttgaatgcagcaaacatgttcattttaatttaagactgctataggtggaccagtgagcttattacagtctcascatagacagatgtgttcagggcaaccccaaatgtttctgcaggcaggtaaacacactcaaagtgagtttaagaataaagccttgggagcagatctgtatctrtaataggagaaatatgctccatttccaagaacattaacaaaaagacrtttgcttggggttgatgggtacaccaccttcagccagagcaacgtgtgttctaaccctgaccataagggatgcctggtgccactgaggtattttggtgccaccaggcacccaggacagttgccagggcatcagaacaagcagaatgcgggaaccagcccagtcactgcacttcagaggaaatcatggtttagtatcttattccaaaagtcaatccaagggaaaagaaggaaggagtaagggtatccaaagctt

SEQ ID NO: 81841 - DNA, 600 bp, Chicken  19866894375805_4
acatgcactgaaggccagagaaacaaagaataatgaaaacaaattattatctttaaaaggttgaaaaaaatcaacratttgaatgcagcaaacatgttcattttaatttaagactgctataggtggaccagtgagcttattacagtctcascatagacagatgtgttcagggcaaccccaaatgtttctgcaggcaggtaaacacactcaaagtgagtttaagaataaagccttgggagcagatctgtatctrtaataggagaaatatgctccatttccaagaacattaacaaaaagacrtttgcttggggttgatgggtacaccaccttcagccagagcaacgtgtgttctaaccctgaccataagggatgcctggtgccactgaggtattttggtgccaccaggcacccaggacagttgccagggcatcagaacaagcagaatgcgggaaccagcccagtcactgcacttcagaggaaatcatggtttagtatcttattccaaaagtcaatccaagggaaaagaaggaaggagtaagggtatccaaagcttggtttactgatgaggtggtgaccatgcccattttgcccagagaagct

SEQ ID NO: 81842 - DNA, 600 bp, Chicken  19866894375805_5
gaggggagcaagcatcacagctagaaagggagaaagcctgagtggtttcatagcccagagtaacataaggaaagaaacacctggaaacttatgcatggagaaaggcagccaggacttatcacctctgtgtttccccctctgttctctctcctgagctgcttgctaaaaggcattcacagtccccctgcgtggcttggcttgtaagatgattccttcgcttcctcctctgtaagctccttctgacaggtgtgcccaggggcactctggagcagcacctcagacatctgttgctccctctcycttttcatgcctgccaagagacatcaacgggattgctttgcaaatacagacgggaggatgcgacctacgggtatgggctgcgcggcatcccttctggaggtaaaaataacaacagcaaaaataaccacagcctacgtgccaacttcagtccctgcccttgtgtgatatcacgttatggtatcacctagccacttctgctaatgtcttttctttggggaaatggaaaacaggaacttatctacggggatcataagccagaaagctctgtctcctggaaacggtgcacaccaagaactgcct

SEQ ID NO: 81843 - DNA, 600 bp, Chicken  19866894375811_1
atacttgaagtacgtgtatttcaaagagtgcatttatgaaacattaagctagttatcttatgtgggcaaatggcttattccctttctcacttacttctaaggacttgagcagcagcaaaatctatgcaattctgtgtgtcatgtgggaaaacatatatattttgtgtgtgtgtgtgtagaatttgacataagtttaaggtacaaaaccattagggcagtaactgcactgagtttctttcttctttctaaagaagtactaccaggaaacaaactgcccaaagccactaccacagtcctcaractgcagaggtgggtgtgacacagctttattttctgttcacccacttcaaagaactatagttccagaaaatacctcagaagttcagtagatgtcttgatagtctgaaatctagatgagagacgaagagagagagagaagtaatgattgcagcaacagttacgtggatctgatgagcatagcctcctctccagagagtttaatcaaatggcagtgtaaagtgagcaagaactgcctgagctttctccatgattgggtgtttgcctttgagatctatcccttatccagtcctaacacaggta

SEQ ID NO: 81844 - DNA, 600 bp, Chicken  19866894375812_1
agccatcttcaatggaaaggcagagttaggaagtaataggcaaagcacttactacgctgctccactacaagcacacagcacacaggatgacacataatggcgacttacaactcactaatcctggattttaaacttacgcaactacttcaggaaaagcagcattttcctcctccagctgcagctcttttgccagctgttcactcatcacatcggcaagggaacatgatatcgaggtagtttttggagttccccagggacactggaaataaatattctgttcgagtcagtgagaaacgcaayggcaacactgataaccaggacaattagctaccagaggctctaaaacaagctggtgtaatcccataagagcttgtgctctctagacatggaggaaagtatgaggaattgtggcacaggggatatcacagaaccacagaatggcctgggttgaaaaggaccacaatgatcattgartttcaacccccctgctatgcacagggccgccaaccaccagaccaggctgcccagagccacatccagcctggccttgaatgcatcccagggatggggcatccacaacctccttgggcaacctgttcc

SEQ ID NO: 81845 - DNA, 600 bp, Chicken  19866894375812_2
gctgcagctcttttgccagctgttcactcatcacatcggcaagggaacatgatatcgaggtagtttttggagttccccagggacactggaaataaatattctgttcgagtcagtgagaaacgcaayggcaacactgataaccaggacaattagctaccagaggctctaaaacaagctggtgtaatcccataagagcttgtgctctctagacatggaggaaagtatgaggaattgtggcacaggggatatcacagaaccacagaatggcctgggttgaaaaggaccacaatgatcattgartttcaacccccctgctatgcacagggccgccaaccaccagaccaggctgcccagagccacatccagcctggccttgaatgcatcccagggatggggcatccacaacctccttgggcaacctgttccagtgtgtcaccaccctctgagtggcaaaacttcctcctaacatctaacctatacctcccctgtctcagtttaaaaccattcccccttgtcctgtcactatccagccctaatatctgaaggagcagctccataagctgagaagtatgtgactgaaaggacatcgatggtcatttc

SEQ ID NO: 81846 - DNA, 600 bp, Chicken  19866894375822_1
atgtgcaggacagatggtaaagtctggccatgctgggcatggacagtcctgtgttgtgaattaatcagatgagtattatctgtctgcagtgagctctgcatttctcacaccaaacagctttgccatccttgggtgtttcctgtgaagccttccctctgcaggcatctccttctgctcagtggctgtccttgcagtggagccccttcatcttaccagctctgctactcctgtgcacagagttgccattttattattgatctgctgttatttagctgggtccttggtctggttttgccttgmagcactggtgaaagatgtaaaggttggctaggaggagtaggctggttagagcaacaccttcatttgaggtacaactaactgctgatataagagatatgtaatccagtcataaaagacacaggttgggccagagtggcccagtggcctctctcttttccaaatatctgcttttgttcactctcagagtaggaagagagaatgtatatgatgcttccttgaagtactttctcagtctctgaccgcgttcagaccagcgatttctgtcttacataatgctcttccatcagtgaacttcccagg

SEQ ID NO: 81847 - DNA, 600 bp, Chicken  19866894375829_1
tgaactgcctttggttctcatcttgctgatatagagcaacatttgcataagtttcagttgtggcctacttgtcttgtgacatcttttttttttcacttgtccaatgaggttacaaacacctacgtgttagggtctgctccatttttagaaggaaagtcagtaggagagagaaactaggcgggatttaagaacacgtgtaaatctcctccttgcctttggctgcaataaagtacaagttctacaaatattttcaggaaaatgctatttcttgtatgcatcccatcctgctcagaccactgyggtgactggagcgtgtgtaatcatcccatagggatcagcagccggaaaacacccccacacagctggcagggctgtggttacctcagtgcataggaaagagaggactgcagaccaagggctgcacgyctggcagctgcccagtttgcagattgcagaagtggggtcctctgggccgtgtgtgctgcagagctcagctggctctccaggagcttcccaggagaaaatctttccattgtggtgactcctctcttcacacaacctcttcgagtgtaatgtttgagcaaaaaacaccaagccatt

SEQ ID NO: 81848 - DNA, 600 bp, Chicken  19866894375829_2
ttagggtctgctccatttttagaaggaaagtcagtaggagagagaaactaggcgggatttaagaacacgtgtaaatctcctccttgcctttggctgcaataaagtacaagttctacaaatattttcaggaaaatgctatttcttgtatgcatcccatcctgctcagaccactgyggtgactggagcgtgtgtaatcatcccatagggatcagcagccggaaaacacccccacacagctggcagggctgtggttacctcagtgcataggaaagagaggactgcagaccaagggctgcacgyctggcagctgcccagtttgcagattgcagaagtggggtcctctgggccgtgtgtgctgcagagctcagctggctctccaggagcttcccaggagaaaatctttccattgtggtgactcctctcttcacacaacctcttcgagtgtaatgtttgagcaaaaaacaccaagccattttatgcacacgtgggtaaggctgtcaggcattccttcaagcaattgcagaaaaatgaggcgtggggaaaatgcaatcaatgcttaagaggtggagtaaactctctctttgttaggtcctgttccct

SEQ ID NO: 81849 - DNA, 599 bp, Chicken  19866894375831_1
  misc_feature (1)..(56): n is any nucleotide
nnnnnnnnnnnnnnnnnnnnnnnnnnnnnnnnnnnnnnnnnnnnnnnnnnnnnnnnaaatcaatccgttatcttcagtgagttcattaagcactacctaggcctactgctaagggagagggcatattttggttctgcaagataaaatagtgtgaagggagatcaaaactggaaaaaacagtgtacagctcttcctgggtgctttgtgggggtgttttctgtcaggcccggcctctcagtagctcccagccctgaggtgaggcctgtggtggcagctgggccctgctgctttctgcccctkctcttcagctgctgtgggactctgatttctgtcygtggcagcagccctagcaagagttatccctatccattcctgtttagaagtgagtttgcttcaactatgaaatctgtgtttatgtattagtcaataccagttttctcctcattgtgataaacaccatcagaaaaaatgacttgcggccttctgtgcctgaacaagccctccaggctgcctgctgccgcagcccctcagactctgcaggctgtggagaagctgggcacagcaagactaacacagccatgccttcatgagatctgtgt

SEQ ID NO: 81850 - DNA, 599 bp, Chicken  19866894375831_2
  misc_feature (1)..(22): n is any nucleotide
nnnnnnnnnnnnnnnnnnnnnnaaatcaatccgttatcttcagtgagttcattaagcactacctaggcctactgctaagggagagggcatattttggttctgcaagataaaatagtgtgaagggagatcaaaactggaaaaaacagtgtacagctcttcctgggtgctttgtgggggtgttttctgtcaggcccggcctctcagtagctcccagccctgaggtgaggcctgtggtggcagctgggccctgctgctttctgcccctkctcttcagctgctgtgggactctgatttctgtcygtggcagcagccctagcaagagttatccctatccattcctgtttagaagtgagtttgcttcaactatgaaatctgtgtttatgtattagtcaataccagttttctcctcattgtgataaacaccatcagaaaaaatgacttgcggccttctgtgcctgaacaagccctccaggctgcctgctgccgcagcccctcagactctgcaggctgtggagaagctgggcacagcaagactaacacagccatgccttcatgagatctgtgtgaagttactgccaaaagaagcttcagcttgttag

SEQ ID NO: 81851 - DNA, 600 bp, Chicken  19866894375832_1
gaaaatgcatattgaaactaaaaaaaaaaaaaaaaaatgcatttgttatagtgttacttgtattttatctatcttggttctaactacaagaaaacaatgaataaagataattcagaatttcagaatgctctctgaatttcagcaacaaggatcattataaatggctggcctttttttcgccagactattatccacttatccactataactctttcatatggacatgtatgacattagaagccagaacatgggcagaatcaaatcagcttattaagccctggaagtacaagtgaagaacaytgatgcccaagttatcttctcctcagccttgtgagctggaggagagaagaaaatagaaatagacatttaatgcacataaattccttgtcatgtggctggtgctcaccctgggatcagtactgggtttggtcttgttcaacatctttatcagtggcatggatgaaggaagaggacacaccctcagcaagtttgctgatgatacaaagatgggaggagtgactgacagaaggctgtgctgccattcagcgagacctatacagactggactttgacagagatgaatcttctgaggttcaccaa

SEQ ID NO: 81852 - DNA, 600 bp, Chicken  19866894375840_1
accccccctgctgcaattcattcttcgttcttaagtttctctactccttagcatagtaaatcagagtaagacctatttgcctcaaaagtttgtaatcttgaaaaaaacatccgaatccaggaaaactctggttgtgaccagagtgacatctgcctcaaaaatagtattttacttgttttctgtcccacagctctgatatttttttgctgcttggctgcgattaggtgtcaaggatttagaagcatcagaaaacagagtgaagctgagatgctcacatgttgctggttcactggctgttgygagcagsacygccagtgttgacttttgtgtgttgatgagagttctttggttgtgaattttgaagattgaatggactgagagcatatccccagttgccttgcctagcwgagacaacatagggttgggctgatgaggtggtctaaaaagagcttttttatcctttctgaagccctgcatgtaagcattgcttttgcaagacagctgtggcactggtctcaccttgctycagtyagttacgttcagagaaactttttcggatgtttatttcttgtgttcctcacagcactatgtattttcagg

SEQ ID NO: 81853 - DNA, 600 bp, Chicken  19866894375840_2
ctgctgcaattcattcttcgttcttaagtttctctactccttagcatagtaaatcagagtaagacctatttgcctcaaaagtttgtaatcttgaaaaaaacatccgaatccaggaaaactctggttgtgaccagagtgacatctgcctcaaaaatagtattttacttgttttctgtcccacagctctgatatttttttgctgcttggctgcgattaggtgtcaaggatttagaagcatcagaaaacagagtgaagctgagatgctcacatgttgctggttcactggctgttgygagcagsacygccagtgttgacttttgtgtgttgatgagagttctttggttgtgaattttgaagattgaatggactgagagcatatccccagttgccttgcctagcwgagacaacatagggttgggctgatgaggtggtctaaaaagagcttttttatcctttctgaagccctgcatgtaagcattgcttttgcaagacagctgtggcactggtctcaccttgctycagtyagttacgttcagagaaactttttcggatgtttatttcttgtgttcctcacagcactatgtattttcagggatatga

SEQ ID NO: 81854 - DNA, 600 bp, Chicken  19866894375840_3
ctgcaattcattcttcgttcttaagtttctctactccttagcatagtaaatcagagtaagacctatttgcctcaaaagtttgtaatcttgaaaaaaacatccgaatccaggaaaactctggttgtgaccagagtgacatctgcctcaaaaatagtattttacttgttttctgtcccacagctctgatatttttttgctgcttggctgcgattaggtgtcaaggatttagaagcatcagaaaacagagtgaagctgagatgctcacatgttgctggttcactggctgttgygagcagsacygccagtgttgacttttgtgtgttgatgagagttctttggttgtgaattttgaagattgaatggactgagagcatatccccagttgccttgcctagcwgagacaacatagggttgggctgatgaggtggtctaaaaagagcttttttatcctttctgaagccctgcatgtaagcattgcttttgcaagacagctgtggcactggtctcaccttgctycagtyagttacgttcagagaaactttttcggatgtttatttcttgtgttcctcacagcactatgtattttcagggatatgatcc

SEQ ID NO: 81855 - DNA, 600 bp, Chicken  19866894375840_4
catccgaatccaggaaaactctggttgtgaccagagtgacatctgcctcaaaaatagtattttacttgttttctgtcccacagctctgatatttttttgctgcttggctgcgattaggtgtcaaggatttagaagcatcagaaaacagagtgaagctgagatgctcacatgttgctggttcactggctgttgygagcagsacygccagtgttgacttttgtgtgttgatgagagttctttggttgtgaattttgaagattgaatggactgagagcatatccccagttgccttgcctagcwgagacaacatagggttgggctgatgaggtggtctaaaaagagcttttttatcctttctgaagccctgcatgtaagcattgcttttgcaagacagctgtggcactggtctcaccttgctycagtyagttacgttcagagaaactttttcggatgtttatttcttgtgttcctcacagcactatgtattttcagggatatgatcccccactgcaaaagggcatttgcactgtgacatagcgtgctccagacagcagcaggcctaggactaactgaagcttggccagtgagcctkcagtgtat

SEQ ID NO: 81856 - DNA, 600 bp, Chicken  19866894375840_5
gtcaaggatttagaagcatcagaaaacagagtgaagctgagatgctcacatgttgctggttcactggctgttgygagcagsacygccagtgttgacttttgtgtgttgatgagagttctttggttgtgaattttgaagattgaatggactgagagcatatccccagttgccttgcctagcwgagacaacatagggttgggctgatgaggtggtctaaaaagagcttttttatcctttctgaagccctgcatgtaagcattgcttttgcaagacagctgtggcactggtctcaccttgctycagtyagttacgttcagagaaactttttcggatgtttatttcttgtgttcctcacagcactatgtattttcagggatatgatcccccactgcaaaagggcatttgcactgtgacatagcgtgctccagacagcagcaggcctaggactaactgaagcttggccagtgagcctkcagtgtattttgaacgaatattttcagcggagcaaaaggacggctaaagtgcctatgatagctttgagacttagctttcaatattgttttgggttgtgggtggtgctcgggtgctctgtccactgga

SEQ ID NO: 81857 - DNA, 600 bp, Chicken  19866894375840_6
ggatttagaagcatcagaaaacagagtgaagctgagatgctcacatgttgctggttcactggctgttgygagcagsacygccagtgttgacttttgtgtgttgatgagagttctttggttgtgaattttgaagattgaatggactgagagcatatccccagttgccttgcctagcwgagacaacatagggttgggctgatgaggtggtctaaaaagagcttttttatcctttctgaagccctgcatgtaagcattgcttttgcaagacagctgtggcactggtctcaccttgctycagtyagttacgttcagagaaactttttcggatgtttatttcttgtgttcctcacagcactatgtattttcagggatatgatcccccactgcaaaagggcatttgcactgtgacatagcgtgctccagacagcagcaggcctaggactaactgaagcttggccagtgagcctkcagtgtattttgaacgaatattttcagcggagcaaaaggacggctaaagtgcctatgatagctttgagacttagctttcaatattgttttgggttgtgggtggtgctcgggtgctctgtccactggaaggag

SEQ ID NO: 81858 - DNA, 501 bp, Chicken  19866894375840_7
gcctagcwgagacaacatagggttgggctgatgaggtggtctaaaaagagcttttttatcctttctgaagccctgcatgtaagcattgcttttgcaagacagctgtggcactggtctcaccttgctycagtyagttacgttcagagaaactttttcggatgtttatttcttgtgttcctcacagcactatgtattttcagggatatgatcccccactgcaaaagggcatttgcactgtgacatagcgtgctccagacagcagcaggcctaggactaactgaagcttggccagtgagcctkcagtgtattttgaacgaatattttcagcggagcaaaaggacggctaaagtgcctatgatagctttgagacttagctttcaatattgttttgggttgtgggtggtgctcgggtgctctgtccactggaaggagtggttcacatcacttgcagtattgttaggttgccttctccatcattaattgcaaatagtgttttacatt

SEQ ID NO: 81859 - DNA, 599 bp, Chicken  19866894375843_1
  misc_feature (1)..(147): n is any nucleotide
nnnnnnnnnnnnnnnnnnnnnnnnnnnnnnnnnnnnnnnnnnnnnnnnnnnnnnnnnnnnnnnnnnnnnnnnnnnnnnnnnnnnnnnnnnnnnnnnnnnnnnnnnnnnnnnnnnnnnnnnnnnnnnnnnnnnnnnnnnnnnnnnnnntactgctaactgtaagggcatcagatccatacaagataaagtgaatcctatggcaaccaacacctattcttcatttttgtgtcatgcaataaccactctgaatgtgtttcagtgacagttacagagagaagagagcggccacccaacgtcagscatcatttaccccacacccstgtgcttcctggtgccaacacacacaatgtctcactcttcagctgcacaasctttactcaccggggtggggagatgatgcaacttatcaacaaggtaaaggactygctttagtcttttgattctagcgtgactctcagagatgagatatgatccttaacaaggagcctggaggtgctggtacagtcagctaagcagcagacctcggggtgatttcccatagcttttacttccctcattrgctcacatttctgctcaatttgaccaaaatctgtccatca

SEQ ID NO: 81860 - DNA, 599 bp, Chicken  19866894375843_2
  misc_feature (1)..(127): n is any nucleotide
nnnnnnnnnnnnnnnnnnnnnnnnnnnnnnnnnnnnnnnnnnnnnnnnnnnnnnnnnnnnnnnnnnnnnnnnnnnnnnnnnnnnnnnnnnnnnnnnnnnnnnnnnnnnnnnnnnnnnnnnnnnnnnntactgctaactgtaagggcatcagatccatacaagataaagtgaatcctatggcaaccaacacctattcttcatttttgtgtcatgcaataaccactctgaatgtgtttcagtgacagttacagagagaagagagcggccacccaacgtcagscatcatttaccccacacccstgtgcttcctggtgccaacacacacaatgtctcactcttcagctgcacaasctttactcaccggggtggggagatgatgcaacttatcaacaaggtaaaggactygctttagtcttttgattctagcgtgactctcagagatgagatatgatccttaacaaggagcctggaggtgctggtacagtcagctaagcagcagacctcggggtgatttcccatagcttttacttccctcattrgctcacatttctgctcaatttgaccaaaatctgtccatcagcaaacacccagaataggtc

SEQ ID NO: 81861 - DNA, 599 bp, Chicken  19866894375843_3
  misc_feature (1)..(76): n is any nucleotide
nnnnnnnnnnnnnnnnnnnnnnnnnnnnnnnnnnnnnnnnnnnnnnnnnnnnnnnnnnnnnnnnnnnnnnnnnnnntactgctaactgtaagggcatcagatccatacaagataaagtgaatcctatggcaaccaacacctattcttcatttttgtgtcatgcaataaccactctgaatgtgtttcagtgacagttacagagagaagagagcggccacccaacgtcagscatcatttaccccacacccstgtgcttcctggtgccaacacacacaatgtctcactcttcagctgcacaasctttactcaccggggtggggagatgatgcaacttatcaacaaggtaaaggactygctttagtcttttgattctagcgtgactctcagagatgagatatgatccttaacaaggagcctggaggtgctggtacagtcagctaagcagcagacctcggggtgatttcccatagcttttacttccctcattrgctcacatttctgctcaatttgaccaaaatctgtccatcagcaaacacccagaataggtcctaccagtcttcaaatgtgcttatctgcaaaaggtggtttgagaggaactc

SEQ ID NO: 81862 - DNA, 599 bp, Chicken  19866894375843_4
  misc_feature (1)..(22): n is any nucleotide
nnnnnnnnnnnnnnnnnnnnnntactgctaactgtaagggcatcagatccatacaagataaagtgaatcctatggcaaccaacacctattcttcatttttgtgtcatgcaataaccactctgaatgtgtttcagtgacagttacagagagaagagagcggccacccaacgtcagscatcatttaccccacacccstgtgcttcctggtgccaacacacacaatgtctcactcttcagctgcacaasctttactcaccggggtggggagatgatgcaacttatcaacaaggtaaaggactygctttagtcttttgattctagcgtgactctcagagatgagatatgatccttaacaaggagcctggaggtgctggtacagtcagctaagcagcagacctcggggtgatttcccatagcttttacttccctcattrgctcacatttctgctcaatttgaccaaaatctgtccatcagcaaacacccagaataggtcctaccagtcttcaaatgtgcttatctgcaaaaggtggtttgagaggaactcaaacggtaccactgctattcaaggggataaaaaccaacaccacggcatcgaagg

SEQ ID NO: 81863 - DNA, 600 bp, Chicken  19866894375843_5
tgacagttacagagagaagagagcggccacccaacgtcagscatcatttaccccacacccstgtgcttcctggtgccaacacacacaatgtctcactcttcagctgcacaasctttactcaccggggtggggagatgatgcaacttatcaacaaggtaaaggactygctttagtcttttgattctagcgtgactctcagagatgagatatgatccttaacaaggagcctggaggtgctggtacagtcagctaagcagcagacctcggggtgatttcccatagcttttacttccctcattrgctcacatttctgctcaatttgaccaaaatctgtccatcagcaaacacccagaataggtcctaccagtcttcaaatgtgcttatctgcaaaaggtggtttgagaggaactcaaacggtaccactgctattcaaggggataaaaaccaacaccacggcatcgaaggaagaagtccagaccagtgtcagtttttatctggaaaaaggcaggaagaggcaggaaatgaagtaggaaattgatttctgcaayccaaaattcaccaactcacctctgagctatgttctacagaagccaagcccta

SEQ ID NO: 81864 - DNA, 455 bp, Chicken  19866894375843_6
gctaagcagcagacctcggggtgatttcccatagcttttacttccctcattrgctcacatttctgctcaatttgaccaaaatctgtccatcagcaaacacccagaataggtcctaccagtcttcaaatgtgcttatctgcaaaaggtggtttgagaggaactcaaacggtaccactgctattcaaggggataaaaaccaacaccacggcatcgaaggaagaagtccagaccagtgtcagtttttatctggaaaaaggcaggaagaggcaggaaatgaagtaggaaattgatttctgcaayccaaaattcaccaactcacctctgagctatgttctacagaagccaagccctattgctgacacctctaacaagtctggtaacaggaggagacgatatgtaatggctttaaatcttcagataactagtttaacagaatgtgcaaactatcttaaaaa

SEQ ID NO: 81865 - DNA, 600 bp, Chicken  19866894375845_1
ttattttgtacaagtaaaaaacattcactgaacagttattaaactgagattacatgcctgctttttcctctctttcagaaaacagaatgcaaggctgtaattaagaccgtagaaaacagttctttggacagtagtggctttggtctagatatatggatttctcatgcctatctaccccgaatgtgggtagagaagcatcccaacaaaaatagtgaggtatggcatacctgtaatatagtttatgaggtaataaacataaaacataataaacagatggacaccataggcagtgttcaatasaatctcagtgattttgttttatcctttgccttgtaccagagtgaaggttgaggtgcattttcaacagtatcccatcacatttcagttgaaacactttcttctaactaactgttgtgctgctgcttgtatttcacagaaatgtgactgtactgcttaagtggatggtggcagttatgactaccaaagataatacctgtaattttttttttaagttggagaaaagattggaatgctgtttgccaaagagtgaattggattgtaaaattaaacaacaaaattccgttttcggttttcatgtgg

SEQ ID NO: 81866 - DNA, 533 bp, Chicken  19866894375853_1
cagctggatattttgtgtagcatatttatgattttggtgaagctaaacatagagtttagttagggacagagtgattccaaaatttagtccactatctgtagcttaaggttcctaatcatgaatgagttactctgtgtaaggtcaatttcctcaatagtgaggatgcctatgggaaaactgaaacacagtcaggctatttttaatgttgacacggtagtttgtaaaaataatctctccttatatctctccgttataaaaatactgaggattctactgaagtaaatacactgaaaacatagrgacacaaacaaggcttaaaatcaaagctcagtgacttcctgcataaagctgcccatctagtttttcacagcattaatggatatataaacaattccattaatggatttgctggatatttctcatacttaattttaaataatttgtgatttatgtagtggaaaaacatgtccaaatacttagattttcagcaaagacctcatcagcttcatagtagaggcttgcaccaagggatt

SEQ ID NO: 81867 - DNA, 599 bp, Chicken  19866894375857_1
  misc_feature (1)..(17): n is any nucleotide
nnnnnnnnnnnnnnnnnaaatccattctgtacaatttctgtatatgaatttaataacttggcttaaagaagactgaaggaaagacatgcattttctggttgatattttgtacagtgtgcttaactgttgcaacagtgatgatgaaaggaaagtcattcttgatgatttaacgaaggtatgtcttgtgtattttcttactagattttattgaagttactattttttatggtatgtggttgtttaaccttttcattttggggatatagaatgagttatgttctacgtgaacttgttcaactraagagaagtagatttagaaaaggttgacattacaatgttgaagttacacttacattaaaatatattaattgtttacgtatatctttacatatataaataaaagtaacatcagaagttctctatgcttcatcttcttacagtgtgcttttatgcttattcatgggaggcctttcttttaaatatggacctttattggtctagatgctagagagagacttgggaggcaaaataactgataaataactttgttgctgaaacttagcaacttgtgcttatcacttgcagaaaatgaaatttta

SEQ ID NO: 81868 - DNA, 600 bp, Chicken  19866894375869_1
agcaccgcacaagcccatcagctcctgtccatgtggctgagtcaagggcttgggacagcacagacaatccacatgagtccttgggagatccagagctactggcaaaccccagccctggaggcagtgagggatggcaacggtgtcttagctcctgctgtagaagcacgcttctgctgtgtgcagaaacacatgcacaaagtgataacagatccagatgtaactgatgaaatgacttttgttaagaggcagaaacaggagatgtggagatgtgacagggtaaaatgtgatcaccaagcctcrcwtccccaggtgaccttcgtgatcccagcttcagaagcaacacaggtgagcaggacaccccactgactccaaactaccacacactggcttccccattgctgcctctgggttcactgttggacaagacaacccatccttctccctaagacatgagctgtgccatgccctgagagaagagagcaggactcaagcacagagctgcaggcacagcaatggccctgcacaccccrtggaaccagcagtgtccacaacaagcatagcaaagccaaagtcatacctgaaaaacccaagtcsagcagg

SEQ ID NO: 81869 - DNA, 600 bp, Chicken  19866894375869_2
caccgcacaagcccatcagctcctgtccatgtggctgagtcaagggcttgggacagcacagacaatccacatgagtccttgggagatccagagctactggcaaaccccagccctggaggcagtgagggatggcaacggtgtcttagctcctgctgtagaagcacgcttctgctgtgtgcagaaacacatgcacaaagtgataacagatccagatgtaactgatgaaatgacttttgttaagaggcagaaacaggagatgtggagatgtgacagggtaaaatgtgatcaccaagcctcrcwtccccaggtgaccttcgtgatcccagcttcagaagcaacacaggtgagcaggacaccccactgactccaaactaccacacactggcttccccattgctgcctctgggttcactgttggacaagacaacccatccttctccctaagacatgagctgtgccatgccctgagagaagagagcaggactcaagcacagagctgcaggcacagcaatggccctgcacaccccrtggaaccagcagtgtccacaacaagcatagcaaagccaaagtcatacctgaaaaacccaagtcsagcaggac

SEQ ID NO: 81870 - DNA, 600 bp, Chicken  19866894375869_3
gacttttgttaagaggcagaaacaggagatgtggagatgtgacagggtaaaatgtgatcaccaagcctcrcwtccccaggtgaccttcgtgatcccagcttcagaagcaacacaggtgagcaggacaccccactgactccaaactaccacacactggcttccccattgctgcctctgggttcactgttggacaagacaacccatccttctccctaagacatgagctgtgccatgccctgagagaagagagcaggactcaagcacagagctgcaggcacagcaatggccctgcacaccccrtggaaccagcagtgtccacaacaagcatagcaaagccaaagtcatacctgaaaaacccaagtcsagcaggacagctcgtttgcggtccttcacactactgatctgctggaactggaggtccacaacaaggaagaagatgcatccaaagaaggcaataatgccaatggcgatgccatagctgcaggcactctcattctcgttgaagatgcagtgtagctcagggtctgtgccatccttgttcatgtagcactcattcacaatggagccaaacaccacaatggaaaagatctgcagaaggaa

SEQ ID NO: 81871 - DNA, 593 bp, Chicken  19866894375869_4
gcctcrcwtccccaggtgaccttcgtgatcccagcttcagaagcaacacaggtgagcaggacaccccactgactccaaactaccacacactggcttccccattgctgcctctgggttcactgttggacaagacaacccatccttctccctaagacatgagctgtgccatgccctgagagaagagagcaggactcaagcacagagctgcaggcacagcaatggccctgcacaccccrtggaaccagcagtgtccacaacaagcatagcaaagccaaagtcatacctgaaaaacccaagtcsagcaggacagctcgtttgcggtccttcacactactgatctgctggaactggaggtccacaacaaggaagaagatgcatccaaagaaggcaataatgccaatggcgatgccatagctgcaggcactctcattctcgttgaagatgcagtgtagctcagggtctgtgccatccttgttcatgtagcactcattcacaatggagccaaacaccacaatggaaaagatctgcagaaggaaggagaaaacacaacttgcagctgcttacatttactctttttccaacagcaacaaatt

SEQ ID NO: 81872 - DNA, 599 bp, Chicken  19866894375875_1
  misc_feature (1)..(9): n is any nucleotide
nnnnnnnnnctgaaaagagcctggccccatccacttgacactcaccctttagatatttataagcattgataagaccctttctccaggctgaacagttccgggtctctcagcctttcctcataagggagatgctgcaggcctctataatcatctctgtagccttccatcaggctctctccagcagttccctctctttctttactggaggagcccagaactggacacagtgctccaggtgtggcctcaccacggcagagtagaggccacatttgacttcccagataactttgcagatgtagractckacacttgttgaatctcatcaggttcctccctgcccaactctccagcttgtccaggtctcccagaatgcacaggcttctggtgtgtcagccactcctcccagctttgtatcatcagcaaacttattgagggtgcagtccatccctttgtgcaggtcaccaatgaagatgttaaacaagaccagacccagtaccaacccctggggaacactgctagctacagrtctccaaccagaccgtgctgctgatcacaaccctctgagctctgcctgcagttgatgtgtacctgcctcagga

SEQ ID NO: 81873 - DNA, 599 bp, Chicken  19866894375875_2
  misc_feature (1)..(4): n is any nucleotide
nnnnctgaaaagagcctggccccatccacttgacactcaccctttagatatttataagcattgataagaccctttctccaggctgaacagttccgggtctctcagcctttcctcataagggagatgctgcaggcctctataatcatctctgtagccttccatcaggctctctccagcagttccctctctttctttactggaggagcccagaactggacacagtgctccaggtgtggcctcaccacggcagagtagaggccacatttgacttcccagataactttgcagatgtagractckacacttgttgaatctcatcaggttcctccctgcccaactctccagcttgtccaggtctcccagaatgcacaggcttctggtgtgtcagccactcctcccagctttgtatcatcagcaaacttattgagggtgcagtccatccctttgtgcaggtcaccaatgaagatgttaaacaagaccagacccagtaccaacccctggggaacactgctagctacagrtctccaaccagaccgtgctgctgatcacaaccctctgagctctgcctgcagttgatgtgtacctgcctcaggagagtg

SEQ ID NO: 81874 - DNA, 466 bp, Chicken  19866894375875_3
gtgctccaggtgtggcctcaccacggcagagtagaggccacatttgacttcccagataactttgcagatgtagractckacacttgttgaatctcatcaggttcctccctgcccaactctccagcttgtccaggtctcccagaatgcacaggcttctggtgtgtcagccactcctcccagctttgtatcatcagcaaacttattgagggtgcagtccatccctttgtgcaggtcaccaatgaagatgttaaacaagaccagacccagtaccaacccctggggaacactgctagctacagrtctccaaccagaccgtgctgctgatcacaaccctctgagctctgcctgcagttgatgtgtacctgcctcaggagagtgtttctccccatccttagcttgtgccatgcttagaaatgccatgggcactttttcttcagctctttgtccatagcttcacttccaaagc

SEQ ID NO: 81875 - DNA, 600 bp, Chicken  19866894375879_1
ataaacagatacctcagacaagctgctaaattgaagtgacaaatgatttccttgatgactctgatacagtgaatggtgtcagcctctctgcttactatctagccttctctttgctcctttaaacaataagactgtcatctttccttacggcccacaggaattgaaggagacctcatgaaacaagagaatctcttgaacttcactgtgtgcaactataaaatatacggaaagtataaaacctcttcttacctaagaaaaatcagcacagtaaagagaattaccaatttttctgttaaacayacttacctgacagaacatcagacaaatcaatttcatccgattgaacaccaatgctgctgttgtatacatttttacatgaggagccacttatttccaaatcaaagagaactggatcaaaaggtgaactgtataatccatatctacaaacagagtaagacaaatagcagtattcaaacaataagaattaacataaatttatttagagaaaaagggcaaatattgcatatagaatttgttatatttcaaaccattcttttccatcaactgatatatctcaaaaattatcatctgctactattt

SEQ ID NO: 81876 - DNA, 600 bp, Chicken  19866894375880_1
tttgtgcttgggcagatctccttttttgttctaaagctccaggggaaatcctggccacccaccaggctctgtacagccatccctactctctcaaaggagagtttcccatacccaagccccagaagagaaatgctaggaaaagctgagatgaagaaaacagggctggaatttgtcatgagtttttatggatttcattaacaaagccaaggcccagaaaggccagttacaggatcctccgcagaatgtgcagcttatttgaagcaaaggaagtaaaacatgagctggaaagtgttcctagawttgggcacatagaactgtatagctgggtagccacttgactctcttcttaatagagaattttttgattgtcaagtggtagctaaaaaaaatctaatggagttctctgtatttctgtactaattyggggagatttgacaaaatctcttaaggccatactttacaactgagtatatccttttctcagagtattgtttttgacagtaattttatatctctgtggcttccaagtctgcctctttgcctttagggcaatggcaatactgacttaaaaggaacagtaagggagcaagatgaaacttc

SEQ ID NO: 81877 - DNA, 600 bp, Chicken  19866894375880_2
agagaaatgctaggaaaagctgagatgaagaaaacagggctggaatttgtcatgagtttttatggatttcattaacaaagccaaggcccagaaaggccagttacaggatcctccgcagaatgtgcagcttatttgaagcaaaggaagtaaaacatgagctggaaagtgttcctagawttgggcacatagaactgtatagctgggtagccacttgactctcttcttaatagagaattttttgattgtcaagtggtagctaaaaaaaatctaatggagttctctgtatttctgtactaattyggggagatttgacaaaatctcttaaggccatactttacaactgagtatatccttttctcagagtattgtttttgacagtaattttatatctctgtggcttccaagtctgcctctttgcctttagggcaatggcaatactgacttaaaaggaacagtaagggagcaagatgaaacttcagtgctttttttttcttcttgtatgggtaatttacctgtttaaaaagtcatttcaagttgatcacaatgatcagactttttcagataaagaatttaaataaattgtttcagtgtcccttaagg

SEQ ID NO: 81878 - DNA, 600 bp, Chicken  19866894375883_1
gacaccctcaaagacttctgatacctacagatttcattattcaaaagtgctatcagaccaataagagccttccagcattagagccctttacagtgccatggcttagcttgctctggggatacattatacttgctgttattccaggttgcactgttttctagcattttgttcttaattgacccagatacaggcagccttaatgcatgcaaatgtgagctgctatattcaaaaagaaatttttgcccagaaatattcaggacagaaaagagttgttgtatgcaatgcttccactaccccccrctgcttaatctcttccatggtttccagctatattctctccccaaaattacaatctacttttctgtgaagagaaatgtgcagccttrctgcaaaaaatttcaaccacctgtattcagccttgggattgtacctagagactgatcctagaccagagatatgaatactgttctcacatggatctccccatgaaaggaaggtgcaaatcaggcagcaaaattatgcgtgtcttttggtctgcaacactgtaaggatcttttaattagttgcagatacttagagaatgcaacataactatgtgtc

SEQ ID NO: 81879 - DNA, 600 bp, Chicken  19866894375883_2
tttacagtgccatggcttagcttgctctggggatacattatacttgctgttattccaggttgcactgttttctagcattttgttcttaattgacccagatacaggcagccttaatgcatgcaaatgtgagctgctatattcaaaaagaaatttttgcccagaaatattcaggacagaaaagagttgttgtatgcaatgcttccactaccccccrctgcttaatctcttccatggtttccagctatattctctccccaaaattacaatctacttttctgtgaagagaaatgtgcagccttrctgcaaaaaatttcaaccacctgtattcagccttgggattgtacctagagactgatcctagaccagagatatgaatactgttctcacatggatctccccatgaaaggaaggtgcaaatcaggcagcaaaattatgcgtgtcttttggtctgcaacactgtaaggatcttttaattagttgcagatacttagagaatgcaacataactatgtgtcataagaacttgcatggaaaaaaaaccaaaaagaaaatgtgtgtgaagaagtctgaggaataaatgtaaacattcaggtgtactgag

SEQ ID NO: 81880 - DNA, 600 bp, Chicken  19866894375891_1
tcatacaaagctcatgggaacgggtatttcggagccaacccatcatacctccttctgcaaggacaaacactcccctcttttccatgcttatctccaaaggtaagagggaacagtcagtgaaagcagtgtactgcctcgtctccctgtgtgtgaagtacgcctggagaggagccgccagagtgtgccccacctccacgtctgcgcgcagcggcatcagttccagctttgccagaggttccacaaacacctgcatgagcacagagccaggaagcagtgtgagagcagaaagccaacagcacraggtcagagcgcacagcgtgtcagcctggctgcgagcaggaagcagcccaaatcaaaatatgggaaacagattgatggtatcttcgcttacaaacgctctaatggttcgcacatgatgctaaacaggatataaagtaaattcagcagctaaatagtastgcatgaagaagcacctgacgctcaagatataagaaatactaagatggaagtccagtaacgtgaactggaaacagtcccactgacagaaagctgcaataaaagcctccagaaaaccaagcccagctcttctgaacaacaaac

SEQ ID NO: 81881 - DNA, 600 bp, Chicken  19866894375891_2
gcctggagaggagccgccagagtgtgccccacctccacgtctgcgcgcagcggcatcagttccagctttgccagaggttccacaaacacctgcatgagcacagagccaggaagcagtgtgagagcagaaagccaacagcacraggtcagagcgcacagcgtgtcagcctggctgcgagcaggaagcagcccaaatcaaaatatgggaaacagattgatggtatcttcgcttacaaacgctctaatggttcgcacatgatgctaaacaggatataaagtaaattcagcagctaaatagtastgcatgaagaagcacctgacgctcaagatataagaaatactaagatggaagtccagtaacgtgaactggaaacagtcccactgacagaaagctgcaataaaagcctccagaaaaccaagcccagctcttctgaacaacaaacacactttgaccttcaagcagaagctttcagtttctaagcctggacaagacggcatttcagaacaataaactgcccagaaaaaaataataaaagaaagactttcctgtatttctgcgtaatgaaagggggttctgtgcatctctggcctgacttgtgca

SEQ ID NO: 81882 - DNA, 599 bp, Chicken  19866894375893_1
  misc_feature (1)..(19): n is any nucleotide
nnnnnnnnnnnnnnnnnnnaataaaaatttagagtatatttgcagggtgctatgagtgttttaagtaaaagaaagattttatagggtgttaaaacaagaagaaaacagatactgagaagcactgatactgagatgtacctatagcaggcagatgtaagggctaataaacatgctcacatgtgacacatgccaaggcaaacctgggacctatcctgccaagtccctgggctgcactgaggctcgtccctgggactctattgaggctgagccctgcagcccctatccaggtgtgaagcacgwgccatttagtggagatctgaaaattgatgtcttttggataaagaatggagaataaaatagaaaggcaatgcactgttgcagggggatcaatcctgggctctaatggtgttgtcaggtcctggccatggtgcagatctcctgacttttgtcccagagctgcttattggtggactcatgttgtgaggtgttggcccgaggagatgttctgggtgcttggaatgttttggcttggggcagcaggaggactgtgtctatccttcttggtgctgagctgagcatgagtgatgagcaccattccc

SEQ ID NO: 81883 - DNA, 470 bp, Chicken  19866894375893_2
cttttggataaagaatggagaataaaatagaaaggcaatgcactgttgcagggggatcaatcctgggctctaatggtgttgtcaggtcctggccatggtgcagatctcctgacttttgtcccagagctgcttattggtggactcatgttgtgaggtgttggcccgaggagatgttctgggtgcttggaatgttttggcttggggcagcaggaggactgtgtctatccttcttggtgctgagctgagcatgagtgatgagcaccattccctttccttctgcatccaattcctcaattccarccggcagctccttgctctcctccatgcacaaaggcaagctgttttgggttttgtgctatattccctctgggtttgtccctcaccagaaataggtttattagcaaccatgaaatctaatgatactaattttccccatgattatggctgtaaagcagtagaaaacctaactt

SEQ ID NO: 81884 - DNA, 600 bp, Chicken  19866894375901_1
taagttttaaagacattttacagaacatagatttcaaactgtgctttggaaacctctggaaatccagtcccactacttttactaaaaattttaacttggttgtggtaaacaggaatgtctaatattatgctgtgacaaatggtatgtgaactgacagtgtacttggtcaaggttttgcctcttctttcatgctgccagcacttttctgtttgcctgagttgaaaatatcttagccctcattagatggcatggtggagaacatgtttatacccagcctcactctgtctttccagtgctttyctttgtacttctcattttgctgatggatatagactagcttggaaaaaatggtccaagctgttcatatgtctgtacaaaaaaggtagatacctagcagatgacaccatttttgtatccctagtgcaggcagcataggggatttttctatcctcccattgatttggcttttatttagctccaacaacacagaaagttcccagttacagtctaaactactgcacttgtctttagacctcacatcgaacaatgaaatgtcacccacacatctacctgagattattataggcactgctgtgtcag

SEQ ID NO: 81885 - DNA, 599 bp, Chicken  19866894375911_1
  misc_feature (1)..(62): n is any nucleotide
nnnnnnnnnnnnnnnnnnnnnnnnnnnnnnnnnnnnnnnnnnnnnnnnnnnnnnnnnnnnnnctgcccgtgcaaaagccacacgtggttccagtgatgctccccctgtctgtaccacggcagcagagcagtcatctcaccactgctcctcacctttcccccaaaacaggggaataggaccagctgcccctccgcagcctgcagcaccaggcacccacctagggacatctcattggcttcaggcagctcttgcccacctgctcttgaccaccaggcccaacgtgcaacagcacaatttaayctagccctgctcattagggctgctatttaaagtctctccctatttttagcttatgttgctttatatattcatacatcctccagccatgagctcccaagagctgccaagctatccatgaccagtccgagtgctgctatttaacaagaagataataaaacagccaraaccttggaaatgaagcccagagagcttgtgattccctaccaaatccttacagacctcagggtgtgttactctccgtcagcagtactaattgcaatagctggaaatgcccaacagtaatgaataaaatactttga

SEQ ID NO: 81886 - DNA, 600 bp, Chicken  19866894375911_2
acaggggaataggaccagctgcccctccgcagcctgcagcaccaggcacccacctagggacatctcattggcttcaggcagctcttgcccacctgctcttgaccaccaggcccaacgtgcaacagcacaatttaayctagccctgctcattagggctgctatttaaagtctctccctatttttagcttatgttgctttatatattcatacatcctccagccatgagctcccaagagctgccaagctatccatgaccagtccgagtgctgctatttaacaagaagataataaaacagccaraaccttggaaatgaagcccagagagcttgtgattccctaccaaatccttacagacctcagggtgtgttactctccgtcagcagtactaattgcaatagctggaaatgcccaacagtaatgaataaaatactttgagaccactgaaagccaacagttttgcagagttcccaaactgattaggtttgtttgaaaacaaatctctcatttagaatcattatttaagcactttgtttttcaatccatcaccgaagaacacctgctgagccatttatacctcgtgaatgaagagcaaaaacccca

SEQ ID NO: 81887 - DNA, 600 bp, Chicken  19866894375913_1
tcaactctgcaactgctctagccataagcttcaatcatcttaactccagcatgggaagatgcaacacaccgtagacaggttttcaagatcacagaccagtgccagtatcagcctttcttagaccaaataaaccaggagacacaacttctgcagtagttcacaaactacaattataaatccccactccaatcttttcacaggtcttttgaagttaaaaacaagagtggtttcaaagaatcaagtatcagataaattgctctaaagtcagtaagcaaagtgatccatttgcactaaaaaagsatttttccctttcattcaggctccagtttctcaacaagcaagaagagctcattccacacccagatgacgatacctgtgggtctgcgcacaaggatttctgcccagccctgtgtcagcagtgggacatatgcagctaagttcgctttttctttctgcagaggtgtctgtggagcaggattagtcttctcygaccgaggtgcaggagcaggaggactctgtgtcccttgkgaagccgagccaccagggaagtgggaggctgtgctgtctaaggcaccaacacgtaaggcatgaccacctaac

SEQ ID NO: 81888 - DNA, 514 bp, Chicken  19866894375913_2
tcttttcacaggtcttttgaagttaaaaacaagagtggtttcaaagaatcaagtatcagataaattgctctaaagtcagtaagcaaagtgatccatttgcactaaaaaagsatttttccctttcattcaggctccagtttctcaacaagcaagaagagctcattccacacccagatgacgatacctgtgggtctgcgcacaaggatttctgcccagccctgtgtcagcagtgggacatatgcagctaagttcgctttttctttctgcagaggtgtctgtggagcaggattagtcttctcygaccgaggtgcaggagcaggaggactctgtgtcccttgkgaagccgagccaccagggaagtgggaggctgtgctgtctaaggcaccaacacgtaaggcatgaccacctaacaagacaggcacagaagggagagccatgattagctgatactaaaaatatttacagtaattatttactaacatagtaaatactaaaaatatcagagaaacagtaa

SEQ ID NO: 81889 - DNA, 475 bp, Chicken  19866894375913_3
ttcaaagaatcaagtatcagataaattgctctaaagtcagtaagcaaagtgatccatttgcactaaaaaagsatttttccctttcattcaggctccagtttctcaacaagcaagaagagctcattccacacccagatgacgatacctgtgggtctgcgcacaaggatttctgcccagccctgtgtcagcagtgggacatatgcagctaagttcgctttttctttctgcagaggtgtctgtggagcaggattagtcttctcygaccgaggtgcaggagcaggaggactctgtgtcccttgkgaagccgagccaccagggaagtgggaggctgtgctgtctaaggcaccaacacgtaaggcatgaccacctaacaagacaggcacagaagggagagccatgattagctgatactaaaaatatttacagtaattatttactaacatagtaaatactaaaaatatcagagaaacagtaa

SEQ ID NO: 81890 - DNA, 600 bp, Chicken  19866894375924_1
cattatttgaactctcatcttaaaagaaaaatatccaaacatttgtattactttcattacactgtatgaagcttggcgcttatcccagtttcacctattgagactgctgtatggctggaagttctgaggagcagctgtctcacaatccaacttccaactcccagtttgaactccacaaggaagcaggatagaacttctggctaatgacaagtatgatgaattttcaaacactgttactatctgctatttttcccccaatatcaacaatttctagaaaaagtatatcgctgagaaatgcakgcagttttacaagaaactgttttacagagtgttttatttgaattaatttctgctctctccctctacttgaggaaatcagtaactcacgagatttgatacattcagatctactagtgaaccactgctaatgaagattttcatcttactctaaagatgagcacaaaaatacttgtgactccagccttaacaatcacacgaatgcagccacttgttttaaatccctgagatacactttgcgtctagtttctgcttcttcccttgtcagatcagattccaataagccattcatttcattcctta

SEQ ID NO: 81891 - DNA, 599 bp, Chicken  19866894375930_1
  misc_feature (1)..(177): n is any nucleotide
nnnnnnnnnnnnnnnnnnnnnnnnnnnnnnnnnnnnnnnnnnnnnnnnnnnnnnnnnnnnnnnnnnnnnnnnnnnnnnnnnnnnnnnnnnnnnnnnnnnnnnnnnnnnnnnnnnnnnnnnnnnnnnnnnnnnnnnnnnnnnnnnnnnnnnnnnnnnnnnnnnnnnnnnnnnnnnnnncagggttttttttgttgttgttgttgttctgaagtaggagagccacacacaaacatgtcttccatcccagatactaacaaatattgagtaacaataatccctaattatcaagaagttatagcrtgatgcctgcagtggctgtgatggtttgggacaggaaggacttttggagcccagatgagcgttccgtggctgtaccagtgcgctcccatttaattcatgctgcaccytctgtctatgaaaacctgcctcctcctccttggacgcctttgtaccacagcatcccacatttrattggcstgccaactgcttgctgttcccagagtccagaaaacaacggctttgtaggtcgcatttgatcttcaggccatctggctctccaggcatgggcaggagaacagtaccactgagtgtagtatagc

SEQ ID NO: 81892 - DNA, 599 bp, Chicken  19866894375930_2
  misc_feature (1)..(70): n is any nucleotide
nnnnnnnnnnnnnnnnnnnnnnnnnnnnnnnnnnnnnnnnnnnnnnnnnnnnnnnnnnnnnnnnnnnnnncagggttttttttgttgttgttgttgttctgaagtaggagagccacacacaaacatgtcttccatcccagatactaacaaatattgagtaacaataatccctaattatcaagaagttatagcrtgatgcctgcagtggctgtgatggtttgggacaggaaggacttttggagcccagatgagcgttccgtggctgtaccagtgcgctcccatttaattcatgctgcaccytctgtctatgaaaacctgcctcctcctccttggacgcctttgtaccacagcatcccacatttrattggcstgccaactgcttgctgttcccagagtccagaaaacaacggctttgtaggtcgcatttgatcttcaggccatctggctctccaggcatgggcaggagaacagtaccactgagtgtagtatagcgtgtttrttttttttccacttgggctctagatgtaagtcatcctttgtcatttggtctaacaaatgatacctacgttttccctgctaatggttcctaatgtattaat

SEQ ID NO: 81893 - DNA, 599 bp, Chicken  19866894375930_3
  misc_feature (1)..(7): n is any nucleotide
nnnnnnncagggttttttttgttgttgttgttgttctgaagtaggagagccacacacaaacatgtcttccatcccagatactaacaaatattgagtaacaataatccctaattatcaagaagttatagcrtgatgcctgcagtggctgtgatggtttgggacaggaaggacttttggagcccagatgagcgttccgtggctgtaccagtgcgctcccatttaattcatgctgcaccytctgtctatgaaaacctgcctcctcctccttggacgcctttgtaccacagcatcccacatttrattggcstgccaactgcttgctgttcccagagtccagaaaacaacggctttgtaggtcgcatttgatcttcaggccatctggctctccaggcatgggcaggagaacagtaccactgagtgtagtatagcgtgtttrttttttttccacttgggctctagatgtaagtcatcctttgtcatttggtctaacaaatgatacctacgttttccctgctaatggttcctaatgtattaatacgagttttgttgcaacttgcatatcagaaagactttttgttttgttttgtttttaaagtatg

SEQ ID NO: 81894 - DNA, 600 bp, Chicken  19866894375930_4
cagggttttttttgttgttgttgttgttctgaagtaggagagccacacacaaacatgtcttccatcccagatactaacaaatattgagtaacaataatccctaattatcaagaagttatagcrtgatgcctgcagtggctgtgatggtttgggacaggaaggacttttggagcccagatgagcgttccgtggctgtaccagtgcgctcccatttaattcatgctgcaccytctgtctatgaaaacctgcctcctcctccttggacgcctttgtaccacagcatcccacatttrattggcstgccaactgcttgctgttcccagagtccagaaaacaacggctttgtaggtcgcatttgatcttcaggccatctggctctccaggcatgggcaggagaacagtaccactgagtgtagtatagcgtgtttrttttttttccacttgggctctagatgtaagtcatcctttgtcatttggtctaacaaatgatacctacgttttccctgctaatggttcctaatgtattaatacgagttttgttgcaacttgcatatcagaaagactttttgttttgttttgtttttaaagtatgcctacaaa

SEQ ID NO: 81895 - DNA, 600 bp, Chicken  19866894375930_5
ctgcagtggctgtgatggtttgggacaggaaggacttttggagcccagatgagcgttccgtggctgtaccagtgcgctcccatttaattcatgctgcaccytctgtctatgaaaacctgcctcctcctccttggacgcctttgtaccacagcatcccacatttrattggcstgccaactgcttgctgttcccagagtccagaaaacaacggctttgtaggtcgcatttgatcttcaggccatctggctctccaggcatgggcaggagaacagtaccactgagtgtagtatagcgtgtttrttttttttccacttgggctctagatgtaagtcatcctttgtcatttggtctaacaaatgatacctacgttttccctgctaatggttcctaatgtattaatacgagttttgttgcaacttgcatatcagaaagactttttgttttgttttgtttttaaagtatgcctacaaayacatctattttataacaaacacagtattataacaaatattataacaaacacagctatcttaaccatctcatactgagatttatcaaacagagcagcatatttgaagtaagaccttgtttactaagttt

SEQ ID NO: 81896 - DNA, 584 bp, Chicken  19866894375930_6
gccaactgcttgctgttcccagagtccagaaaacaacggctttgtaggtcgcatttgatcttcaggccatctggctctccaggcatgggcaggagaacagtaccactgagtgtagtatagcgtgtttrttttttttccacttgggctctagatgtaagtcatcctttgtcatttggtctaacaaatgatacctacgttttccctgctaatggttcctaatgtattaatacgagttttgttgcaacttgcatatcagaaagactttttgttttgttttgtttttaaagtatgcctacaaayacatctattttataacaaacacagtattataacaaatattataacaaacacagctatcttaaccatctcatactgagatttatcaaacagagcagcatatttgaagtaagaccttgtttactaagttttgaggcagatggaatttgatggccagattgtaactggttataaaatgtgtttataatgaaaatgttgataaactattatttgttaccaaatgaatctttgtgactgctttatgagagaaatggcatataacagaacagaaacacattcaaactttt

SEQ ID NO: 81897 - DNA, 600 bp, Chicken  19866894375945_1
ctttcacttaaatacccgtgcaagttttggcatgcttgcttctcttttattacaactaaaattttgagttttaatacacaccgtggagttattatatttatggcattattatatttatatgcttgaattctacatatatatggaataaagcattacaaatcagcaggtgttttaaatgatacagctggaaaaaaaagagacatggctgaggtgtttatttcacagcattgtcttttctttggtgattttggtattatcatactaccatgctctaaaaagtaatagtataaaatacttttwaaaaattatttaataaactgtgctgttcccagatactactgtaagggttcagggtttctgtcttaaaatgaaaaatcatagtgtcttatttccaggctgtgttacacttgtacttaggctgcaaaaaagcagcgcatgtggaattttgcagctggcacctgcagttcagcaagcagcctggcagacaattaatgtttttatggttttccacaacttattttgaagttcacatctttctgttggcataaattagagttgtgtgaggcttcagagcatacatgrtttgaatattttgatgcg

SEQ ID NO: 81898 - DNA, 600 bp, Chicken  19866894375945_2
tagtataaaatacttttwaaaaattatttaataaactgtgctgttcccagatactactgtaagggttcagggtttctgtcttaaaatgaaaaatcatagtgtcttatttccaggctgtgttacacttgtacttaggctgcaaaaaagcagcgcatgtggaattttgcagctggcacctgcagttcagcaagcagcctggcagacaattaatgtttttatggttttccacaacttattttgaagttcacatctttctgttggcataaattagagttgtgtgaggcttcagagcatacatgrtttgaatattttgatgcgatatagcatgatcccaccattggagtaggacatttctgtgcaggtgcatcctgacagcacagtcggggtgggttagtatacacagttctggtgaatgttcatgggctaaactgtaaaatcatgatactagaagtgagagactgaatgaggtagttttgtgtcaaactgggttaaagttcaatggaaatgcaaacccataacttcatgtaatgtctaataccactttattaggttgttatgaactgttgtaagcaaatatgatagatcaaagagataaattag

SEQ ID NO: 81899 - DNA, 600 bp, Chicken  19866894375947_1
gtctcttcgactgatctacaaccttgcagttggttctgttacaagtgctgttattttaaatgtaaggattttcctttatacatgctcacttcagacagccactagagcctttcactgcaatcatgagcagcgatgcacagaaatgcaatgaatggacctgagttgacagtccagtttggtaattcatgaatttaaggcagtctgtttttaatctaatttactccaactattttctaatccaaggtatctttcttctattgtaaatagctgctacagcaatgccagtttttagcatttctwtattccaacaaaagaattactgtagaccacaattgcattgtgtaaacagcaatacttatggtagttcatttgcctgaatacattagagtccatgaaaaaagaactatttaaaaatgtgagtctctttatttcctgccttttggttgtcattgtttgctcagttatacagtgttttgttgacaccaaatattttaataatttctttccaagtccttgtgcctatgcctttgagatgctgctatagtaattaaactgtcttttagttgaaatgcttgcgaagcgtccagttctgtgcctggc

SEQ ID NO: 81900 - DNA, 600 bp, Chicken  19866894375948_1
agttttatttaaatgtcacacacgaggtgggggacaagtctctagtttcacatgatttattcaatgaaaaataaaaatgccaaagagcaacttctttctgggcacttaaacaaagaaagtcttttatgtctccagtgaaccgtgaaccttatcatcatgaaatgttcctttaggtaattcattgtgatgtgaccgaccacatatatcagtcagttcaatcagctgcaaaaatggaataatacacgtatacacaagatgttttttccttctcctcttggaataaagagattcttgtaattktattgtaccctgttttgagctggtgatccaacatgagctactttggcttgggagctttrgcttgtgtctcagcaaaggccattctccatgatgctgatgccaacaggcttcatgttgaggaatgctgaaaggactctcgggagcaaacttgaaggaaattttacattgaattgacagtggacattttatctttcggggcagatctcacacttaacgcccaacttctgccaattccagaggaagttcaaccttaaaggaagctccagttccagtcacgtaagtatcagagcagtgtgtgct

SEQ ID NO: 81901 - DNA, 600 bp, Chicken  19866894375948_2
ttcaatgaaaaataaaaatgccaaagagcaacttctttctgggcacttaaacaaagaaagtcttttatgtctccagtgaaccgtgaaccttatcatcatgaaatgttcctttaggtaattcattgtgatgtgaccgaccacatatatcagtcagttcaatcagctgcaaaaatggaataatacacgtatacacaagatgttttttccttctcctcttggaataaagagattcttgtaattktattgtaccctgttttgagctggtgatccaacatgagctactttggcttgggagctttrgcttgtgtctcagcaaaggccattctccatgatgctgatgccaacaggcttcatgttgaggaatgctgaaaggactctcgggagcaaacttgaaggaaattttacattgaattgacagtggacattttatctttcggggcagatctcacacttaacgcccaacttctgccaattccagaggaagttcaaccttaaaggaagctccagttccagtcacgtaagtatcagagcagtgtgtgctcaggatgtggccattaccactgtcacagttgcactgtgcagcatgtacaattcatgtca

SEQ ID NO: 81902 - DNA, 600 bp, Chicken  19866894375950_1
gaaaacacaggcatctatccaagatgtcccagagttatctgagcacactatctggtgaggagatgcagtttgattatccacacatagtgccatctgagctgcccaggcagcccccagctgctgctgctgaagggcacaggtctcctgtgtcctgccattcccacgtagatatccctgataccctagggcatcccacatagcactaggcacctataccaagctgctgaattaagccctagatcctcattacctgcactatgaccttggatatatgcatttggtgacttaatctggaatagrgtcccacgcctttagcctacagacagattgctccagcctgtagctggtgaaggaagtaggtagcctgagtgatcacggagattygggtggaggccagttgtttcagtatgtggctataagcacaaccagagccagatatcagctatctcaacagtcacctaattcttttctctcaaaagttttagcaagttttttgctcaaaccagactcttaaatgcacatgctatatgtgcatgtcagaataaatgaccccttaaagcactgttacaaactacagaggcaatttataagatgattcgc

SEQ ID NO: 81903 - DNA, 600 bp, Chicken  19866894375950_2
tagtgccatctgagctgcccaggcagcccccagctgctgctgctgaagggcacaggtctcctgtgtcctgccattcccacgtagatatccctgataccctagggcatcccacatagcactaggcacctataccaagctgctgaattaagccctagatcctcattacctgcactatgaccttggatatatgcatttggtgacttaatctggaatagrgtcccacgcctttagcctacagacagattgctccagcctgtagctggtgaaggaagtaggtagcctgagtgatcacggagattygggtggaggccagttgtttcagtatgtggctataagcacaaccagagccagatatcagctatctcaacagtcacctaattcttttctctcaaaagttttagcaagttttttgctcaaaccagactcttaaatgcacatgctatatgtgcatgtcagaataaatgaccccttaaagcactgttacaaactacagaggcaatttataagatgattcgcaatccataattaagcaatgcacttttgctccaaagctgaaaatcaaagggagatcaaaggcagttgtttacaaagcagaagaaa

SEQ ID NO: 81904 - DNA, 600 bp, Chicken  19866894375950_3
gaaatgtgggaatcagtccccctctacaaaaataaatctccacagtaatctttacatactaccacaaaaaatgttgaaggggacaattggtaagaggtcagatcagaagcttacattggcagatcagacagccatggagagggacccatgtgtgaagatttccaactttgcatggaaagcaagagcttcagtttctttctgaaagctcagctccctgtttccaaacaggtttctcttgcagcatgaacaccatattcccagaagcacctgaaaacttcactggttcattctcaggttctkctgcagtataaataattgggtgtgaagcaatcttcagaaacaagctgcccagagtaacacagaaggaagaacagcatttagggcccaataaagcttggttagtgaactgataagccttgctagaggtgcctttcctcattatagattctgggagggaaaactgtctcaaaggtacatacctgtgtggctttccacccgtgatctgctggttttggcagagctggcagctccttctacccacccatgtaccacagcccacctccctaycatggcagcaataaaacagtttgtgtggctaag

SEQ ID NO: 81905 - DNA, 600 bp, Chicken  19866894375950_4
ctgaaaacttcactggttcattctcaggttctkctgcagtataaataattgggtgtgaagcaatcttcagaaacaagctgcccagagtaacacagaaggaagaacagcatttagggcccaataaagcttggttagtgaactgataagccttgctagaggtgcctttcctcattatagattctgggagggaaaactgtctcaaaggtacatacctgtgtggctttccacccgtgatctgctggttttggcagagctggcagctccttctacccacccatgtaccacagcccacctccctaycatggcagcaataaaacagtttgtgtggctaaggctataatctagatcactgaaatgacttgagataaaaatacccttgccccagaaagtgaattcagtttccagcacagtcctgaaaacagctgtatcagtagagctgcaagtggtgagtagaagcaggattcttttaagctgcctttacttaacagggagaaaatcacagaatagccaacactgtagtaacagaagacatctttgggatctgtccaactccaaacctgttctagtttgtaaaaatacaaatatattaattgtgtcagg

SEQ ID NO: 81906 - DNA, 600 bp, Chicken  19866894375953_1
aatctcccctgaatcaaagcactggtgccagcagtgaccctgtgtagggttggtcacctatgactcaggggcaggagccagcctttgcagaaaggagcttgctttttggctcccacagacctgctgcaagccaccgtgagcggaaggagggaggagaggttgagaaagctctccgtccgtggaagtaacatctgcctgcagctccaggaaactgtttgggctgtaaaactaaccttaaccagcccacgcagaaggcttccctacttccaaaattgtttctgtcctcaggcacaagctgcyggtgcctgtctctctgggagcagggactgcctccctgtgtcactctgggtaggtggctgtgagtcatgcctctgtgtgaggcaagctcagaggctggttttgtgcctcagtattcattcacctgccccaagtgctttggcttaatgcagcttacctctgaggcgtaaggggctgggaagccccagatctcctgcagcttcttttttgggttgtgttgaagagctggctctcagctgtcatcagatccagctgttgtgatggccttggagcccctccccagccctctatcccaatgctgat

SEQ ID NO: 81907 - DNA, 444 bp, Chicken  19866894375953_2
tgaggcaagctcagaggctggttttgtgcctcagtattcattcacctgccccaagtgctttggcttaatgcagcttacctctgaggcgtaaggggctgggaagccccagatctcctgcagcttcttttttgggttgtgttgaagagctggctctcagctgtcatcagatccagctgttgtgatggccttggagcccctccccagccctctatcccaatgctgatattggtccttctaaatggagaagggagtggaatagggatttccactgcaccgctcatttttaggtccacgataaargctcttctgtcctttttccatttcctattctctgtgcattgctttatgtaaccagccccacagaggctttcagatcaagccctctttctcagactggtgtgcctatagtaatacctgctcaaggagaggcaagagcaagccaag

SEQ ID NO: 81908 - DNA, 600 bp, Chicken  19866894375954_1
tctttttgtcttctcgagagaaccatctttatggggagattcagccttccttcacgtggagctctcagtctgctccgctattctgtcgttccctgggggcagaaggtggtggtgatgcttttagaaggagcagctcccactgagatgcagtccaggtgtcctcgtggcacagggactgagagcggctggggctgccaatggcactgcattcattactccttatggaaaacagaggtgtcctaccctgggttggtgatgctggcactgctgcatgagagctctgagcagcgctcgctctcyctttggcagcacttacgtgacaccttcaggttatttgctggtggaatctgaagatagggcgctgtttgggtgtgtgtctgcctgctgctgccagccgttctgtgcaggagttgagtcagaaggattcagagctgcgttcccattgcagctgtttgtcccgcaggggtggtgttgtcctcattaatttaaacaacgcgttgtgggttccattggagccagcattgtaagagattgctctcccctcctgctatcctgccttggcaccagagagctctttaacagcagctcattgggcagcac

SEQ ID NO: 81909 - DNA, 600 bp, Chicken  19866894375954_2
tgaagatagggcgctgtttgggtgtgtgtctgcctgctgctgccagccgttctgtgcaggagttgagtcagaaggattcagagctgcgttcccattgcagctgtttgtcccgcaggggtggtgttgtcctcattaatttaaacaacgcgttgtgggttccattggagccagcattgtaagagattgctctcccctcctgctatcctgccttggcaccagagagctctttaacagcagctcattgggcagcactgagcggccgctcgtttaggtgaaaatggaaatgatgatttcagcacwgagaggatttttgaggagtgcctgcatgacctgtgggtggaaaacccattcagaggtgggatttgctccctctcggtgtgggcacggggagagcttcctacaatagctattgcaacagaacggaacggttacccrcaattgctttgtgttctggaaagaagtctgggttggttctgtaactgctggtgctctgcccaggctgaggagctgttccaggatatcgttcaatacgaaggagtgttctcaacaatgccttattctgccctcagtaactccaacttcccctcatgtgagccctgg

SEQ ID NO: 81910 - DNA, 545 bp, Chicken  19866894375954_3
atttaaacaacgcgttgtgggttccattggagccagcattgtaagagattgctctcccctcctgctatcctgccttggcaccagagagctctttaacagcagctcattgggcagcactgagcggccgctcgtttaggtgaaaatggaaatgatgatttcagcacwgagaggatttttgaggagtgcctgcatgacctgtgggtggaaaacccattcagaggtgggatttgctccctctcggtgtgggcacggggagagcttcctacaatagctattgcaacagaacggaacggttacccrcaattgctttgtgttctggaaagaagtctgggttggttctgtaactgctggtgctctgcccaggctgaggagctgttccaggatatcgttcaatacgaaggagtgttctcaacaatgccttattctgccctcagtaactccaacttcccctcatgtgagccctggactgcggggtgccttcgggtgctgcgctgcgtgtgagggaagcccagttcacaaggagccagaagcagaagttggagggg

SEQ ID NO: 81911 - DNA, 600 bp, Chicken  19866894375955_1
tcatacagagccgtatcaaatgtcttccaccagtccaggtacactgaaagtgccatcatctcacaatctaccctcctggcagtgaaccaacccatcagcttcttttagcctgacagcggaccacacagatgaaatctcaccatgacctttcaagtcctatgcctgatgtacacctttcaggcagacatgtccaagttatgcgcccatcatgtgctaatgggcaagggatgtgaaaacaaggacccaaggcctcttcctgaatgcaggcaatcagcttctcaggcagaagggatctctcartccacctgcccagcaggtgccttctgctggattaccagagacaggggaatgaccatgagctgcattcctaaaggtacagagctcagccctgaattcaaggctgtcctattggctactacagaaggaatgacttccaaagccctttgccagccttgttcctgcggcaggtctgtcacctccagagactgaaataacctctgaaacaccatctagccacgtctgttccaaggtggtgagttctgcttgcacaagtgacctcacctcaacttatctatccctgcctcgtgacccattgctcag

SEQ ID NO: 81912 - DNA, 599 bp, Chicken  19866894375958_1
  misc_feature (1)..(41): n is any nucleotide
nnnnnnnnnnnnnnnnnnnnnnnnnnnnnnnnnnnnnnnnnaagtggcattcgctttcaggaaacagagggagacgggtggaaacagaggtgctcgcacgtgctttagtcacaatcggagtctggttttaaaataaccacgtttgtttgttaccaatagatttgggaaagaaattacccatgctctttgtttttgaaagggcagtgtgtgttcattgcccatgtggtagcgtttaacccgtattgtgtgagctgacaccgagtcacatttatgctctgacttgtttcagtgttcagactrttctttttctgagatctaggacaataagtgatgcatttcaagttgtgcaatgtaactgtcttgcgctgctttagctcattgttataataataccaggttcatgagtaagcaatttcttttcctcctgaaataatttccttaagaaacagttgagctctggatgttgaaatgatttgcgggaagagttgcraacaatagcctgtaacgggatgtgctgtaaagaactgtgggtgaggtgttactgcctttgctgtccgaaactggagctgtccttcgatagctgaagatgtacttgggaa

SEQ ID NO: 81913 - DNA, 600 bp, Chicken  19866894375958_2
ttttgaaagggcagtgtgtgttcattgcccatgtggtagcgtttaacccgtattgtgtgagctgacaccgagtcacatttatgctctgacttgtttcagtgttcagactrttctttttctgagatctaggacaataagtgatgcatttcaagttgtgcaatgtaactgtcttgcgctgctttagctcattgttataataataccaggttcatgagtaagcaatttcttttcctcctgaaataatttccttaagaaacagttgagctctggatgttgaaatgatttgcgggaagagttgcraacaatagcctgtaacgggatgtgctgtaaagaactgtgggtgaggtgttactgcctttgctgtccgaaactggagctgtccttcgatagctgaagatgtacttgggaaggcttttttttcttgttttcccttccctcttcccctccagccttcgcacagaggttgctgagttgcctgttttaatagatgccgtctggcttcacttggctttgaggcatcctcgctggggttggcagccacaagtatgataaagccatgaatcaggcagctgaagggttggcttaaaccttgccattatg

SEQ ID NO: 81914 - DNA, 600 bp, Chicken  19866894375965_1
gtcaatcaccatcaactttttagagaatctagagacagccttgtgctgatgaagtctgggccttgaatgaaatttccaaaagtgttccagtggcaagaagcttaatctatcaaaattcaatgggctatagacttctaaattgctttgagccagaacagttaaccttctgaatggatttgtagattttatcattggatactttcaaacattttcttcttctgtttttgctcatcacctttgtccatgcagacagagagatcacagacaagccattaagagcattttaataggagctgtgawgagaggtgcacagactataacctcagcttctgcaaagaagcattttcttgattccagccaccagtttgcacttagctgagagtacagctgcattaggtstgtaaaatgcccaaagtcaaggtaaattaattaaacatgcatagcctgcagattgttacagtgtttggtaaaaaactttgragcaaagggttttatactcctccaaggaaaataaaagtttgtgagataaaaggtatcttctcccaagctgattggcttagctctcccaagccccttctttatcttccaagtttggcgtta

SEQ ID NO: 81915 - DNA, 600 bp, Chicken  19866894375965_2
gcttaatctatcaaaattcaatgggctatagacttctaaattgctttgagccagaacagttaaccttctgaatggatttgtagattttatcattggatactttcaaacattttcttcttctgtttttgctcatcacctttgtccatgcagacagagagatcacagacaagccattaagagcattttaataggagctgtgawgagaggtgcacagactataacctcagcttctgcaaagaagcattttcttgattccagccaccagtttgcacttagctgagagtacagctgcattaggtstgtaaaatgcccaaagtcaaggtaaattaattaaacatgcatagcctgcagattgttacagtgtttggtaaaaaactttgragcaaagggttttatactcctccaaggaaaataaaagtttgtgagataaaaggtatcttctcccaagctgattggcttagctctcccaagccccttctttatcttccaagtttggcgttacttagagttgaactccttctcctcttcctctctcagtgcaaatgattgtttagcttcctagaccttccttcgttgcaaaagagcagaatacttctctaa

SEQ ID NO: 81916 - DNA, 600 bp, Chicken  19866894375965_3
agattttatcattggatactttcaaacattttcttcttctgtttttgctcatcacctttgtccatgcagacagagagatcacagacaagccattaagagcattttaataggagctgtgawgagaggtgcacagactataacctcagcttctgcaaagaagcattttcttgattccagccaccagtttgcacttagctgagagtacagctgcattaggtstgtaaaatgcccaaagtcaaggtaaattaattaaacatgcatagcctgcagattgttacagtgtttggtaaaaaactttgragcaaagggttttatactcctccaaggaaaataaaagtttgtgagataaaaggtatcttctcccaagctgattggcttagctctcccaagccccttctttatcttccaagtttggcgttacttagagttgaactccttctcctcttcctctctcagtgcaaatgattgtttagcttcctagaccttccttcgttgcaaaagagcagaatacttctctaaatgcagattatgtgactatggatacttggatatagtagagtgttttcaaatgacatttttccaaataatttcccatagcta

SEQ ID NO: 81917 - DNA, 600 bp, Chicken  19866894375972_1
gtttgcaataaattaataagggtgctgaggggactcaatgtttctacagctcttcaaattatatcctgagatacagagcctattgaaattactgacagtaacttcagtttaaggcaagtttccgactaagctcatcttagcagtgtggtgaaacagcaaatgccttctgttttagtggtcccttgtttttctgggatgtaccaggagaaagtcagtgatctataatggattgtgcggtctgtttcttgctagtgggatattaacagactgtgagcagtggggaaatgagtaattgtcagragtgatctgtgtccaggtttctgtcaaaattctctataatcagtgytttgtatccgttccgtgcttccaaatcggtgttctgagtgaaagttatttgtgtgtatgtcctatctgtgctaccgaagcagcgtgagccaccaagcaaattcatggcacctcctgaggacacgcagtttgttttaggaggcagtcatgcgtcattcaaaacctgtctctttgccatcgtactgttagagggcctgacaaggaagcaatacaaggactattgcagcggctaacagctccaaggaatactcaaag

SEQ ID NO: 81918 - DNA, 600 bp, Chicken  19866894375972_2
cagctcttcaaattatatcctgagatacagagcctattgaaattactgacagtaacttcagtttaaggcaagtttccgactaagctcatcttagcagtgtggtgaaacagcaaatgccttctgttttagtggtcccttgtttttctgggatgtaccaggagaaagtcagtgatctataatggattgtgcggtctgtttcttgctagtgggatattaacagactgtgagcagtggggaaatgagtaattgtcagragtgatctgtgtccaggtttctgtcaaaattctctataatcagtgytttgtatccgttccgtgcttccaaatcggtgttctgagtgaaagttatttgtgtgtatgtcctatctgtgctaccgaagcagcgtgagccaccaagcaaattcatggcacctcctgaggacacgcagtttgttttaggaggcagtcatgcgtcattcaaaacctgtctctttgccatcgtactgttagagggcctgacaaggaagcaatacaaggactattgcagcggctaacagctccaaggaatactcaaagtggtgttgatgtttggctgctccctctgaatatygggtttgaccaa

SEQ ID NO: 81919 - DNA, 600 bp, Chicken  19866894375972_3
tataatcagtgytttgtatccgttccgtgcttccaaatcggtgttctgagtgaaagttatttgtgtgtatgtcctatctgtgctaccgaagcagcgtgagccaccaagcaaattcatggcacctcctgaggacacgcagtttgttttaggaggcagtcatgcgtcattcaaaacctgtctctttgccatcgtactgttagagggcctgacaaggaagcaatacaaggactattgcagcggctaacagctccaaggaatactcaaagtggtgttgatgtttggctgctccctctgaatatygggtttgaccaaaagcagtgttagcaaaaactgctgctcaggttgctatctctcctttaaaacttgaggcagaaagcttaaccagttgtcggcagagatcccatgacagttttgcaagagtggcatacagcctggggttacgtaaaataattagctcaggtaattacattgtgatcacctacattcccctgcagtttcacttggatgtgatgaagttttgcatatcctgccctaaattgttgagtgtttgctatgtgtggaaaagttttcatgctgttctagtgatgctttaaatgtttt

SEQ ID NO: 81920 - DNA, 600 bp, Chicken  19866894375980_1
agacactcattattccatgtaggttaacatgtcttgtttattggcttaagtttaaatagaatatgaatatttgtaattttaaagaattaatctgactgggaaaaaaaatgaatctgaagaggtaatcaagcaatcttaattaacactgcttccagataagtcaaattttaaaacgtgacaagaactccatgtatatccttgcagtgttgcaactctatgttagagcaactcagaagtatcatccttaacatgagatttccaccggaagacagataaggcaaatcactacaaaagataaayttatgccagattgaactgggaaattgagggtcaaggactgcactgygggacatgaagatacagtctttaaaaggctcacctcaactcccttaaaaaagaaagtgcttaaaaaacagtcttgaagtaacttaactggatacagtgctgagcaagctgctctagctgacattgcttgcatcagcagggttggactagatgatcttaagtcctttccaacctaaatgactctataattaaaattggaattatcagttggaattatttcaaatagaattgaaattgatttaaaagactggaaaa

SEQ ID NO: 81921 - DNA, 600 bp, Chicken  19866894375980_2
taagtttaaatagaatatgaatatttgtaattttaaagaattaatctgactgggaaaaaaaatgaatctgaagaggtaatcaagcaatcttaattaacactgcttccagataagtcaaattttaaaacgtgacaagaactccatgtatatccttgcagtgttgcaactctatgttagagcaactcagaagtatcatccttaacatgagatttccaccggaagacagataaggcaaatcactacaaaagataaayttatgccagattgaactgggaaattgagggtcaaggactgcactgygggacatgaagatacagtctttaaaaggctcacctcaactcccttaaaaaagaaagtgcttaaaaaacagtcttgaagtaacttaactggatacagtgctgagcaagctgctctagctgacattgcttgcatcagcagggttggactagatgatcttaagtcctttccaacctaaatgactctataattaaaattggaattatcagttggaattatttcaaatagaattgaaattgatttaaaagactggaaaaatcactcctttttgccaaggatgaaaaagtcatttgtggaagtgag

SEQ ID NO: 81922 - DNA, 600 bp, Chicken  19866894375985_1
tgaaaagaaacaaaatctcttctgagtgaacaaatctctggttctctgacgagcttaagaggtaccaactttctcatttcccagatttatgcagggtcataaatctgcctgctgagaagtggcttagcagagaggccactgctatggcactgctgtagcttcctaagttgacattccccctcatcagctggagtcatctttacaacaggtgtacagagcttgtgcacttcatggcaactttctaaacccttccaccaaaaacttcacctccaagccaacctagagattacaataacttawggtcagctccacaaagcatgtaaaattcacctcagctccttcaccattgtattctaattttaagcccctttatccctttttcctcagacctgcatttgtgggttttgcaagtatattcttctgtttctttttgcatttgggagtgatcatttcagtctctagccaagtgttttaaatatgtgtacaataccatcaacaaatgagtggcgtgataattctctcttgctaaagaaacactatatatacatattataacactattgtgtttaggatgtttggatttaccttggtccagatttt

SEQ ID NO: 81923 - DNA, 599 bp, Chicken  19866894375988_1
  misc_feature (1)..(149): n is any nucleotide
nnnnnnnnnnnnnnnnnnnnnnnnnnnnnnnnnnnnnnnnnnnnnnnnnnnnnnnnnnnnnnnnnnnnnnnnnnnnnnnnnnnnnnnnnnnnnnnnnnnnnnnnnnnnnnnnnnnnnnnnnnnnnnnnnnnnnnnnnnnnnnnnnnnnnttattatgaaaatatttgttacaacaaactttgtcaattataaaacatccagaggaatggtgcacgttgcacagcctggagggtctggaagcttcagcaaacaaaaaacacacatcagcctctcagttggacacttctcccagcccagagmagccaacaggtcctgagcacacagcacttccaggagagtcactctgtacatgctgggtgtgatcacgagggaaaggttcccaaccattgagcagatgttctccrgagcaagagaccctgtcgttctctgtaacagtgacatcagttttctgcagaaaggagcaccctgacaaagagcagtgcccttaagggacactgttggctgtgtggggatctcttaaccaagcaagtgagaggagagtttcctggatgtacgttctttgrcacttkgcccttttgcccacatcttgcctcctccaa

SEQ ID NO: 81924 - DNA, 599 bp, Chicken  19866894375988_2
  misc_feature (1)..(45): n is any nucleotide
nnnnnnnnnnnnnnnnnnnnnnnnnnnnnnnnnnnnnnnnnnnnnttattatgaaaatatttgttacaacaaactttgtcaattataaaacatccagaggaatggtgcacgttgcacagcctggagggtctggaagcttcagcaaacaaaaaacacacatcagcctctcagttggacacttctcccagcccagagmagccaacaggtcctgagcacacagcacttccaggagagtcactctgtacatgctgggtgtgatcacgagggaaaggttcccaaccattgagcagatgttctccrgagcaagagaccctgtcgttctctgtaacagtgacatcagttttctgcagaaaggagcaccctgacaaagagcagtgcccttaagggacactgttggctgtgtggggatctcttaaccaagcaagtgagaggagagtttcctggatgtacgttctttgrcacttkgcccttttgcccacatcttgcctcctccaactcctgccaagttcaaggcaaagtgtacgtctatcccactcccatcaacccttcatggtcctaaaaagtggtctgtgaaacgtgctttatccaccagccacagt

SEQ ID NO: 81925 - DNA, 600 bp, Chicken  19866894375988_3
tcagcctctcagttggacacttctcccagcccagagmagccaacaggtcctgagcacacagcacttccaggagagtcactctgtacatgctgggtgtgatcacgagggaaaggttcccaaccattgagcagatgttctccrgagcaagagaccctgtcgttctctgtaacagtgacatcagttttctgcagaaaggagcaccctgacaaagagcagtgcccttaagggacactgttggctgtgtggggatctcttaaccaagcaagtgagaggagagtttcctggatgtacgttctttgrcacttkgcccttttgcccacatcttgcctcctccaactcctgccaagttcaaggcaaagtgtacgtctatcccactcccatcaacccttcatggtcctaaaaagtggtctgtgaaacgtgctttatccaccagccacagtctcagagagggaagcactgctcctcagatctgcgcctttcctccacgactcataggctcctggcaaagtattggtcagcagcgaggctcctctacctgacagtgatgggattggtgttgctggcagagcccatacccagatggagcaaatcagtcagagt

SEQ ID NO: 81926 - DNA, 600 bp, Chicken  19866894375988_4
tctcagttggacacttctcccagcccagagmagccaacaggtcctgagcacacagcacttccaggagagtcactctgtacatgctgggtgtgatcacgagggaaaggttcccaaccattgagcagatgttctccrgagcaagagaccctgtcgttctctgtaacagtgacatcagttttctgcagaaaggagcaccctgacaaagagcagtgcccttaagggacactgttggctgtgtggggatctcttaaccaagcaagtgagaggagagtttcctggatgtacgttctttgrcacttkgcccttttgcccacatcttgcctcctccaactcctgccaagttcaaggcaaagtgtacgtctatcccactcccatcaacccttcatggtcctaaaaagtggtctgtgaaacgtgctttatccaccagccacagtctcagagagggaagcactgctcctcagatctgcgcctttcctccacgactcataggctcctggcaaagtattggtcagcagcgaggctcctctacctgacagtgatgggattggtgttgctggcagagcccatacccagatggagcaaatcagtcagagtcacttc

SEQ ID NO: 81927 - DNA, 600 bp, Chicken  19866894375995_1
cagtacctgcaagaagacatcaacttaccgaaggtaacgctagactgtctgctggttcaaagcttttcctgcagtgagctttgtatttgtaggcaggcataagagtagacctgggaatgctgaccctgcaaccacacaaggagagtaattgcccacatgctccgcaaggcaaagtaaatttacatgccttttccactcataattcaagcatctaatcccaaaaatgaacaaaggcatgtagttcattagacacttaaaaaagcacattctgattctggaccaaattcagatacaaaaaamatttctcaccaccttcaaaactagctctgcttatggaaaagattagtaagggagattttaagcaagagatttctctctgccttgacagcagcaaccatctgtggaagcatttggactcttttctacccactgcttcctgagtgctgcatactgcaacgtaacaatcgtcatctacctgacataggctggctcttccagtgtctctgggggctgggtgggtacgtgggaccttacatacaggacaggcagaatcagaatccatagggacaggaaagaggcgctggttcaatcggtaacagt

SEQ ID NO: 81928 - DNA, 600 bp, Chicken  19866894375995_2
actcttttctacccactgcttcctgagtgctgcatactgcaacgtaacaatcgtcatctacctgacataggctggctcttccagtgtctctgggggctgggtgggtacgtgggaccttacatacaggacaggcagaatcagaatccatagggacaggaaagaggcgctggttcaatcggtaacagtaaacacctgccacagaataatgaaacatgacagtatttctagcttgtcagaaggttcctcaacactggcaatatatagctctcttctacctccgtgcaatacgtgccttctatrgaaactgctttccctaaagtgtcttttatatttcctgccccaaataagttcctaaaaagcaaaaccaaaactcaaccccctcaactaaaaaagagaactgcagcaagttacaaaaagtcctgatgctgatttagagatggtgcctagaagacttgattctctttggaggaggaaactgagtatggattagaaactgcagctaaaaataacacattcttcctcctcttaagtgatatccactcaggataacaggtaaagaattctcagttgtttgttcacagaaacagggttaggaagaaa

SEQ ID NO: 81929 - DNA, 599 bp, Chicken  19866894376000_1
  misc_feature (1)..(5): n is any nucleotide
nnnnntatgcagttaaatctatttaaagaaaattaaactataaaccccaaatacacttacaggtaaaaatactgtagaaaacacggagagaatataatcacaaaaacaaggcaggagactaagatttaagtcctcctaagaggaagacgataggcagagatgtactttcatgcttactaataacaatacctcagcttttatcccgatgtttgttgacatagtgacagatatgagtacaaatgaaagatccaaattatttcacaaagctgtggagaacggtagctgagaatagggaacatraaggtaaagatgcagcagtataagagtcccgtattcttccatcttagttctcagctccaaaaaaaaaaaaagctytgaagaaaaaaagaacgtattccataggaagactgttggatgaaatgaatgttagtgcaactttttttagtacgtttattgatacgtgatttgagccagcacttgtcctgtgatgtcttgtcagcatggaacgttatgctctaattgtgcattctaacttagggtcagcactgaagtagtctgaaagttgaattcagcaatccctgtgagtcctttcccactgg

SEQ ID NO: 81930 - DNA, 600 bp, Chicken  19866894376000_2
agaaaacacggagagaatataatcacaaaaacaaggcaggagactaagatttaagtcctcctaagaggaagacgataggcagagatgtactttcatgcttactaataacaatacctcagcttttatcccgatgtttgttgacatagtgacagatatgagtacaaatgaaagatccaaattatttcacaaagctgtggagaacggtagctgagaatagggaacatraaggtaaagatgcagcagtataagagtcccgtattcttccatcttagttctcagctccaaaaaaaaaaaaagctytgaagaaaaaaagaacgtattccataggaagactgttggatgaaatgaatgttagtgcaactttttttagtacgtttattgatacgtgatttgagccagcacttgtcctgtgatgtcttgtcagcatggaacgttatgctctaattgtgcattctaacttagggtcagcactgaagtagtctgaaagttgaattcagcaatccctgtgagtcctttcccactggaaaattttctatttttaaaacagcctttttaacagtactctctatatgtaaaatcacaaggcttaaatttacttag

SEQ ID NO: 81931 - DNA, 600 bp, Chicken  19866894376002_1
caaaatgggaaaaaaatgttctaatggccagagccctgattttgtttgatatgtccacttgctgttgaccctttcactcccagcactgagatgctaaggtgccttttgagtttgtgtctcattagcgaaccaaaacaatgggtgatctggatgatattttgtaagccctgattcactggcatcttccatcgcttttctctgactcttcatgagtgataatgtcagctatgcttagcagatttccattaattatttgcaggcagcaagtcaccatttagcattaaatctcctttgagtacrtttcctcatctgtatcctcccagctgccataacatacattacttctataccaggaaagcagtatatatgcatgatattaacactgctaaaatcccagtcaaatcaagcacaaatccagcaagaagcatctccttcagttttttcaagtataagtactatcctaaccttttgaaatcagatttctatttgaaaagatgttgattcctttttctccaccacaaatatttgaaaaagctgaatgccaggaaaaagacagaattagcaagccattcttccagcacatgaagtcagacttttaca

SEQ ID NO: 81932 - DNA, 600 bp, Chicken  19866894376003_1
aggattatttttgtctttaacagtgctgtgtaagaagaaattaaccaacagaaaactatgcggcattaatgttaaggctcaggctgaaattccatccttaacttggtctattgtgtgcagatacggcaagggcacccagccgtgggtgttcccatgcgccacatgctccgcagcaccgaagcacagccaaaagcattagcactgaagtttcagctttaacttggaattcagtcccctttgtggttttatgtcaaacttccagcattaatttgagaatgtaaatggtaaagctaggatagsggatggtaaattagaattgaatgacctgaaaaggactctacaagaatgcaagtgttttcctctgcagtaggcatggtggtcagctgctagtgtctgtgggcattattgaacaccatggcctccttggcttcccgtgctgagtactgcctaagagcagtaacgttatttcttaaaattaattttcaaatttgtgtaatgaattcgtgcatcagtttcttaaattagcaggctaataaagaatgcatggtgttcrgtttttggctttgatcattcttggtatggaacatagcatgcttaagt

SEQ ID NO: 81933 - DNA, 600 bp, Chicken  19866894376003_2
aacttccagcattaatttgagaatgtaaatggtaaagctaggatagsggatggtaaattagaattgaatgacctgaaaaggactctacaagaatgcaagtgttttcctctgcagtaggcatggtggtcagctgctagtgtctgtgggcattattgaacaccatggcctccttggcttcccgtgctgagtactgcctaagagcagtaacgttatttcttaaaattaattttcaaatttgtgtaatgaattcgtgcatcagtttcttaaattagcaggctaataaagaatgcatggtgttcrgtttttggctttgatcattcttggtatggaacatagcatgcttaagttgagtgaaaacattatatgaagctaaaccattgttcagcttttttctttctaaataatacatttataaacatgaagggttacataaataaaaccttgattactcttaccaatgtgattttggtaatgctgctaagcaaattctgcatccatccaaaatgtgtacaacctcgaatatctgcagctgggtatgacttagaaatgacttaaaataagctcatatatgwatctcttcttaaaatttaaaacaatttg

SEQ ID NO: 81934 - DNA, 600 bp, Chicken  19866894376003_3
caggctaataaagaatgcatggtgttcrgtttttggctttgatcattcttggtatggaacatagcatgcttaagttgagtgaaaacattatatgaagctaaaccattgttcagcttttttctttctaaataatacatttataaacatgaagggttacataaataaaaccttgattactcttaccaatgtgattttggtaatgctgctaagcaaattctgcatccatccaaaatgtgtacaacctcgaatatctgcagctgggtatgacttagaaatgacttaaaataagctcatatatgwatctcttcttaaaatttaaaacaatttgcaagtattttttttttctcatctttatttttttctgcatatataatacactacattatccagttcctttcctttctgaactcctttccatattcctttccacataattttcttattttcccaccgtatcctttcacctcctttcctctgccacttgcacaacttcttccacatttcctttcccatagagggaaacataagttacaaaaacattttttcttctcatctgaaaataggatcaatctggaagagataatttgtgccactcatcac

SEQ ID NO: 81935 - DNA, 600 bp, Chicken  19866894376004_1
ttctccccaaatcctaacaaaatataaaacgtatctacatatgctgtgcctcccctgggtgagagggtgagagaaagaacaagctgtgtgtgacagaggagagccacaacacttcacactgtccttagcgacaccagatatgataccgatagaactgaacgggaagaaaaccagaagctctggactggcttggtctgtgccaacctcctcttgttcatttcctttccgagataaacagccccaatcattttgatctccctttgtgagtgacttcgccatgcccctaatcagccctttccragaaaggcttgcttgaactgcagacagtattcccagagaggctacgctgctgatttacataatagcattatcatattttccatattattctcctcttcttccttctgcatgctaatgttttgtgtgtgctcttttttaacctgcatcaactcacggagccaggatttgtgtgatattcatacccttccccgagttgccgcaggcaatctggagcttcataatatcgttgtgtggaattttgtcttaattttctttcttacttggcatttgttaagttaaaccttggcaaatgcatgttgt

SEQ ID NO: 81936 - DNA, 600 bp, Chicken  19866894376020_1
ttcccatttactaagtatagctgttcattttaatttgcataaagaacatggatatgtaagtctccaattactttaaaagcagtatttcaacagatacagtgaagtaattagtttaatgaggaaatgtcattacatagtggaaagcttggtttgccaaggatcaatttgttgacatttgaatccaactagaaatgaaatgcacagaacaaaaagtaaacgattttagtaaaagccacctcgtccgtttggaacaaatggaaagtatgtctgcttctccaccagaggggctaagtaaggggkttttctgcattagaagacttacaaatgatcgtttaaaatatgaagagagtaggaaagtttattgtgcaaacgtggggagtcaacaagttccttttgtgaaaagtagaataattatttccagaatacatttttcctatatataaaatgaggatatttattacttacatcttttcagaattgtgaagcctaattcagaaacatctggtaatgtctctgaaattcgcaatcagggcagcaaatatcctaacttttatatctggatttcatttgcttgactgttaaccattattgatacactgt

SEQ ID NO: 81937 - DNA, 599 bp, Chicken  19866894376021_1
  misc_feature (1)..(175): n is any nucleotide
nnnnnnnnnnnnnnnnnnnnnnnnnnnnnnnnnnnnnnnnnnnnnnnnnnnnnnnnnnnnnnnnnnnnnnnnnnnnnnnnnnnnnnnnnnnnnnnnnnnnnnnnnnnnnnnnnnnnnnnnnnnnnnnnnnnnnnnnnnnnnnnnnnnnnnnnnnnnnnnnnnnnnnnnnnnnnnncccaagcatttagcaggacctaccttcttgttctgccacatgttgcagtttttctgtccaggactgcattacatatttcatgttacagggctgtgaaaattacttttgcttttccatttcatttygtttctcttcagcaatggcagtggcataactgtcagcaaagactgaagtatcaccaacccttggcccacatcacsctcagacaagcctkccatgaataagttgatgaccatctccacttaacagagaaaaaagacagggtaaagcataaacctatgggttccaacttataactgcaggtgtttctagcagtaacagttgcaaagggcacttaacctcagccccacagctgtaaagaagtaaagagtgtgatttgggatgactgtggctagtagctacctaagccacagaagttaggcat

SEQ ID NO: 81938 - DNA, 599 bp, Chicken  19866894376021_2
  misc_feature (1)..(100): n is any nucleotide
nnnnnnnnnnnnnnnnnnnnnnnnnnnnnnnnnnnnnnnnnnnnnnnnnnnnnnnnnnnnnnnnnnnnnnnnnnnnnnnnnnnnnnnnnnnnnnnnnnnncccaagcatttagcaggacctaccttcttgttctgccacatgttgcagtttttctgtccaggactgcattacatatttcatgttacagggctgtgaaaattacttttgcttttccatttcatttygtttctcttcagcaatggcagtggcataactgtcagcaaagactgaagtatcaccaacccttggcccacatcacsctcagacaagcctkccatgaataagttgatgaccatctccacttaacagagaaaaaagacagggtaaagcataaacctatgggttccaacttataactgcaggtgtttctagcagtaacagttgcaaagggcacttaacctcagccccacagctgtaaagaagtaaagagtgtgatttgggatgactgtggctagtagctacctaagccacagaagttaggcataactatgtcagagcagcatggcaaacatgtggttcagtggaaggagaacccaggacttacagttgttggatctga

SEQ ID NO: 81939 - DNA, 599 bp, Chicken  19866894376021_3
  misc_feature (1)..(86): n is any nucleotide
nnnnnnnnnnnnnnnnnnnnnnnnnnnnnnnnnnnnnnnnnnnnnnnnnnnnnnnnnnnnnnnnnnnnnnnnnnnnnnnnnnnnnncccaagcatttagcaggacctaccttcttgttctgccacatgttgcagtttttctgtccaggactgcattacatatttcatgttacagggctgtgaaaattacttttgcttttccatttcatttygtttctcttcagcaatggcagtggcataactgtcagcaaagactgaagtatcaccaacccttggcccacatcacsctcagacaagcctkccatgaataagttgatgaccatctccacttaacagagaaaaaagacagggtaaagcataaacctatgggttccaacttataactgcaggtgtttctagcagtaacagttgcaaagggcacttaacctcagccccacagctgtaaagaagtaaagagtgtgatttgggatgactgtggctagtagctacctaagccacagaagttaggcataactatgtcagagcagcatggcaaacatgtggttcagtggaaggagaacccaggacttacagttgttggatctgatctccacttgatgt

SEQ ID NO: 81940 - DNA, 600 bp, Chicken  19866894376029_1
ttggtggcattctgtaatctaagttgattcttatgcttgggaaatgagaggctgaccaaaggcaaagtagggattttcctcagatatggatttatcccaattttaggctatttagctgggggctatgttaaaatttgaaatgtatgagcttgttgtttctggggcatttttgaagatgtgcttctgattaacattattgcaggttaatgatgagtgttcagggctgtagcatgcagtgctgtatgatgtctgatgtagtaatattgcagatggattctgagagggtgattttaggctccygtaggctgttcttccttctgcacagatccaggagttgtgctgccgaagggcacattgattaaacaaaaatggaaatgtagggattctcagcacgttgatttccattggatttccactgacccgtgctggagttcccaaataactacatccaaaacagtggcagtggtggctgtgtttaaccagtgatgggatggagaaaagagttggtctgtcactggtggtggtggatgcactgacaccaggtgaggataaacatcaggataaatacccttagcaaagataccccgacagctctgctca

SEQ ID NO: 81941 - DNA, 600 bp, Chicken  19866894376029_2
tgccgaagggcacattgattaaacaaaaatggaaatgtagggattctcagcacgttgatttccattggatttccactgacccgtgctggagttcccaaataactacatccaaaacagtggcagtggtggctgtgtttaaccagtgatgggatggagaaaagagttggtctgtcactggtggtggtggatgcactgacaccaggtgaggataaacatcaggataaatacccttagcaaagataccccgacagctctgctcaaagctgctttgtgagttcactcagtgattgaggagaaacyacatgacatggatttcttcacaaacagcagtaatcctctacggtggctcacttggctttgacagttctgttattctttggataatcattttatttggtggtataagatgcagctatttttcctaackgagccagcrattaattgctgaagcacctgctraaaacaatgtagtaaggcatttattatttaacagctgttcctgttaacatgctgtgagtgtattatgtaccagasgataaaggaataartaagctaggattgattagttttcttggatttcaattcttaaaatttgaccta

SEQ ID NO: 81942 - DNA, 600 bp, Chicken  19866894376029_3
ggctgtgtttaaccagtgatgggatggagaaaagagttggtctgtcactggtggtggtggatgcactgacaccaggtgaggataaacatcaggataaatacccttagcaaagataccccgacagctctgctcaaagctgctttgtgagttcactcagtgattgaggagaaacyacatgacatggatttcttcacaaacagcagtaatcctctacggtggctcacttggctttgacagttctgttattctttggataatcattttatttggtggtataagatgcagctatttttcctaackgagccagcrattaattgctgaagcacctgctraaaacaatgtagtaaggcatttattatttaacagctgttcctgttaacatgctgtgagtgtattatgtaccagasgataaaggaataartaagctaggattgattagttttcttggatttcaattcttaaaatttgacctacttaattatgtgtcttctctgtgttttgcatatttttgcatatatgtaatgtgtgttctatacataaaatacatgtgtatataccatagtgctgatgaggtagctacttaacaggctggttaataaa

SEQ ID NO: 81943 - DNA, 600 bp, Chicken  19866894376029_4
taaccagtgatgggatggagaaaagagttggtctgtcactggtggtggtggatgcactgacaccaggtgaggataaacatcaggataaatacccttagcaaagataccccgacagctctgctcaaagctgctttgtgagttcactcagtgattgaggagaaacyacatgacatggatttcttcacaaacagcagtaatcctctacggtggctcacttggctttgacagttctgttattctttggataatcattttatttggtggtataagatgcagctatttttcctaackgagccagcrattaattgctgaagcacctgctraaaacaatgtagtaaggcatttattatttaacagctgttcctgttaacatgctgtgagtgtattatgtaccagasgataaaggaataartaagctaggattgattagttttcttggatttcaattcttaaaatttgacctacttaattatgtgtcttctctgtgttttgcatatttttgcatatatgtaatgtgtgttctatacataaaatacatgtgtatataccatagtgctgatgaggtagctacttaacaggctggttaataaaacaccttgt

SEQ ID NO: 81944 - DNA, 600 bp, Chicken  19866894376029_5
agagttggtctgtcactggtggtggtggatgcactgacaccaggtgaggataaacatcaggataaatacccttagcaaagataccccgacagctctgctcaaagctgctttgtgagttcactcagtgattgaggagaaacyacatgacatggatttcttcacaaacagcagtaatcctctacggtggctcacttggctttgacagttctgttattctttggataatcattttatttggtggtataagatgcagctatttttcctaackgagccagcrattaattgctgaagcacctgctraaaacaatgtagtaaggcatttattatttaacagctgttcctgttaacatgctgtgagtgtattatgtaccagasgataaaggaataartaagctaggattgattagttttcttggatttcaattcttaaaatttgacctacttaattatgtgtcttctctgtgttttgcatatttttgcatatatgtaatgtgtgttctatacataaaatacatgtgtatataccatagtgctgatgaggtagctacttaacaggctggttaataaaacaccttgttgttctagctgtgcccaaaaaag

SEQ ID NO: 81945 - DNA, 528 bp, Chicken  19866894376029_6
caaagataccccgacagctctgctcaaagctgctttgtgagttcactcagtgattgaggagaaacyacatgacatggatttcttcacaaacagcagtaatcctctacggtggctcacttggctttgacagttctgttattctttggataatcattttatttggtggtataagatgcagctatttttcctaackgagccagcrattaattgctgaagcacctgctraaaacaatgtagtaaggcatttattatttaacagctgttcctgttaacatgctgtgagtgtattatgtaccagasgataaaggaataartaagctaggattgattagttttcttggatttcaattcttaaaatttgacctacttaattatgtgtcttctctgtgttttgcatatttttgcatatatgtaatgtgtgttctatacataaaatacatgtgtatataccatagtgctgatgaggtagctacttaacaggctggttaataaaacaccttgttgttctagctgtgcccaaaaaagaat

SEQ ID NO: 81946 - DNA, 514 bp, Chicken  19866894376029_7
cagctctgctcaaagctgctttgtgagttcactcagtgattgaggagaaacyacatgacatggatttcttcacaaacagcagtaatcctctacggtggctcacttggctttgacagttctgttattctttggataatcattttatttggtggtataagatgcagctatttttcctaackgagccagcrattaattgctgaagcacctgctraaaacaatgtagtaaggcatttattatttaacagctgttcctgttaacatgctgtgagtgtattatgtaccagasgataaaggaataartaagctaggattgattagttttcttggatttcaattcttaaaatttgacctacttaattatgtgtcttctctgtgttttgcatatttttgcatatatgtaatgtgtgttctatacataaaatacatgtgtatataccatagtgctgatgaggtagctacttaacaggctggttaataaaacaccttgttgttctagctgtgcccaaaaaagaat

SEQ ID NO: 81947 - DNA, 599 bp, Chicken  19866894376031_1
  misc_feature (1)..(130): n is any nucleotide
nnnnnnnnnnnnnnnnnnnnnnnnnnnnnnnnnnnnnnnnnnnnnnnnnnnnnnnnnnnnnnnnnnnnnnnnnnnnnnnnnnnnnnnnnnnnnnnnnnnnnnnnnnnnnnnnnnnnnnnnnnnnnnnnnnacttgcgtgtgtacagaactgagtctaaatgaaaactagcaagcctttaatgaaaacagtgcagtgattgaaatgtgggcactgaaccgcgcctcccaggaaacagcatcttgtggatgaaccctgctgaatggtggtggtaccttctccagtaggggaggcagtggtgygatgttggtaaacttcatatagtttgaatattgctgccagagatgagctgcactccttgtaagagtgctgtaatatggtggtccttcacatctggtgctgtatgtgccctkatgaggcagggaaggagctcacaatgtggcagctttggaaaagatgtgagtgagaattctttcctaccgtatgaaagtagcattgaatggaaatcatgtgggaatccttatttaaagctagagaggtaatagattggaactcctgtgtcgttcctggtatgcatttgcaggtattttgttcaattccc

SEQ ID NO: 81948 - DNA, 599 bp, Chicken  19866894376031_2
  misc_feature (1)..(19): n is any nucleotide
nnnnnnnnnnnnnnnnnnnacttgcgtgtgtacagaactgagtctaaatgaaaactagcaagcctttaatgaaaacagtgcagtgattgaaatgtgggcactgaaccgcgcctcccaggaaacagcatcttgtggatgaaccctgctgaatggtggtggtaccttctccagtaggggaggcagtggtgygatgttggtaaacttcatatagtttgaatattgctgccagagatgagctgcactccttgtaagagtgctgtaatatggtggtccttcacatctggtgctgtatgtgccctkatgaggcagggaaggagctcacaatgtggcagctttggaaaagatgtgagtgagaattctttcctaccgtatgaaagtagcattgaatggaaatcatgtgggaatccttatttaaagctagagaggtaatagattggaactcctgtgtcgttcctggtatgcatttgcaggtattttgttcaattccctgtgtgttaataatgaagaatattccaaccttagtcttgttctggatatacacataacttagccttagattcttacagtttttaaagtgtttgcacctgtaccttaaaata

SEQ ID NO: 81949 - DNA, 600 bp, Chicken  19866894376033_1
gtacagacttcaccaaggtgggatatttgcaaagtaactctgctctcagctctgttgcactgatgtggaataccctttttaagaggccacgaacatttcagaggtgtactcacttgctcagtcagcactgtgcaggaaggctcaatgattcgcactgaggagggtctttgcatagctgcaagtccttcacaagcttctgctaagcaagtgcaagaagttatttggattgtttgccattcttcctctactcacttcataatttggtctagtttagtggaatttttgtgaaaataagaagtrgtctgtctgtgatgcagatggcatcaggattgttatgtcttgtcgcttcaaaactgagtgctctccatcatatgcttgaatgattctccttcctgttctctctcccttatcgtctttcaaaataaaataaagtatgctttatccatcaaagaaccaaagaggtgaagttgtccttcagcaaacgttgctaggaattggggttttagaaataaacacaagaaaacccctttaaataccttgatattcttagaaaagaaaaaagtaaaaaaatgatgcatcagcactatgaagcaaatgcag

SEQ ID NO: 81950 - DNA, 600 bp, Chicken  19866894376050_1
gtaaggcagaggatgcttttcaaaattgatacgtcctaactcagccagcagttgtggcataaattacagggtggagttttaccagactgcactgtatttgaagcagtttggacttgatcaacttaaacacttcatgttggaaaggactgctgtgagatgtcagataagatcctttagctaagaacctaattagctgctctaaaaacaaaagttacttcagctgctacacattaccaccaaatcatccttaacattaacttgtaattgtcctttcataattggtgtttgtaatttggttgrgtatacactgagcacagtcgtaaacaaacttactttaagaaaaataaagagtgtgcctggaaataccactggtttagctggtccatgataactttcctaaagagataaccttacctaaggatttataaccatgaaacacatctctttgacacacagttcagagaaagaaaggagtctcatcttctggtatcacttccagcattaaaacatacaaaataccacactgccaatatactggactgacagacaagggcaaggctggttccatgtgacaatatagattacagatgctttagagga

SEQ ID NO: 81951 - DNA, 600 bp, Chicken  19866894376060_1
aaaatggcagaatatcaaggcacacagcagtcgttgtttataattaaatgtaagcccacctgatctcactgtagctaacttaacttaggcagtaaacaccacatgctgggagagctgtgaattagtttctgagagttctaattatggaccaaaacatcagatgtttcctaatttatttcttatacagaactcctatattttttggctcagagatgattcacaggggttgtgtgttcactcacttgtaggaaagcttgatttttaaaaacttaaaaaactgagcttgagtaagcggtaatygggacaaaagtgttctgtatgtctttaagattcttcatgctgtgaagaagtgtggcttttcctaaagtgacatgaagtgaaactctactgaagcacttctaagccatatcataatgtcttgtaactttttcttttgtagtacaaaatggttcgttacatcaaaaggatacagttcacgacaacgattttgaaccttacctttctgggcagtcaaatcaggttggtgtgttttttcactttttttctttatcttaagcatgcttttggcacccaattccataggatggcgttgtggaagaa

SEQ ID NO: 81952 - DNA, 600 bp, Chicken  19866894376068_1
gtcatcatatcaacagctggcctttcctgtcatcgatgcttccatttggcatacaaataatccttttttattattatttttatttttattttcccaccagggaccaaccacattaattatgttccaagaatattctctatgcttttcagggcattttgaaagactctttccttggactgagtagcactgagtactttgtcattgatgtagggaacaaagctaagatccccaggttcagcagatgtagatgagtgagaaaatagtatagattgcagtattttggctagtattaattaattyttattaactttttgaacaaacactgacactgaaaaaaactgaactgttgaagagtcgtcaatgcgagagaagctcactgctaatcaaaatgaattctttagcacatatgattaaagaaggaagttcataaaaaggtagaaaatttattggatgctgatgaaccttaaggtccactaactgtatattacataaggtatttctgaatccagtaaaataaaataaacagcaccctgtagatggaaattttaattacctccatcatagacagtgatgattataccctgatgattatattttctg

SEQ ID NO: 81953 - DNA, 599 bp, Chicken  19866894376071_1
  misc_feature (1)..(170): n is any nucleotide
nnnnnnnnnnnnnnnnnnnnnnnnnnnnnnnnnnnnnnnnnnnnnnnnnnnnnnnnnnnnnnnnnnnnnnnnnnnnnnnnnnnnnnnnnnnnnnnnnnnnnnnnnnnnnnnnnnnnnnnnnnnnnnnnnnnnnnnnnnnnnnnnnnnnnnnnnnnnnnnnnnnnnnnnnnattcacatcaagaaccatgcccagcattttctcattatttggtattaccaaatggatacaccatgtgtgtgccatgggcacgctgactgtgctccctaccttcacaggaacatggctttatactcaaackacaagagactagatttattttttgtgacctcattgaaaatcactcatgaagagaaagagaagctgctaaaaattaatgaaatttcayragcatttaatgtgatctaaatatatctwtacatatcttgttccacatcagcaagagggggcaatgtatcaatgtagctgtcacagaaaagcttcctgaaaaaatactgatgttcaaagctgaatactgatgaataattaatgtttcctgttttgaaaatgagtttgactcatttcatccatttccagtactggaatccctctctccctcat

SEQ ID NO: 81954 - DNA, 599 bp, Chicken  19866894376071_2
  misc_feature (1)..(83): n is any nucleotide
nnnnnnnnnnnnnnnnnnnnnnnnnnnnnnnnnnnnnnnnnnnnnnnnnnnnnnnnnnnnnnnnnnnnnnnnnnnnnnnnnnnattcacatcaagaaccatgcccagcattttctcattatttggtattaccaaatggatacaccatgtgtgtgccatgggcacgctgactgtgctccctaccttcacaggaacatggctttatactcaaackacaagagactagatttattttttgtgacctcattgaaaatcactcatgaagagaaagagaagctgctaaaaattaatgaaatttcayragcatttaatgtgatctaaatatatctwtacatatcttgttccacatcagcaagagggggcaatgtatcaatgtagctgtcacagaaaagcttcctgaaaaaatactgatgttcaaagctgaatactgatgaataattaatgtttcctgttttgaaaatgagtttgactcatttcatccatttccagtactggaatccctctctccctcatttgaaaataggcactcgtcactggttgatgggtgaggaatgcccttgggatcccactcccgtaactgtgattttatcttccctgaaa

SEQ ID NO: 81955 - DNA, 599 bp, Chicken  19866894376071_3
  misc_feature (1)..(82): n is any nucleotide
nnnnnnnnnnnnnnnnnnnnnnnnnnnnnnnnnnnnnnnnnnnnnnnnnnnnnnnnnnnnnnnnnnnnnnnnnnnnnnnnnnattcacatcaagaaccatgcccagcattttctcattatttggtattaccaaatggatacaccatgtgtgtgccatgggcacgctgactgtgctccctaccttcacaggaacatggctttatactcaaackacaagagactagatttattttttgtgacctcattgaaaatcactcatgaagagaaagagaagctgctaaaaattaatgaaatttcayragcatttaatgtgatctaaatatatctwtacatatcttgttccacatcagcaagagggggcaatgtatcaatgtagctgtcacagaaaagcttcctgaaaaaatactgatgttcaaagctgaatactgatgaataattaatgtttcctgttttgaaaatgagtttgactcatttcatccatttccagtactggaatccctctctccctcatttgaaaataggcactcgtcactggttgatgggtgaggaatgcccttgggatcccactcccgtaactgtgattttatcttccctgaaat

SEQ ID NO: 81956 - DNA, 599 bp, Chicken  19866894376071_4
  misc_feature (1)..(54): n is any nucleotide
nnnnnnnnnnnnnnnnnnnnnnnnnnnnnnnnnnnnnnnnnnnnnnnnnnnnnnattcacatcaagaaccatgcccagcattttctcattatttggtattaccaaatggatacaccatgtgtgtgccatgggcacgctgactgtgctccctaccttcacaggaacatggctttatactcaaackacaagagactagatttattttttgtgacctcattgaaaatcactcatgaagagaaagagaagctgctaaaaattaatgaaatttcayragcatttaatgtgatctaaatatatctwtacatatcttgttccacatcagcaagagggggcaatgtatcaatgtagctgtcacagaaaagcttcctgaaaaaatactgatgttcaaagctgaatactgatgaataattaatgtttcctgttttgaaaatgagtttgactcatttcatccatttccagtactggaatccctctctccctcatttgaaaataggcactcgtcactggttgatgggtgaggaatgcccttgggatcccactcccgtaactgtgattttatcttccctgaaatttggccattcacttctgtaaaaacaaca

SEQ ID NO: 81957 - DNA, 600 bp, Chicken  19866894376076_1
gacgctgagagcaaactgtagataaaacttgaacaactgtaacctgactgaggaacaagagagaagccatttaaggtcatcgttttttttccacctcaggaaccacaacgttttcccctctgattggtaccagagccctcacatccccgattagaaagattcccgataatcccaagtaaaaccggggactccccgttattcctgcggggagagggcgggaggatgcttctcccaaccccgatgacgcaaggaggcggaatccgcagcgactcgcagcggatcacgtacacatcggcggcrgggagggagcgcggaggcactgctccgtggagttgccggctcggggacgcagcggggagcggacactgcagagtgggggatgctgctcataccgcttacgcgctagaagaaccgggaggatgcctcaaacgcggcaggaccacgcatgtgtccacgtgcagggcagctagttttggtctttaaactaccgagcccatgcacaaaggaaagaagcttttttttttttttttaaacccttcaaaaggcgtgttagaggaacattccttaacttaaagtatttccgaagcactctctggcaat

SEQ ID NO: 81958 - DNA, 599 bp, Chicken  19866894376086_1
  misc_feature (1)..(119): n is any nucleotide
nnnnnnnnnnnnnnnnnnnnnnnnnnnnnnnnnnnnnnnnnnnnnnnnnnnnnnnnnnnnnnnnnnnnnnnnnnnnnnnnnnnnnnnnnnnnnnnnnnnnnnnnnnnnnnnnnnnnnnntattttagagctgtaagggattcatgctcacagctggcacacttctggatcttgaattgcttatattaaatacccatgggaataagcaaattggtgcttacagcatctggtttacactgtcaccatgccacatgtcctagaacatttaatcacctgcttttcacttgtacagagatgcacygtttttagaagcgaacgtttaaggtgaartatttatgttttaggcactgcaggaaaatataaggctgtcaacacaaaaatctaactaggctgactccatctttctggtagcaaagaaagtatttcagagatgaaatggaattttctatctctgggactgactttaaaagatttagcagctagcacaactacagtataytttgagttccaagtacatcatccctcagggctccctctcagtcccactagccctgtgcagctcttctgaacccagccttgtttgttgagcacttggtgcca

SEQ ID NO: 81959 - DNA, 599 bp, Chicken  19866894376086_2
  misc_feature (1)..(90): n is any nucleotide
nnnnnnnnnnnnnnnnnnnnnnnnnnnnnnnnnnnnnnnnnnnnnnnnnnnnnnnnnnnnnnnnnnnnnnnnnnnnnnnnnnnnnnnnnntattttagagctgtaagggattcatgctcacagctggcacacttctggatcttgaattgcttatattaaatacccatgggaataagcaaattggtgcttacagcatctggtttacactgtcaccatgccacatgtcctagaacatttaatcacctgcttttcacttgtacagagatgcacygtttttagaagcgaacgtttaaggtgaartatttatgttttaggcactgcaggaaaatataaggctgtcaacacaaaaatctaactaggctgactccatctttctggtagcaaagaaagtatttcagagatgaaatggaattttctatctctgggactgactttaaaagatttagcagctagcacaactacagtataytttgagttccaagtacatcatccctcagggctccctctcagtcccactagccctgtgcagctcttctgaacccagccttgtttgttgagcacttggtgccataggagatttccagtgtattttgcasctg

SEQ ID NO: 81960 - DNA, 600 bp, Chicken  19866894376086_3
gaataagcaaattggtgcttacagcatctggtttacactgtcaccatgccacatgtcctagaacatttaatcacctgcttttcacttgtacagagatgcacygtttttagaagcgaacgtttaaggtgaartatttatgttttaggcactgcaggaaaatataaggctgtcaacacaaaaatctaactaggctgactccatctttctggtagcaaagaaagtatttcagagatgaaatggaattttctatctctgggactgactttaaaagatttagcagctagcacaactacagtataytttgagttccaagtacatcatccctcagggctccctctcagtcccactagccctgtgcagctcttctgaacccagccttgtttgttgagcacttggtgccataggagatttccagtgtattttgcasctgggatcacttgcactcagctggcaactgtgttctggccacgctggcatctcctcaaactggcagtgtgccttggtctcctttttcagtgcagtacttcaatgaagaaacaaactgcagttttgccacgtgagtgcaagagcgtggccaaggccagcaaaggagaactcaag

SEQ ID NO: 81961 - DNA, 600 bp, Chicken  19866894376086_4
gaartatttatgttttaggcactgcaggaaaatataaggctgtcaacacaaaaatctaactaggctgactccatctttctggtagcaaagaaagtatttcagagatgaaatggaattttctatctctgggactgactttaaaagatttagcagctagcacaactacagtataytttgagttccaagtacatcatccctcagggctccctctcagtcccactagccctgtgcagctcttctgaacccagccttgtttgttgagcacttggtgccataggagatttccagtgtattttgcasctgggatcacttgcactcagctggcaactgtgttctggccacgctggcatctcctcaaactggcagtgtgccttggtctcctttttcagtgcagtacttcaatgaagaaacaaactgcagttttgccacgtgagtgcaagagcgtggccaaggccagcaaaggagaactcaagccattattttctgaccattgtgcaccagccggaagtaggttagcatgaactgcaaaagcactaacgtggtatactctgatatctcagtaacagatgaagcaaccgcacgtatcctttgcaatggaga

SEQ ID NO: 81962 - DNA, 600 bp, Chicken  19866894376087_1
taaactgaattgctacaatctgtacgtacattcgactttgcatacgcttgacttgcgcttttccactttgagcatgaacttgtgaactttaagtttgtattattttgtgtcatcacacagaccatttagcttatctctcatttcctgtaggaagtctgcttttccttctgttattggaagatggctctgaaagggcagttagaggtggaaggctggcaagaacaatttgataagtagaaacaagacaatggaagcaacaggtgagtttgacttaaagagcattgatttcagggtaacacrtagagttcctgtgaattaatatttacaaagagtacatttaagactggggttatactgagaytcatyaagtcagtgcagaaaagtcwaggggaaraatgtcagtatgatattaaaacaaatgatgagttagggaaaaaaaataattcggagcagcatatcactgctgcctaaaccaatgccaccttctcagcatgaatttggtatacagacactcagcaggctatccatgatgttctatttgagggctaagggcacagaaaattgcttggtaggcttgagaggcctctcaccactcaaaaa

SEQ ID NO: 81963 - DNA, 600 bp, Chicken  19866894376087_2
tccactttgagcatgaacttgtgaactttaagtttgtattattttgtgtcatcacacagaccatttagcttatctctcatttcctgtaggaagtctgcttttccttctgttattggaagatggctctgaaagggcagttagaggtggaaggctggcaagaacaatttgataagtagaaacaagacaatggaagcaacaggtgagtttgacttaaagagcattgatttcagggtaacacrtagagttcctgtgaattaatatttacaaagagtacatttaagactggggttatactgagaytcatyaagtcagtgcagaaaagtcwaggggaaraatgtcagtatgatattaaaacaaatgatgagttagggaaaaaaaataattcggagcagcatatcactgctgcctaaaccaatgccaccttctcagcatgaatttggtatacagacactcagcaggctatccatgatgttctatttgagggctaagggcacagaaaattgcttggtaggcttgagaggcctctcaccactcaaaaacatcctcactgcagcaaacccgaagaagacagggatatgggcttataagttagcaaattta

SEQ ID NO: 81964 - DNA, 600 bp, Chicken  19866894376087_3
tttgagcatgaacttgtgaactttaagtttgtattattttgtgtcatcacacagaccatttagcttatctctcatttcctgtaggaagtctgcttttccttctgttattggaagatggctctgaaagggcagttagaggtggaaggctggcaagaacaatttgataagtagaaacaagacaatggaagcaacaggtgagtttgacttaaagagcattgatttcagggtaacacrtagagttcctgtgaattaatatttacaaagagtacatttaagactggggttatactgagaytcatyaagtcagtgcagaaaagtcwaggggaaraatgtcagtatgatattaaaacaaatgatgagttagggaaaaaaaataattcggagcagcatatcactgctgcctaaaccaatgccaccttctcagcatgaatttggtatacagacactcagcaggctatccatgatgttctatttgagggctaagggcacagaaaattgcttggtaggcttgagaggcctctcaccactcaaaaacatcctcactgcagcaaacccgaagaagacagggatatgggcttataagttagcaaatttaccagt

SEQ ID NO: 81965 - DNA, 600 bp, Chicken  19866894376087_4
ctttaagtttgtattattttgtgtcatcacacagaccatttagcttatctctcatttcctgtaggaagtctgcttttccttctgttattggaagatggctctgaaagggcagttagaggtggaaggctggcaagaacaatttgataagtagaaacaagacaatggaagcaacaggtgagtttgacttaaagagcattgatttcagggtaacacrtagagttcctgtgaattaatatttacaaagagtacatttaagactggggttatactgagaytcatyaagtcagtgcagaaaagtcwaggggaaraatgtcagtatgatattaaaacaaatgatgagttagggaaaaaaaataattcggagcagcatatcactgctgcctaaaccaatgccaccttctcagcatgaatttggtatacagacactcagcaggctatccatgatgttctatttgagggctaagggcacagaaaattgcttggtaggcttgagaggcctctcaccactcaaaaacatcctcactgcagcaaacccgaagaagacagggatatgggcttataagttagcaaatttaccagtagctaaacctttggatatct

SEQ ID NO: 81966 - DNA, 600 bp, Chicken  19866894376087_5
ttgtattattttgtgtcatcacacagaccatttagcttatctctcatttcctgtaggaagtctgcttttccttctgttattggaagatggctctgaaagggcagttagaggtggaaggctggcaagaacaatttgataagtagaaacaagacaatggaagcaacaggtgagtttgacttaaagagcattgatttcagggtaacacrtagagttcctgtgaattaatatttacaaagagtacatttaagactggggttatactgagaytcatyaagtcagtgcagaaaagtcwaggggaaraatgtcagtatgatattaaaacaaatgatgagttagggaaaaaaaataattcggagcagcatatcactgctgcctaaaccaatgccaccttctcagcatgaatttggtatacagacactcagcaggctatccatgatgttctatttgagggctaagggcacagaaaattgcttggtaggcttgagaggcctctcaccactcaaaaacatcctcactgcagcaaacccgaagaagacagggatatgggcttataagttagcaaatttaccagtagctaaacctttggatatctaaattaga

SEQ ID NO: 81967 - DNA, 599 bp, Chicken  19866894376090_1
  misc_feature (1)..(245): n is any nucleotide
nnnnnnnnnnnnnnnnnnnnnnnnnnnnnnnnnnnnnnnnnnnnnnnnnnnnnnnnnnnnnnnnnnnnnnnnnnnnnnnnnnnnnnnnnnnnnnnnnnnnnnnnnnnnnnnnnnnnnnnnnnnnnnnnnnnnnnnnnnnnnnnnnnnnnnnnnnnnnnnnnnnnnnnnnnnnnnnnnnnnnnnnnnnnnnnnnnnnnnnnnnnnnnnnnnnnnnnnnnnnnnnnnnnnnnnnnnnnnnnnnnnnntaagaactcataacttgcaagtataagcagttactgccacgaaatttatttctgwaagactgatgttgtgatagatgatttacacaaacttccagatatggaaaggacataattcaaaatagactattcttaaactgaggtttaagatgaagtttatgataagataaaactgaattttagtgctggattaaaatgactccaaccagagtcctagtatctattagtatctacatccctatcccccaggatgatttttcagcagcacagtagttgtgaaatcatggacacagtcagtgttattcttaatttggttttcaaagaccaaataaccctgtttacatttactcagcatca

SEQ ID NO: 81968 - DNA, 600 bp, Chicken  19866894376090_2
actgaattttagtgctggattaaaatgactccaaccagagtcctagtatctattagtatctacatccctatcccccaggatgatttttcagcagcacagtagttgtgaaatcatggacacagtcagtgttattcttaatttggttttcaaagaccaaataaccctgtttacatttactcagcatcaaagctaagtatatctggttatccatttaaaattttgcccaagttaacccagatctggcaacgccattcatcatatatgacttttatcaagccttttaaagcaagtcagcatttyaagcatcagataaaacaacgattacctctctgtggtagtctgtggagtaataagcagaactcacgctcccctcattagaagtcctcatttaataaatttccttatcaggaaatctgccttacaaacagtctcttgctgctgagacaccctttgtgggagatttgcatcccagtataaactaatgatttaaaatatctatacataaataacacactggagaaaaaattaaagtaagtgctagcattctgtcggggaagtgctgactgattcagataaaggcaacagattacacaacagcta

SEQ ID NO: 81969 - DNA, 600 bp, Chicken  19866894376092_1
aatggcttgctgtcctctgcaactgagacaccacccgatagttgtttggctgaatatcaggaattgctcaggagcataatgtgtcctcctctttctcttctcctcttcctccttcgctctcacccctgtctctgcccctccggatccagggcctgagtgcacttccagctcctgtcatcatgggggaacaaggaaaccaggaccaggaattgaaaccagcacaggatgctcacggcgttgtcccttgtgctagcatagtacccctcttcctgcctttctcgcaggagtagtttgtgctcrtggaaacaagaaagggcacagttggtcatcttggacttcttttggtgaaagcagtgcccgctgagtgtggagcagcacctatcccacaaaggaagtgttgtgcagagctgtactccctgctgccacggaggggaactgcatccatctttaccttctctgtcctttgttctattcccctctgggcaggagcaaagcagaaagtaagctgaagtcccctgatatcccagttgcctgtggaagtaagagtatgaggttggtttgagggaacagtttgctacagtgtgagctgtttgttggcct

SEQ ID NO: 81970 - DNA, 600 bp, Chicken  19866894376099_1
taaattgcagaaataattaggagcttttgctatgtagtatgacttgtttatgaactgcattaaaaccacctcctttaattacagtgaaagcattttctttgtggcagtgtttgctacatatgttttgagacaatttattttagtggataggaaaacatgacactgcaagtttgccaaaagggttttgactgacattgataaatacataaagataataaatgttgaactgcatctaccaaattggtaacattaattattcctcttgcttagtttttctgcaaattatgcattcctgtactrttatcaagtgttgtaatctagacataggcacaatatgcattttttcctatacatgctggaactctaggtagtaaattaaagagtaggacttaggttcaaagaatcatttattgtgaatgtacctctttatacctcatcctcctgcaacatcctgacatgacttttgccttctgttcatgtatttgcaagatttgaaagaaaaacagctagttcaattgtaaatcagagtgtatgawatatgattcttgtctaatgtatcagtcactatttgtattccgtaacacagctggaaatgtctta

SEQ ID NO: 81971 - DNA, 600 bp, Chicken  19866894376099_2
caaattggtaacattaattattcctcttgcttagtttttctgcaaattatgcattcctgtactrttatcaagtgttgtaatctagacataggcacaatatgcattttttcctatacatgctggaactctaggtagtaaattaaagagtaggacttaggttcaaagaatcatttattgtgaatgtacctctttatacctcatcctcctgcaacatcctgacatgacttttgccttctgttcatgtatttgcaagatttgaaagaaaaacagctagttcaattgtaaatcagagtgtatgawatatgattcttgtctaatgtatcagtcactatttgtattccgtaacacagctggaaatgtcttattgtatcccttgctgatttctcagcatttgcatctcagttaaggttgatgayatttgtactaaaggtactgaaataaactcaattttcagtgaactcaaatgatatctgtattaagaaatgtgtctgatggaaagagacttactatcatggtgttcatttttatagcagtcttttctagggtttagtggtaattcacttctaggactagtcctgttcagcatttttatcaaggatc

SEQ ID NO: 81972 - DNA, 600 bp, Chicken  19866894376099_3
atgctggaactctaggtagtaaattaaagagtaggacttaggttcaaagaatcatttattgtgaatgtacctctttatacctcatcctcctgcaacatcctgacatgacttttgccttctgttcatgtatttgcaagatttgaaagaaaaacagctagttcaattgtaaatcagagtgtatgawatatgattcttgtctaatgtatcagtcactatttgtattccgtaacacagctggaaatgtcttattgtatcccttgctgatttctcagcatttgcatctcagttaaggttgatgayatttgtactaaaggtactgaaataaactcaattttcagtgaactcaaatgatatctgtattaagaaatgtgtctgatggaaagagacttactatcatggtgttcatttttatagcagtcttttctagggtttagtggtaattcacttctaggactagtcctgttcagcatttttatcaaggatctgaattgaagaattgaatgcatcctcaggaattttgctggtgatgttaaaatgggaagtgcagttgactctcagaagggataagaggcctttcagaactatctagataaattggag

SEQ ID NO: 81973 - DNA, 600 bp, Chicken  19866894376109_1
ccatccatcctacattttacaagttctgatttattcctcctacttaatgtggtgtatggatttttcaattattgcaagaaccttgagctcatttcttttcctagctgtcactttggaaatgattttcaattgttccagtacataaataattaatattatcaataaaatattggtagggaagaaagaacttctaaagtagcttagttgtcctttcccagccttggcatctccatgagcagaattatgatatagaaaataagaatcaggaattcctcatgctctttaaccaaaagtctattyttgtgtgtttatgaacagacatttcataataacagagtctggcaggttacaaagactcttaagatttcatcatctggctgggttrcatctaacccttacatagctgcaccagaagagagagctgtctgacatgytttgaccaaaaagtcacacatctccttttctttcaagtttccctgctaaggaatttcccaattgagctattaccaatttttacaaataactaaaattaaatatacaaacaagtacatattttagccatctaatggagcagctgcagtgaggacctggctacaaggt

SEQ ID NO: 81974 - DNA, 600 bp, Chicken  19866894376109_2
agctcatttcttttcctagctgtcactttggaaatgattttcaattgttccagtacataaataattaatattatcaataaaatattggtagggaagaaagaacttctaaagtagcttagttgtcctttcccagccttggcatctccatgagcagaattatgatatagaaaataagaatcaggaattcctcatgctctttaaccaaaagtctattgttgtgtgtttatgaacagacatttcataataacagagtctggcaggttacaaagactcttaagatttcatcatctggctgggttrcatctaacccttacatagctgcaccagaagagagagctgtctgacatgytttgaccaaaaagtcacacatctccttttctttcaagtttccctgctaaggaatttcccaattgagctattaccaatttttacaaataactaaaattaaatatacaaacaagtacatattttagccatctaatggagcagctgcagtgaggacctggctacaaggtatctgacagttcacatattcatgtccatacgtacactaagaatcactgaatgataaaggttggaaaagacctctaagatcagcta

SEQ ID NO: 81975 - DNA, 600 bp, Chicken  19866894376109_3
ccagtacataaataattaatattatcaataaaatattggtagggaagaaagaacttctaaagtagcttagttgtcctttcccagccttggcatctccatgagcagaattatgatatagaaaataagaatcaggaattcctcatgctctttaaccaaaagtctattgttgtgtgtttatgaacagacatttcataataacagagtctggcaggttacaaagactcttaagatttcatcatctggctgggttrcatctaacccttacatagctgcaccagaagagagagctgtctgacatgytttgaccaaaaagtcacacatctccttttctttcaagtttccctgctaaggaatttcccaattgagctattaccaatttttacaaataactaaaattaaatatacaaacaagtacatattttagccatctaatggagcagctgcagtgaggacctggctacaaggtatctgacagttcacatattcatgtccatacgtacactaagaatcactgaatgataaaggttggaaaagacctctaagatcagctagtctaaccattagcccattccctccatgccctctaaatcacatcccttg

SEQ ID NO: 81976 - DNA, 599 bp, Chicken  19866894376118_1
  misc_feature (1)..(1): n is any nucleotide
nctgaaatttgaagtgtggtagaccttgtgaaaccaggtaagtttaaatgtcatctttgtcccagatttgagagaagataatggtgtgctttgtagctgatgtaagaaatgatatgttttaacagcatttatttagaggagagtgtttaataactactcttttatgttggaaggtatttaagaatattctactgttgtccaaagctgaatggtgtcataggtggatattatctcggtgaaatttgaaatactgactttgaagaagcatcaccgttctgtttgaacttgaagttttgttaragtcttaatatttagctggcttgcttcacatgttagtattatgggggtgtcttcctttcctaaagtaacaaagaaattgtatttaaaaaaaaaaccacacatgaaaayttttaatgctcccacccctgagtctgtactctttttgaagtaggatattagacaggataacaaactaagatttgaatattttgaaatagcagttattttctgcatacagtaaatgatgggagtttttttcattgcctttcagctgatcttaagagaacaattgctgttcttctggatgacatcttacaacg

SEQ ID NO: 81977 - DNA, 600 bp, Chicken  19866894376118_2
atgatatgttttaacagcatttatttagaggagagtgtttaataactactcttttatgttggaaggtatttaagaatattctactgttgtccaaagctgaatggtgtcataggtggatattatctcggtgaaatttgaaatactgactttgaagaagcatcaccgttctgtttgaacttgaagttttgttaragtcttaatatttagctggcttgcttcacatgttagtattatgggggtgtcttcctttcctaaagtaacaaagaaattgtatttaaaaaaaaaaccacacatgaaaayttttaatgctcccacccctgagtctgtactctttttgaagtaggatattagacaggataacaaactaagatttgaatattttgaaatagcagttattttctgcatacagtaaatgatgggagtttttttcattgcctttcagctgatcttaagagaacaattgctgttcttctggatgacatcttacaacgtcttgtgaaattggaaaacaaagtggattacatcattgtgaatggttcagcaacaaataccactaatggaactagcaaccaagtgtcagtaaattcaagtaaacgtgca

SEQ ID NO: 81978 - DNA, 567 bp, Chicken  19866894376118_3
gaagcatacgctattctgttgaagaatgtgctggatatatatacgtataggcctaacttatgtgcataaggttcttaaagcactatttcattgcctttgagcagtgcttctaaagtgatctttgttgtcatcatttgatgtagtatgcccttggataatagtaaatggacagcaatgaggaatttagaggtaggtttataaatgtatttatttaagtataaatatagcatatcttttggataggtgagcagcattgtagcttattcatttttgtgatctgcattaaacaggtaactgagsagaacattgttaaacagatgttagaaaatgtgtatacttaacagtattttgttactcatttactaaaatattaaatcgaggatagcgctttggggggataatgttttagaattgtgacccaaagaatgtctttatttgcactatcagaatagctagagagaatttactgtatatttaagaaaatcgattataataggaaagcatcctaggtagttacactgttcaggtgtatccttgtgtcaaaattagggcagttagattaccaaa

SEQ ID NO: 81979 - DNA, 600 bp, Chicken  19866894376121_1
ttaatgtgttttttattgtgtttagatgggtaagcgcactgcaaagctgctggttgtccacttgatggtatcaagtaactgagctcaggagggtacagcagctgttcagacagaagcgaattctgcagcaggtaaagcagcagagctgtgtccttcacttgcagcagcagctcctgcactaagttcagtcactctggtgctggttctatgtgctgctctgatcccaaattctgggctagccttgtcccttcccaggggtgacatcagccagatgtaaaatgcagtgctgcctctgcaacrcaaagcacgagcacagttctttgggtgcttttgagttgattttaggctgactttgatcatagcatagcagagacgaacggaaaagttttcccaggtaggaaaaacgaaggttgagcaacaagattcttcagaatgagaaacacctgccctgagatttgctacccgctatgaaaagagcttgtgtcacgtcctgaagaaacacggggatctggatcgttttgtgatctttacagtgctaagcactgtgcaaactgaatgcagtcagggacctttccatctcaggccgtttagttgctgatg

SEQ ID NO: 81980 - DNA, 600 bp, Chicken  19866894376121_2
agcaacaagattcttcagaatgagaaacacctgccctgagatttgctacccgctatgaaaagagcttgtgtcacgtcctgaagaaacacggggatctggatcgttttgtgatctttacagtgctaagcactgtgcaaactgaatgcagtcagggacctttccatctcaggccgtttagttgctgatgtgaaacacgccttgttgaaagcaacctggcggcacaatgctgggaccaggagctgcctgggcagtgaccacgccgagcaaaacacagagccaggtctccgcgctggcacgcckctctatgactgctttagaacctctgcattaagcagagggcgatggcatcccaagggctggcagcaggcagcaggccgggtgtgcagcagggggcccagcgcctcgctggcgccaatggcctccacattacaggatggcaggcgatgcacgcagcacgcagccggcccgtgttgtgcaccaaataagagcatgcttgtgtgcttgtttgggattttttgtcccacataccgcttcttcctccggttgccagcagataggctgtgagcaatccctgctttacaggcagtggttgttatccat

SEQ ID NO: 81981 - DNA, 600 bp, Chicken  19866894376124_1
ataagggaatgaaaagttcacagaccatatctcatacatttccaagcataatccagcagcacgtgtgtatatacaacacaacatgggaacgttacgccagcagaagaatcaaaaactgttgaagtgacaacaattgacagactagatcagactcagctccatctagcacaagatcctgcctgcagcagtgacaactggctgtttcaacatttctgaggatggagagaaaggcatataggggcagtctgccaatctctggaacgctgcacacgctcctagtgccaggaaatccaaacaatktctaaagcaggttccagaaattacaaggctgtaatagcctatagttaatgtaattatgcaatcatgagccttgagaaataaacctccaaataaaattccaggacgctaagtttccaagaccttyctcaaaaatatgtttttaaacagatctaaacagaggccacaatcatggtgtgacaggtgatgagtcaaacacatgaaagagtatrtcaaaatacaaaaagaatttgtgtaaagtttcaaagaaagtaagtctgaatgtagttcttccagaaacctcctacggaatatttccctctg

SEQ ID NO: 81982 - DNA, 600 bp, Chicken  19866894376124_2
tgacaacaattgacagactagatcagactcagctccatctagcacaagatcctgcctgcagcagtgacaactggctgtttcaacatttctgaggatggagagaaaggcatataggggcagtctgccaatctctggaacgctgcacacgctcctagtgccaggaaatccaaacaatktctaaagcaggttccagaaattacaaggctgtaatagcctatagttaatgtaattatgcaatcatgagccttgagaaataaacctccaaataaaattccaggacgctaagtttccaagaccttyctcaaaaatatgtttttaaacagatctaaacagaggccacaatcatggtgtgacaggtgatgagtcaaacacatgaaagagtatrtcaaaatacaaaaagaatttgtgtaaagtttcaaagaaagtaagtctgaatgtagttcttccagaaacctcctacggaatatttccctctgtacatttactttatgtccctctttctgagcttcactgaagatcaaaagccatttttatacttttttcaaataaattccacataagttcatcctgatgcagctaaatttacacagtcatcattct

SEQ ID NO: 81983 - DNA, 600 bp, Chicken  19866894376124_3
tttctgaggatggagagaaaggcatataggggcagtctgccaatctctggaacgctgcacacgctcctagtgccaggaaatccaaacaatktctaaagcaggttccagaaattacaaggctgtaatagcctatagttaatgtaattatgcaatcatgagccttgagaaataaacctccaaataaaattccaggacgctaagtttccaagaccttyctcaaaaatatgtttttaaacagatctaaacagaggccacaatcatggtgtgacaggtgatgagtcaaacacatgaaagagtatrtcaaaatacaaaaagaatttgtgtaaagtttcaaagaaagtaagtctgaatgtagttcttccagaaacctcctacggaatatttccctctgtacatttactttatgtccctctttctgagcttcactgaagatcaaaagccatttttatacttttttcaaataaattccacataagttcatcctgatgcagctaaatttacacagtcatcattctaatttatattcaccttcttcctcccctgttattaggtaggagaattagcataaaattctcaaagcaaatcttatgcaagtaacaa

SEQ ID NO: 81984 - DNA, 599 bp, Chicken  19866894376129_1
  misc_feature (1)..(56): n is any nucleotide
nnnnnnnnnnnnnnnnnnnnnnnnnnnnnnnnnnnnnnnnnnnnnnnnnnnnnnnnctgaaaagctgcttctttttggtgcaacctgcagaaaaagagagtgtagacaagcagtattagtagatgggacattggtattgttctgggttgggagatgaggccactggggctgccagatctctgaccagagccaggaactccaggtttttgactcccagaaccatcactgagaataacagcatccacacagcaggcaacatgaatcccactgacaacctcagttccagacatgttatatggyttttgatctgctttctttgtrtttgggcctgtggcatccagaaagggaccggtattctcaccttaatatctcaaatatgcattcagagatcatttgattgaagatgatacagctctattatttccacatatgaatttagcctgattctgtaagaaatgcagtacttcagcatttctaaatgtctaacactacccaagttttggtccagaaagggcaatttatccaattgcctcctggtgtgctccactgggcttaccccagcagaaaacaagatgctcaagatgcatcaggttggatat

SEQ ID NO: 81985 - DNA, 599 bp, Chicken  19866894376129_2
  misc_feature (1)..(35): n is any nucleotide
nnnnnnnnnnnnnnnnnnnnnnnnnnnnnnnnnnnctgaaaagctgcttctttttggtgcaacctgcagaaaaagagagtgtagacaagcagtattagtagatgggacattggtattgttctgggttgggagatgaggccactggggctgccagatctctgaccagagccaggaactccaggtttttgactcccagaaccatcactgagaataacagcatccacacagcaggcaacatgaatcccactgacaacctcagttccagacatgttatatggyttttgatctgctttctttgtrtttgggcctgtggcatccagaaagggaccggtattctcaccttaatatctcaaatatgcattcagagatcatttgattgaagatgatacagctctattatttccacatatgaatttagcctgattctgtaagaaatgcagtacttcagcatttctaaatgtctaacactacccaagttttggtccagaaagggcaatttatccaattgcctcctggtgtgctccactgggcttaccccagcagaaaacaagatgctcaagatgcatcaggttggatattaggataaatttcttcattga

SEQ ID NO: 81986 - DNA, 561 bp, Chicken  19866894376129_3
acactacccaagttttggtccagaaagggcaatttatccaattgcctcctggtgtgctccactgggcttaccccagcagaaaacaagatgctcaagatgcatcaggttggatattaggataaatttcttcattgaacgagaggtgaggtgttggcacaggctgacaagggaggtgatggagtcacctggaggtgttcaagaactgtggagctgtggcactgagggatatggttggtgggcacgatgggagtgggtttgtgactgcttccccccatggaaatcacagtgggttgcacattwtcctgtgttccaacacagatgtgctcccaaacagatgtggtcattctggcactggggcaaagccagagcagattcacagatgagaatggaaataaattagaataaaaaaaggtatgggaggagaactggaaccataatgttactttttctttcaaactgatcagtacgcacgtcacacagttggatgtatgaatagtaaattattctattcatttcttactcttgatgaacagtaaattagtctaataacatttactgttc

SEQ ID NO: 81987 - DNA, 600 bp, Chicken  19866894376136_1
gtctggaaatctcttcaatgaggtctggaaatttgaattacaaagcttaagaaatagctggatttggaagtaagctttaatgcagattctgagtaaccaccatgtaaaacacttatttacaactaacaccatttcaataaataaatccagaagggtagcatcatgaacaagcagagagagaagcaaattccatttaatttgctcattatgttggaaagcacataaatgccagtttccacctcattaccaacatctgcaagttcaaaatgagcatctccttatcaaataaaggaaaaaaamccatctccatcagtttcattttactctgaatgccactttcctgttgagaagcattttttcattggaaagcaagcttaactatactttccaagcgtgggcttcattccccctcatctctgctatctccatgttagagatgcagtgtaagctattacctagacttcttccctacagccagcagagaaagaagagagcaatttattctacctgttttggccaccacgagagcctagacaactaaaaaactgagacccgcttggcaatgttaaaggcaagagaaggtgatttctatcctgcacc

SEQ ID NO: 81988 - DNA, 600 bp, Chicken  19866894376137_1
acagagctgccaacccatgcaagctctgtggtatttcttaagtcttggttcatggcgtcatggcactaactgagaatttcagtatttgtttaaaaactttcctcaagcaaggtatgaaaccggagatcaccttcaaaaccctcacagtagaaagaacaaaaaatatgttctaaaagcatgctgtttttttaggtgagtgttgcagggagctggatttggttttaaaggaagttgttaatgctgaagaagtgtagttttggtagtgagataacatctgtagggagagggcagagcagagcrtggtgcagccagaacattgctctatgatgctcagctgagctcggctgagtttttcctgccctgaagctgtcttatcatccaacacttgcaaagaggagtgtctctgtggagggcaacatcacagaaaggtttgagttggaagggaccctccaaggccctctggtcccactcccccaatgcacagggacacccacagctccatcagtgctcagagcccatcccctgacctcggctgtctgcagggatggggcagcaccgcctctctggtcaacgtgtgccgtgcctcaccgtcagctcctg

SEQ ID NO: 81989 - DNA, 600 bp, Chicken  19866894376144_1
cttctttcctctctgtttccttgttctatgttttcttataatcatcatttaaattttgtgttgtgtagtgctaaagggcattactctgtaacacctgtaactgtaaatatcaactgctttttaaagatagctttgtacccagaagttttcccacatcatagtgaaaagctacaggtgtgtaaatgttagaagaatggggaaaaaaagcagagttgtgtcaggagtgggtgtatcaccactctgagtttatcatattttcatcttaacgtccgcatctaatgttaagatttcttctatacmggaatgttccctgtataaaaaccaaakgagaggagtcagcaaagtacagtcagatggtaaagaacttaagactgcatattacaagcctgattcatttatgctgttccaacccatgcttcaggatcccracaaaagcagtaaccacamatgaccttgtgygtctaaaagcatttcaattgcaatactttggcagacaggtgtgtatctatggagtaactatacaaacagtgactcagaactcgaggtttggtggttgtattaaattcacttaataagattgtttcagctgccggtgcctct

SEQ ID NO: 81990 - DNA, 600 bp, Chicken  19866894376144_2
atgttttcttataatcatcatttaaattttgtgttgtgtagtgctaaagggcattactctgtaacacctgtaactgtaaatatcaactgctttttaaagatagctttgtacccagaagttttcccacatcatagtgaaaagctacaggtgtgtaaatgttagaagaatggggaaaaaaagcagagttgtgtcaggagtgggtgtatcaccactctgagtttatcatattttcatcttaacgtccgcatctaatgttaagatttcttctatacmggaatgttccctgtataaaaaccaaakgagaggagtcagcaaagtacagtcagatggtaaagaacttaagactgcatattacaagcctgattcatttatgctgttccaacccatgcttcaggatcccracaaaagcagtaaccacamatgaccttgtgygtctaaaagcatttcaattgcaatactttggcagacaggtgtgtatctatggagtaactatacaaacagtgactcagaactcgaggtttggtggttgtattaaattcacttaataagattgtttcagctgccggtgcctcttttttaggattgagtcttctggacaaa

SEQ ID NO: 81991 - DNA, 600 bp, Chicken  19866894376144_3
agctttgtacccagaagttttcccacatcatagtgaaaagctacaggtgtgtaaatgttagaagaatggggaaaaaaagcagagttgtgtcaggagtgggtgtatcaccactctgagtttatcatattttcatcttaacgtccgcatctaatgttaagatttcttctatacmggaatgttccctgtataaaaaccaaakgagaggagtcagcaaagtacagtcagatggtaaagaacttaagactgcatattacaagcctgattcatttatgctgttccaacccatgcttcaggatcccracaaaagcagtaaccacamatgaccttgtgygtctaaaagcatttcaattgcaatactttggcagacaggtgtgtatctatggagtaactatacaaacagtgactcagaactcgaggtttggtggttgtattaaattcacttaataagattgtttcagctgccggtgcctcttttttaggattgagtcttctggacaaaagcaaattttctttttcataacattgtctctgcattagtgtgttacattagtttatctacagtgtagaaacgtatcccagttccataatcatttttcctgt

SEQ ID NO: 81992 - DNA, 600 bp, Chicken  19866894376144_4
ttcccacatcatagtgaaaagctacaggtgtgtaaatgttagaagaatggggaaaaaaagcagagttgtgtcaggagtgggtgtatcaccactctgagtttatcatattttcatcttaacgtccgcatctaatgttaagatttcttctatacmggaatgttccctgtataaaaaccaaakgagaggagtcagcaaagtacagtcagatggtaaagaacttaagactgcatattacaagcctgattcatttatgctgttccaacccatgcttcaggatcccracaaaagcagtaaccacamatgaccttgtgygtctaaaagcatttcaattgcaatactttggcagacaggtgtgtatctatggagtaactatacaaacagtgactcagaactcgaggtttggtggttgtattaaattcacttaataagattgtttcagctgccggtgcctcttttttaggattgagtcttctggacaaaagcaaattttctttttcataacattgtctctgcattagtgtgttacattagtttatctacagtgtagaaacgtatcccagttccataatcatttttcctgtcaatcagaaaaggaagcaa

SEQ ID NO: 81993 - DNA, 600 bp, Chicken  19866894376144_5
agtgaaaagctacaggtgtgtaaatgttagaagaatggggaaaaaaagcagagttgtgtcaggagtgggtgtatcaccactctgagtttatcatattttcatcttaacgtccgcatctaatgttaagatttcttctatacmggaatgttccctgtataaaaaccaaakgagaggagtcagcaaagtacagtcagatggtaaagaacttaagactgcatattacaagcctgattcatttatgctgttccaacccatgcttcaggatcccracaaaagcagtaaccacamatgaccttgtgygtctaaaagcatttcaattgcaatactttggcagacaggtgtgtatctatggagtaactatacaaacagtgactcagaactcgaggtttggtggttgtattaaattcacttaataagattgtttcagctgccggtgcctcttttttaggattgagtcttctggacaaaagcaaattttctttttcataacattgtctctgcattagtgtgttacattagtttatctacagtgtagaaacgtatcccagttccataatcatttttcctgtcaatcagaaaaggaagcaatgtgactgacag

SEQ ID NO: 81994 - DNA, 600 bp, Chicken  19866894376148_1
atctgctcaaaaaaaaaaaaaaaacattctccacctatgggataaaccacttttaagataatcaaaccctaataatttctttgagaaaatacagacaagatgctgtaaatacaccatactaaaggacacagtgcatacatgatctcctatcaaatttgcagacttaagctgccctgcagctttcagaaggccattccagccacatctgggcctttacactgagccggttagctcaactccacctgcctacacagctatcctactgcacctcccagcgtcccagtctttcccagttttgargtgagagcaacctgcatgggatgaaggaaacaacctgactactgccaggagctgcatctcttaagaacacgtgccagaatatatagcttgatctgaaacagctaaactgtcagcattgcgctcccgtctgtctgcatgacaatgatttttatttgtatgaatatatatattatatgaggctcattcatttcaaatacaaattacagtgtagcaaattagaacttgtcccatctctaccaatatttctctgttcagtacttctttctatatcactggttttcatacagtcacattgcaaag

SEQ ID NO: 81995 - DNA, 600 bp, Chicken  19866894376155_1
gtatgtataagtcatacatttggaaaattgttttcttccaaaggcagtcataagaataatctgctattcaggaactgatttacaaatacatgcatatttcttctgtacttctatgatttactgtgagtaataggaaggcactggatagttttccaatggctgcttgaaaaaaatactaatcaaatactagttgagttgaacaagacacttttaaacaaatactgatttgattttaccacccactcaaaaaataaactgtgaggaaaagttaaactgaagttgagaactcttcattctgcytgtgtggaattaatcattcctcatttgttagcaaatcagcaaacaggcttactggatagaaaaacaaaagctgaacagaagaacaacagagctaacatatgttgggcacactgaagggtaaaatcaggtctctaacatatttgttttgtgaatgggtcagctttatgcagccagaattaaatgagaaaatgatacaaaagggaggagaagactaccctgacatttcacactagaacacatgcttgttttgatctaatgaaaagtgggaaaaaatcatttcaaaaccatgcaatatgaatt

SEQ ID NO: 81996 - DNA, 599 bp, Chicken  19866894376158_1
  misc_feature (1)..(30): n is any nucleotide
nnnnnnnnnnnnnnnnnnnnnnnnnnnnnncagagatgatgggaggcgataacggcccctccggtttgttgacaccaacagcaccaaatggcccttttcttttgtcggggcttcggggacctcctgtcttaacttggaattgaacttggacttccgaccagacaggggccctaaattgggcccgatattttatttgtctgtctccgaatcgctgagtcgagcagcgccggcgtggaaataatcgcaataattaaggatggggaactgctgggacgttccgcaggggctgtaacaataaayaaagaaaagaaaagaaaagaaaacccagcgtttttttgcctcaaaatgcggcgtggccgcaggacggactcggagggattttctctttgcctcctctgcctctcagcttcggcgttttgcgggggaaagggggaaaatagagacaaatcacggcctcaaagccatagggggggaagggtttgtccccgcatatccatctctggcgctgccccggggagaaatgggcactgaagggaagttttgtatttcccacactctctttttttttttttttgtctgcattgcaaaatctctgcgga

SEQ ID NO: 81997 - DNA, 599 bp, Chicken  19866894376158_2; identical to SEQ ID NO: 81996
  misc_feature (1)..(30): n is any nucleotide

SEQ ID NO: 81998 - DNA, 599 bp, Chicken  19866894376158_3; identical to SEQ ID NO: 81996
  misc_feature (1)..(30): n is any nucleotide

SEQ ID NO: 81999 - DNA, 599 bp, Chicken  19866894376158_4; identical to SEQ ID NO: 81996
  misc_feature (1)..(30): n is any nucleotide

SEQ ID NO: 82000 - DNA, 599 bp, Chicken  19866894376158_5; identical to SEQ ID NO: 81996
  misc_feature (1)..(30): n is any nucleotide

SEQ ID NO: 82001 - DNA, 600 bp, Chicken  19866894376160_1
tcactgcatgtgttacctttaaataattctagtctttcagttctaagggaagatttgggctgaattaaacaattagctgctactcaacagccaaaatttgattctctcaaagtttatgctcccaattttttcacattggcaatgtagtttaaaatgggagaagatagagggaagagtttaaaatgcactgcatgctgttcattcttgtgagctggaagattccatgtttgtgtgtaatccaacagaaacagtctaccagctactgccacgttttcatctattggtaaacatcatctgccrgttgctcttatgggaggaggattgaattacttccagatggagagctccttcagccaattttaggctttccagctgatgtaagacagcaggtcagtaattcagaggtgtggttttattcttcttcttgctgttctgcttcctaccactagtggaattggtgatgttaaatacgataacgtgatgctgcccaaagtgggggttttgttgggcgtaattgtttttgtttttaattgagcagcgtaaacagaaaaaaaaaggattagcaaagttttggtgactaaccgttctgaatgtataaag

SEQ ID NO: 82002 - DNA, 599 bp, Chicken  19866894376167_1
  misc_feature (1)..(128): n is any nucleotide
nnnnnnnnnnnnnnnnnnnnnnnnnnnnnnnnnnnnnnnnnnnnnnnnnnnnnnnnnnnnnnnnnnnnnnnnnnnnnnnnnnnnnnnnnnnnnnnnnnnnnnnnnnnnnnnnnnnnnnnnnnnnnnnntggggatatcgagagagtaaaggggaaaggaagagtcataaatctgtctgtgtcgaaagacgtttggatgtctccattcttgcttctgtttggccagtgtttgctgggcttaaaggcttcccgttagactgggaccatgaggcaggaggggcttgctttgaggcagctgtcytgggctggtcccatggacatggtgctctgcgcacacysagtttcacatcaccctttggatcttactgtgttcaaccttctttttgctgtgtgtgtgttgttctcaatcacccaaggaaggacatctgcgcagcaatgaacagaccctgtgagaccctgggtctgtcccatgtggcaggaatgtgccagccccacaggagctgcaacatcaatgaggacacagggctgcccctggccttcaccgtggcccacgagcttggacacaggtacccyctgtttccttcttctcctttctgacct

SEQ ID NO: 82003 - DNA, 599 bp, Chicken  19866894376167_2
  misc_feature (1)..(91): n is any nucleotide
nnnnnnnnnnnnnnnnnnnnnnnnnnnnnnnnnnnnnnnnnnnnnnnnnnnnnnnnnnnnnnnnnnnnnnnnnnnnnnnnnnnnnnnnnnntggggatatcgagagagtaaaggggaaaggaagagtcataaatctgtctgtgtcgaaagacgtttggatgtctccattcttgcttctgtttggccagtgtttgctgggcttaaaggcttcccgttagactgggaccatgaggcaggaggggcttgctttgaggcagctgtcytgggctggtcccatggacatggtgctctgcgcacacysagtttcacatcaccctttggatcttactgtgttcaaccttctttttgctgtgtgtgtgttgttctcaatcacccaaggaaggacatctgcgcagcaatgaacagaccctgtgagaccctgggtctgtcccatgtggcaggaatgtgccagccccacaggagctgcaacatcaatgaggacacagggctgcccctggccttcaccgtggcccacgagcttggacacaggtacccyctgtttccttcttctcctttctgacctctgtcctctatggcttagtcaggacttgacaagggac

SEQ ID NO: 82004 - DNA, 599 bp, Chicken  19866894376167_3
  misc_feature (1)..(90): n is any nucleotide
nnnnnnnnnnnnnnnnnnnnnnnnnnnnnnnnnnnnnnnnnnnnnnnnnnnnnnnnnnnnnnnnnnnnnnnnnnnnnnnnnnnnnnnnnntggggatatcgagagagtaaaggggaaaggaagagtcataaatctgtctgtgtcgaaagacgtttggatgtctccattcttgcttctgtttggccagtgtttgctgggcttaaaggcttcccgttagactgggaccatgaggcaggaggggcttgctttgaggcagctgtcytgggctggtcccatggacatggtgctctgcgcacacysagtttcacatcaccctttggatcttactgtgttcaaccttctttttgctgtgtgtgtgttgttctcaatcacccaaggaaggacatctgcgcagcaatgaacagaccctgtgagaccctgggtctgtcccatgtggcaggaatgtgccagccccacaggagctgcaacatcaatgaggacacagggctgcccctggccttcaccgtggcccacgagcttggacacaggtacccyctgtttccttcttctcctttctgacctctgtcctctatggcttagtcaggacttgacaagggaca

SEQ ID NO: 82005 - DNA, 600 bp, Chicken  19866894376167_4
ggaggggcttgctttgaggcagctgtcytgggctggtcccatggacatggtgctctgcgcacacysagtttcacatcaccctttggatcttactgtgttcaaccttctttttgctgtgtgtgtgttgttctcaatcacccaaggaaggacatctgcgcagcaatgaacagaccctgtgagaccctgggtctgtcccatgtggcaggaatgtgccagccccacaggagctgcaacatcaatgaggacacagggctgcccctggccttcaccgtggcccacgagcttggacacaggtacccyctgtttccttcttctcctttctgacctctgtcctctatggcttagtcaggacttgacaagggacaaataaaagttggaaggatgttgctgagcagttccctgaatctcagggaatgtaccctgagagatttgtttcagagttaggcttttggttgccctagattcaaggaacccttcgcaaattacacatttatgtacacctgtgtgttgctgatactaaaagttgtcgagaagagaattgttcattgagaggttttaaaatagagtctatgtgtaccataagtaacaggatttttctga

SEQ ID NO: 82006 - DNA, 600 bp, Chicken  19866894376184_1
aggtgagagagaagctttccaagaaaaggctcagtattgcaccgagagacagaatttagtggtgtggtggtggtgtgctgacctgaacctcaatcccacagccccttagccttgcagctcctgtggcttggtggcagtgctgctgtgtggctgcaaacacaagcaaggacatgcagtgggcacttctgtcacacagattgtttccaccacagcaagtctatcgttagcagagatctcctcatggcagtgcctgaaggctcagggcttctttaaaagttgctgccaggaacattcccaagsaatggatggctcagattcccagacttactctcctactcatgctaaaaccaagctttaattgctagcattaaaatgtgatatttagagctagccctcactgcattccaaagcaaaacactgatccataatgcttgcccatatccttacactgtcctgaaaacctttagcagtacaccaagacctctcactaaacctttgcttcatctctgccccaaaaggtgagatttgacccttaatccctatcctgaacacccaacacccacagacactgttcctgtgctctgccctcctcaccttcaa

SEQ ID NO: 82007 - DNA, 600 bp, Chicken  19866894376192_1
tcggggtgtcacctcacctcaccggggctgcctcccccctatggggatggtggggatgtggggagggactcacagtggccacggggtcgttgctgcgggtcgccaccaggctgagcttcttgacgtgggtgttggttttcatggcttcacagatggccttcagcgtggagatgggaatgtcctgcagtgaggggacgtggctgtgaccgggggggtggggacggccccatagtggtgcagtgtcaccaagggggtgcactgcaggggtctggacgtctccaggggcgcagccgcccccargagcgcgcagggtgtcatcgaaggattgcaaggggcaccaaggggatggaggcattatcgggggacgcagcacctccagagacccccgggctcaggatgagcaccccgaggtcagcgcagggcatggaggctctgcggacagcccaggccgcgggtgccgcsctcaccttgatgttgttgaggttgacgtcttccagcgcgctgtcgttggcctggatctgccgcagcgtctcctccacgttggtggggttcgggggctcatccggcaccggtttgtacttatcggcttcaccacgcctg

SEQ ID NO: 82008 - DNA, 459 bp, Chicken  19866894376192_2
gcgtggagatgggaatgtcctgcagtgaggggacgtggctgtgaccgggggggtggggacggccccatagtggtgcagtgtcaccaagggggtgcactgcaggggtctggacgtctccaggggcgcagccgcccccargagcgcgcagggtgtcatcgaaggattgcaaggggcaccaaggggatggaggcattatcgggggacgcagcacctccagagacccccgggctcaggatgagcaccccgaggtcagcgcagggcatggaggctctgcggacagcccaggccgcgggtgccgcsctcaccttgatgttgttgaggttgacgtcttccagcgcgctgtcgttggcctggatctgccgcagcgtctcctccacgttggtggggttcgggggctcatccggcaccggtttgtacttatcggcttcaccacgcctggcacggggggggacagggacg

SEQ ID NO: 82009 - DNA, 600 bp, Chicken  19866894376195_1
cgaggcccctaagaagggaaaaggaaaatgaaaaaacaaacaaacaaacaaacacggcaagtaaaacactacagatttctgcagatagaactagtaacaacactgcaaacagggaagagggtcattttagttagtaataatgttcctaaaacttcttcaccatagtgacatgatacagcatggtacagcatttaatgggatcacagacaaaacaagataacatcctatgaagctagacagtcccaacataatgtgcaatttcaccgatactgacactcttcccaggattttattagaggytttaagtaccgatgatgttcaatagcatgcactattccaaaagcatacaaagacgatgattttattaagtaaaaataaaagcctaatgtgaacagaatacttcataggctacattagcatgaaacagcttacaaaacatcgtctttgatctataaaattttgaaggaaggctcaggagacaatgctgcctcattaaaagatcatttctctcttgaagagattgtatctcccactgctaacaaaattacctggcaaaaactgaatgcttgagagaaaaggaggcagtttaagagaccatgt

SEQ ID NO: 82010 - DNA, 599 bp, Chicken  19866894376198_1
  misc_feature (1)..(97): n is any nucleotide
nnnnnnnnnnnnnnnnnnnnnnnnnnnnnnnnnnnnnnnnnnnnnnnnnnnnnnnnnnnnnnnnnnnnnnnnnnnnnnnnnnnnnnnnnnnnnnnnntgccagcttgcattccagcccatcaaaagcacaacctgggttatgctgcagcacaggcaacaaaacccaggactgtgcagaaagacgtgtgggcactgagcaatcttggagcactgcaactcactgcccatcaagggtgtgagcacaggattactgaagtgctgggagaatagtttgcatccagaaaaggagcgtacttggawaacagctgaggacaggaatgaaaacyctttttccccctctttaaaacaaacaaacaaacaaacaaacctgaaagaccacctcaggagaccattccttttccaaaatcccaaatacgtttgtcagatggcaacatactaagttacatttgccattggcccctgctgcttcttactgctcaagtaccccaggaatgtgacacctgataaaagttttcttaaaatctctcaatttacatcagaactgcttcctccctaagaaggaaaattccattctttctcatccccaccrtatctcacta

SEQ ID NO: 82011 - DNA, 599 bp, Chicken  19866894376198_2
  misc_feature (1)..(71): n is any nucleotide
nnnnnnnnnnnnnnnnnnnnnnnnnnnnnnnnnnnnnnnnnnnnnnnnnnnnnnnnnnnnnnnnnnnnnnntgccagcttgcattccagcccatcaaaagcacaacctgggttatgctgcagcacaggcaacaaaacccaggactgtgcagaaagacgtgtgggcactgagcaatcttggagcactgcaactcactgcccatcaagggtgtgagcacaggattactgaagtgctgggagaatagtttgcatccagaaaaggagcgtacttggawaacagctgaggacaggaatgaaaacyctttttccccctctttaaaacaaacaaacaaacaaacaaacctgaaagaccacctcaggagaccattccttttccaaaatcccaaatacgtttgtcagatggcaacatactaagttacatttgccattggcccctgctgcttcttactgctcaagtaccccaggaatgtgacacctgataaaagttttcttaaaatctctcaatttacatcagaactgcttcctccctaagaaggaaaattccattctttctcatccccaccrtatctcactaattcacctctccctggtcaacagacc

SEQ ID NO: 82012 - DNA, 600 bp, Chicken  19866894376198_3
cgtacttggawaacagctgaggacaggaatgaaaacyctttttccccctctttaaaacaaacaaacaaacaaacaaacctgaaagaccacctcaggagaccattccttttccaaaatcccaaatacgtttgtcagatggcaacatactaagttacatttgccattggcccctgctgcttcttactgctcaagtaccccaggaatgtgacacctgataaaagttttcttaaaatctctcaatttacatcagaactgcttcctccctaagaaggaaaattccattctttctcatccccaccrtatctcactaattcacctctccctggtcaacagaccttggccyttcttattcctcaaacattaattcagcaaggaagtgcctggctctcaccttgatcccagctccatgttttgctataaaggcgtccttcctcctttgcactatcctttcatgtacaaattagccctttcctccttgttcatcactgcctccgtctgagagtagcagagtgcctgggctccaggactacttactactgagactcacaacaactggaaaaatacccattgaaaagatgtactccacttaccacagttagt

SEQ ID NO: 82013 - DNA, 600 bp, Chicken  19866894376198_4
ccccctctttaaaacaaacaaacaaacaaacaaacctgaaagaccacctcaggagaccattccttttccaaaatcccaaatacgtttgtcagatggcaacatactaagttacatttgccattggcccctgctgcttcttactgctcaagtaccccaggaatgtgacacctgataaaagttttcttaaaatctctcaatttacatcagaactgcttcctccctaagaaggaaaattccattctttctcatccccaccrtatctcactaattcacctctccctggtcaacagaccttggccyttcttattcctcaaacattaattcagcaaggaagtgcctggctctcaccttgatcccagctccatgttttgctataaaggcgtccttcctcctttgcactatcctttcatgtacaaattagccctttcctccttgttcatcactgcctccgtctgagagtagcagagtgcctgggctccaggactacttactactgagactcacaacaactggaaaaatacccattgaaaagatgtactccacttaccacagttagtgaaactgactttgtgccacagcatatcagtgagcaattcctaa

SEQ ID NO: 82014 - DNA, 600 bp, Chicken  19866894376198_5
tccatgttttgctataaaggcgtccttcctcctttgcactatcctttcatgtacaaattagccctttcctccttgttcatcactgcctccgtctgagagtagcagagtgcctgggctccaggactacttactactgagactcacaacaactggaaaaatacccattgaaaagatgtactccacttaccacagttagtgaaactgactttgtgccacagcatatcagtgagcaattcctaaaacacggacacatactaagtgcttcctgacaaaataaaacctccacatttttccctgtcragagagagaagccaaacccttgataggaggtggtggtggggatagaagacaacgaccygagtcgtttaaaaataatatactgaaaatcaaaccagcaagagcttcaaagaaaattctaaagccggggtacttccccacatatcttccacaacaaaaaaataataataaagaatcctcccctcaccctgccctgcaccctcctcagttccaggaagtgacactcacgcaggtgtgccggcagtctgatcgtgtcttcctccatcctgatcgctcgaggcactgggacatgtagtggtgacg

SEQ ID NO: 82015 - DNA, 600 bp, Chicken  19866894376198_6
tagccctttcctccttgttcatcactgcctccgtctgagagtagcagagtgcctgggctccaggactacttactactgagactcacaacaactggaaaaatacccattgaaaagatgtactccacttaccacagttagtgaaactgactttgtgccacagcatatcagtgagcaattcctaaaacacggacacatactaagtgcttcctgacaaaataaaacctccacatttttccctgtcragagagagaagccaaacccttgataggaggtggtggtggggatagaagacaacgaccygagtcgtttaaaaataatatactgaaaatcaaaccagcaagagcttcaaagaaaattctaaagccggggtacttccccacatatcttccacaacaaaaaaataataataaagaatcctcccctcaccctgccctgcaccctcctcagttccaggaagtgacactcacgcaggtgtgccggcagtctgatcgtgtcttcctccatcctgatcgctcgaggcactgggacatgtagtggtgacgaggaagtgtaatttggtactgggctggctggaggtgtgtacgaaattctctcttgctg

SEQ ID NO: 82016 - DNA, 600 bp, Chicken  19866894376201_1
gtagatacagttctgtatcataaaagggttatgtgaacagagcccatgttgaaccatgactgcagaaacaacatatgagtacagacaggatcccctcccccacagccccatgccatgcttgtgctatatgaatgttgatagaagtgttaattacttgtgctgtactgtaggattctgatggtaattctatataattgaaataaatcctggatgctcatcagttgctttccaaagtggataaaccaaggcataacttaaaaccacggggatgtggcatctctgtatgaagatgaaagatgkaacagaggccatctcttaaggaaagaaattcatggcccttctctttgggggcggatgaagtcccaatgkagtgacagttgtcaggtctatggtcccctcttccaaaagacagaaagagatttacttcttactacacatttaggatttaaacaaaatgctttactctgagaaytattcaggaatcrtttggccattggcagccatactactgctatcagtactctttaaactgtgcataattataaagtccattcgttattttagacctaaatcaagcacttacataagctctgtgcctta

SEQ ID NO: 82017 - DNA, 600 bp, Chicken  19866894376201_2
aacatatgagtacagacaggatcccctcccccacagccccatgccatgcttgtgctatatgaatgttgatagaagtgttaattacttgtgctgtactgtaggattctgatggtaattctatataattgaaataaatcctggatgctcatcagttgctttccaaagtggataaaccaaggcataacttaaaaccacggggatgtggcatctctgtatgaagatgaaagatgkaacagaggccatctcttaaggaaagaaattcatggcccttctctttgggggcggatgaagtcccaatgkagtgacagttgtcaggtctatggtcccctcttccaaaagacagaaagagatttacttcttactacacatttaggatttaaacaaaatgctttactctgagaaytattcaggaatcrtttggccattggcagccatactactgctatcagtactctttaaactgtgcataattataaagtccattcgttattttagacctaaatcaagcacttacataagctctgtgccttagatttaattactggatgtgattcgcatcagagacactgattcatccaaagtagataattgccagatccc

SEQ ID NO: 82018 - DNA, 600 bp, Chicken  19866894376201_3
ttctgatggtaattctatataattgaaataaatcctggatgctcatcagttgctttccaaagtggataaaccaaggcataacttaaaaccacggggatgtggcatctctgtatgaagatgaaagatgkaacagaggccatctcttaaggaaagaaattcatggcccttctctttgggggcggatgaagtcccaatgkagtgacagttgtcaggtctatggtcccctcttccaaaagacagaaagagatttacttcttactacacatttaggatttaaacaaaatgctttactctgagaaytattcaggaatcrtttggccattggcagccatactactgctatcagtactctttaaactgtgcataattataaagtccattcgttattttagacctaaatcaagcacttacataagctctgtgccttagatttaattactggatgtgattcgcatcagagacactgattcatccaaagtagataattgccagatcccagtgtattaaagaaagacatttatctcatgcctcgcttcctcttgctggggctttcttctctgccatttaatgtgggcctctttctgacacctttaaaaggtg

SEQ ID NO: 82019 - DNA, 600 bp, Chicken  19866894376201_4
tctatataattgaaataaatcctggatgctcatcagttgctttccaaagtggataaaccaaggcataacttaaaaccacggggatgtggcatctctgtatgaagatgaaagatgkaacagaggccatctcttaaggaaagaaattcatggcccttctctttgggggcggatgaagtcccaatgkagtgacagttgtcaggtctatggtcccctcttccaaaagacagaaagagatttacttcttactacacatttaggatttaaacaaaatgctttactctgagaaytattcaggaatcrtttggccattggcagccatactactgctatcagtactctttaaactgtgcataattataaagtccattcgttattttagacctaaatcaagcacttacataagctctgtgccttagatttaattactggatgtgattcgcatcagagacactgattcatccaaagtagataattgccagatcccagtgtattaaagaaagacatttatctcatgcctcgcttcctcttgctggggctttcttctctgccatttaatgtgggcctctttctgacacctttaaaaggtgctgttgtacaggt

SEQ ID NO: 82020 - DNA, 600 bp, Chicken  19866894376214_1
gagttgactgtctgatggcagttctatacactccatttgaaaatttgcaggcaatttattttgttgactgaaagtggagttgcaaatgtataaaaaaaaaagtgggtttttttctgatcttgaaacctattatcaaattcctttatggaatttgaagaaaaactgaaaggaaggcagtatttttttttcattattcacaggactgtgcttatccaagctatcagagtgctcaaatttattcgcataacttgagttactactgcactgcacccttcccttgttgtggtttcagttgagacygtgttaatagcacaccaatgtttggttgctgctgagtgatggktgtstgtgtgtggggctgagccaggctgcttgataggaaagagctgccaccatgctgctgcagggtgaggtttgactgggatgcatgcagcctgtggcctagacatgcctgagttaagtcatacaggctcccgatgctaatttcttgtgactgagtttatatctggtgttgctagttttgcttccttcattttaccaatgcagtagttttgcaaacgttgaaccaacataacacttcaattttaggagcaagaaact

SEQ ID NO: 82021 - DNA, 600 bp, Chicken  19866894376214_2
tttgcaggcaatttattttgttgactgaaagtggagttgcaaatgtataaaaaaaaaagtgggtttttttctgatcttgaaacctattatcaaattcctttatggaatttgaagaaaaactgaaaggaaggcagtatttttttttcattattcacaggactgtgcttatccaagctatcagagtgctcaaatttattcgcataacttgagttactactgcactgcacccttcccttgttgtggtttcagttgagacygtgttaatagcacaccaatgtttggttgctgctgagtgatggktgtstgtgtgtggggctgagccaggctgcttgataggaaagagctgccaccatgctgctgcagggtgaggtttgactgggatgcatgcagcctgtggcctagacatgcctgagttaagtcatacaggctcccgatgctaatttcttgtgactgagtttatatctggtgttgctagttttgcttccttcattttaccaatgcagtagttttgcaaacgttgaaccaacataacacttcaattttaggagcaagaaactgcatcagtccttgtactgatgcagcagtaactgatctctgcac

SEQ ID NO: 82022 - DNA, 600 bp, Chicken  19866894376214_3
caggcaatttattttgttgactgaaagtggagttgcaaatgtataaaaaaaaaagtgggtttttttctgatcttgaaacctattatcaaattcctttatggaatttgaagaaaaactgaaaggaaggcagtatttttttttcattattcacaggactgtgcttatccaagctatcagagtgctcaaatttattcgcataacttgagttactactgcactgcacccttcccttgttgtggtttcagttgagacygtgttaatagcacaccaatgtttggttgctgctgagtgatggktgtstgtgtgtggggctgagccaggctgcttgataggaaagagctgccaccatgctgctgcagggtgaggtttgactgggatgcatgcagcctgtggcctagacatgcctgagttaagtcatacaggctcccgatgctaatttcttgtgactgagtttatatctggtgttgctagttttgcttccttcattttaccaatgcagtagttttgcaaacgttgaaccaacataacacttcaattttaggagcaagaaactgcatcagtccttgtactgatgcagcagtaactgatctctgcacaaga

SEQ ID NO: 82023 - DNA, 600 bp, Chicken  19866894376222_1
agcagtcagttagaggcctgggcagctggaggttgaactctgggattggcctatgtttcaaatcccagcaaatgcaacgtcatgtactgagagtgctgatatcctctgtaattaaaaggcgtgagttgaagttaagtttgcagcatgtggctaaggaggtgagaagtctgcagatataaacaacaactgagaagtgtatttgtcccctggtgagaactcagagctggctggtacagaaatatgaccttggaggccctgcatagcacagaatatatagaggatatatattttctgttcacygctaaaatacaactaccaatatttatcttttttctataggtttatagtcacggctctaatatggctacaaatatctgtgtcttttctatggctccaaacagctttaaatttaagctttttgtaactataagctctccctctgggatgcgttccttatgtggagcatggagaggccgaagaggcrtttcaagctatcactaagcctccccttggctgaaagctgccctaccagcactacagggctggcagtgccatctgcccacaggctacagagatgccaatgctgtaacactgaagaaa

SEQ ID NO: 82024 - DNA, 600 bp, Chicken  19866894376222_2
aactgagaagtgtatttgtcccctggtgagaactcagagctggctggtacagaaatatgaccttggaggccctgcatagcacagaatatatagaggatatatattttctgttcacygctaaaatacaactaccaatatttatcttttttctataggtttatagtcacggctctaatatggctacaaatatctgtgtcttttctatggctccaaacagctttaaatttaagctttttgtaactataagctctccctctgggatgcgttccttatgtggagcatggagaggccgaagaggcrtttcaagctatcactaagcctccccttggctgaaagctgccctaccagcactacagggctggcagtgccatctgcccacaggctacagagatgccaatgctgtaacactgaagaaaatggaaaaaaaatactgatgtgccccatatggcaggtaggttccttcttacaaagctttgaatttccaccctctgctttagagcatatgtgcctttatacataatcacttcccctttctttctgccatttctaatcagaaaaggacccagaaggcactcaccaaaaccccagtgctctgacaca

SEQ ID NO: 82025 - DNA, 600 bp, Chicken  19866894376225_1
gcaggaaggaccaaaccctgggctgctggaagagcagcaaggggagattcctgtaaggttgggatctgacctgacgagcagctcagcagtgattattttctaacacccagagcacataataactccgagttcaaaatcctttattttctttggcatagcgagagatgagacctaacacgacaatcatccataatgcatgaaacaagcaacaaggcagaaagcaaacagaaaggagacgaaatgcacagcatacacagcgatgcggggcagcaccagctgtgcttctcctgccccttccaygcagggtccccggctgtgttgtaggaaacaaggctcgatccgtgaggagggaagggggcaacgtttgctcaccccatccccaggggcagggctggttttgcagcgtgggtgctggagttgatccatgtggttcagtagctgggatcagcacagctccacgagctgcacggggctctggtggggcatccccagggagaaaaagggaaacccatccaggtaaaaaaaaaaaacaaacatggcaaggaggcatcggggctccgtagaccgaaagtcgcttttgcagccttgcatgggaggaaa

SEQ ID NO: 82026 - DNA, 600 bp, Chicken  19866894376227_1
tgtgtaacatggggtagttttaaaacatcaatctataagtgtctacctttttagttttagctacttgtttagctgttttccaacgctatttgtatttgaagacatggaattgtaggtggagttgtagcatagaattaaaaagttgtatagctgtactttacttccacagtcttttttggaaatttaaaaacccatgctccatgcgtaatgtttgtatattttggttttatattagcaaaggtgctgttatgtggtgatcatcctatgttttacagccgagagacccacaagattgcagtrttttatgttgctgagggacaagaagataaacactccattcttactaatactgggggaagtcaagcctatgaggattttgtagctggccttggctgggaggtacttattcaatttttttattctaagtttgtctacggagaaaatgatatatccctacagttctttggctctttaaattacttacaaatacagtcttgctaataggatgcagagaataattctaatttcattagcaatactagatacttaattctaagctttttcaatttaggaaagtttatgcaggcagggattattcat

SEQ ID NO: 82027 - DNA, 600 bp, Chicken  19866894376227_2
cagttctttggctctttaaattacttacaaatacagtcttgctaataggatgcagagaataattctaatttcattagcaatactagatacttaattctaagctttttcaatttaggaaagtttatgcaggcagggattattcattaatatgcaattgtgtacttcatgaactaatggggaggtatcttgattgccctgtgggcctgtaaagcatgaagttcactgaagctttagctttgttcaaatttatgaatcctaaaaatatgagaatgcatcttaactcatgttttcttctagctycctttcactgcaggcatgtgcctattcgcaatcactccgctctcttcacatgtctgttccagcagtcagaaatgctgtcatataccctatcatctcttcagcactgtaactcttcagtcagtagtctgatattgttaaagggatttcccttttttgtgtcctttgtttctggctgcataagattaacttcctgagacacagctgtgtctcacagaagtacagaaatcattcctgcttctgactggctatgaaaagtgaccatcaatttttaaaattcagttgaaagtggatttaaaaaaa

SEQ ID NO: 82028 - DNA, 600 bp, Chicken  19866894376239_1
ctaggtataggtagtgtttcctatttatttccatggaagccgcaacagaaactataagcacagtaactcttattgatagagaaaattctctgctacaaaagaacagttttcaacatagtcaccaccattatctatgccttatcaccagcaatggacaagagcctgcatggccacactcatcaaaaccagtaccagcagaggtgatgcactgtcactgtcactgctgccaaaaagcaccaccccactgcctcactgtgctcacatctactctttggtctccataaaattcagcaagcatcratgaatgtcaatgggtgcttttttttccacatggaggaactcaatgggacaacagcataaaactggaaacattccttttggagcaacctttgtaaaattcataatataatcatatcacgaacagaatttcttttatttttttttttcttgaaacagtgaaagaaagaacaataaaaacaaaggactagtgggatatgtgaccttatttttgtgaaactagtgtgtcagtctgcttcagtgtcagtggctgcaattcctagtgagttcccaaggtgttcatcagagactttctatgaaatt

SEQ ID NO: 82029 - DNA, 600 bp, Chicken  19866894376239_2
gagaatgtgtttatgttgaatgaaaatggagttgcaagcataccaaaaagcggatgcttttttctgcaatcttgaaacctattcttaagtcctttttcagaacaaaaagcacagctgcatattttttactgttcactgttcactgtgcttattgccataatttgtgttagtattgcactgtgtcctctgcatgtcctggtttcaacccagtgttaataggacactgatgtttggttgttgctgagtgatgtatgcacccctgggtccaggctgggccctgggcggggcagagctgccacmactatggtgcagggcagccggtggctgcaggatgggctgcatctggctgcatgtggcctgcaggccatgcattggacatgcctgccttagtgtgttttaagtgcttctttgcatccttttgtgattttgctacttcctcacacaaacaccatgtgagtccatgtccaaatgcttcctaactgcagtgattttttagatagtagcaacctatctgaggtctatctctaatgaaatatagccagttaaacagttaaaataacagggagacacttatatgaaaaaaaaaaaaaaaaaaaaaaa

SEQ ID NO: 82030 - DNA, 599 bp, Chicken  19866894376241_1
  misc_feature (1)..(189): n is any nucleotide
nnnnnnnnnnnnnnnnnnnnnnnnnnnnnnnnnnnnnnnnnnnnnnnnnnnnnnnnnnnnnnnnnnnnnnnnnnnnnnnnnnnnnnnnnnnnnnnnnnnnnnnnnnnnnnnnnnnnnnnnnnnnnnnnnnnnnnnnnnnnnnnnnnnnnnnnnnnnnnnnnnnnnnnnnnnnnnnnnnnnnnnnnnnnntagacagaagaagtgtggagatgtgtagttggcagatacaggagcaagttcagtgtatatgtgacagctaattgctgtcagacggtcacagaaacactattaattgacatwtaatacttaacactttcagagcaatttayatcttctaaggaccatactatataaacactaattaatgcctaattaacttatctatatgtattagccaattaatttctaattagtttatttacagattcttccacactggaaactaatttaggtggggctttttattctgtttctagaataccgtccataatatatttgagggaaggaattaatttccccagcatttgaagaggtggtgtaactggtggtttgtttgctttagagatgtccgttcccacygttctccttyatgctgggta

SEQ ID NO: 82031 - DNA, 599 bp, Chicken  19866894376241_2
  misc_feature (1)..(160): n is any nucleotide
nnnnnnnnnnnnnnnnnnnnnnnnnnnnnnnnnnnnnnnnnnnnnnnnnnnnnnnnnnnnnnnnnnnnnnnnnnnnnnnnnnnnnnnnnnnnnnnnnnnnnnnnnnnnnnnnnnnnnnnnnnnnnnnnnnnnnnnnnnnnnnnnnnnnnnnnnnnnnnnntagacagaagaagtgtggagatgtgtagttggcagatacaggagcaagttcagtgtatatgtgacagctaattgctgtcagacggtcacagaaacactattaattgacatwtaatacttaacactttcagagcaatttayatcttctaaggaccatactatataaacactaattaatgcctaattaacttatctatatgtattagccaattaatttctaattagtttatttacagattcttccacactggaaactaatttaggtggggctttttattctgtttctagaataccgtccataatatatttgagggaaggaattaatttccccagcatttgaagaggtggtgtaactggtggtttgtttgctttagagatgtccgttcccacygttctccttyatgctgggtaggaatgtttaagccattcaaaggtaaact

SEQ ID NO: 82032 - DNA, 600 bp, Chicken  19866894376241_3
gaaacactattaattgacatwtaatacttaacactttcagagcaatttayatcttctaaggaccatactatataaacactaattaatgcctaattaacttatctatatgtattagccaattaatttctaattagtttatttacagattcttccacactggaaactaatttaggtggggctttttattctgtttctagaataccgtccataatatatttgagggaaggaattaatttccccagcatttgaagaggtggtgtaactggtggtttgtttgctttagagatgtccgttcccacygttctccttyatgctgggtaggaatgtttaagccattcaaaggtaaactgtcctccactgtgagtgtgctgcaaaggcaacagggctttgtcccaggacaggaggatgtctggcttggatcttgggtatggaagcagaagggcatgggctgcttcagctcctgcttccaggagcatgttgtcttctgtcctttccatataaagcactaaatatgaaataaggaatctgaatctgggcaaaactactattaccaaactgctgtgcagtgctttgttttgttttggggggggaggagggggt

SEQ ID NO: 82033 - DNA, 600 bp, Chicken  19866894376241_4
taattgacatwtaatacttaacactttcagagcaatttayatcttctaaggaccatactatataaacactaattaatgcctaattaacttatctatatgtattagccaattaatttctaattagtttatttacagattcttccacactggaaactaatttaggtggggctttttattctgtttctagaataccgtccataatatatttgagggaaggaattaatttccccagcatttgaagaggtggtgtaactggtggtttgtttgctttagagatgtccgttcccacygttctccttyatgctgggtaggaatgtttaagccattcaaaggtaaactgtcctccactgtgagtgtgctgcaaaggcaacagggctttgtcccaggacaggaggatgtctggcttggatcttgggtatggaagcagaagggcatgggctgcttcagctcctgcttccaggagcatgttgtcttctgtcctttccatataaagcactaaatatgaaataaggaatctgaatctgggcaaaactactattaccaaactgctgtgcagtgctttgttttgttttggggggggaggagggggtttgctatccc

SEQ ID NO: 82034 - DNA, 600 bp, Chicken  19866894376247_1
aaggtctcacctggagacaggagataagatgtcccaccttttcttgctgctgttgtctgtgcccaacgtacgcagaaggctggaggtaaattcctgtctgtgttggagctaacaggacttctgtcatcaaccccatcgtcttgtgtgaagaaggacacttagctgttgcagtaatcacaaaacatgtcacaggctccagcagcatgatgtatccccatcagcacaatgaccgctggaacacagcattgctcacagtaaggacagcgggctgcaatcttacattgcttcacagtctgataytggtgctcgtggctggccaacaagtgtgattgaaagcacttggcaccctcctaaataaaatatcaaagcttacggctgagaggcagaagcacataagtgatgtacaaaaatgctgattgccaatttccatgttccaggtgtgattcatggggctgctgcctgggaagcatttatatccaaccgtaacaaacataaacagaatgacacagtttattaagccagaggcaaatgtaaatgatgaaaggctgccgtgtaaaaccacattaaacatgtcccattacatgatgtaaaccacatttt

SEQ ID NO: 82035 - DNA, 599 bp, Chicken  19866894376256_1
  misc_feature (1)..(153): n is any nucleotide
nnnnnnnnnnnnnnnnnnnnnnnnnnnnnnnnnnnnnnnnnnnnnnnnnnnnnnnnnnnnnnnnnnnnnnnnnnnnnnnnnnnnnnnnnnnnnnnnnnnnnnnnnnnnnnnnnnnnnnnnnnnnnnnnnnnnnnnnnnnnnnnnnnnnnnnnnatttctagaatctgagagtgtattagttgcaataggaaaaaacctcatgaaagtgtactgtcaagctgtgctgcagctaaggaggtgctaactattttctcagaaatcttcctggcaatgttttaaagacagtgaaggaaatgagcrgcatagcaggctacaatgatgctccgcaaaaatggaagaactcttatttacactatttactgctcttttaatggtatataagaactatytaaaaggagcctactgcaagaaaagaactatyatcatctctactttccattttttagccttcagtagagccttcaagactccagtgckacagccccaatacaggcaccattcccactacarctccaatttaaaatctcaaccaaaggttccaaaaataggatcctaaggtcagctgcctatccccatgggcagaattttcaggagttttc

SEQ ID NO: 82036 - DNA, 599 bp, Chicken  19866894376256_2
  misc_feature (1)..(64): n is any nucleotide
nnnnnnnnnnnnnnnnnnnnnnnnnnnnnnnnnnnnnnnnnnnnnnnnnnnnnnnnnnnnnnnnatttctagaatctgagagtgtattagttgcaataggaaaaaacctcatgaaagtgtactgtcaagctgtgctgcagctaaggaggtgctaactattttctcagaaatcttcctggcaatgttttaaagacagtgaaggaaatgagcrgcatagcaggctacaatgatgctccgcaaaaatggaagaactcttatttacactatttactgctcttttaatggtatataagaactatytaaaaggagcctactgcaagaaaagaactatyatcatctctactttccattttttagccttcagtagagccttcaagactccagtgckacagccccaatacaggcaccattcccactacarctccaatttaaaatctcaaccaaaggttccaaaaataggatcctaaggtcagctgcctatccccatgggcagaattttcaggagttttcacatgcctcagaagtaccagcctcactgacttcagaagaacttktgattgaagtaggtattcctttataattttggctattagttaatt

SEQ ID NO: 82037 - DNA, 599 bp, Chicken  19866894376256_3
  misc_feature (1)..(32): n is any nucleotide
nnnnnnnnnnnnnnnnnnnnnnnnnnnnnnnnatttctagaatctgagagtgtattagttgcaataggaaaaaacctcatgaaagtgtactgtcaagctgtgctgcagctaaggaggtgctaactattttctcagaaatcttcctggcaatgttttaaagacagtgaaggaaatgagcrgcatagcaggctacaatgatgctccgcaaaaatggaagaactcttatttacactatttactgctcttttaatggtatataagaactatytaaaaggagcctactgcaagaaaagaactatyatcatctctactttccattttttagccttcagtagagccttcaagactccagtgckacagccccaatacaggcaccattcccactacarctccaatttaaaatctcaaccaaaggttccaaaaataggatcctaaggtcagctgcctatccccatgggcagaattttcaggagttttcacatgcctcagaagtaccagcctcactgacttcagaagaacttktgattgaagtaggtattcctttataattttggctattagttaattcactttgactttagggagatgatagcttttat

SEQ ID NO: 82038 - DNA, 600 bp, Chicken  19866894376256_4
agttgcaataggaaaaaacctcatgaaagtgtactgtcaagctgtgctgcagctaaggaggtgctaactattttctcagaaatcttcctggcaatgttttaaagacagtgaaggaaatgagcrgcatagcaggctacaatgatgctccgcaaaaatggaagaactcttatttacactatttactgctcttttaatggtatataagaactatytaaaaggagcctactgcaagaaaagaactatyatcatctctactttccattttttagccttcagtagagccttcaagactccagtgckacagccccaatacaggcaccattcccactacarctccaatttaaaatctcaaccaaaggttccaaaaataggatcctaaggtcagctgcctatccccatgggcagaattttcaggagttttcacatgcctcagaagtaccagcctcactgacttcagaagaacttktgattgaagtaggtattcctttataattttggctattagttaattcactttgactttagggagatgatagcttttataatatccacacaaacatcctgtgactgcataatatttccttaatcgtgcctgcatct

SEQ ID NO: 82039 - DNA, 585 bp, Chicken  19866894376256_5
ctgtcaagctgtgctgcagctaaggaggtgctaactattttctcagaaatcttcctggcaatgttttaaagacagtgaaggaaatgagcrgcatagcaggctacaatgatgctccgcaaaaatggaagaactcttatttacactatttactgctcttttaatggtatataagaactatytaaaaggagcctactgcaagaaaagaactatyatcatctctactttccattttttagccttcagtagagccttcaagactccagtgckacagccccaatacaggcaccattcccactacarctccaatttaaaatctcaaccaaaggttccaaaaataggatcctaaggtcagctgcctatccccatgggcagaattttcaggagttttcacatgcctcagaagtaccagcctcactgacttcagaagaacttktgattgaagtaggtattcctttataattttggctattagttaattcactttgactttagggagatgatagcttttataatatccacacaaacatcctgtgactgcataatatttccttaatcgtgcctgcatctgtaatattgacgatgtaa

SEQ ID NO: 82040 - DNA, 452 bp, Chicken  19866894376256_6
ttatttacactatttactgctcttttaatggtatataagaactatytaaaaggagcctactgcaagaaaagaactatyatcatctctactttccattttttagccttcagtagagccttcaagactccagtgckacagccccaatacaggcaccattcccactacarctccaatttaaaatctcaaccaaaggttccaaaaataggatcctaaggtcagctgcctatccccatgggcagaattttcaggagttttcacatgcctcagaagtaccagcctcactgacttcagaagaacttktgattgaagtaggtattcctttataattttggctattagttaattcactttgactttagggagatgatagcttttataatatccacacaaacatcctgtgactgcataatatttccttaatcgtgcctgcatctgtaatattgacgatgtaa

SEQ ID NO: 82041 - DNA, 599 bp, Chicken  19866894376263_1
  misc_feature (1)..(55): n is any nucleotide
nnnnnnnnnnnnnnnnnnnnnnnnnnnnnnnnnnnnnnnnnnnnnnnnnnnnnnntacctttgttttatccaggaaattcaaacagatgacagaagtgaagcacatactgccatctgtaataagtgccaaactctcattgcctcgagtgtgaactactcagtgtggtttgtgttgttgctcagtagcatgtccttccaagaccagactctagaacaagaagacaaacataaattttgccatgatggcattgcatacagcagaaagctgaagcaaattaatagaaaaaataggaaaaaaawttttactgagaaaaataaattctctcttttagagtacatggagtttattgtgctattataaatatcctaatatcatttgtcttgtagattttatgtcaagagaaagcaaagtataggtgtgttataatgtattgtttcaagtttatttatctagagtttgctttattttagctctgaaatgttggaggaaaaactggagctagtgccagatcaaacaacttgaggagaacaaatggagaacttgtcaaaaggtaaggacttctaagatattaataaggaacctcaggtgttttaccagt

SEQ ID NO: 82042 - DNA, 599 bp, Chicken  19866894376265_1
  misc_feature (1)..(13): n is any nucleotide
nnnnnnnnnnnnngcttgtttctccacttaggaaaaaaaaaaaaaaaagaagcattagctgagcagccagtctccaagggtgatcctgatcagggatttgttaagttttctctttttttcaatgcatgacaaaagtgtcaaggaaatacagctcaaaggatgcagttaacaccgcgatattcagcaagtcggttcctcaggcggatataagcagtcagtcataggccagagtagaacatcctattctgtgatgccctaaaagtactgcagaggtcatctgaacatacccactcctctctycccagcccagtgaaggtttgttgtgtttctttgctccccatctcctgtcctgcatgagtaattctgccacttcacactgaggtcctcccagatgtgtttaactctgcatcttgtgctgcagtaggaatggaacaacctggtaagctggacaaaaaaagagaaagggcctggtaggaaaatgaacttcagagcacgctatggtaagtgagagggccgggcccctctgcagactagatgcagaaaatgggtgatggaaaaacagaagtttagtgggaagggaagtcatctgcagcagtctc

SEQ ID NO: 82043 - DNA, 600 bp, Chicken  19866894376272_1
ctttttcagttgtaaaaatagaacttcaaaaataataaaagtttagcaataaatcttaatattccagtgtcggtattgttaaattcaaaaccactcaaatataactaaaggctgaagagttcatttggaagctataaattccactgtcagcagcatttccctatatttatttcttacttttccttaaatgtgtgaagcaaaaataaaacaaaaacttaaaaataatttgccctgtataacttattaaactataaattcctatcgcacatataaaatctactagtatatttcttaatgtaygtatttcagaattgccaataatygattctcactggcgctattaattattctatactgtcaagtacgaattgaagttatcagttaaagcaaagaataagaacttatcccattagactcagtctggtcagacaatcagcacttatttatagactcctccattaatgatgtcactccatttatagactaatatagtgaggggaaataaagatcccacattgtatcaagtctatataatgtacaaattgcaattccaggtatactgataatgccattatagttaagttatggagtgaaaaaaaa

SEQ ID NO: 82044 - DNA, 600 bp, Chicken  19866894376272_2
cttcaaaaataataaaagtttagcaataaatcttaatattccagtgtcggtattgttaaattcaaaaccactcaaatataactaaaggctgaagagttcatttggaagctataaattccactgtcagcagcatttccctatatttatttcttacttttccttaaatgtgtgaagcaaaaataaaacaaaaacttaaaaataatttgccctgtataacttattaaactataaattcctatcgcacatataaaatctactagtatatttcttaatgtaygtatttcagaattgccaataatygattctcactggcgctattaattattctatactgtcaagtacgaattgaagttatcagttaaagcaaagaataagaacttatcccattagactcagtctggtcagacaatcagcacttatttatagactcctccattaatgatgtcactccatttatagactaatatagtgaggggaaataaagatcccacattgtatcaagtctatataatgtacaaattgcaattccaggtatactgataatgccattatagttaagttatggagtgaaaaaaaaaagagttcattataactatgcca

SEQ ID NO: 82045 - DNA, 599 bp, Chicken  19866894376273_1
  misc_feature (1)..(120): n is any nucleotide
nnnnnnnnnnnnnnnnnnnnnnnnnnnnnnnnnnnnnnnnnnnnnnnnnnnnnnnnnnnnnnnnnnnnnnnnnnnnnnnnnnnnnnnnnnnnnnnnnnnnnnnnnnnnnnnnnnnnnnnnacaagaaggaactggatgcactgagtggtatcatcttctcgggaccagtggattcgaaggttggatacaagagtggtaatgcactggcacaggttgcccagggagatggtggagtcactgtccctggaggtgtttaagaattggttggatgtggcactgagggacgtggtcagtgggcayggtggggatgggktggrgatggacttkgtgatcttggtggtcttttccaacctaaatgattctttgattcttcgattctgtgaaaagtctcagcttaaagcagtaaaaagactgrgarcaggagaggacactgacaagcccgtggtctccttgtcaatgccaagtggtgtcactagtgccttgatgaggcattgcaggtgctccatcactggctggttactgggtgctgggttagcagacagttttggatgtttgataagtgcttcaggagggcatgagaccagctycacccgcactgt

SEQ ID NO: 82046 - DNA, 599 bp, Chicken  19866894376273_2
  misc_feature (1)..(107): n is any nucleotide
nnnnnnnnnnnnnnnnnnnnnnnnnnnnnnnnnnnnnnnnnnnnnnnnnnnnnnnnnnnnnnnnnnnnnnnnnnnnnnnnnnnnnnnnnnnnnnnnnnnnnnnnnnnacaagaaggaactggatgcactgagtggtatcatcttctcgggaccagtggattcgaaggttggatacaagagtggtaatgcactggcacaggttgcccagggagatggtggagtcactgtccctggaggtgtttaagaattggttggatgtggcactgagggacgtggtcagtgggcayggtggggatgggktggrgatggacttkgtgatcttggtggtcttttccaacctaaatgattctttgattcttcgattctgtgaaaagtctcagcttaaagcagtaaaaagactgrgarcaggagaggacactgacaagcccgtggtctccttgtcaatgccaagtggtgtcactagtgccttgatgaggcattgcaggtgctccatcactggctggttactgggtgctgggttagcagacagttttggatgtttgataagtgcttcaggagggcatgagaccagctycacccgcactgtgcagtttccagca

SEQ ID NO: 82047 - DNA, 599 bp, Chicken  19866894376273_3
  misc_feature (1)..(103): n is any nucleotide
nnnnnnnnnnnnnnnnnnnnnnnnnnnnnnnnnnnnnnnnnnnnnnnnnnnnnnnnnnnnnnnnnnnnnnnnnnnnnnnnnnnnnnnnnnnnnnnnnnnnnnnacaagaaggaactggatgcactgagtggtatcatcttctcgggaccagtggattcgaaggttggatacaagagtggtaatgcactggcacaggttgcccagggagatggtggagtcactgtccctggaggtgtttaagaattggttggatgtggcactgagggacgtggtcagtgggcayggtggggatgggktggrgatggacttkgtgatcttggtggtcttttccaacctaaatgattctttgattcttcgattctgtgaaaagtctcagcttaaagcagtaaaaagactgrgarcaggagaggacactgacaagcccgtggtctccttgtcaatgccaagtggtgtcactagtgccttgatgaggcattgcaggtgctccatcactggctggttactgggtgctgggttagcagacagttttggatgtttgataagtgcttcaggagggcatgagaccagctycacccgcactgtgcagtttccagcacaca

SEQ ID NO: 82048 - DNA, 599 bp, Chicken  19866894376273_4
  misc_feature (1)..(93): n is any nucleotide
nnnnnnnnnnnnnnnnnnnnnnnnnnnnnnnnnnnnnnnnnnnnnnnnnnnnnnnnnnnnnnnnnnnnnnnnnnnnnnnnnnnnnnnnnnnnnacaagaaggaactggatgcactgagtggtatcatcttctcgggaccagtggattcgaaggttggatacaagagtggtaatgcactggcacaggttgcccagggagatggtggagtcactgtccctggaggtgtttaagaattggttggatgtggcactgagggacgtggtcagtgggcayggtggggatgggktggrgatggacttkgtgatcttggtggtcttttccaacctaaatgattctttgattcttcgattctgtgaaaagtctcagcttaaagcagtaaaaagactgrgarcaggagaggacactgacaagcccgtggtctccttgtcaatgccaagtggtgtcactagtgccttgatgaggcattgcaggtgctccatcactggctggttactgggtgctgggttagcagacagttttggatgtttgataagtgcttcaggagggcatgagaccagctycacccgcactgtgcagtttccagcacacagagtgaccac

SEQ ID NO: 82049 - DNA, 599 bp, Chicken  19866894376273_5
  misc_feature (1)..(5): n is any nucleotide
nnnnnacaagaaggaactggatgcactgagtggtatcatcttctcgggaccagtggattcgaaggttggatacaagagtggtaatgcactggcacaggttgcccagggagatggtggagtcactgtccctggaggtgtttaagaattggttggatgtggcactgagggacgtggtcagtgggcayggtggggatgggktggrgatggacttkgtgatcttggtggtcttttccaacctaaatgattctttgattcttcgattctgtgaaaagtctcagcttaaagcagtaaaaagactgrgarcaggagaggacactgacaagcccgtggtctccttgtcaatgccaagtggtgtcactagtgccttgatgaggcattgcaggtgctccatcactggctggttactgggtgctgggttagcagacagttttggatgtttgataagtgcttcaggagggcatgagaccagctycacccgcactgtgcagtttccagcacacagagtgaccaccactgttagccagcacagacactgcatccattacacctaccatgacagtcttcatacacaaacaggtaagaatttccttgcaaatccc

SEQ ID NO: 82050 - DNA, 599 bp, Chicken  19866894376273_6
  misc_feature (1)..(2): n is any nucleotide
nnacaagaaggaactggatgcactgagtggtatcatcttctcgggaccagtggattcgaaggttggatacaagagtggtaatgcactggcacaggttgcccagggagatggtggagtcactgtccctggaggtgtttaagaattggttggatgtggcactgagggacgtggtcagtgggcayggtggggatgggktggrgatggacttkgtgatcttggtggtcttttccaacctaaatgattctttgattcttcgattctgtgaaaagtctcagcttaaagcagtaaaaagactgrgarcaggagaggacactgacaagcccgtggtctccttgtcaatgccaagtggtgtcactagtgccttgatgaggcattgcaggtgctccatcactggctggttactgggtgctgggttagcagacagttttggatgtttgataagtgcttcaggagggcatgagaccagctycacccgcactgtgcagtttccagcacacagagtgaccaccactgttagccagcacagacactgcatccattacacctaccatgacagtcttcatacacaaacaggtaagaatttccttgcaaatcccagt

SEQ ID NO: 82051 - DNA, 600 bp, Chicken  19866894376273_7
ggtcagtgggcayggtggggatgggktggrgatggacttkgtgatcttggtggtcttttccaacctaaatgattctttgattcttcgattctgtgaaaagtctcagcttaaagcagtaaaaagactgrgarcaggagaggacactgacaagcccgtggtctccttgtcaatgccaagtggtgtcactagtgccttgatgaggcattgcaggtgctccatcactggctggttactgggtgctgggttagcagacagttttggatgtttgataagtgcttcaggagggcatgagaccagctycacccgcactgtgcagtttccagcacacagagtgaccaccactgttagccagcacagacactgcatccattacacctaccatgacagtcttcatacacaaacaggtaagaatttccttgcaaatcccagttctgtgtggtctgttcagtggagatggtgcaactgcaaaaaccacagcagaagaccctggagagcagtaaccctcagacccctccactaactacatctataatctcttcctaggtgttggcgcaggaagccccaacctcttcctcaccaccttgctcccttcggtcctgc

SEQ ID NO: 82052 - DNA, 600 bp, Chicken  19866894376277_1
tgcctcaggtaagaaacgtgattacaccaccacaccaatccctttcggccttcccatttttcaccacagaaaccattcagccataatctatttttgctgctgctggatttaagaggaagataaaggaccactgtatgcacacgctaatggccttgatacttctggtagacatttaacaagcaaagggaggctctggaaggtgcagaactacagtgaccacagcagagactggtggtcttagtacataacgaagatcttccccttcctattcatcagctggattttcagaggggacctagmtccatttgcacctccaagggaatgcctgggaagatgatagaggccatagcaatgcagtattcactggagcaagcaagccaccaacggtgctcatgagccaatgagcagacgcttcttattgcaacacagcaccagctcacacctctaccatccaaagggagtgataaaacaccaaaaatagcctcccaccacatgcaccacactgccatcctctcagctaatcccatatacattttaacagtcttaaaacaaaaacagcacccaatgttcaaagcattacatgaagacttcggtacaggt

SEQ ID NO: 82053 - DNA, 600 bp, Chicken  19866894376279_1
tcagcaagatttttgcttgtgaacccattagtattttccctgagcagctcctccgccccctccccctccctcaatcttgctaggccagagaattgctctttcacaggtctgctctttttgttattcccatggctttggtgaaatatatatgagatgactcagagtttgaactccggctccatgttcctaatacaaagcttccatgtgtctggggacctcagacaagtgtttaattttagatgagacgtaccagtgacatcacgcttttgattccagcactgggtgcgtgcaccaagcacrtggggcagtggctcagcctcacctcgtgtaaaaagctgcttggtattcagcgcaggcagagctacgggcagcactggtgcagaccaccaggagcacaacacagcacttaaccctgtgcagacacrrtgacatgcactggaggataaaggagctcagaaggaaaacaaatttttccagggccatttgacacagctgctgccgatcctggacacaaagctctaatcagagcacatcagcaggtagtttatctacccttaccccacacctcaccatgaaggtgaggatttatacccctcacat

SEQ ID NO: 82054 - DNA, 600 bp, Chicken  19866894376279_2
cccatggctttggtgaaatatatatgagatgactcagagtttgaactccggctccatgttcctaatacaaagcttccatgtgtctggggacctcagacaagtgtttaattttagatgagacgtaccagtgacatcacgcttttgattccagcactgggtgcgtgcaccaagcacrtggggcagtggctcagcctcacctcgtgtaaaaagctgcttggtattcagcgcaggcagagctacgggcagcactggtgcagaccaccaggagcacaacacagcacttaaccctgtgcagacacrrtgacatgcactggaggataaaggagctcagaaggaaaacaaatttttccagggccatttgacacagctgctgccgatcctggacacaaagctctaatcagagcacatcagcaggtagtttatctacccttaccccacacctcaccatgaaggtgaggatttatacccctcacatgctgagggtgttggattgagcctcatcagtggtgactgcagcactccacagctgcagacatcagcaagtgcacccaatctgaagggagcacaccgcagcttcagttttagcttttcagctaaaga

SEQ ID NO: 82055 - DNA, 600 bp, Chicken  19866894376279_3
ccatggctttggtgaaatatatatgagatgactcagagtttgaactccggctccatgttcctaatacaaagcttccatgtgtctggggacctcagacaagtgtttaattttagatgagacgtaccagtgacatcacgcttttgattccagcactgggtgcgtgcaccaagcacrtggggcagtggctcagcctcacctcgtgtaaaaagctgcttggtattcagcgcaggcagagctacgggcagcactggtgcagaccaccaggagcacaacacagcacttaaccctgtgcagacacrrtgacatgcactggaggataaaggagctcagaaggaaaacaaatttttccagggccatttgacacagctgctgccgatcctggacacaaagctctaatcagagcacatcagcaggtagtttatctacccttaccccacacctcaccatgaaggtgaggatttatacccctcacatgctgagggtgttggattgagcctcatcagtggtgactgcagcactccacagctgcagacatcagcaagtgcacccaatctgaagggagcacaccgcagcttcagttttagcttttcagctaaagaa

SEQ ID NO: 82056 - DNA, 600 bp, Chicken  19866894376281_1
tggcagggagggccatgcaaggatgaggcagtggcatcacacgggaagagtcccagatgtgaggaggagaaaaggtgccactgaattctcagctcctccaagcccacaggggcagcctgcacggagatagggaaggcagcactgctttcactcgagatgcaaagaaaggctctcacaaggcaccatctggtttataattctttttttttttttttcttttttctttttttgtcactgaggggtcatttctaactgatcacaggctctggaaaccctctttacagcagaggcagcaggctygctgcgtgccggccgttcccgagcagctcagggatagagctggaggagagcagagggggaatgaaatcccaatttcagatgctcattgcagggtaattatcaaaaggcaacagtaggctgggatgcttgctaattaggctacgttctttatgacttgttattccaagatgtcatttaacagactggggtagggggtggggggtagaatgtgcacataaagttgtttttaattacatttggtatgctaatttctgatataaaataaatatttaccaggagcaatatttcttcatttcacgc

SEQ ID NO: 82057 - DNA, 599 bp, Chicken  19866894376284_1
  misc_feature (1)..(64): n is any nucleotide
nnnnnnnnnnnnnnnnnnnnnnnnnnnnnnnnnnnnnnnnnnnnnnnnnnnnnnnnnnnnnnnnaaataaaactggacggggtgtctagtcttgccctgactaaatgatgactaaatcctagctaaaatcttctgctctccagagcaagctggccacctcgtctacagccaaagcaagccggctgtatccaaaatggaaaggaccctgagcttgtaccgaaccttaaactatgtccagagatgcagtttaatctgggagagcattaactaacctgggacaaattcgtgccagggagcacrctaacaactcaccagacaatcatggtgtgccaagggtgttttgcagtgagtgtgcagcctggctgtggtgcttcacatatcaggcagtggtctttgggtgacagtgggcacagctcaggagctggctcagggctgcatggctgcagcctgcgttggagcagagttcagccttggtacaagaaatggtgtgtctgtgggctgggaaaaggtcttgacttgggtttctggcagtataggctattttctgaggtctgctctctgaaccatgattcttctgtaataactgctactgatttagc

SEQ ID NO: 82058 - DNA, 600 bp, Chicken  19866894376288_1
gcataacgtaatgcatcatgtctaagatacaagaacagaactgaaaagaataatttggtttcttatacacagttaatgatgaattaccatttacatgtttcatcattcatatggctataattcagaatcgtgacagtacaaaatctattactctaacaaagggtttgtatcagacaattatcttgacggttcctgtcttgttcttggagtagtggtgtattcaaagagctctgtgagttatcagccagctctgaagtttttagataccagtgagcctcccttctaaatcattaaaatgtraaagaaaaactaatgttatttttatgtgtaacctaagaatgctcacattcccctctctctctgttcagaaagcctgcaggaacacactcactgaccctattctttcctttcctttaggatgattccaaggcctggatttttacctaggtttttctcaactgttgtgcgttatgcagatgaattctgaggacctggcaggactctgaaggtcactaattcaggactatatattgcataggatagtattttttttatttttttattacgcattactataaaccaaaagaaacctttacatta

SEQ ID NO: 82059 - DNA, 600 bp, Chicken  19866894376292_1
gctaaggaaaaaaaaaagaattaagaaagtccacagagcagatttatagtcttgtatttatcttagctatctttggaaacctatgatgagattaatctcaccaaatataaatgtttaaaactgaatgagtcatttacattctagtggtcagtagagaaaaatgagcaagtataaggtgctgttcatgtcatcctaaggtagaaagcactatttgataatacattttatagtcttaaatgagcctgtttctccctagtgcctgtaaggacagtctgggcaactgtctcacacaaaaacaarcttgatatccatcatactgggtagattctataccccatgatttgctaggctttgctactggcctcagaagtctgtctttaaaatcaaatcctcagtagatgttcaggctgtgaataaaatgatgcaaatagtgctctgctcaagcatctagaaagggtatttgcgtttagcaaatttgcatgtattacaacaagtacatttgcaaattaagtgctttcttcagtactagaagtcatttgaaaaccaagtcagttgtattcagaaagccaatatgtgcttatctgagtctgttcttcagtt

SEQ ID NO: 82060 - DNA, 600 bp, Chicken  19866894376303_1
gattctgaatgcttcattttaaacacaagtggatttgagaggacttctgtctgattccatcacgctttactgagccaaaagcaaaggtggttttagagaacttaataatgtgttttaattctctgaacacttcagggtatttccttccatgtttaacactccttgcctctaaggaaacaaacaaacaaaatcccatagaatataatagagtaataaccattggtgtttttaggaagttgctgtagtgtttgtttctttaattattattattcctaaaaaaaaaaccaaaacaacaacaamaaaaaacccacaagtggtttcaaggaagagctttacctatgagaaaagagccgacgaaccctcacaaatcctactacagttactgcagttactgacattctggaaaacaattactaaacaagaaaaaacatctgttgcccataaattacagttaaatgcccatcggaaaatatttatttaacaactaaacaaaagaaccgtcagcagtgcactgtgcttaaagccacttttcttgctcatgtattttgaatagctggaaaataactgtgcaggctgagcgcatcgagctagtcagcacaa

SEQ ID NO: 82061 - DNA, 493 bp, Chicken  19866894376304_1
cagtgcaattaggaattcccttctttcgatttttttttttaactaactgtgtggtttgatcaaggatcagcgctttgtcatggattgtgggagtatgggcaaagtcggaattgaattatgtttctttatagccattacaccgggtaccgtttgaatttgctattaatggtgtggtaatggtgggggaagtaccctgaggtgacttagtgtttcgttaatgaaaaggctgttgatcgttcggaaggattctcctttgagtactggtgcatatggaaatgtgctgaaaagcaccaatggctygctttgtctgacctgcctgcccatcgggtaccaattggatttgaatcttgcctaagtaagctccagtgcagctttcaaaggtcagttcgtacccagcgtgtgagaggttagttttgcagagcagatgggctcctaaaacttttatggtctccagtcaaatcacctcaagctgtaatctcattaaatcctaagt

SEQ ID NO: 82062 - DNA, 496 bp, Chicken  19866894376309_1
aaccatttaaccttatcacataaactaaagctcatcccaagtttttcactctgctccctcagcataatatgctgaatgcttcccaagagagtccaggtcccaggcaggggcacgtgcagctgtaccacactgagcctgccagcagccatggaaccctgcctgcctcatggacctggaaaacatgtggagaaacaagagcagaaatcagctgccaaagcactgaacacctttggataccactgttgtatgtgtgtgaagatccacaggacctccagcacaaggctgaactaaggggtgagrtgtgcctggcttcacattcctccctactgatggaatttaagaacacagttcactttcaagagcgtgttgtgctttcagagcctgacgggatctcaggatccaggaagcacccaaggaagcggtttctaaacgataaaccagatcgctaatatcccagctgtctccatgacaaccaagctggattgctgttggatgt

SEQ ID NO: 82063 - DNA, 548 bp, Chicken  19866894376316_1
  misc_feature (1)..(73): n is any nucleotide
nnnnnnnnnnnnnnnnnnnnnnnnnnnnnnnnnnnnnnnnnnnnnnnnnnnnnnnnnnnnnnnnnnnnnnnnnaattatgaaagtaggctgaccagaggaataccaaccttgtaggccggtatctcatagttgaaacttcgttaaaggactcgttaacagacagaaaagtgtagtagataaaacctgtgttctgacacagccatgacagttgaatgaattagtcttttctccagagttcctccattaattacagaaatacccaaaggccctgtgcgggattgtgctgtaggtaatccacraacaagatggcattttctcaggaacaatgaaacctgagactatcaaagctttcttcttaagcaggtattgctaaacctaatacagagcctcctttgggcatcgtatccaaaccagtccaggccccctggtgacatcaggaaatgtgagatgcctgtcagttagcctctggccacctgtctgtcttgtgcttgaggcgatagccacagagttgacagagaagagcgggacttttgcaaaacctcggcat

SEQ ID NO: 82064 - DNA, 600 bp, Chicken  19866894376328_1
gattgactaattgctcatggttacatttgacatttggattattttcctttatgcattttggggttttggattttgagtggagttagagcgcttctgatagacatttagcagaaacagaagaacaacgaatgtgaaagtagaaatattcactgcctacagactcccaaatgaacgtgctgtgattcaggaggggctgaagtaagcatcaaacacttaatttgctttttatacccctttcagatttcccagatattcaggaaagcatctgcaatgtctgcagtacttgctctctcattacayctgaaacattggatcactgyaattcttactgtccttctccatttccccataagaatgcttgtttttcacaagccaccacttctacagtttccctgtttactcaggctactatccacagcgcttggtcatatttgctttatggactgcccaygcaaggtttttaagtgacctgcaaactataattacatctccataaacaccttctgtcgcttttgctataaacattattgattcacataactacaagactggacccgtttcatttttaaatctggaaaaaaatccctgaaaaagaaaaca

SEQ ID NO: 82065 - DNA, 600 bp, Chicken  19866894376328_2
ttacatttgacatttggattattttcctttatgcattttggggttttggattttgagtggagttagagcgcttctgatagacatttagcagaaacagaagaacaacgaatgtgaaagtagaaatattcactgcctacagactcccaaatgaacgtgctgtgattcaggaggggctgaagtaagcatcaaacacttaatttgctttttatacccctttcagatttcccagatattcaggaaagcatctgcaatgtctgcagtacttgctctctcattacayctgaaacattggatcactgyaattcttactgtccttctccatttccccataagaatgcttgtttttcacaagccaccacttctacagtttccctgtttactcaggctactatccacagcgcttggtcatatttgctttatggactgcccaygcaaggtttttaagtgacctgcaaactataattacatctccataaacaccttctgtcgcttttgctataaacattattgattcacataactacaagactggacccgtttcatttttaaatctggaaaaaaatccctgaaaaagaaaacaccactgtgatttgggatttt

SEQ ID NO: 82066 - DNA, 600 bp, Chicken  19866894376328_3
gcctacagactcccaaatgaacgtgctgtgattcaggaggggctgaagtaagcatcaaacacttaatttgctttttatacccctttcagatttcccagatattcaggaaagcatctgcaatgtctgcagtacttgctctctcattacayctgaaacattggatcactgyaattcttactgtccttctccatttccccataagaatgcttgtttttcacaagccaccacttctacagtttccctgtttactcaggctactatccacagcgcttggtcatatttgctttatggactgcccaygcaaggtttttaagtgacctgcaaactataattacatctccataaacaccttctgtcgcttttgctataaacattattgattcacataactacaagactggacccgtttcatttttaaatctggaaaaaaatccctgaaaaagaaaacaccactgtgatttgggattttttctgctaagtttaccttgtatttgatcaggctctagctgctggttcacatgcagcccttgctcagattagtttatgtctctgcaatggatgcagaccaactttcctgttcctgacaggtaaaactatact

SEQ ID NO: 82067 - DNA, 599 bp, Chicken  19866894376332_1
  misc_feature (1)..(1): n is any nucleotide
nccagttattttctggttaagtatacacatgaaagccttgagtttcgtgtctttttttgctaccttgaagcctcactcatctgtgttagtgttcagttacatacattataggcagacctgtcttagaacaacagattcacacttgtcacttaaaaaaactgtaaatgactgtaaatggtaatctagtagtatccaaaaatctgagtaattattcagaagctgatggcatcattatttcaacctcctgactgtaaaatcccgactctcaagagaataaagagacaaacctcattggcttcyrgaaaatgctatgtaacagcatgagcctaaagttactgttggcagagagatgcctgcaggtgccttctatggccctgtactgtgtccaactggaggcttagaacttgcacaattttctrattgcattcatttgattggatttctggggaagtcagaaaaaaaatatatgagaaaagaaaaaggatttatgcagtaaagattccagtgattttattaacagcggagtttttactacagtgagaaatggtgagagtaccctgaatcaatggtctcaccagttggagcctaaataccagcaa

SEQ ID NO: 82068 - DNA, 600 bp, Chicken  19866894376332_2
ccagttattttctggttaagtatacacatgaaagccttgagtttcgtgtctttttttgctaccttgaagcctcactcatctgtgttagtgttcagttacatacattataggcagacctgtcttagaacaacagattcacacttgtcacttaaaaaaactgtaaatgactgtaaatggtaatctagtagtatccaaaaatctgagtaattattcagaagctgatggcatcattatttcaacctcctgactgtaaaatcccgactctcaagagaataaagagacaaacctcattggcttcyrgaaaatgctatgtaacagcatgagcctaaagttactgttggcagagagatgcctgcaggtgccttctatggccctgtactgtgtccaactggaggcttagaacttgcacaattttctrattgcattcatttgattggatttctggggaagtcagaaaaaaaatatatgagaaaagaaaaaggatttatgcagtaaagattccagtgattttattaacagcggagtttttactacagtgagaaatggtgagagtaccctgaatcaatggtctcaccagttggagcctaaataccagcaact

SEQ ID NO: 82069 - DNA, 600 bp, Chicken  19866894376332_3
gtcttagaacaacagattcacacttgtcacttaaaaaaactgtaaatgactgtaaatggtaatctagtagtatccaaaaatctgagtaattattcagaagctgatggcatcattatttcaacctcctgactgtaaaatcccgactctcaagagaataaagagacaaacctcattggcttcyrgaaaatgctatgtaacagcatgagcctaaagttactgttggcagagagatgcctgcaggtgccttctatggccctgtactgtgtccaactggaggcttagaacttgcacaattttctrattgcattcatttgattggatttctggggaagtcagaaaaaaaatatatgagaaaagaaaaaggatttatgcagtaaagattccagtgattttattaacagcggagtttttactacagtgagaaatggtgagagtaccctgaatcaatggtctcaccagttggagcctaaataccagcaactccctgggggaaatttctctagtcttcccttaagcttggagtttcactttgaacagtctacccagccttttccatgctttaatcacttccacaacattcagattcttttatcatctgaa

SEQ ID NO: 82070 - DNA, 600 bp, Chicken  19866894376334_1
gctgagagggcacaaggagctgggagaagacagaacaaggactgctgacttaaacaggccaacgggatattccacataacattatgaaaaaaatcattacaaactgttaggagttggctggagggcagccactgcttggagactggctgagaatcagtctgggggtggtgaacaattgttttgggaatcacttgttttgtaaatgtataatatattattatcattgctagaattattctcttttccatttctatcttggtaaacagtttttatctcaacccacaattgtacttggttggktttttttaagattttctactgaatcccactgggaggggggagtgagcaaacaaccatgtagtgcttaactgcctgctgagttaaaccacaataacttttcacgtgtggatatggtagaaagtttagttgattggaataagtggtctccttagggatgcatcagttattattagagacagagtgctgtatattgtattgttgtattctgtattaagtacagagctgcaagagcatactctgttgtggcaggacacaagcacatgacaacatgtacaatttctggtgtacagtggtacctca

SEQ ID NO: 82071 - DNA, 600 bp, Chicken  19866894376336_1
gttttctactcggaactgggaagtgcacagctgtgatccatctatatcctcctcacttatttactggacattgaaagctactgataagttcacagggccttataatagcacttgcccccctaagcaaaacatgcctgggagctgagaaatggaaagagatccctaggttacattctcatgtttgaagtgctgtttttccatgttcatgtaaaaaatctgagatacaacaataacatcatgactttcaggagctaatagcttactacaggagaagaaaaaacaactacaactactaaaatyactcagatgtcactcccaaagtagccaccacagcgtttatactcctaatctcttcygtcataaaatagaattctcaaaactttcacaggacagtggattgctagtaataatccctagatggcaacagagtgtggtaaaaatgaactctaaataagaggcagaagagagtaagcaagtcagtctgagagagatgatgctctcccagtgcttttctccttgtgtttcttttgcctgatacaaagagtgagtaaatcacagccctgagattgttctacggagcagaagagtgctccctggttg

SEQ ID NO: 82072 - DNA, 600 bp, Chicken  19866894376336_2
ttatttactggacattgaaagctactgataagttcacagggccttataatagcacttgcccccctaagcaaaacatgcctgggagctgagaaatggaaagagatccctaggttacattctcatgtttgaagtgctgtttttccatgttcatgtaaaaaatctgagatacaacaataacatcatgactttcaggagctaatagcttactacaggagaagaaaaaacaactacaactactaaaatyactcagatgtcactcccaaagtagccaccacagcgtttatactcctaatctcttcygtcataaaatagaattctcaaaactttcacaggacagtggattgctagtaataatccctagatggcaacagagtgtggtaaaaatgaactctaaataagaggcagaagagagtaagcaagtcagtctgagagagatgatgctctcccagtgcttttctccttgtgtttcttttgcctgatacaaagagtgagtaaatcacagccctgagattgttctacggagcagaagagtgctccctggttgcaaggaatggtgtgctactctgcttactgaacagctcatagagtcagaacaacact

SEQ ID NO: 82073 - DNA, 600 bp, Chicken  19866894376337_1
tatattcttacggggcttttgttattgttcttcagatgttgtaggtcatacatgaagatttttcattgcattatctgttcctctcagcaggaaacatttgaagtactcatagttattaattttgctaatcatattgtttgaagatggaaattgcatcacaatggcaaaccttgcatgatatggtcttgataagtttgtgtaatgatgacatggagagaccttctagaggccgtttgttcctagtatcgtaggaaaattgaccaaaaaagaaaatgcttgagtggaaggatcctggtcacrtgtatacaaaattccaggttttgtctcatctaaacatcacccccaataaataatgaatggaataatttgagcaaagtggaatatgttgttgtattagaaagttatgaggctgtgctgtttctccattaaatatgtgaagcaagttttcttgaagcaagttcaggtagcttggtcctacaaggatatggattgtggctttttagttttttctaaaataaatatgctggagccctgttcagtgcatggacacttaatgctgcaatagggaagttgttgtaaaatacgtcacagcaaagtacc

SEQ ID NO: 82074 - DNA, 600 bp, Chicken  19866894376337_2
aatggaataatttgagcaaagtggaatatgttgttgtattagaaagttatgaggctgtgctgtttctccattaaatatgtgaagcaagttttcttgaagcaagttcaggtagcttggtcctacaaggatatggattgtggctttttagttttttctaaaataaatatgctggagccctgttcagtgcatggacacttaatgctgcaatagggaagttgttgtaaaatacgtcacagcaaagtaccagaaaggctggatggcagctccattagtgggagaattctatgcttatcttacaawataacttgccttactgtatcactaatggattggaaaagaaaaatgtagaaaagcaatggtcaaacagatttatgtggggagggtagttctgtggaagttaaccttattatgccttaaaggaactgcatgtatttaaggattggtctgctttagaacacaagtatgagcagtccaattgaagctgactacagtttgaaaattagtgagaccaggacaaggcaagtacaaggcatgtttagcacattcaagatagataagtttgattaaatccaagcactttttgattttactctcgatagc

SEQ ID NO: 82075 - DNA, 600 bp, Chicken  19866894376338_1
tcaggcactgtgctatgcaaatatatacaaacgcaggatgcaaatagggaaagtttgcaaaatcagctctgatcccaagtgccaggacatgggatggcacatagggtgaggagagctggattcctccctgccccttctggggagtgctgctgcggggagccctgcctgactctggaggtctcaggttttgccacgtgggccttcagctggcactgagcaaaggaagcccagacagccctgactgcccatttccatacccccctgcctagctaagtgttgagcatgtgttacgtcttcatytgtagaaatatattagtatataacgatatttgtatttatatttgtatttgacacattgacccaggaatggaaggaaacccataggcacacggcatggctcttgggaccttccttcccctgcaaaggctgtgccatggctctggtgggagctgtgcccggcggcggctccgctccagccctgtgctgcctctcccagcgctggctgccggctgactcagtgtctttctctcattgcactgtaaatcctgggctggcgcgcggcgtatttacaaggtaatacggcgtgatgcatcataaaga

SEQ ID NO: 82076 - DNA, 600 bp, Chicken  19866894376349_1
ttccctacagcactcagcacagtgctgagtgagtatcagttactgcttttatttgtgtcagggcttacactgctgttgggcatttcctggaaagaggattgttgatgccagttctaccaccctctgattcccagcagtgggcttcattttacatctcttcataccatttgaacggcttgttttgctgtgtacgtctcctgtgcactgttttgcatttttgttcattgtttctctgctcttacgcagcagacatgtgcaatcctgggatttggccacatgttacacccctctgcctttccrtccatgcagggcagcacagaacagyggagagatggaaaaggaatacttcagaccttcaggttcctgcctcatccctttcctcctggtctctgtgtgctaccaatcacagatgtgtgatcctcagacacgtctttctgattagttctcatcttggagcactcacttctgtgtgtctgagcggtgctgtaaattacagtgatcttttacttgtttgtagctttttatcagcttcagcatggttttcmttctctgtaggtgttcctgtaatgccatctcgtggtaatcctcagactctaaatg

SEQ ID NO: 82077 - DNA, 600 bp, Chicken  19866894376349_2
tgagtgagtatcagttactgcttttatttgtgtcagggcttacactgctgttgggcatttcctggaaagaggattgttgatgccagttctaccaccctctgattcccagcagtgggcttcattttacatctcttcataccatttgaacggcttgttttgctgtgtacgtctcctgtgcactgttttgcatttttgttcattgtttctctgctcttacgcagcagacatgtgcaatcctgggatttggccacatgttacacccctctgcctttccrtccatgcagggcagcacagaacagyggagagatggaaaaggaatacttcagaccttcaggttcctgcctcatccctttcctcctggtctctgtgtgctaccaatcacagatgtgtgatcctcagacacgtctttctgattagttctcatcttggagcactcacttctgtgtgtctgagcggtgctgtaaattacagtgatcttttacttgtttgtagctttttatcagcttcagcatggttttcmttctctgtaggtgttcctgtaatgccatctcgtggtaatcctcagactctaaatgtctctttcccatgcttgccaaagct

SEQ ID NO: 82078 - DNA, 600 bp, Chicken  19866894376349_3
gcagacatgtgcaatcctgggatttggccacatgttacacccctctgcctttccrtccatgcagggcagcacagaacagyggagagatggaaaaggaatacttcagaccttcaggttcctgcctcatccctttcctcctggtctctgtgtgctaccaatcacagatgtgtgatcctcagacacgtctttctgattagttctcatcttggagcactcacttctgtgtgtctgagcggtgctgtaaattacagtgatcttttacttgtttgtagctttttatcagcttcagcatggttttcmttctctgtaggtgttcctgtaatgccatctcgtggtaatcctcagactctaaatgtctctttcccatgcttgccaaagctgatgagatgagctgccttcaagctgtatagaagtgattgcagctctgtattgatagctacacttgtgtgcttgtgaatcaaggaaatagctgcctcctgccatggagcactaatcgtggcattatgtctgatcttctgaagatggtgttttgtgttcaacaggggccctcatggcagatgcctgagctgggtgttttatctacagtacaatagaagtgca

SEQ ID NO: 82079 - DNA, 599 bp, Chicken  19866894376357_1
  misc_feature (1)..(64): n is any nucleotide
nnnnnnnnnnnnnnnnnnnnnnnnnnnnnnnnnnnnnnnnnnnnnnnnnnnnnnnnnnnnnnnnctgctaaaaactttgcatttcataataagtctgaataagtattaaagccaaaatgcaataggaaaattaccttcaaaagatatttgcattcaccagaccaaaaacatttctttttcaggcatttgtgggcacagtttgtttataatatctgtttttttttcagagacgtacttgcatttctttttctctggttttcttttgtgacaagaactttcaactttctatgtaacttccckctaaccaatgaacagctctgaatttatacattgaaattattgagttctatttaaaattgtgactttgcaaacaaaagtaagccctcttgttatgattattacacaaagtcataatttactggtgataaatgagaattatttgatgctaaaaacaatttctacagttttgtgcatcattttgttttccattttctctaattttgtattggttaaatttttttctgtgagaaaattgcatgtgatcttgaggaggacactgagctttactgtgcttccagtgtctgttgacaagaacaatt

SEQ ID NO: 82080 - DNA, 600 bp, Chicken  19866894376365_1
ctgcatgtccctttgcagacaacatccattggctctgagcctccagcatggaggaaagccctctgcaggtgaaaggggatgatttacttttccctcacctgttaaataggctttcttggttttatatgacttcccttttcagaacagagagtgagagcagaagatctcttggtttgtgttgctgctcttacctgcaaatgccataattttcactatctgaccacgctcaattttgtgattcaaaatcctttgctgttcgtgggtcagtttcacttcagacaaactactaaaataagagaraaagaaaaaaaaaaccctaaataagtaaaaggaattaagaataaacattctcccacataaatgaatctaatatcagaaggagatccacaaagggtttatcccatcccacagccaggaggttggcactggggcaagctgatcattgtgcaaaaaggcagtaccttccayagaataagactggagagagggaaagcaaaaagtaaaccttgcaaaaggttacatgggaaaagaccttctcaagagcactcagccacgctttcttggcttaggctcactgaaagcaaacagcatcttagagtt

SEQ ID NO: 82081 - DNA, 600 bp, Chicken  19866894376365_2
ttggtttgtgttgctgctcttacctgcaaatgccataattttcactatctgaccacgctcaattttgtgattcaaaatcctttgctgttcgtgggtcagtttcacttcagacaaactactaaaataagagaraaagaaaaaaaaaaccctaaataagtaaaaggaattaagaataaacattctcccacataaatgaatctaatatcagaaggagatccacaaagggtttatcccatcccacagccaggaggttggcactggggcaagctgatcattgtgcaaaaaggcagtaccttccayagaataagactggagagagggaaagcaaaaagtaaaccttgcaaaaggttacatgggaaaagaccttctcaagagcactcagccacgctttcttggcttaggctcactgaaagcaaacagcatcttagagtttgaggtgtcttcttgcttctgagagcacgtatcttaaattgctttcagattcctcagtgcaggacatcaattatctctgcctcacgtgggagctgagagctgtgattaatgttcagaaaggcattcagcacttcctgctggagtgcagttgttttattcataaaggtc

SEQ ID NO: 82082 - DNA, 599 bp, Chicken  19866894376369_1
  misc_feature (1)..(169): n is any nucleotide
nnnnnnnnnnnnnnnnnnnnnnnnnnnnnnnnnnnnnnnnnnnnnnnnnnnnnnnnnnnnnnnnnnnnnnnnnnnnnnnnnnnnnnnnnnnnnnnnnnnnnnnnnnnnnnnnnnnnnnnnnnnnnnnnnnnnnnnnnnnnnnnnnnnnnnnnnnnnnnnnnnnnnnnnncttgcaaaacctgagaagctgctggaggagcccagcgcagtgccccgcagacacgtgtgctgccctctccccacacgaaccacgtggtgctgagctgactgctcgtgctttccagaaatcagctacaaccrccctgcagactgcattgtgtctttgtgccaccagttggccatccccaatgaattagaggttcttgttctttagacacttggagatttttaatggccttgctctgaaggtggagaaatccaactcygcacagcccacrtatcttcactttgcacagcagtgcttctgagttagggtcgtatggtcaggttgtggttggacttgatgatctttaaggtcttttccaaccttagctattccgtgatcctgaagtcactaacgtgcactcctgacctatcctccctttgtgatgtgatgctga

SEQ ID NO: 82083 - DNA, 599 bp, Chicken  19866894376369_2
  misc_feature (1)..(44): n is any nucleotide
nnnnnnnnnnnnnnnnnnnnnnnnnnnnnnnnnnnnnnnnnnnncttgcaaaacctgagaagctgctggaggagcccagcgcagtgccccgcagacacgtgtgctgccctctccccacacgaaccacgtggtgctgagctgactgctcgtgctttccagaaatcagctacaaccrccctgcagactgcattgtgtctttgtgccaccagttggccatccccaatgaattagaggttcttgttctttagacacttggagatttttaatggccttgctctgaaggtggagaaatccaactcygcacagcccacrtatcttcactttgcacagcagtgcttctgagttagggtcgtatggtcaggttgtggttggacttgatgatctttaaggtcttttccaaccttagctattccgtgatcctgaagtcactaacgtgcactcctgacctatcctccctttgtgatgtgatgctgagtgaatcctgcaggmttgctgcatggatgagatgacacactgctctgcacttgttctcagacacattccctccttctgccctcaataatatctgcacttaaaacatactttctgacaattgcctt

SEQ ID NO: 82084 - DNA, 599 bp, Chicken  19866894376369_3
  misc_feature (1)..(32): n is any nucleotide
nnnnnnnnnnnnnnnnnnnnnnnnnnnnnnnncttgcaaaacctgagaagctgctggaggagcccagcgcagtgccccgcagacacgtgtgctgccctctccccacacgaaccacgtggtgctgagctgactgctcgtgctttccagaaatcagctacaaccrccctgcagactgcattgtgtctttgtgccaccagttggccatccccaatgaattagaggttcttgttctttagacacttggagatttttaatggccttgctctgaaggtggagaaatccaactcygcacagcccacrtatcttcactttgcacagcagtgcttctgagttagggtcgtatggtcaggttgtggttggacttgatgatctttaaggtcttttccaaccttagctattccgtgatcctgaagtcactaacgtgcactcctgacctatcctccctttgtgatgtgatgctgagtgaatcctgcaggmttgctgcatggatgagatgacacactgctctgcacttgttctcagacacattccctccttctgccctcaataatatctgcacttaaaacatactttctgacaattgccttgtttattcactg

SEQ ID NO: 82085 - DNA, 600 bp, Chicken  19866894376369_4
ttgtgtctttgtgccaccagttggccatccccaatgaattagaggttcttgttctttagacacttggagatttttaatggccttgctctgaaggtggagaaatccaactcygcacagcccacrtatcttcactttgcacagcagtgcttctgagttagggtcgtatggtcaggttgtggttggacttgatgatctttaaggtcttttccaaccttagctattccgtgatcctgaagtcactaacgtgcactcctgacctatcctccctttgtgatgtgatgctgagtgaatcctgcaggmttgctgcatggatgagatgacacactgctctgcacttgttctcagacacattccctccttctgccctcaataatatctgcacttaaaacatactttctgacaattgccttgtttattcactgaggcagacatacacggtcacactgagatttgtataggaaaatggtagcttggggtcaaggcatagactgaaattattgctgtggttatcactgcagtgcgcattgaagtaataactgcargcacccaagagatgcacagtttggttcttgcagatgcttgcttctgagactgtggaac

SEQ ID NO: 82086 - DNA, 600 bp, Chicken  19866894376369_5
acgtgcactcctgacctatcctccctttgtgatgtgatgctgagtgaatcctgcaggmttgctgcatggatgagatgacacactgctctgcacttgttctcagacacattccctccttctgccctcaataatatctgcacttaaaacatactttctgacaattgccttgtttattcactgaggcagacatacacggtcacactgagatttgtataggaaaatggtagcttggggtcaaggcatagactgaaattattgctgtggttatcactgcagtgcgcattgaagtaataactgcargcacccaagagatgcacagtttggttcttgcagatgcttgcttctgagactgtggaacccacatcagaattaaaatgcttaataaaatggggtagcttgcattaaatatcagaggggatttattagaagctgtaacaaactgagtaaagagtggatcaggctgtggaagaaggaagacctagaattaacatgaagacttttgaaaatgatcttatgcagtcaaaatctgcagtattaccagctttttctccttccttgggaaataatcaagtactcccttatgattgttgtatggaatca

SEQ ID NO: 82087 - DNA, 600 bp, Chicken  19866894376371_1
ctcattaaatatcagttacaaccactcactgacatgtctaaaagatttataccaaactgcgtaacaaacatttatcgcagttttctggtcatttcagtcatttttaagaatggtaagaatttaatttaagaatttttaaaaactacaaaaaaaatagatttagctcaaaagaaacatacaaaatagtcttgctttttgtcacactcagttcattatcaagttaaaagctcatcttcaaaccaaagctgaggagcaaccaagaagtttcatgcttttatctttcattccctgtttacagcrgggcatcagattgttgtacactgtacacaaacctctcacaggagagagagaaattaacatttgcatcatattaacaacaaaagtaatttttacatgtcttctttacagatttatttacaattcaagcaattcccagcattctatattgtatgtgaagtctattttctgcagtgaagttaatgcagaacacttgtcgggaaactgaactttgtgccaaaatgagtcaaaatgaacacagatgaaaactgactgagttatctccagtacaacaatatctcattggctcaatttcaggcttcc

SEQ ID NO: 82088 - DNA, 599 bp, Chicken  19866894376373_1
  misc_feature (1)..(21): n is any nucleotide
nnnnnnnnnnnnnnnnnnnnnttgtttgaaaaggaacacacacaagaaaagaaattaaaaaaaaaaggaaattcagatcaaagagaaagcagaaatgaaccgtgagaagcacagcaggatctggcatgaaggagcccccacacgcagcatccccctgaagccaacacacatctgcagtgtgtgcacaacggcctcctgatgccatgcagcccattgctgtgaagcacacacctcctggcacaccccacagaccctctgccacccccatgggatgcacagcagctgccacaaacctcaggkacaaaccagtgggacctcttacaccaagtgtgcacggaaagagagcaccggtgtgtgtgtgcacacaggcagtgctacawggagtgcaggaatgccatgccatgagctcacacaccctgcaggcagkaagaacartgctctgctgagtgctccccgtgcttttgctgggcataagagcatcactcctgctgggaccagtggggggcacagcacagagctgggcacagcacactgacctcctctggtacggtcagaaatgactttcgctctgcagctcaattactcttattgccatctgc

SEQ ID NO: 82089 - DNA, 600 bp, Chicken  19866894376373_2
aagagaaagcagaaatgaaccgtgagaagcacagcaggatctggcatgaaggagcccccacacgcagcatccccctgaagccaacacacatctgcagtgtgtgcacaacggcctcctgatgccatgcagcccattgctgtgaagcacacacctcctggcacaccccacagaccctctgccacccccatgggatgcacagcagctgccacaaacctcaggkacaaaccagtgggacctcttacaccaagtgtgcacggaaagagagcaccggtgtgtgtgtgcacacaggcagtgctacawggagtgcaggaatgccatgccatgagctcacacaccctgcaggcagkaagaacartgctctgctgagtgctccccgtgcttttgctgggcataagagcatcactcctgctgggaccagtggggggcacagcacagagctgggcacagcacactgacctcctctggtacggtcagaaatgactttcgctctgcagctcaattactcttattgccatctgctggcaaaactcaaagcaggcagagcaggaactgagcaggagcagggcttggctgtgctggagctctgagctccacctgggc

SEQ ID NO: 82090 - DNA, 600 bp, Chicken  19866894376373_3
gaaggagcccccacacgcagcatccccctgaagccaacacacatctgcagtgtgtgcacaacggcctcctgatgccatgcagcccattgctgtgaagcacacacctcctggcacaccccacagaccctctgccacccccatgggatgcacagcagctgccacaaacctcaggkacaaaccagtgggacctcttacaccaagtgtgcacggaaagagagcaccggtgtgtgtgtgcacacaggcagtgctacawggagtgcaggaatgccatgccatgagctcacacaccctgcaggcagkaagaacartgctctgctgagtgctccccgtgcttttgctgggcataagagcatcactcctgctgggaccagtggggggcacagcacagagctgggcacagcacactgacctcctctggtacggtcagaaatgactttcgctctgcagctcaattactcttattgccatctgctggcaaaactcaaagcaggcagagcaggaactgagcaggagcagggcttggctgtgctggagctctgagctccacctgggccagggctgcaagcacacaacagcacatgcggaggcaacacagagcac

SEQ ID NO: 82091 - DNA, 600 bp, Chicken  19866894376373_4
ccccacacgcagcatccccctgaagccaacacacatctgcagtgtgtgcacaacggcctcctgatgccatgcagcccattgctgtgaagcacacacctcctggcacaccccacagaccctctgccacccccatgggatgcacagcagctgccacaaacctcaggkacaaaccagtgggacctcttacaccaagtgtgcacggaaagagagcaccggtgtgtgtgtgcacacaggcagtgctacawggagtgcaggaatgccatgccatgagctcacacaccctgcaggcagkaagaacartgctctgctgagtgctccccgtgcttttgctgggcataagagcatcactcctgctgggaccagtggggggcacagcacagagctgggcacagcacactgacctcctctggtacggtcagaaatgactttcgctctgcagctcaattactcttattgccatctgctggcaaaactcaaagcaggcagagcaggaactgagcaggagcagggcttggctgtgctggagctctgagctccacctgggccagggctgcaagcacacaacagcacatgcggaggcaacacagagcacagcagctc

SEQ ID NO: 82092 - DNA, 600 bp, Chicken  19866894376379_1
cagggagccctgctccatctcctctgggctccgcgctcctccttctgcccactccccagggacacgctcatctgcagagagttttccatgtgctgttatgtctgaaaccagcttctacactgcaacgttggggtggttttaaagcagctgctctcttggctgagggctgtgtgttgacagccacaattgtaccttctggatccactgcagcttcttccagtctcaggaagacatcctccagggttgtcatactgactccgtaattgatgattcccaggtcagagcagttgtcgaggcccyggaacagatctgtgtgacagaggtatggtcagtgccaccaaggtgtcaaacacaagcatgactatggaccagacttgggagaggtgaagtcaaccagagtgggttcccagtcatagggaaaataacaaagcaataactgcctgcaagcagggggtttggagggaaccccagactgccagattcacagttcagtgaaaatttcatagaatgaatcatagaatcaaagaatgggtttggctgggagggaccttgaagatcacccagttccaacctcctgccatgggcaggtttttccaatta

SEQ ID NO: 82093 - DNA, 599 bp, Chicken  19866894376380_1
  misc_feature (1)..(20): n is any nucleotide
nnnnnnnnnnnnnnnnnnnntagaagtggatgcactgaactttagcaatctgaaagcaatgtctactcaaagtactttaccttgtgagaaatgtagatgccttcagaaaaagatgctattttttctcccacaattagcagaaatgaatcatctgcgcagaggtaccagtggaggtatctctactaactgcagagagaggaaatctggctagtgtaaatttgacatctgatttttagatggctgaaagatgggatgaatccttccacagaagttataaaacacgaaaaagtgtatgatagrtgtggaaactctacagaaattctggcaactcccaggaaaatgtgtgaacttctgcttggtaagagagagttaactatctaaaaatgcagcaatataaaatacttttcaggtagccgtggctaaagtagttttcattatcgctcttttcactctgctacagcagagctgtcatctgtgattgtcttctccagggctgcaagtgattgtttgttagcttaatcatactgttcttctcccgagatgttcacttatgaataccagattttcaagaataattgtgatctctgctgtaaaacagt

SEQ ID NO: 82094 - DNA, 600 bp, Chicken  19866894376383_1
acagaagtttcatgaactacttgtatttatttttaagttacacattagttaactgccaagttaataatttgctttctgaatctatcacctaatagtaattgcaagttatcgtatcacaagcaaagctattattctggtttgtcatacagttagttgcatttcaatcatactgtaaaccagcaagccaataggacagaaattaatcaaatcatcagaacaagatctcaacaagtttcctcagtcagcgccagaagtttagcaatgacttgagaagctaactacaagggttgtattaagtgktcaagaaccttatgcacttctatgatctatcagggaatgatgctagtttcataaawggtgcccaacggcaggtagcatcaagcacgccatttctgcttagtgccccacatcctacgtctgtaaagcaataagtaaaacttgatgatgggggaagggacagaacagcttattttcagatacttcattttgatttttaattatgcatccttctttaaaaatgatagtcctatttaatttttaatgcaactaatataacgtggcaaaacagaagctaagctgacaaaaacaggtgattttata

SEQ ID NO: 82095 - DNA, 600 bp, Chicken  19866894376383_2
caagttaataatttgctttctgaatctatcacctaatagtaattgcaagttatcgtatcacaagcaaagctattattctggtttgtcatacagttagttgcatttcaatcatactgtaaaccagcaagccaataggacagaaattaatcaaatcatcagaacaagatctcaacaagtttcctcagtcagcgccagaagtttagcaatgacttgagaagctaactacaagggttgtattaagtgktcaagaaccttatgcacttctatgatctatcagggaatgatgctagtttcataaawggtgcccaacggcaggtagcatcaagcacgccatttctgcttagtgccccacatcctacgtctgtaaagcaataagtaaaacttgatgatgggggaagggacagaacagcttattttcagatacttcattttgatttttaattatgcatccttctttaaaaatgatagtcctatttaatttttaatgcaactaatataacgtggcaaaacagaagctaagctgacaaaaacaggtgattttatatttcgctggggactgtacattcccaaaaactcaaaagaaacatttaaaacagaatt

SEQ ID NO: 82096 - DNA, 599 bp, Chicken  19866894376387_1
  misc_feature (1)..(90): n is any nucleotide
nnnnnnnnnnnnnnnnnnnnnnnnnnnnnnnnnnnnnnnnnnnnnnnnnnnnnnnnnnnnnnnnnnnnnnnnnnnnnnnnnnnnnnnnnncattctttttaacacatctctgagtttaggttatctgcagggtgctttgcaggctttacaggccagacatgttcaagaaatccctcccaagatagcaactgagacactcttattacttacccaagggagccctgcaggatagtgagcatataaaatttggtgttgttgaatgtgcttctgcatggcagtgcaacatggtggacaggtctygatatttatgatccaagactgtataaattcctattatttcctatcctgtattattcctcagcaatcttggtagaaataaagatcatagaatcagagaatcttagaacggtttgagttggaaggtaccttaaagatgatccagtttcaactcccctgtcatgatcagagacacctcccactaaaccagcttgctcaaagcctcatccaacctggctttaaatgctttccactttaagagaagagcaggtccaagactgcctttggaactggaatgggtccaaaggaagaccatgaagatg

SEQ ID NO: 82097 - DNA, 600 bp, Chicken  19866894376391_1
agaagggaaaaaaagatttaaaaaaataccaagaaaacaacagtgtgtgtctggctcacagaagtagttaaggagaactgggaaggagaagcgtactttgcctcttatcatacagatcgcatattagggaagatttgcagcatagtgctacagatgttagtttaaaatttgagtcctagttctgtaagagtgcttctctagcatatattcatggtgtaagctacaatcataaaagaactgagacatttccaatacaaatggccctgacagactatacctatgcaggaagttacttcagckagtctgaagcagcaaataaattacttcaaaaactttttggctctataaaccccaaacaaaaacagctcttttacagtactgaagcttaacagacttattttacatttagaaaattgtttcaacacagttttatcttgtccaaaggaaataaagacaagaattacacccatgaaattggctacttatagagaacgattttaaactaaatgggaaggtctacacaaagtgacaaagtacatgccaagaaaacagtatttggtgaaacctgaaacattagccagggttaattcccctcacaaa

SEQ ID NO: 82098 - DNA, 600 bp, Chicken  19866894376395_1
tgacctccttacaagaaaataaccccaaaacttttgctgcttgggataccatagaatcacagatccgtgggatggctgggttggaagggaccctgaggatcacagagcccaaagagtggttgggttgcctcccatcagctcaagctgggaaggtctaaggaggggggcagatggtgggaaaagcttcaggccctgctggccccgttggccctgctcatccttcttcaagcactgcttctctgttgctttcttgcagacgacctcgaggctgatgagctccagctggaccttgaggactcraagctgcacccctctatccagtgcacgcccagccccggtgagcagccagggacagccttccctctgaacgtgtccacactcctttgagcgttgctgaactctcaggcccccacaacccttcctgcagtgtctcacatggaaaccacacctgagcccacctgagacatgaggctctggagctgggctctggccaggctggggaccggtgggatggacagcttccctctcccacttggaggcagctgccttcagatggggagaggacaaaggtgtggtgttcccatgagctcctctggaaga

SEQ ID NO: 82099 - DNA, 456 bp, Chicken  19866894376395_2
gagcagccagggacagccttccctctgaacgtgtccacactcctttgagcgttgctgaactctcaggcccccacaacccttcctgcagtgtctcacatggaaaccacacctgagcccacctgagacatgaggctctggagctgggctctggccaggctggggaccggtgggatggacagcttccctctcccacttggaggcagctgccttcagatggggagaggacaaaggtgtggtgttcccatgagctcctctggaagaagccccctttgacttcagagcctgaagaggatccagcayagggcaggggtggggggaggagagcaaaagggctttgccatgcacagagtcacggggtggcaatgccggggatctgccctccccacattccagacatcctgaggagctgaggccaccgttctgagcggcaccactggagcaaagcctggctttggg

SEQ ID NO: 82100 - DNA, 600 bp, Chicken  19866894376396_1
atttgttgtgctttttttttcttttcccctccctcccttctttccccttttaatttgtctaggagataaaaagcccctccagtgttgtttcctgcaaagaccattcttaagagctcgttggacagcgcagggctcttgaagtgatagctaattggtgaaagaaaggccccgattgtctggagggagctggaaagtgctgcgtgtgctgctgaaagggactagggagaaggtgcctggtttcgctgagcagctgctgctggagatgtttggagattacatcagcattggaaaaaaggggcyaaaaaaaaaaaaaagtccaacttcacagagacggagtttatggagttttttttcccyttccaaaggtcttctgacaatactgtcattgtcaatataagagttgttaattcttcatgaatagcacatggggcctcttgactaaatggtacgttacatgtcccaaatctgtcagctgggctcttctctcacatgctagtgagatcactttgattggaatgttacaggaattgctgggctggccgtgcagaattgaatgctgcattatataattagatctcccrgagtatttttttggcgtta

SEQ ID NO: 82101 - DNA, 600 bp, Chicken  19866894376396_10
ccacaacaactgattgagtcaaacgacttcctatcagactggagcaagaatttgttgttgggaacagggttgtggacgtttgccagttaaacgatctggacaagctggaaggaatcctattgttgggcagtccaaggctgtcagtggcccagtcttgctacgtgaaatgcgatggcccattgcctgctggacaagctgctggtctgcacgttaggatgtcagctgcacaccctgcctggatgcaacaacggactgtgcctgaatgaacatggagattactaacccagctctggatccacrtctaatgctgctgatttgcagagtggatttgtacatgattgacttgttgctaaattcctcttgtggtttctatcagtcagtcagatcagaagctggttataacccaatgatcgcctttcctgtcagacggtatatctgagtaacagaagtggttggacaccactgggttagtctgttccatgaaaaacagatctgtgtgttatagtttgtcggacagattccagctctgcttcagcagtgctgggcgttggggcacatgacagtgcttagaggccttgcaaagtaatttctcttctagtc

SEQ ID NO: 82102 - DNA, 600 bp, Chicken  19866894376396_2
atttgttgtgctttttttttcttttcccctccctcccttctttccccttttaatttgtctaggagataaaaagcccctccagtgttgtttcctgcaaagaccattcttaagagctcgttggacagcgcagggctcttgaagtgatagctaattggtgaaagaaaggccccgattgtctggagggagctggaaagtgctgcgtgtgctgctgaaagggactagggagaaggtgcctggtttcgctgagcagctgctgctggagatgtttggagattacatcagcattggaaaaaaggggcraaaaaaaaaaaaaagtccaacttcacagagacggagtttatggagttttttttcccyttccaaaggtcttctgacaatactgtcattgtcaatataagagttgttaattcttcatgaatagcacatggggcctcttgactaaatggtacgttacatgtcccaaatctgtcagctgggctcttctctcacatgctagtgagatcactttgattggaatgttacaggaattgctgggctggccgtgcagaattgaatgctgcattatataattagatctcccrgagtatttttttggcgtta

SEQ ID NO: 82103 - DNA, 600 bp, Chicken  19866894376396_3; identical to SEQ ID NO: 82102

SEQ ID NO: 82104 - DNA, 600 bp, Chicken  19866894376396_4; identical to SEQ ID NO: 82102

SEQ ID NO: 82105 - DNA, 600 bp, Chicken  19866894376396_5; identical to SEQ ID NO: 82102

SEQ ID NO: 82106 - DNA, 600 bp, Chicken  19866894376396_6
tctaggagataaaaagcccctccagtgttgtttcctgcaaagaccattcttaagagctcgttggacagcgcagggctcttgaagtgatagctaattggtgaaagaaaggccccgattgtctggagggagctggaaagtgctgcgtgtgctgctgaaagggactagggagaaggtgcctggtttcgctgagcagctgctgctggagatgtttggagattacatcagcattggaaaaaaggggcaaaaaaaaaaaaaaagtccaacttcacagagacggagtttatggagttttttttcccyttccaaaggtcttctgacaatactgtcattgtcaatataagagttgttaattcttcatgaatagcacatggggcctcttgactaaatggtacgttacatgtcccaaatctgtcagctgggctcttctctcacatgctagtgagatcactttgattggaatgttacaggaattgctgggctggccgtgcagaattgaatgctgcattatataattagatctcccrgagtatttttttggcgttacctcattattctagcttaaatatggaatcagtycttttgatgactttactggttgta

SEQ ID NO: 82107 - DNA, 600 bp, Chicken  19866894376396_7
gcattggaaaaaaggggcaaaaaaaaaaaaaaagtccaacttcacagagacggagtttatggagttttttttcccyttccaaaggtcttctgacaatactgtcattgtcaatataagagttgttaattcttcatgaatagcacatggggcctcttgactaaatggtacgttacatgtcccaaatctgtcagctgggctcttctctcacatgctagtgagatcactttgattggaatgttacaggaattgctgggctggccgtgcagaattgaatgctgcattatataattagatctcccrgagtatttttttggcgttacctcattattctagcttaaatatggaatcagtycttttgatgactttactggttgtaattatattaatacgattcgttttatggtcctgtcttagtgcttatatagattacaaactgtctcgaaggtttcctgacaggaaaaaagagctctaaaagagctcaaaaggcttcttcagatttcaactgacaacaaggacaactggatgaggtaaatggaccyagagcagattttactctggcctctgaggacagagcaatggccggttgagactgcaactcag

SEQ ID NO: 82108 - DNA, 600 bp, Chicken  19866894376396_8
gagtttatggagttttttttcccyttccaaaggtcttctgacaatactgtcattgtcaatataagagttgttaattcttcatgaatagcacatggggcctcttgactaaatggtacgttacatgtcccaaatctgtcagctgggctcttctctcacatgctagtgagatcactttgattggaatgttacaggaattgctgggctggccgtgcagaattgaatgctgcattatataattagatctcccrgagtatttttttggcgttacctcattattctagcttaaatatggaatcagtycttttgatgactttactggttgtaattatattaatacgattcgttttatggtcctgtcttagtgcttatatagattacaaactgtctcgaaggtttcctgacaggaaaaaagagctctaaaagagctcaaaaggcttcttcagatttcaactgacaacaaggacaactggatgaggtaaatggaccyagagcagattttactctggcctctgaggacagagcaatggccggttgagactgcaactcagtgaaggtccttcagaaggcctcatgctgacagagagggaatagaaaccacaa

SEQ ID NO: 82109 - DNA, 600 bp, Chicken  19866894376396_9
acaggaattgctgggctggccgtgcagaattgaatgctgcattatataattagatctcccrgagtatttttttggcgttacctcattattctagcttaaatatggaatcagtycttttgatgactttactggttgtaattatattaatacgattcgttttatggtcctgtcttagtgcttatatagattacaaactgtctcgaaggtttcctgacaggaaaaaagagctctaaaagagctcaaaaggcttcttcagatttcaactgacaacaaggacaactggatgaggtaaatggaccyagagcagattttactctggcctctgaggacagagcaatggccggttgagactgcaactcagtgaaggtccttcagaaggcctcatgctgacagagagggaatagaaaccacaacaactgattgagtcaaacgacttcctatcagactggagcaagaatttgttgttgggaacagggttgtggacgtttgccagttaaacgatctggacaagctggaaggaatcctattgttgggcagtccaaggctgtcagtggcccagtcttgctacgtgaaatgcgatggcccattgcctgctggaca

SEQ ID NO: 82110 - DNA, 599 bp, Chicken  19866894376400_1
  misc_feature (1)..(174): n is any nucleotide
nnnnnnnnnnnnnnnnnnnnnnnnnnnnnnnnnnnnnnnnnnnnnnnnnnnnnnnnnnnnnnnnnnnnnnnnnnnnnnnnnnnnnnnnnnnnnnnnnnnnnnnnnnnnnnnnnnnnnnnnnnnnnnnnnnnnnnnnnnnnnnnnnnnnnnnnnnnnnnnnnnnnnnnnnnnnnnctcaaaccgctgaacttccatcccatacagtctctgactataactacactagaacctgttggtcatgaacagtagaagatgtatctgtttacttctgaccactgttgccttttcattctaaacacraaatacatgcagggaaaggcaggttagttagaaagttaagtttcaagaagaagatcaggaaatccctcacttcatgagatacagggtaggagcaactcaccattgaaacagttacagatatcttcatgggtgacatatgaaaatgtaatttatgtcaaggaacgtttttcttaaagcaacatgaaactggtattcgatgcctttagaaagaagtttgtccaaactaagcctacgtttactgctgctactcamaggtgtaaccaaggcatgatttataatgttcagaatggctattttaa

SEQ ID NO: 82111 - DNA, 600 bp, Chicken  19866894376400_2
atgtatctgtttacttctgaccactgttgccttttcattctaaacacraaatacatgcagggaaaggcaggttagttagaaagttaagtttcaagaagaagatcaggaaatccctcacttcatgagatacagggtaggagcaactcaccattgaaacagttacagatatcttcatgggtgacatatgaaaatgtaatttatgtcaaggaacgtttttcttaaagcaacatgaaactggtattcgatgcctttagaaagaagtttgtccaaactaagcctacgtttactgctgctactcamaggtgtaaccaaggcatgatttataatgttcagaatggctattttaaaaataacacagttctgtactgtaaatatatatatgtgaagcaaataccaaaagagaaggagctgaatagcttgaatgaaaagagattcttttcaaacagaaaacatgtaaaatcttgtttttaagaacaccatttacctcattaatttgacactatataactcaacagggtataaggatgttccagaagtcacataaaaagactgctagaggggacttgagagttcatctgcagacccattcccctgcctcga

SEQ ID NO: 82112 - DNA, 599 bp, Chicken  19866894376405_1
  misc_feature (1)..(115): n is any nucleotide
nnnnnnnnnnnnnnnnnnnnnnnnnnnnnnnnnnnnnnnnnnnnnnnnnnnnnnnnnnnnnnnnnnnnnnnnnnnnnnnnnnnnnnnnnnnnnnnnnnnnnnnnnnnnnnnnnnngaaagcatgcaagaaacaaggctgctctcctgaaactggtcacaagataccctacaaaatgcctgacctagaaaacacaggttacttcactcacatgcaaagtaactccagtgttagtctttatgcataccaagagacagacagagagagctttagaagtgaggagcagggcagtgtctggagcmctgctaactttggcagcggaagcagcagcagtcctgtgtggagatggaaaggaagacaaaagatttccttgccacggttagttaggataaaggcaaagagtgagctaaattcagatgactcacctcagcttgcaacaaaaatggcaattttaacgagctgtgataatgtcatgcagactgcttacgccaagatttaggtcaaaggagcccagtcaatgtttttgacatgcaaaaagctgctcctgggtccagagtgtactttgaccataggataacgctatgtcaggagaagatctggt

SEQ ID NO: 82113 - DNA, 600 bp, Chicken  19866894376407_1
gcagcagagactgaccttctaagatgctatctgcagttgtttgctttgtcacaggtgtgagggctgctttcacaaaccagatccagaagatgaatgagcagtgaattcagaagcatgagcttcattctctgccctccatgtctcatttctttgcaggtctgggctttgccctttactgttgggggtttatgtgacaatgcacctggcttgtttgtgcagttttgacttttgggttcatgttctaagcagtggctttacttttacgtagcttaagaaaaataggttgtaatggaaatgtcrgtcactgctgtcacagtagtcccagtgctgtaacaagtaaccttctgggcagagctccgagttcagtgttaacaggttttatttgggatacttagaagagactggtgatgcttccttttaatttgtaggctttaaaagagttcttgtcagtggctgcaggactagcagaggcatcaggtattacaagtaatttatcttttttttcctactgcaagaattcaggactcgagagaagaggtagcaaatgaggggagcagagacagcttggagcagtatagggtagtctgatacagccacatt

SEQ ID NO: 82114 - DNA, 600 bp, Chicken  19866894376408_1
atctttaaaattatattttaaaaacaacttcatgcattccaacattttaaagtcagatgtggaaaaactacatgccagaatcttgcctttcatcactacagttaccaaatatgctttgaaagttatcaacaaaactgtatttttaaatgaatattataagactgaatatgtagtataggtactgtatatgtaacactgcttctgataccttctttattcataaatattactcatttcagtcagaatatcaatagagcatgactagagacaacatgtaaacaaaatctaaatgcatttatytacagtgttagaatacactgtccataagttttcttctcactttaaggatatgcattagcttcttacacactaaacaatttattacaaaatacaattgataatttgaatggaattgtaatattcacataatatttagattcccataactagaagcagcaaaaggaaacaaaacactaaatggaatgtgacaatgaaaatggactcattttgataaaatgtgctttccaatactttagctaataaaatgttttgaactgtattaaacaacatacgcttaattccaatattcctctaaaaaaa

SEQ ID NO: 82115 - DNA, 600 bp, Chicken  19866894376411_1
ttcctgactggacactgttgtggaaagcagaaagaaaagaggctgttctgtagttaaataaattagtaaaagaaacagaaaatagaatctttccaactctgcaggtcagagtaaatctagcttgtgtcctgtcctcacctacatagtgcctcagggaacctcctctgctccagcattaggcaatgtgaacctgggtgttttcaaaaagtacggggctgcagatgtgtgtgagaggcaaaagacacattcagttctgtgttaagaaatgttgctcaggagagttgccttctcactttgtgwcctagacgacataaatttcctttggcacaacagatttttcctaccaaacatgaggtaggtggcatacatacagcttcttcagccggcraagcacatggaaggagcttgcaggacaaaagagatgggcataagtctgcagggccacagcaaggaacacggctggcccaggaattgcactatttttcatggctgctggacaaaggactcttcccccttatgcaaggcccctcctctttgattgagattcaaaacccagagaatttcaggaattattcatcacttaatgaagctgcatacagg

SEQ ID NO: 82116 - DNA, 600 bp, Chicken  19866894376411_2
ctttccaactctgcaggtcagagtaaatctagcttgtgtcctgtcctcacctacatagtgcctcagggaacctcctctgctccagcattaggcaatgtgaacctgggtgttttcaaaaagtacggggctgcagatgtgtgtgagaggcaaaagacacattcagttctgtgttaagaaatgttgctcaggagagttgccttctcactttgtgwcctagacgacataaatttcctttggcacaacagatttttcctaccaaacatgaggtaggtggcatacatacagcttcttcagccggcraagcacatggaaggagcttgcaggacaaaagagatgggcataagtctgcagggccacagcaaggaacacggctggcccaggaattgcactatttttcatggctgctggacaaaggactcttcccccttatgcaaggcccctcctctttgattgagattcaaaacccagagaatttcaggaattattcatcacttaatgaagctgcatacaggaaaggactggacaagtcattaagctaaaaagcaactgcactacaacaattaccatatctctatcaattcaatttgtacaagcatatat

SEQ ID NO: 82117 - DNA, 600 bp, Chicken  19866894376415_1
ccacctctcattattagatgaagaggacgactttttttggttttaccctgtagtctctgcttgactctttatcacgtttccaaagcttaccaaagagaaaacaatttcaaacacaagttgttgacttgtgtgctctgacatctttgctgttttgcatcatgacagtgcagacccagagatctaatgcaccctggccacatgctcttacagctgggtcacagcatgagctaggagagtttacaactcggcagtggggtgaaaaaccaacctctggcaatgtgaactctccagcagtttccrctgtcagcacagcttgtgaaagtgataatgtagaagtggaaaaatttccagcccgtgctcagtagcrgcagttgcagaagcttagattttgcttttagatcttgagaggaagtgaagaaactcagtctcattctaacaaaataaagcagagctgggatagagaagtgattcttataagcacatttaggaaagcaaaaaatatctgcaaataggaatacatttctggaggacgggcaagttacactggctggcttctccaggcaagaatgatggcaaatagctcatgagttatggctggaa

SEQ ID NO: 82118 - DNA, 600 bp, Chicken  19866894376415_2
tttatcacgtttccaaagcttaccaaagagaaaacaatttcaaacacaagttgttgacttgtgtgctctgacatctttgctgttttgcatcatgacagtgcagacccagagatctaatgcaccctggccacatgctcttacagctgggtcacagcatgagctaggagagtttacaactcggcagtggggtgaaaaaccaacctctggcaatgtgaactctccagcagtttccrctgtcagcacagcttgtgaaagtgataatgtagaagtggaaaaatttccagcccgtgctcagtagcrgcagttgcagaagcttagattttgcttttagatcttgagaggaagtgaagaaactcagtctcattctaacaaaataaagcagagctgggatagagaagtgattcttataagcacatttaggaaagcaaaaaatatctgcaaataggaatacatttctggaggacgggcaagttacactggctggcttctccaggcaagaatgatggcaaatagctcatgagttatggctggaaatactgaataaaaaatgctactggcagtcagctcagggttgtgacaatgaccatttcacaacttgca

SEQ ID NO: 82119 - DNA, 600 bp, Chicken  19866894376416_1
atacgtggatattcagaataatctatctgaatttcctaagccactgaaacataattcatttcagtgaaagagagacattatgcaaatcgctattacctgttagtaatgacttggaaagccattacatactgaatgatatgaatgaaacccaccttagcatttggagtagctttaattgtccatatgcaatctactgcttgtcctggttttgttttttcttcttgttctacttgactggaacgtactattccatcagctcccgagagctcaaattggcagtctagggagaacatatacctygatgtcaaatgcaatatgatattaattcaaaattttttatataaagaaattggtattgtaatactagacctggaatgggatttaaaatacctcctaggtaagtgaagtcaggatctgtaatagaaagaagtcatgaatcacaggggctatcaatgcttgagaatcacttcaaggtttattacaatctgaagatgatgtccatttttattatgtcacaatagaaattgctagaaagtttgttcggtcaattggagggtacaaagacaaactttttttagataatacatgatttcacgaaga

SEQ ID NO: 82120 - DNA, 599 bp, Chicken  19866894376417_1
  misc_feature (1)..(146): n is any nucleotide
nnnnnnnnnnnnnnnnnnnnnnnnnnnnnnnnnnnnnnnnnnnnnnnnnnnnnnnnnnnnnnnnnnnnnnnnnnnnnnnnnnnnnnnnnnnnnnnnnnnnnnnnnnnnnnnnnnnnnnnnnnnnnnnnnnnnnnnnnnnnnnnnnncttattcagtttgagcgtacaaattatttcatattatacagactactcagtccttgaatactgttgttaaacacagggacagttctctgcagtacctctaaactggcaggtgcttccagctccaggtaaaacagattagatactttatgatccyctgagctgaaaaccagaaaggttaatcttaagagcaaatgggaagatttatgaagacaagccaaataaaaaacttcctcagaagagtaggaaaagaaatagaacaagaggcaagattatttcaactccagttatacttttttactttgttggacacagggatgtggagtaaataatgtataaattaaatacatttgttttaggatattatttagaatattgctttcaaatgggcctatagacaaggggaaagcttatctgattgagacagcagagacaaaagcactagaatcattcatg

SEQ ID NO: 82121 - DNA, 599 bp, Chicken  19866894376418_1
  misc_feature (1)..(38): n is any nucleotide
nnnnnnnnnnnnnnnnnnnnnnnnnnnnnnnnnnnnnntaacgatagcagcccctggaagctgacacataaagattccgtgtccctcttgctgcctgcacccaaagctttgacccagagcatcccacctttgctatgatactgctaagtatttatccttagtgacctggctgctcaaacaagtgcaagtactgtgcaagacatgattgctacatgagagcaatgagagagccaagatcgctgctgaactcatcagagcccactctggcacagccatacttgccaccagcatttcaaaccysagcaccagccttgggatgtcagagaggggtgaccygtggcagcagcagagctggtgaagggtctgcagcatctcccagggcatcgctcctccaggggtgaagcttactgggcttggctctctgctgccctccctctcctggcacagccttccattccctgcagcctgtgaggcttactgcgtctcacctctggcacccttgggtgcagctgggctcactgctgtgctcccttccaggtacatccacaggccttgcctccaggtgattgaggccatgctggttgcagcagtgacggcag

SEQ ID NO: 82122 - DNA, 599 bp, Chicken  19866894376418_2
  misc_feature (1)..(37): n is any nucleotide
nnnnnnnnnnnnnnnnnnnnnnnnnnnnnnnnnnnnntaacgatagcagcccctggaagctgacacataaagattccgtgtccctcttgctgcctgcacccaaagctttgacccagagcatcccacctttgctatgatactgctaagtatttatccttagtgacctggctgctcaaacaagtgcaagtactgtgcaagacatgattgctacatgagagcaatgagagagccaagatcgctgctgaactcatcagagcccactctggcacagccatacttgccaccagcatttcaaaccysagcaccagccttgggatgtcagagaggggtgaccygtggcagcagcagagctggtgaagggtctgcagcatctcccagggcatcgctcctccaggggtgaagcttactgggcttggctctctgctgccctccctctcctggcacagccttccattccctgcagcctgtgaggcttactgcgtctcacctctggcacccttgggtgcagctgggctcactgctgtgctcccttccaggtacatccacaggccttgcctccaggtgattgaggccatgctggttgcagcagtgacggcagc

SEQ ID NO: 82123 - DNA, 599 bp, Chicken  19866894376418_3
  misc_feature (1)..(2): n is any nucleotide
nntaacgatagcagcccctggaagctgacacataaagattccgtgtccctcttgctgcctgcacccaaagctttgacccagagcatcccacctttgctatgatactgctaagtatttatccttagtgacctggctgctcaaacaagtgcaagtactgtgcaagacatgattgctacatgagagcaatgagagagccaagatcgctgctgaactcatcagagcccactctggcacagccatacttgccaccagcatttcaaaccysagcaccagccttgggatgtcagagaggggtgaccygtggcagcagcagagctggtgaagggtctgcagcatctcccagggcatcgctcctccaggggtgaagcttactgggcttggctctctgctgccctccctctcctggcacagccttccattccctgcagcctgtgaggcttactgcgtctcacctctggcacccttgggtgcagctgggctcactgctgtgctcccttccaggtacatccacaggccttgcctccaggtgattgaggccatgctggttgcagcagtgacggcagcygtgggctttgtcatgatttactgctcccgagact

SEQ ID NO: 82124 - DNA, 600 bp, Chicken  19866894376418_4
agcaccagccttgggatgtcagagaggggtgaccygtggcagcagcagagctggtgaagggtctgcagcatctcccagggcatcgctcctccaggggtgaagcttactgggcttggctctctgctgccctccctctcctggcacagccttccattccctgcagcctgtgaggcttactgcgtctcacctctggcacccttgggtgcagctgggctcactgctgtgctcccttccaggtacatccacaggccttgcctccaggtgattgaggccatgctggttgcagcagtgacggcagcygtgggctttgtcatgatttactgctcccgagactgccagcccatccaggggagctcagtggcctatcctctgcaggtaggagctacacctggagtgagggataccccgaggctgagcagggcagtgacaccctgctggagtttgcggccctgggccttgctggttcccctgcagccacttccctctgcttgggtggagctggagaccttgagtttgccctggamtccttgccataacacccatgtcagagatgtgagccccacctgggctgtagtgttgctttgcacaggtctctgtcac

SEQ ID NO: 82125 - DNA, 470 bp, Chicken  19866894376418_5
gctcccttccaggtacatccacaggccttgcctccaggtgattgaggccatgctggttgcagcagtgacggcagcygtgggctttgtcatgatttactgctcccgagactgccagcccatccaggggagctcagtggcctatcctctgcaggtaggagctacacctggagtgagggataccccgaggctgagcagggcagtgacaccctgctggagtttgcggccctgggccttgctggttcccctgcagccacttccctctgcttgggtggagctggagaccttgagtttgccctggamtccttgccataacacccatgtcagagatgtgagccccacctgggctgtagtgttgctttgcacaggtctctgtcaccagcagcacggtagctggatggaagtgctgtggcattggtgtgcttgctgcctgcagtccccccacctctgcacccaactggagcacggcagca

SEQ ID NO: 82126 - DNA, 600 bp, Chicken  19866894376420_1
actgcttccagcattcccaattattgcaccgcgccgctgcggagcgtgctaaccctaaaatgctcagcaaatacatctgtgtcactcagtcctatcagtgtttagagaatgtcttggagcacacattaaacacttcagctgctaaagcgagtgtcagcgctgtcccaagagcctccgaagtaaatgatgtcgttaaccacatcatgggaatactcatattaatctccccagctctgtgcaaacctttgtgacagcagagccacaggtgctgaagctcttacacttggacttacagcacgstgggacacggagcagggctgggcagaggtggccccatgggtacgtgcgtggggacagcagtgggacgctgcgctgccagcccccagctgctcctcgctccttgccctgtgcgccagaccttgctagcaccgtatggcaccagggctcctgacatggccataatgtaattttgcatgtgttaatttcatttcttggctttgcttagtatcagttattattctgctgagactgtaagcaggaacgggtgaagctggttcagagaaaacagccgagcccatgcctttcatttcccctctcttt

SEQ ID NO: 82127 - DNA, 556 bp, Chicken  19866894376428_1
cgagcctcctgcttcatgtttgatgccatcatctgactgtgaaattcctgctgggcagcgttcacctcctgatgaaagtggagtagatgtgagctctctgcctgagcaagcaaaagagtgcagacccatgagccttgaaaaggtgtgcgcagagaccatctacctgaacaagtgcattaacaatttcaaaaatgtactgagggaaaagagacaaatgcgtaggagactcataaaagaattagcacaggaaggaaactggatttctgctgaggagacaaattcaggtaaacaaacaaaaamatgtttttaaggagatgtccatactggtatctgtgtagacagtaaccaaaatcttgctctgcaggtgaacaaccatagaaattaggagacaattatgaaggcaagtgtrtgcactatacagcagtaytaacaacaacaaaaaaaacccaacaaccccaaagtaccaaaaaaccaaaaaacaaacaaaaaagccaaccctaaaattcattgtacaacacattggaatgcaaatcagtaagcttcaaatttttaattt

SEQ ID NO: 82128 - DNA, 447 bp, Chicken  19866894376428_2
gcaaaagagtgcagacccatgagccttgaaaaggtgtgcgcagagaccatctacctgaacaagtgcattaacaatttcaaaaatgtactgagggaaaagagacaaatgcgtaggagactcataaaagaattagcacaggaaggaaactggatttctgctgaggagacaaattcaggtaaacaaacaaaaamatgtttttaaggagatgtccatactggtatctgtgtagacagtaaccaaaatcttgctctgcaggtgaacaaccatagaaattaggagacaattatgaaggcaagtgtrtgcactatacagcagtaytaacaacaacaaaaaaaacccaacaaccccaaagtaccaaaaaaccaaaaaacaaacaaaaaagccaaccctaaaattcattgtacaacacattggaatgcaaatcagtaagcttcaaatttttaattt

SEQ ID NO: 82129 - DNA, 429 bp, Chicken  19866894376428_3
atgagccttgaaaaggtgtgcgcagagaccatctacctgaacaagtgcattaacaatttcaaaaatgtactgagggaaaagagacaaatgcgtaggagactcataaaagaattagcacaggaaggaaactggatttctgctgaggagacaaattcaggtaaacaaacaaaaamatgtttttaaggagatgtccatactggtatctgtgtagacagtaaccaaaatcttgctctgcaggtgaacaaccatagaaattaggagacaattatgaaggcaagtgtrtgcactatacagcagtaytaacaacaacaaaaaaaacccaacaaccccaaagtaccaaaaaaccaaaaaacaaacaaaaaagccaaccctaaaattcattgtacaacacattggaatgcaaatcagtaagcttcaaatttttaattt

SEQ ID NO: 82130 - DNA, 600 bp, Chicken  19866894376432_1
gtcctgctgaaaaggaaggaagtgactgaaaatattacccaaaataagaaccataagagagtggctacaggcgaggggtctgtgcaggttgctccagagacaacatcatgacagagagaattggtggacatgtctctctggcatgtcagaggtgaggaggtaaagggttagagggaacagttttgaaatattagttgtgttcagcctccaaactgaagccttaacacttctgaaggggaatgtaaatactctgaggagactctactgagcttagtggattcaagactgagaagctattcrtattttctgactataaataatgtagaatatttaacaactccttaatattgatgttggttgtgcactggtaagcagtacttagcaagtcaatgagaaaaatgtcaggcaaagagaatacttttatcacaaatatatggcagtattttgctatcactgttgaggacttttgctagcctctactaggcaagctattttccatgctgatttccacaagattagtgtcaagtattgttattgtcttgtatctctacatacacttatgcaagcatgtgttaatacaatattatgttgtattgttta

SEQ ID NO: 82131 - DNA, 600 bp, Chicken  19866894376432_2
aatattatgttgtattgtttaaaaatgtatagagatgccatctggtccagctgatgtgtgggccagtaaatgttgtattgctttatttatatcatgtggggacatacttgctgttagaattcaggatttatcatgtgtttgagaatggaaaggtttagctggctagaaaatttctcttcagtaggaaatgtgtggtgaaatttggaaatgttcattttccatgttgatgtcaagttctgtatttgtgtgtgattttgataatgttttttcagtttaatttcaacctgattagctgctacyttttaagatatttggctagactcccacatttaaaagaaatgttgaattcctctatagcctgagcaaatacttctaggattgtaaacatagatttcaaaactgtaagtgtatacacattattcatgtaacatatacatcaccgacctagtcatatatagaggcttggggacccatccatcctgacagtctgtacctttttttcagaagaaaggcaatgaaggtcaaaaggagcagatgaaagggaaatcaagagacctcagaccacagaggtactgaaaagcgtcaagtcatttaatgttt

SEQ ID NO: 82132 - DNA, 567 bp, Chicken  19866894376438_1
tttcttaaaaaattgagagtgatatttccctttttccagacactaagaactccacctgacagccattaattttttaatatgttagagagtgtcttagcaaccacatcagccagttccttggcaggagcttggagtcatggtgtgcttgttgcacctgtagtcccatgaaatagaaagttcttgtgtgggttcctaaggcagagaaaattcaaattcaagcttgtatctttattgtggatgaacacagaaaaatgacaaaagtacctacattttaatgaagaacatatgtttatgactaakaaatatttttaaataattatttaacaaaaacatttatttcatacttattttcaaagtaaaaaagaaaagatatatytgcagaaacaaattcaagttaaacagtcaacagagtatgtgtaatagaaatttcctgtggtccatctgagatccaagatcccaggctaaaaatggagagaagtgttcactgaaaaaacctagaaaaataaaaaatagacaaaaaaaaaaaaaaaagttgtgcaggactatgtcaatttttacacacagaaa

SEQ ID NO: 82133 - DNA, 491 bp, Chicken  19866894376438_2
atatgttagagagtgtcttagcaaccacatcagccagttccttggcaggagcttggagtcatggtgtgcttgttgcacctgtagtcccatgaaatagaaagttcttgtgtgggttcctaaggcagagaaaattcaaattcaagcttgtatctttattgtggatgaacacagaaaaatgacaaaagtacctacattttaatgaagaacatatgtttatgactaakaaatatttttaaataattatttaacaaaaacatttatttcatacttattttcaaagtaaaaaagaaaagatatatytgcagaaacaaattcaagttaaacagtcaacagagtatgtgtaatagaaatttcctgtggtccatctgagatccaagatcccaggctaaaaatggagagaagtgttcactgaaaaaacctagaaaaataaaaaatagacaaaaaaaaaaaaaaaagttgtgcaggactatgtcaatttttacacacagaaa

SEQ ID NO: 82134 - DNA, 600 bp, Chicken  19866894376444_1
agcaacctcatcttgtttgtaaacaagtgttagattttgtgaaaatatccatgctttctaatctgcatgggattgtagagataccaagacagtttgtttcctatttccagttgcatttcatgaaaacatcaagaattaagatgcaatttttttgtgtgtgcaactctaaataactccaggtcccttctttcctgactaagagttaccaacattatgggatatttttcattcttttgatgctagacatttcttgtatggcaaggttttggtagtggcttgagtgagaggaggagttacacytgtcagcaatagagctccttcctactattaatctgtgaagctcctacttaatccctctgtaatttgtacacttcttactgcttggaattaagttcagatttgttgctctctacctgagatttccttttctgttttgtcagacccatggcacccttgaattattttgatggctgcttcacactgatgctttcctaatctaataatccttgatgaagtgtggaaaacaagccattcagtcctcttccagctgaacaaggaggaccactcacggggaaagtaaaaatagtttattggcttctg

SEQ ID NO: 82135 - DNA, 600 bp, Chicken  19866894376456_1
aaatacacacacacacatatatatatgcacagtatatatatatgctatatatatgtatatgcattgtatatacatgtatatatatcctgtatatatgtgtgtgtatatatataaattgtgagtttgaatccagtgataattgtcctggacagattttttttaagtaattgttcttacggttgagtccgtctgagaaatcaaaaaatatgtgcactggtatgtttttctctatgtgtagctgaggagtttgtatggctattttatttcagatgcaaaaataagctagcccataaagactcrggcctcgtagaatccatgaaaggtggaaaaaatcactacggtttcttttcttatcaaggcaaaggtttatcatattatgtatcatcatattcaactttgcctttggagaaaactttatgtagttcatagaatcatagaggctggaagggatatttgaagatcattgagtccaaccccctttctaaagtaggttccacagactagtttgcacaggaartcttctgggcagattttgaacatctacaaagaaggaggctccacaggatctctggagagcttgttccagtgctttgtcaccct

SEQ ID NO: 82136 - DNA, 600 bp, Chicken  19866894376456_2
tatgtttttctctatgtgtagctgaggagtttgtatggctattttatttcagatgcaaaaataagctagcccataaagactcrggcctcgtagaatccatgaaaggtggaaaaaatcactacggtttcttttcttatcaaggcaaaggtttatcatattatgtatcatcatattcaactttgcctttggagaaaactttatgtagttcatagaatcatagaggctggaagggatatttgaagatcattgagtccaaccccctttctaaagtaggttccacagactagtttgcacaggaartcttctgggcagattttgaacatctacaaagaaggaggctccacaggatctctggagagcttgttccagtgctttgtcaccctcaaataagtttttcctcatgtttgtatgtaacttcctgttttccagtttatccttggtatcccttgtgctgttgctggtcaccactgaaatagcctggctccatccacttgattcttgccctttagatatttgtaagcatgattaaaatacccccctcggccttcccttctccaagctgaagtctcaggtcgcacacaagggagctccagtcccgtc

SEQ ID NO: 82137 - DNA, 600 bp, Chicken  19866894376457_1
agtcttaatgatccttcagtctattgtgttttgggtgactcttgataaagctttacctccctttacttcaaatttcataactgcaaaatgctgatagcattgctgacttcctttgtggaatatttggaaacctactggtgaaagctatgtgtggaaggtaaatataattgcaatttaaatcaataaatatgaagaatagggtcagccatgcatatctcagagctttattgcaggatactctttgatattcctctgtttaacatggataagtttgtgcctgctgcgtatcgagtgcagacrgcaaccgaagcattagctcaaatttattgagaatgcaccatgtgtacataatttcagggttatatcattggccttaaaatctggtgtcatattctgaggagggattgtaaattcatctgtggctgctttcctgcytggggtataagcrcggatgagggaggaagggctgctgcagaaacttctgttgctggtctgatgcattcacagaagttcattgttaagtgcctgatatactttctacacttgctaactgaaaaatacggtcatggcttttcttgaaactttccctcaagaaccatt

SEQ ID NO: 82138 - DNA, 600 bp, Chicken  19866894376457_2
tggtgaaagctatgtgtggaaggtaaatataattgcaatttaaatcaataaatatgaagaatagggtcagccatgcatatctcagagctttattgcaggatactctttgatattcctctgtttaacatggataagtttgtgcctgctgcgtatcgagtgcagacrgcaaccgaagcattagctcaaatttattgagaatgcaccatgtgtacataatttcagggttatatcattggccttaaaatctggtgtcatattctgaggagggattgtaaattcatctgtggctgctttcctgcytggggtataagcrcggatgagggaggaagggctgctgcagaaacttctgttgctggtctgatgcattcacagaagttcattgttaagtgcctgatatactttctacacttgctaactgaaaaatacggtcatggcttttcttgaaactttccctcaagaaccatttatctctatgttgggaataagcacgaggaggtgaagttcaaaggtgctatttctgaaaaacagagccttagaaaggaaatgccacagttttgactctggcaactcatcaacacttccagatctcttttaacttat

SEQ ID NO: 82139 - DNA, 600 bp, Chicken  19866894376457_3
gtgtggaaggtaaatataattgcaatttaaatcaataaatatgaagaatagggtcagccatgcatatctcagagctttattgcaggatactctttgatattcctctgtttaacatggataagtttgtgcctgctgcgtatcgagtgcagacrgcaaccgaagcattagctcaaatttattgagaatgcaccatgtgtacataatttcagggttatatcattggccttaaaatctggtgtcatattctgaggagggattgtaaattcatctgtggctgctttcctgcytggggtataagcrcggatgagggaggaagggctgctgcagaaacttctgttgctggtctgatgcattcacagaagttcattgttaagtgcctgatatactttctacacttgctaactgaaaaatacggtcatggcttttcttgaaactttccctcaagaaccatttatctctatgttgggaataagcacgaggaggtgaagttcaaaggtgctatttctgaaaaacagagccttagaaaggaaatgccacagttttgactctggcaactcatcaacacttccagatctcttttaacttatccttttgtgaaac

SEQ ID NO: 82140 - DNA, 600 bp, Chicken  19866894376466_1
ccttcaatttgtgttttgtttttagtcacattattcttccagtttttgttaattagagttgttgttcttcctttccacctgcagtcctgtggtcctggtcattacatttgtatgttagccagctacctggcttgcttctttgtttttatctttaatgcttaatcaatttatcttctctacttataatcagtgtgacagtctcacttggcatcctgagtggtttgtaaactaccagtcttctaattgaaattgaaaacaatttatatatccatgatacatacagggagtatgacctctgawgatatattagcaaataatgatgataataaattattttttatattcaacagatctttgttaaggtttaaggtccggagcaattccagttttaatcagtttctgtgcaggataagcaagaaggattcctatgctgctggagaaaatagataccatttattattatatgttaattacacagggctttcttagtcatctgcaatttccttcctcagtaaacaaagttttgtgtagtgtaactgcctatgtgatctctgttttattggagtaccagatatttattggacaaaatcagtatgaagt

SEQ ID NO: 82141 - DNA, 600 bp, Chicken  19866894376466_2
ggtgtgataggattaaataattttcatgttctgagaggctgcaggtaataaaatctctggagttatgggtagcaaatatgatatgttgattactaataaccaagtagctaggatactgcctcttctgaaaataaagtgcacattaagactctttatgtttcagccacttgtaggtcttttacaattcttttaatggtcctgaatcttttagtcttttgttttctacatccagcctgacacagagctttatctagacagtaatgagtgtccctcttcccctgtgaaaaaaaagacccattwatgtctgcatacaagaagttctgaaggtgttgatgaacctatggcagcactgagccagcagcaataaatgtcaaattgcaactgctccttttttcttatcttttgagaagtatatcctgattagatcatagtaattgtttttcttatttaacaagcactctgttcagtgactgcatttctgtttgtgtagagtttcccacctttcttctaccagcttgaattttgttcacctgatgtttcttcaggataaacaagtcactgtgacaggcaggggcctggcttattttaatcagaaaaatt

SEQ ID NO: 82142 - DNA, 600 bp, Chicken  19866894376467_1
atgatctgaagcagataaattaaagattaatgttatcttcaaacttctaagttacagctatttaatgtattgtcagttttcatgctgtttcaatatgaaaaaatgtagccatggcagcaaatacgcagtgaaaaagcaatgaagaggagtgagaattttgagggttatattttgtctatacacataaacagtagttattgtgctattaccaaagcactgataaggacttcaaaaataaacaatcttgctgttagtattttaacttgcacttcacagtagctttgaaaagaacttctcctkaatgatrgattcattacaagtcacaggagtgtgactctgagcagcagtgatgggaaatataacaatagctgtgtatttttagaattactggtgttcatcatatcagacatgttcatttacatattgctgcttggctatctgccgtccactgttcaatcttctaaagtaacacaaatccaattttacaggtacctatttacaagtatcttaatcctggagtactgtactcatgtggagtgctgcatccagatgtggagtcctcagtacaggagagatatagacctgtactggcacatccag

SEQ ID NO: 82143 - DNA, 600 bp, Chicken  19866894376467_2
gaagcagataaattaaagattaatgttatcttcaaacttctaagttacagctatttaatgtattgtcagttttcatgctgtttcaatatgaaaaaatgtagccatggcagcaaatacgcagtgaaaaagcaatgaagaggagtgagaattttgagggttatattttgtctatacacataaacagtagttattgtgctattaccaaagcactgataaggacttcaaaaataaacaatcttgctgttagtattttaacttgcacttcacagtagctttgaaaagaacttctcctkaatgatrgattcattacaagtcacaggagtgtgactctgagcagcagtgatgggaaatataacaatagctgtgtatttttagaattactggtgttcatcatatcagacatgttcatttacatattgctgcttggctatctgccgtccactgttcaatcttctaaagtaacacaaatccaattttacaggtacctatttacaagtatcttaatcctggagtactgtactcatgtggagtgctgcatccagatgtggagtcctcagtacaggagagatatagacctgtactggcacatccaggagacag

SEQ ID NO: 82144 - DNA, 600 bp, Chicken  19866894376473_1
gtgcgttgatcacattgagatctcatggtcacagaacagatcctgagggtgagagcgtgaatggcttaaaagacaaaaagcagaactcagcatttattagtttttgatgactactaagtgctggggtgctgacacggcagcactgttttactcctaatcatatgtcagagaaaataaaacaaagatgcaactgtgtcctatcaagacactccatctggtgaatcttgacacttgatctttgcccttatgaagcacaaatccacttaagagggatgcagtgctgtacatcatggctgattmcgtgtatcttaatccagtcccaggatgtatactgccattcccatgcagcatttgaaatgctgtcagagcatcataatatttcacttaatcgaaaacgcattactctgcttggttccccttttccttatgcaagtgcatctctgctgacctccaggaagttcaggagaatgggagcaggattgaagtccatcccacatctgcttcaccccatttctggaagtaatacagctgtgtatggggaaatgtgcttttatctttgggtgaagggcaactagcatcccaagtacctttgttacagta

SEQ ID NO: 82145 - DNA, 600 bp, Chicken  19866894376476_1
tgatttggctttttacgctgttgaggttgcagagtagattggtcaatcaagtatttccactgatataatgctagaaagagtgggatgtcttttagtacgagaagagttatgaaaatgtatttaatgattggacttctctgtttgaagaaatagaaagtgaagattcatatcagtgagttaagtaacgccttgaaattcagacagaattgtttcagaaactactttttgcactgaatgattcagtattaaggtggcgaagaatcacaaaagagatcaacactgaatatcttctcagttttygaagtcaaagttcagaaggttcaactaaatcttaggaaaaacagaaacagaaattaatactccttttgatttacttcagaatgatacttttgaacctcttttctcaaatgtagttatccatagcacaattttttttttaatgaacaagctggaacagcaattcatatttctgtgcaaatcctggagagctatacagtatgcaattttgctgcaaaaatgttctagttattacacgaaccagtcagatatagatgcaaaatattatacaagtaaactttcatgatggtattgactatgtaa

SEQ ID NO: 82146 - DNA, 473 bp, Chicken  19866894376476_2
gttgcagttcctaatagcttgatactatccaagatggagactggagtaaaatacaacttacactgcagtacatatcaataatgtaaaggaatgtataactagtatattataaaaaatatcagcattagtgtacacacatgaaaaatcagcacaagtgttccaattcaatccgtactttctcatttgttataagcacttaggaataaaagtgctgtcttgcatttcacagaattcgattttgctactgaaaaaatgtaacttgtttatagacacagtgcttggaaactgtttagtgaaagyggaatagtggcagtaataacagaaagtaatgagtcttttcactgcatagacgaatcaggaggaaaaaggggtaatcttaaaatccctacacagtatcagataaaaaactgaaatagagtgtaactttgagatgaagcagggtgtatggtgtgtgtgctagtttggatctttat

SEQ ID NO: 82147 - DNA, 599 bp, Chicken  19866894376482_1
  misc_feature (1)..(56): n is any nucleotide
nnnnnnnnnnnnnnnnnnnnnnnnnnnnnnnnnnnnnnnnnnnnnnnnnnnnnnnntcagcagcatccagtgacagcatgcaagaggaaagttatctgagtgaatctaagtgagcttcccaccttttgagcaagtgattccatttgctgttcctgtctcccccactggacagggcttcctcaggcccctctgggtttatgtaggagctagaaatatccagaatataaaaaagaacaaaaaaggggaattaaaatgttaactgaaactgaacaaactgacaacatcagggtttctgcattkcaactgtacctctatttcctaacaactgactcttgctttactgtgaaagccccaactgagctggcgctaaatgttcttggccagaaaagtgccctagggccatgaggaagctgctatgaaaacccaaacttaacagaaaagtgcctgcactttcctgttctgctctgacactgatgcatgctttgtcttctgactgtatttttttcttctccctttcagtggtgtgtgagctgcaaagcctgagagttgggaattcataagcaaagtctgaattctcacaggaaaagcagttctcccca

SEQ ID NO: 82148 - DNA, 599 bp, Chicken  19866894376484_1
  misc_feature (1)..(36): n is any nucleotide
nnnnnnnnnnnnnnnnnnnnnnnnnnnnnnnnnnnncttctgagaagaaattattcctaatatccagcctgatcctccctcggcacaacttaaagccattacatcttgtcctgttgctgttgcctgggagaagaggctgagcctcacatctccacagtctccttgtaggaagatgtagagagcgataagatctcccctgagcctcctcttttcctgactgaataatcccaattccttcagccactttccataatacttgtactccagactgttcacagcttcgcggccttctctggacaygcttcagggcctcagtatctttcctgtagcgaggggcccaaaactgaacacagtacttgaggtgcagcctcaccagcgccaagtacagagggacgatcacctccctgctcctgctgacagcactgtttctgataccagccaggatgccattggccttcttggccacctgggcacactgctgtaagactcgtgatggagcaatccacatgactgtgtgcaatggcaacacacaacctcgctgcagattgagacttttgggttgagtcagagattatcaggggagttgtaccrtgactgga

SEQ ID NO: 82149 - DNA, 600 bp, Chicken  19866894376484_2
tctggacaygcttcagggcctcagtatctttcctgtagcgaggggcccaaaactgaacacagtacttgaggtgcagcctcaccagcgccaagtacagagggacgatcacctccctgctcctgctgacagcactgtttctgataccagccaggatgccattggccttcttggccacctgggcacactgctgtaagactcgtgatggagcaatccacatgactgtgtgcaatggcaacacacaacctcgctgcagattgagacttttgggttgagtcagagattatcaggggagttgtaccrtgactggaactgccagcatcyctccagagcagcctggctgtgtttgtggctagtacaggggctgctgcaaagaagtaattatgacagcagtgggactgctgcattacagcagcacttgtattgccaggcaagacaaaatagactgttttgtctccctttcaccttctaggcagatcagtgcagtccttagtgttggccttagctatttccctcttcatttcacacatatttcaaacaaacagggatgacaaaagtattcaatttatcgcaacatacaatgctggtaattttgcaggatct

SEQ ID NO: 82150 - DNA, 600 bp, Chicken  19866894376484_3
cagtatctttcctgtagcgaggggcccaaaactgaacacagtacttgaggtgcagcctcaccagcgccaagtacagagggacgatcacctccctgctcctgctgacagcactgtttctgataccagccaggatgccattggccttcttggccacctgggcacactgctgtaagactcgtgatggagcaatccacatgactgtgtgcaatggcaacacacaacctcgctgcagattgagacttttgggttgagtcagagattatcaggggagttgtaccrtgactggaactgccagcatcyctccagagcagcctggctgtgtttgtggctagtacaggggctgctgcaaagaagtaattatgacagcagtgggactgctgcattacagcagcacttgtattgccaggcaagacaaaatagactgttttgtctccctttcaccttctaggcagatcagtgcagtccttagtgttggccttagctatttccctcttcatttcacacatatttcaaacaaacagggatgacaaaagtattcaatttatcgcaacatacaatgctggtaattttgcaggatctgaggccagctgagcaatatgc

SEQ ID NO: 82151 - DNA, 600 bp, Chicken  19866894376498_1
aagatttggcaagatctacaggacttttttttttgttcctgtacatcttttgtgtaacaataaaaatactgtatactaaataaaataacgttaaatagtctgtgttcacattggcaccattgatttcaagaccctcactttttaaggcccgacaaatgtaaaaaagaggattcctttggcttcttttaaacaaatgagtggtgtgtactattaaatgaaacatgaaatataggggacagtccactgaataacactgtagttacacactggcacaagagaagtagaatcttcccattctayttttttttttttttttccttttttacttaagtagcaatagactgaatctgcaaatgtagggtcttggaaatctgttgaagaatgcagagctgtcagcaaacctcgaaatcttactgaagcctgttgaagtctgtactaatttgtcattgatttcaagatagcaagaatcccatccataaattaaacatcagttatccagttaaacattcaaataaatgcagtttgcatcttcctttataagaaaagtcaaaattctcctcagatttagcacatgcaaattaataaagagtgagttagggt

SEQ ID NO: 82152 - DNA, 600 bp, Chicken  19866894376498_2
agatttggcaagatctacaggacttttttttttgttcctgtacatcttttgtgtaacaataaaaatactgtatactaaataaaataacgttaaatagtctgtgttcacattggcaccattgatttcaagaccctcactttttaaggcccgacaaatgtaaaaaagaggattcctttggcttcttttaaacaaatgagtggtgtgtactattaaatgaaacatgaaatataggggacagtccactgaataacactgtagttacacactggcacaagagaagtagaatcttcccattctatytttttttttttttttccttttttacttaagtagcaatagactgaatctgcaaatgtagggtcttggaaatctgttgaagaatgcagagctgtcagcaaacctcgaaatcttactgaagcctgttgaagtctgtactaatttgtcattgatttcaagatagcaagaatcccatccataaattaaacatcagttatccagttaaacattcaaataaatgcagtttgcatcttcctttataagaaaagtcaaaattctcctcagatttagcacatgcaaattaataaagagtgagttagggta

SEQ ID NO: 82153 - DNA, 600 bp, Chicken  19866894376498_3
gatttggcaagatctacaggacttttttttttgttcctgtacatcttttgtgtaacaataaaaatactgtatactaaataaaataacgttaaatagtctgtgttcacattggcaccattgatttcaagaccctcactttttaaggcccgacaaatgtaaaaaagaggattcctttggcttcttttaaacaaatgagtggtgtgtactattaaatgaaacatgaaatataggggacagtccactgaataacactgtagttacacactggcacaagagaagtagaatcttcccattctattyttttttttttttttccttttttacttaagtagcaatagactgaatctgcaaatgtagggtcttggaaatctgttgaagaatgcagagctgtcagcaaacctcgaaatcttactgaagcctgttgaagtctgtactaatttgtcattgatttcaagatagcaagaatcccatccataaattaaacatcagttatccagttaaacattcaaataaatgcagtttgcatcttcctttataagaaaagtcaaaattctcctcagatttagcacatgcaaattaataaagagtgagttagggtac

SEQ ID NO: 82154 - DNA, 600 bp, Chicken  19866894376499_1
gctccatgccattctcttgtcgctgtcacagagagtagagctcagtgctgcctctctgctcccttcttgaggagttgtacgccaccatggggcctcctctcagctcctctgccctgggctgtacaaaccaagggacctcagctgctggacacattttgccttcagacctcttcctatctttgtagccctcctttggatggcctccagtccttatattatgttgcctgaaactgcagagcttatgaccaatatccatcataaatactaaattcacttcaactatttccaaccattaaacayttttaaaaaaacattaaatgtctattcagtttttaagttattgaaattaaaatacagaagaaagttgtttaaaaatttccatgtttccttaggrggctaagggacatttttcattgaactctgaaacaatttctaccctagtgaatatgtaagttcatatctaggcagacagtcaaaaacaaaaagatggatatattctgtaatctagtattgctaatgcatccatcttcaaagactgtaaatatagctaaaccaaattatctacagtttgcatgaaacaaaatttgtaaaacctttaag

SEQ ID NO: 82155 - DNA, 597 bp, Chicken  19866894376499_2
tcctctcagctcctctgccctgggctgtacaaaccaagggacctcagctgctggacacattttgccttcagacctcttcctatctttgtagccctcctttggatggcctccagtccttatattatgttgcctgaaactgcagagcttatgaccaatatccatcataaatactaaattcacttcaactatttccaaccattaaacatttttaaaaaaacattaaatgtctattcagtttttaagttattgaaattaaaatacagaagaaagttgtttaaaaatttccatgtttccttaggrggctaagggacatttttcattgaactctgaaacaatttctaccctagtgaatatgtaagttcatatctaggcagacagtcaaaaacaaaaagatggatatattctgtaatctagtattgctaatgcatccatcttcaaagactgtaaatatagctaaaccaaattatctacagtttgcatgaaacaaaatttgtaaaacctttaagaagtacttacaaagttaactccactagaatgcagatcaaactgcctactgttttttatgaagttaaaattcatcagctcacagccatagca

SEQ ID NO: 82156 - DNA, 600 bp, Chicken  19866894376507_1
aatagttaaaaaaagacaggtctggtttctagattgatatggtcattattctgtagtcttccctttacatgtgcactttactgcagcactgagagctggggctgttcaacctggagaagagaagactccaggaggacctgatagcagacttactaaaaagggtctgtaagaatgaaggggacagacttgttagcagggtctgctgtgataggacaaggggaaatggtttcagactaaaagaggagagatttagattgggtatgcagaacaaggcggagatttagattgggtatgcagaasaaggcggtgaagcactggcacatcttgcccagagaggcggtggatgctctgtccctggagacatccaagatcaagctggatggggctctgagcaccagatctagctgtaggtgtccctgttcattgcaggagagttggactagatgacctttaaggatcctttccaactcacctgattctgcacacatactctttgtgtcatgtgatcatatagacagggataagaaggaggtacaggtttctggtttcaacaggtactgttgaaacacctctactgaatctttccatagaaaatttcaa

SEQ ID NO: 82157 - DNA, 600 bp, Chicken  19866894376509_1
aagacttaattatgagttaagtccaagaagaagacaggaggcacaggaataaatccaggattacagtggctgggaactgtggagcagtttcctccccgaaacttacccaaggaacccagatacgtggtttgtgttgtttactttggaactgctctgaaaagctctctttgctctgctgcttgataaccttcagacaagaaatgtggctgcgttgtgcaaaggagaaggaggtcaccggtcagtctgaaactccgcagagcgtgatagcagcagcttaaggggtggtggtaaacatggcaraaagaaatagcagcatgtgggtcaccccatccttgcaagatggacgtgctctgtccagtccttcgkcctgcccagtctgtcagcagggcaagctttgggtctctgtggagagcagcaaactctggggcaaaagactttttcagcttcattctgtgcaagagatgggattcgtttagactcgattacttttgctacccaggtaatggaggaggctgtctgtcaagcacatgggacctgcacccaggtcacctcgctgctacttaggcacagcaccacgggatttcctttcctttcacatcg

SEQ ID NO: 82158 - DNA, 600 bp, Chicken  19866894376509_2
tggctgggaactgtggagcagtttcctccccgaaacttacccaaggaacccagatacgtggtttgtgttgtttactttggaactgctctgaaaagctctctttgctctgctgcttgataaccttcagacaagaaatgtggctgcgttgtgcaaaggagaaggaggtcaccggtcagtctgaaactccgcagagcgtgatagcagcagcttaaggggtggtggtaaacatggcaraaagaaatagcagcatgtgggtcaccccatccttgcaagatggacgtgctctgtccagtccttcgkcctgcccagtctgtcagcagggcaagctttgggtctctgtggagagcagcaaactctggggcaaaagactttttcagcttcattctgtgcaagagatgggattcgtttagactcgattacttttgctacccaggtaatggaggaggctgtctgtcaagcacatgggacctgcacccaggtcacctcgctgctacttaggcacagcaccacgggatttcctttcctttcacatcgttgctttgaggatgaatgcgttgcaaagggtcacgcttcagccatcggttttgggtatatgggagt

SEQ ID NO: 82159 - DNA, 600 bp, Chicken  19866894376515_1
taaaattatcagggtatgagttagataaggagaagtcctggtcccaaggttctacctatgctgtgtttactgctctgccatttttacataacagggcttatgcagatttggcagtactgctattttaagttgaaatcaaacttttatgtcccaagaccatacaggcattccctaataaattttaagggcaggtagtatcaagcagcaagagaaactataagaaattgggctgaaggaaagaggaggagcaacagaaagaagcagtaagtggaaggactctgtggataagttactaaaagraagtacatataaaggcacccagtctagggaggagaaggtccagatatcagaagggatctagtgcaaggttgcttgagttgggcaagaagcaagtgaaagaggacatctcaaaagcagagagtctcaggagtctagccaagcactgggaaggacaagygaaggtggtgacatccctctgaacatttgagaactgaaggaaaggttctggaggtgtaggaagtgcaaaatctgatgccagattcaaagagatattggcagaagtgtgtgcatatttttacagcaggtggcaaggaagtttct

SEQ ID NO: 82160 - DNA, 600 bp, Chicken  19866894376515_2
catacaggcattccctaataaattttaagggcaggtagtatcaagcagcaagagaaactataagaaattgggctgaaggaaagaggaggagcaacagaaagaagcagtaagtggaaggactctgtggataagttactaaaagraagtacatataaaggcacccagtctagggaggagaaggtccagatatcagaagggatctagtgcaaggttgcttgagttgggcaagaagcaagtgaaagaggacatctcaaaagcagagagtctcaggagtctagccaagcactgggaaggacaagygaaggtggtgacatccctctgaacatttgagaactgaaggaaaggttctggaggtgtaggaagtgcaaaatctgatgccagattcaaagagatattggcagaagtgtgtgcatatttttacagcaggtggcaaggaagtttctgatatttatttacctttcaggaaagaacctgtgttgtgattagtctttggactggtgtgtcctggggactctgccttttcctgaacaacttattcatcagaaaacttaccttgaattttaggaagttggcatatttctgttagtttttttaaaaggt

SEQ ID NO: 82161 - DNA, 600 bp, Chicken  19866894376521_1
agctcagcatggagcatcccagcacagaggcagctcaggcagaagctggacaagggcatcagctgctacaggcaggggctgggcctgatgcagtgctgtgcatcttgttgggacgtgttcaggacaccgtgcacagccacccatgttgcaggacagtgaaggtagggctgtggtgaggtcctgtgccaccatcaaacagagacagcaaaacctgccggctgctccttgcactgacaggaggtttgtgcatcacttcctcactgctgtgtgtcaccatgggaccagcaccactgctgtctscactcccacagtaatagacagcctcgtcctcggctcggaccccagtgatggttaatgtggctgtggagccggactcggaaccggagaatcgtgaagggatgtttgagggtctactggtgctaccatagatcacagtgacaggagcactgccaggtgacttctgctggaaccagccgtagttgttaacaatcctggagcagatgtgggtatcctgctaccccatgtgtccttgtggaattgggtgcctcatctgacagcctggtgagggctgtgcatgttgggcaattgctgagccctatt

SEQ ID NO: 82162 - DNA, 600 bp, Chicken  19866894376521_2
ggaccccagtgatggttaatgtggctgtggagccggactcggaaccggagaatcgtgaagggatgtttgagggtctactggtgctaccatagatcacagtgacaggagcactgccaggtgacttctgctggaaccagccgtagttgttaacaatcctggagcagatgtgggtatcctgctaccccatgtgtccttgtggaattgggtgcctcatctgacagcctggtgagggctgtgcatgttgggcaattgctgagccctattttctctcctctcccttacgctaacctgaaaggaggrtgcaaagtgaacagagccaggctttttccagcagcattcagcaccagtacaggaggcagtggcacagactgaacgcagaggttctgtctggccagagtcaggagtcacatccttactcygcaggtaatgtagcactgatccaggctgcccggagagatcatggagtctcctccttggagatctctgacagccacctgcacacaggcctgggcactgtgctgtaggtgatgccagttgagctgaggtaggagcagatcacaacaatcatcctgatctgaaagattctgtggctgccctcgt

SEQ ID NO: 82163 - DNA, 600 bp, Chicken  19866894376521_3
gacttctgctggaaccagccgtagttgttaacaatcctggagcagatgtgggtatcctgctaccccatgtgtccttgtggaattgggtgcctcatctgacagcctggtgagggctgtgcatgttgggcaattgctgagccctattttctctcctctcccttacgctaacctgaaaggaggrtgcaaagtgaacagagccaggctttttccagcagcattcagcaccagtacaggaggcagtggcacagactgaacgcagaggttctgtctggccagagtcaggagtcacatccttactcygcaggtaatgtagcactgatccaggctgcccggagagatcatggagtctcctccttggagatctctgacagccacctgcacacaggcctgggcactgtgctgtaggtgatgccagttgagctgaggtaggagcagatcacaacaatcatcctgatctgaaagattctgtggctgccctcgtgccagaagagaaacacagccagcccagccttgtgccatgggaaacatcccctctaagtagggagctttggcctggctgctcagcggtccacaggttccctgctgtcagtgctggggatg

SEQ ID NO: 82164 - DNA, 600 bp, Chicken  19866894376526_1
gatgcaattgtgaagaactgagagcagctcacatggctgtgtattggagtgggaaactgctacttttaaatcaggtttgaaaggattattttaaaattgaagatcgtgcatttagcaaaagtgctggaggcgtaggggcacggagaaggtacagattgccatatttaaccctttcctgagtcttagtgtaggatttatgcctttccacgcgggagaaatagccagacatctggacagcttggaaagagtgggacaggagcagaggaggtgatgcacaacttatggggagaactgagcaargtctgagtttggcttataacaggaacatatatctcattgtgtattcagcaagtgatgtccagatgagcatgactggtacaaattgctattaaaagcaatcgacggctctgatcacaggaatgatgcataggagcagtgtcccagatgctacctcagagatgaagctgggaacagactcctgtggtctgggtgagctggggtgagctaaggcagggcagtgaacaatgtgagaggggtcagtgcaagtctccagctgtgtcagctcttgttgttcagatggttggatttgccagagtggct

SEQ ID NO: 82165 - DNA, 374 bp, Chicken  19866894376526_2
ttggcttataacaggaacatatatctcattgtgtattcagcaagtgatgtccagatgagcatgactggtacaaattgctattaaaagcaatcgacggctctgatcacaggaatgatgcataggagcagtgtcccagatgctacctcagagatgaagctgggaacagactcctgtggtctgggtgagctggggtgagctaaggcagggcagtgaacaatgtgagaggggtcagtgcaagtctccagctgtgtcagctcttgttgttcagatggttggatttgccagagtggctgtagagcygtgctttgctgctaatattggcaattcactgttatgacgtggcagtgctattgggtctaagcttgtaactgcag

SEQ ID NO: 82166 - DNA, 600 bp, Chicken  19866894376531_1
attagcctgtactgtaggtgtaatagagacattaaatggtgtaattagcctttatgattcatgagtgatggcttattttttaattacagtaacgatggaccgggggatgaacaaatccattaagtttctaaacagtacctgtgttttccaatacaattctccaaaagatttaccactactgtgaagttagcataagcattgctacagcagaccactctgtcactagtattgtgttgtagggctttttcataaattgatatacagcacattttcaggaggaataaaaaatcagcctagacygataagtatttgtagggaagtgcagagagagtcaaaatcaaacaacaaaaaagtcatgttaaaggaaattattattattattattattaaagcaacacagaagaaaggatgaaagaagttattcaggaggttttcaaaggtttagtgataagactgtgtttttcagtggcctattatgctttctcacatagctttctcaccaggttaactgatataaaatgaccaaagggatgtctcataaacatatgacatcatgctgaacaataaaatgggggagttggctgaggaaggggaactgct

SEQ ID NO: 82167 - DNA, 600 bp, Chicken  19866894376531_2
atgctttctcacatagctttctcaccaggttaactgatataaaatgaccaaagggatgtctcataaacatatgacatcatgctgaacaataaaatgggggagttggctgaggaaggggaactgctgcttcttggggatggtggtgagcaattgcactgtgcatcattgttttttgtttgtttgttttaattattcttgtttgcttgtttttgtttgtccgtttgtttctttgtttctttgtttttttcctagttcttataaactgtccttatctgaaccagtgagttctcacatttgtayacttttcagttctgttccccaacccactgaaggagagagagcaaacaagtatgtggtgttaagctgcctgccagattaaacataaggtcatttcaaatatcagaatattgattttatgaagtatgtataaaagttgtaatccagatcgtttggggggggggcaacagctattacctatggtgtttgaatgcaactctgatagtcctcattagaaaactatagagacatagggcataacctggttctacatactttattgttactggtacaagcatggaacaaagcaacagacagcttcaa

SEQ ID NO: 82168 - DNA, 600 bp, Chicken  19866894376532_1
acagaacattaaattgctccaaagagattgatggagatctatggctcatttatttaagatcttgtatgtttttgcgaaatgcgttttaactaatatttagagataatgttaatgctatttattaactattcattaggtacatagcccactagagggctgcttttcaaacaaattgcatccagagtgttaataaacagcaaaataaaaacaaacaaaaaaagaaagcatcacatataaatatgaatcaaatatatatacgttgtcattattttgttgtataccttctgtaacttcatgatrtatgcagagcaatctcaaacagcataaatcatggctctaactctgcaaacatttattatgtgcttagctttaggtatatagtcagacttcccttctactctactagtaagttgaaatagatgcctgtatgccactgagactgtctgctgtcacatattgcactgactgtggctgtggaggggcaaaattccaatgtttatcccttgtatttggtttgaatattgcatagcaaaggtattttgacatctgagtgacaggtcacagcttcagtttggaaatcaggtgtcagtagtaatttct

SEQ ID NO: 82169 - DNA, 600 bp, Chicken  19866894376534_1
gtaagtgatattttttgacatttattcattactttttgaccttcttggcaactgaaaaacaaacaagcgaagtacacctcctgtgaagcatggatgatgtggttcacaccagaactgctgaatacacagtcatgctagcacacattaaggaacagtagaggaaaataaactgttgtcagatagaacaaactaatccccctaaactggaaaaatattgggtcagtcaaaaaaaaaaggctgtattcacaaaatggatgttatagctacagttcttaagcagcaaaaggaagtagtttcagycctttctccaataaatagtgcactaatttacacgaaatatgcactgaagaaaggacatggaaacaagtaatgaaactcctggggtgtagccacatactaggctacagcacagtgtttctttttgctctcatgtactccaagccagtgaattttccattattccctgctagttttgacagcttcgagaggaaaagctgagaatttcctcccaatacatcctagcacaatgaccaaggatatggattcaaagtctctgaggctgaggaatacagtgaatctgtatctatagcctgaacaagt

SEQ ID NO: 82170 - DNA, 480 bp, Chicken  19866894376536_1
actactctctgttgatagataacaatgattcttttttatcctcatcttgagcatttttttgcctggaaaaaaaaaaaaaaaaagttctatattcacagtttcactctgtcaacactcttgatagcaaaataaaaagacaaagtaataaagcttagctcaatttcctctgttattctaacaatgtctttgactcaggaaaggacaaatgtgaggtgcatactcacacacagatatgtacttacaaatatagataagacacaattattctcctaatacttttgaatcagaggtgtatgatcmatttttccttccccttcgacaaaaagcagaccaaccctagaagtctgatccagaatgtgagagctatgtcctggttaatctacattcataagatcaaatgcataaatctgaaaaatgtgcagagtctgacaattaaaataataataataataataataataacaacaacaacaacaacaa

SEQ ID NO: 82171 - DNA, 599 bp, Chicken  19866894376537_1
  misc_feature (1)..(37): n is any nucleotide
nnnnnnnnnnnnnnnnnnnnnnnnnnnnnnnnnnnnntgatggggctgctctattcctcaacacatgaggaacgcttccgccccagtggggagctttgtcacccatctatagcagcgaagggaaaaaagctcaggcagcagatataataaccacagtccacacagcgctttaaaatttgcctcctgtggttgtcgtcctcctcttccctgccaagcttcctcgcccggtgatgaatgacctcgtccgggtaccgccggtaccaggcgagcgcagctgtggggctgctttccagggcgggygctgcagatggccgctccgtgccgagagcacagctgcacgctggggctgccgcgccatgccacaaagggacacaacaggcaatgaatgagagcaggggagcaggcagggagggatgctggggggtctccaggagtgggtctgtgtggttagggcygcacacaaggcatagtcgtgcccaaagggcttcatggagatggggagatgctacttacagaaagtgacagcttctcatcctcccggcttcagttctggcttttttggtgctggttctcagcctctggttccaagtcaagaagca

SEQ ID NO: 82172 - DNA, 600 bp, Chicken  19866894376537_2
gtccacacagcgctttaaaatttgcctcctgtggttgtcgtcctcctcttccctgccaagcttcctcgcccggtgatgaatgacctcgtccgggtaccgccggtaccaggcgagcgcagctgtggggctgctttccagggcgggygctgcagatggccgctccgtgccgagagcacagctgcacgctggggctgccgcgccatgccacaaagggacacaacaggcaatgaatgagagcaggggagcaggcagggagggatgctggggggtctccaggagtgggtctgtgtggttagggcygcacacaaggcatagtcgtgcccaaagggcttcatggagatggggagatgctacttacagaaagtgacagcttctcatcctcccggcttcagttctggcttttttggtgctggttctcagcctctggttccaagtcaagaagcaaacttgcattgcctataagcaggtctgtgttggaaatgctgcagaaaatgccctcccagcaagatactttttggagaaaaacctgcttgaacagtaaagctcagaacttgcctcattactaagctaaactgggagcaactcccagtttcccatggg

SEQ ID NO: 82173 - DNA, 515 bp, Chicken  19866894376537_3
aaggcatagtcgtgcccaaagggcttcatggagatggggagatgctacttacagaaagtgacagcttctcatcctcccggcttcagttctggcttttttggtgctggttctcagcctctggttccaagtcaagaagcaaacttgcattgcctataagcaggtctgtgttggaaatgctgcagaaaatgccctcccagcaagatactttttggagaaaaacctgcttgaacagtaaagctcagaacttgcctcattactaagctaaactgggagcaactcccagtttcccatggggagggrgacaatgagctgcccccacctgccaggctgcccagcagcattcagccctcccatccagaccaaggaggtcccacactgtgcatccagggcagaaaacctgcacccgagcagcactgggtggctgcagcacagctaagggtgtgatgggctgcaccttgcaaaatcatctcagactgaagtcatttaaactcattctgccacctcagaatttagtg

SEQ ID NO: 82174 - DNA, 596 bp, Chicken  19866894376545_1
ctccatagctccagggcctgtccaggtttcatttcttcagaaatcaaagtgcaaagaagctgagctggggtgcagagggtcagaaagagagttggcccattcctaagtctgtgccctcttagttgcctgtacagagcaacaatatgcactgctacctgtcccatgtgttatttggagcacatctttactaaggagatggaaaggatgtgttttccagcttgcaacagctatgcaaagggatagtctcatatccagatctaaatatggcaacttgtgttgactgcaacagctatattacartagctatgttacaacacagaagaagcctgattccttgtgtgcttcaggtccaacagtaaaataatactttctgcgatgattaattcagaacactaactatatgcaacatacctaattctgctgaccttacctgatcaacaaagggcagcattcagatatatcacagaagctctcccaactagttattcatttcccaagtttgcagcaatacagctacctgtgactcagagctttgcgctgaaatggcatggatctagagccctgcagttcaaaaaaagaaatattttttaataaat

SEQ ID NO: 82175 - DNA, 600 bp, Chicken  19866894376553_1
ttcatgggttgaaatgtccgtgcatatacattcacacatgtaaataaggaatgaaaagcttcacgttctgcatgaaaggcccaaaaacacttctcataatttaactaaatagatgttagcaacatgccaactaaacaaaatgccttacatgcatttacatgaagcatcagttttgcagctgactactgctccattatttctactaattacatatttaactgccttaaggagcagttatactattgattcaactggaaacagcttgcacaaagccaaaaataaagcagcattatgaagtcrgacttttacatgcaaatacatgagccagtcagtgatggtatcaagcagcagtcacggaactgcactaagagctgtgccacctcctcacaaccacatttgtttcagctcaggttttaacatgaaagcagaagggctggttcaaatcagatgaatttagggataatatggtacatgagaacatcctccggtgagcgtgaacacaccagtgctacacaaaagaacaagagtcagcttcacaagtgctgaatatcagcaaagctctcatcactgcattgagattggctcatttgtattgtcagg

SEQ ID NO: 82176 - DNA, 590 bp, Chicken  19866894376554_1
gtaatatgtgatctgccacgggctaacatcatatttctaaaacttgaggattaaattgtgtgcatctgcctttatttagcctgacaggtgtgcttggtttttccaagcatttccaaattgaagcagctatagtgggatgtctaatatacttctgcactgctcctttacatctcattcactggactagatctgatgatatgtgcagcagtgtgtcatattctgtcctaccgtcataaacatcctatttttcctatagagggatgcaagcgactgtgctactgattgagtagtttgtcaagwgtaaaacgcgacaaaagagaactgagcagtgcaagagtcatttaaaaaaagagtccatcacactgcatagaatgctgctgatgggccagaatgcagattttctttctggaattctgtcctcagagtgtaggtgtgtgctgccacaactgtgcttagaaattcctatcatcaatggcattatagcagttaagtttaaaaataagacccagagagaatgaaactggccagtgttttattatctaaagaactttgatgtaagaaagtcacattcaacccaaatcgtctattaa

SEQ ID NO: 82177 - DNA, 600 bp, Chicken  19866894376562_1
tctgttcctgttgccctcaacatctctctttttgtctcggacatggaaatggttttcagcaagcttgtgaataagtggcagtcactaactaggagtgaggcagtcatttctgtattagctactgagcaaaaacattttggattacaacctgtgcaaagcaaggctcacagatctgcctgtgggagacaaaagactcacagctgtccaagaaacagatccttaagattactgtgctttatgtattctcccttaattctttttaatttgcatgcatctgtgctgaatgtcttctgcagaatrttttcactgaaaaaaatgtctctgaccctggatgtgttacaaatagtgactaaagggaagagcttagaccattaacaatgctaggaattaatatytttcattttttttttatgatgctgtgtgtttgaaacatcagattaacctcagtgccagaaacgtgttaaccactgctttgtgtcttcagctgtgttgagtccaaatttcagtatgtagcgttaagttgtcctctgagtttaatgtatttaaaaatttttgtctttcctatggcagtgtgaaaagggaagggcagcaagcagctag

SEQ ID NO: 82178 - DNA, 600 bp, Chicken  19866894376562_2
tgaggcagtcatttctgtattagctactgagcaaaaacattttggattacaacctgtgcaaagcaaggctcacagatctgcctgtgggagacaaaagactcacagctgtccaagaaacagatccttaagattactgtgctttatgtattctcccttaattctttttaatttgcatgcatctgtgctgaatgtcttctgcagaatrttttcactgaaaaaaatgtctctgaccctggatgtgttacaaatagtgactaaagggaagagcttagaccattaacaatgctaggaattaatatytttcattttttttttatgatgctgtgtgtttgaaacatcagattaacctcagtgccagaaacgtgttaaccactgctttgtgtcttcagctgtgttgagtccaaatttcagtatgtagcgttaagttgtcctctgagtttaatgtatttaaaaatttttgtctttcctatggcagtgtgaaaagggaagggcagcaagcagctaggcagaagggttaactggcggtgctgctgggcggggaagggtggaaggatttgcatagaatagcatctggaatctatatgtcctcgcatactttga

SEQ ID NO: 82179 - DNA, 599 bp, Chicken  19866894376563_1
  misc_feature (1)..(32): n is any nucleotide
nnnnnnnnnnnnnnnnnnnnnnnnnnnnnnnncctcattcattacagctgtagcttcctaagtgacattatttttgtactttgtgccaattgccaaagtccatgaggatcttttagtatttgacccagtaaacaggaactatctgtaacgttagtgaaaactaattctgctggttgtaatttctatagcgttaaactgtgcaactaaagaacttcagtgcgctacgtatgttttttcccccattaattgtattgtcttgtttttatttgtgtgtacttttaaataaagagtatggtagtwacatctactctgtaaaatgtgtgtgttttttattccgttggcaacttatttcacctaagaacatttttaattaacaaaatctgttactttcaaagaggaaacattcatctgatctcttccctacttgaagaaagacaatgagaaaaatcagataggcacacaaagctgataagttgtcacttagcaggtaatgtcactgtagagagagaactctttcatttcacctcacttaaatcagaaacacctatttttaaagcttcctaaaacataatacagttggaccccatcagtatcctctt

SEQ ID NO: 82180 - DNA, 600 bp, Chicken  19866894376568_1
tgatgacatgctcttcagataaatgtacttttcatctataaatgtgttttctgtaaatgattcatagaagtgatttcaattggtgtttcccaggttgcgctgtagtcccactgctgacaccccccttgcagaccacatggtataaggtgaggtgaggagctgcagctgagctgcttatgagttgtgtggggtgataaaattcacgcaactactgtcaccttagctgagtcagagagtaatagacccaccagtcacagtgttcactgttggctagagagggtttgctctcctcgctgagcrgtttgagcactgagcaaagggtgaattgattctgaatgtgctgaaaccagtgcgggaatgcctctggatatatttccagtttaatgtttcccacttaccagaaaaggtcactgagagatccaagcaggtatctacttgttagtgtaagatgtttccttcttgctttatttcggggggtagtgtttacgtagcaaaccacatgcaaaatgcacagaagcttcttcctcctgtgcatccacacatgagctactgctttgctggtagtgattacagagatgaagttagaaatacctaagcgtg

SEQ ID NO: 82181 - DNA, 600 bp, Chicken  19866894376568_2
gtgcatccacacatgagctactgctttgctggtagtgattacagagatgaagttagaaatacctaagcgtgaggcagacaacgcagctaccaaagaaaacttgtgacctgcatcttgcatatcagatctcgagggaattgtgtaaagaggaattaaaatggacatggctgccattgaaggtgactacatctttgcagggaatgcagttctttctccccttatttggccaaaatgcactgtatcattataaaaatcagtcactaagcctgaaaaactagcattagttacatcagaagtctrtacaaagctgggaaattaatgtgagtcttttatgtgctagagcagtacccttgctttgcattctcaaacattttgctttccctacatgattctgttatcaactttgctgatttcaactttaaaaaggttttgttgatttttattttgtaaattttaacctcttcaaaaaagatcccaaatgcactaaatatgtcacctcctgctgcagaacctgtttggtttgataattaatagattgatcactgctggcaatargcgtactactcaaaattgtacataactgttctctatactaatgca

SEQ ID NO: 82182 - DNA, 600 bp, Chicken  19866894376568_3
agtcactaagcctgaaaaactagcattagttacatcagaagtctrtacaaagctgggaaattaatgtgagtcttttatgtgctagagcagtacccttgctttgcattctcaaacattttgctttccctacatgattctgttatcaactttgctgatttcaactttaaaaaggttttgttgatttttattttgtaaattttaacctcttcaaaaaagatcccaaatgcactaaatatgtcacctcctgctgcagaacctgtttggtttgataattaatagattgatcactgctggcaatargcgtactactcaaaattgtacataactgttctctatactaatgcaataaaagtgggtctgcttttacagtggcaattttagtagcaatctaaatcaacaccctgttgatgataagacatctttcttcaaacagaaaagcagtgcaagtgaggttgttagtattatgagcacattattgtctttactttctgcaatcagcttttattcatgcttttacaataggtgtaaatttttatatctccttaggcaagcagaagagtgaactgaacttctagaaaattacttaaaataggcaatggt

SEQ ID NO: 82183 - DNA, 554 bp, Chicken  19866894376568_4
ggtgtttgaagtgtggcagagtgttttctggatgggtgtgttggggaatttgggagggtagagggagaatttctgtggcatgaggcactgctgtgggataaatggtgtctgaaagaggactcacctcaagtgagggtagaggacttgctcctgtgacagacctgccctcccacagctatgccttatcctcatccctctgtctcaggctgagccatgaccaggtgtaggagaagtgagggagaacagggaagtgcccttcatgtaacacagtgacagacagaagaatgactaactggtaarctcagagtttgatgccctcaagctgtaacaaaagcmgagagcagccagttttatttttcatttctcttgacagcgttgctgtaaaaaattgaaagaattcactgtgatcttgctgtgctgtagtttaaagagcacttgtggcacagaaaagtttgttgctccaaatgatgctgttcacaagctgcactgactcagacaagcaacacgagagcagctcacacctaaatagcttttgaaggtagagcttccgtttt

SEQ ID NO: 82184 - DNA, 518 bp, Chicken  19866894376568_5
tgtgttggggaatttgggagggtagagggagaatttctgtggcatgaggcactgctgtgggataaatggtgtctgaaagaggactcacctcaagtgagggtagaggacttgctcctgtgacagacctgccctcccacagctatgccttatcctcatccctctgtctcaggctgagccatgaccaggtgtaggagaagtgagggagaacagggaagtgcccttcatgtaacacagtgacagacagaagaatgactaactggtaarctcagagtttgatgccctcaagctgtaacaaaagcmgagagcagccagttttatttttcatttctcttgacagcgttgctgtaaaaaattgaaagaattcactgtgatcttgctgtgctgtagtttaaagagcacttgtggcacagaaaagtttgttgctccaaatgatgctgttcacaagctgcactgactcagacaagcaacacgagagcagctcacacctaaatagcttttgaaggtagagcttccgtttt

SEQ ID NO: 82185 - DNA, 600 bp, Chicken  19866894376589_1
ttcgctaaaggtgctgacctgtgaaaaaaaatgaaactcactatgcaaagcaactgtttcatgtagcttttaaaatgtgtatgagtgcacatataaaagatatatctgtggatgcaggcgtacacatccacgtccgttacatgcatctggtcggagatgaaggcagaccaaacgatttctgaaaaaattgaccacgtaaagctttttttttttttccagagatactgcatttatattttatctgttaagtgtagtattaggcagccatctccgagcattccctaacctgctgtcaacaaygaaatagtacacttactgaagtataaagtcataacaaattgcattatattcraagagtatgagaaatgggacagttagtattcctatttaagataattctataatggcatagctgcaaccacatcagagatgtcattgatataactgcctggcaaaaacaaacaaacaaaacaaaactcaacaaaatggtgacatcatacctacaagttttaaatgtagaccaggctgctgagttaagactttcttaaattctcttccttaaaatgattctgtcagaaactgtatttcagccacagtgaa

SEQ ID NO: 82186 - DNA, 600 bp, Chicken  19866894376589_2
actgtttcatgtagcttttaaaatgtgtatgagtgcacatataaaagatatatctgtggatgcaggcgtacacatccacgtccgttacatgcatctggtcggagatgaaggcagaccaaacgatttctgaaaaaattgaccacgtaaagctttttttttttttccagagatactgcatttatattttatctgttaagtgtagtattaggcagccatctccgagcattccctaacctgctgtcaacaaygaaatagtacacttactgaagtataaagtcataacaaattgcattatattcraagagtatgagaaatgggacagttagtattcctatttaagataattctataatggcatagctgcaaccacatcagagatgtcattgatataactgcctggcaaaaacaaacaaacaaaacaaaactcaacaaaatggtgacatcatacctacaagttttaaatgtagaccaggctgctgagttaagactttcttaaattctcttccttaaaatgattctgtcagaaactgtatttcagccacagtgaaagggcttcattctatctgcacttgcaaccgattactgttcctggaatactgt

SEQ ID NO: 82187 - DNA, 600 bp, Chicken  19866894376592_1
gttttttgttgatgttggtatcttggaatgaaaaacaagcaaatttctcacagtattttcttatcttgcagatgttaaagcctgttccagggaagctgcgaccgcagtgggagatgggtgttaagcaagcaagtgaagcagtaggcatgacagtggaagaacggaagggccaaatacaccttcatctacattagggacagacctcatcttaatcctcaagtggcaaaggaagttggcattgctgtggagcttttagaggaggaggtagatgagtcatcttactcaaatgaagaaacctcygaaaatctgaaatcaatgaaggagtctggcattcctaacaagaggaggagaaggacatcaaaattgtctgccactgatgatacacaagaaagcagtcagttggagactaagaatactactcctcaaaagtcatctgaacaggctgaatccaaaagagggataggctcccctctgagtagaaagaaaactccagcatctactccacgaagcagaaagggcgatgcagtatctcagtttttggtcttctgtcagaagcacagagatgaggttagtctcttttagctgttactatggatgatt

SEQ ID NO: 82188 - DNA, 600 bp, Chicken  19866894376592_2
attgtctgccactgatgatacacaagaaagcagtcagttggagactaagaatactactcctcaaaagtcatctgaacaggctgaatccaaaagagggataggctcccctctgagtagaaagaaaactccagcatctactccacgaagcagaaagggcgatgcagtatctcagtttttggtcttctgtcagaagcacagagatgaggttagtctcttttagctgttactatggatgattgcctctgctcatttctgtactgaaaagaaattcttcactttggttgacaactaactgttacwttagaatccataatactctgagtttgacaaagtatgcctgcatcaaatcttggtccagacagtaacagagaaaggaaagaatgtatataaataatatgaacaaaatagtgataatgctgttcacttcaagcatgtcacwttagtatcatcctacataatttaacagtccttttaattagtcctaatttttttaatatatgtaaaatgtagtagatatgctatacatacgctcaggcaaatataagtaaggttatactgcttatggtcatccacttgcagttagtttgtgcattcattttg

SEQ ID NO: 82189 - DNA, 600 bp, Chicken  19866894376592_3
ccacgaagcagaaagggcgatgcagtatctcagtttttggtcttctgtcagaagcacagagatgaggttagtctcttttagctgttactatggatgattgcctctgctcatttctgtactgaaaagaaattcttcactttggttgacaactaactgttacwttagaatccataatactctgagtttgacaaagtatgcctgcatcaaatcttggtccagacagtaacagagaaaggaaagaatgtatataaataatatgaacaaaatagtgataatgctgttcacttcaagcatgtcacwttagtatcatcctacataatttaacagtccttttaattagtcctaatttttttaatatatgtaaaatgtagtagatatgctatacatacgctcaggcaaatataagtaaggttatactgcttatggtcatccacttgcagttagtttgtgcattcattttgctaacatggctcaaattatacagtgtgttcccatgtcttttaactcctcaaaaactcaatttccccacctagagtcctttgctgagcttcagagaaagcttcaacagttaccaaagtgtatgaaaatcactgtcagtgt

SEQ ID NO: 82190 - DNA, 600 bp, Chicken  19866894376592_4
ttttttaatatatgtaaaatgtagtagatatgctatacatacgctcaggcaaatataagtaaggttatactgcttatggtcatccacttgcagttagtttgtgcattcattttgctaacatggctcaaattatacagtgtgttcccatgtcttttaactcctcaaaaactcaatttccccacctagagtcctttgctgagcttcagagaaagcttcaacagttaccaaagtgtatgaaaatcactgtcagtgtgcagtatcttgggacagaaactaggcctacttgagaggactacactycagggcaaggtagattaaataactaccataatatcaacacttcatwggaagactgttagaggtataaaagcggtattgttgttctaactcactattttaaaatcatgaacatcatttttcttccttacaaccctctgctgcatttgcagcacagttccatgcactagtggaagcatgagttctgatgttatatattagttgtacttttctgtaatacccacaaaggcagaaggttagagatgacttggtcagaggcttcagctgttaaatgggttgatttcaatttaagatatttgtgtt

SEQ ID NO: 82191 - DNA, 600 bp, Chicken  19866894376592_5
aggcaaatataagtaaggttatactgcttatggtcatccacttgcagttagtttgtgcattcattttgctaacatggctcaaattatacagtgtgttcccatgtcttttaactcctcaaaaactcaatttccccacctagagtcctttgctgagcttcagagaaagcttcaacagttaccaaagtgtatgaaaatcactgtcagtgtgcagtatcttgggacagaaactaggcctacttgagaggactacactycagggcaaggtagattaaataactaccataatatcaacacttcatwggaagactgttagaggtataaaagcggtattgttgttctaactcactattttaaaatcatgaacatcatttttcttccttacaaccctctgctgcatttgcagcacagttccatgcactagtggaagcatgagttctgatgttatatattagttgtacttttctgtaatacccacaaaggcagaaggttagagatgacttggtcagaggcttcagctgttaaatgggttgatttcaatttaagatatttgtgttagaaaatattaacaaatctgaacatagcaaagaaaaattgaaagcc

SEQ ID NO: 82192 - DNA, 600 bp, Chicken  19866894376594_1
aaagactgcttttctttttgtaagcaattgtcagattgcttgaggactgtgctattcgtttctcttaattattttatccctgcaaaaagttatttcaggcatttttagaaaactagcgtttaaatcttttaaattgcgtttacaaagggattgtgtattgcttcctacacctccagcacctgatttgtgtgcctagaacacatgcttcattagtccctttcacaagctgttccaaatgcaatgcaaatcacttcttaatggtcacattgactagataggaaatgcttttgttggagctaygacttgtagttaattaagccaattagcatttgacataggcaattctggaaagataaagcctaagaatagctctcgtgagatggtggaagactttaagcaaatagaaatgtacagaagggaaargaaatgaagcaagatgaagtttaaaactaatttctaaacccgttcagtgtttttttttccttgtttacatcggtctctgctgaacttctatgagaagagttgggggtggggaaagaatctatttcctatggctttgttaaagaatattaaaccggactttgtactcagcaaatatta

SEQ ID NO: 82193 - DNA, 600 bp, Chicken  19866894376594_2
atcttttaaattgcgtttacaaagggattgtgtattgcttcctacacctccagcacctgatttgtgtgcctagaacacatgcttcattagtccctttcacaagctgttccaaatgcaatgcaaatcacttcttaatggtcacattgactagataggaaatgcttttgttggagctaygacttgtagttaattaagccaattagcatttgacataggcaattctggaaagataaagcctaagaatagctctcgtgagatggtggaagactttaagcaaatagaaatgtacagaagggaaargaaatgaagcaagatgaagtttaaaactaatttctaaacccgttcagtgtttttttttccttgtttacatcggtctctgctgaacttctatgagaagagttgggggtggggaaagaatctatttcctatggctttgttaaagaatattaaaccggactttgtactcagcaaatattaacagcaaaatttttgctgagattctgcttataccatgaaattatcagatttatcaaatgcgcttttgacttccttccaatagaaggtttttgactgcttgacgccagaagagcaggcgtcctt

SEQ ID NO: 82194 - DNA, 600 bp, Chicken  19866894376596_1
tttatctgataaatttgttttgtttttctgttgatgcaatttgttttctccattctggaattcaaagacagtaagtgagcagttcatagaagcaagtgttattttactctaattgtgtttattactcaaaaattaatgtattacctacacttcatatggtccttcaatgtactcctattttcttgggcactagatagagttttactaaacaaggcttcacaaagtaacactaatcagatgtcacttgacctatcaaaccatgctataatatccattttcaaagaactgattcccattatrgagccacagatacagcagaaaaggtttgctctccttgtttctaggtatatccaacacaggcccaaatgactgggtattcttctggctaagtgcagccctattatcttgaaatttaacatagccagtgtcatgttagcactgctgttggtgcaaaatatcacccatcttcctctgtctcttagcaaccacttcccactttttttcttgctgtcaaagtctttctcctttctctccatatctgcagcccacaaagagcttttaaaaacacttgcacatgctagaattgaatcaattttgttc

SEQ ID NO: 82195 - DNA, 600 bp, Chicken  19866894376598_1
ccacacagcccccaactgtttatttccagaagagacaccttcctatgaagatcaaaaccatcctacctgctaaagctgagcccacacgccaggagctttcagtgcattcaggaagtcgatgcacacgagggctcagcaaggttgaacaatgtgcattcaacaaaggaaacaccatttcagtgggtaagggtttccttgagctcagatattcatgtcagaaagcgtaacgagaaatagagctggtacttatttaagacagacgcagcatatttcatggtataaagtgttatgaaatcagtwtgacattaatagccaagctttccagaaatagcaaatgtgcacagtagcttctaaggtgtgtgctgccataacgactccagtgcagaaatgtggaagctgtcagatttcataaaaacgctccatgtttcctcacacagagctctgtcagagctgactgatggcacaaagaaagaagcagcaagaatgggaatttatccacgcggccaaatccactaaagcgacaaggaaaggaggctgggtccaagccgcaggagctatgaaagaaggggggacgctatttagttgctctgctctcccagc

SEQ ID NO: 82196 - DNA, 600 bp, Chicken  19866894376610_1
aagtcaagcaaggtgcttagctgtaatcttactcattgtttctgggagttcttaacaagtgccttataggcagatatgaaaatgacatatttttcctaaaagaattagaattttaagtcttctgagggttcgtattattattaaaatgacaggaggaaattgagtgaatacatgataaagcttgagtttgaagttgcatattctaatttatgaaagattcttctcattgcctcagctttatagagattaattataaagtcattttctgtgttcctgggcatacataaatttccaggcatytttctgtcacaaagaaaaaataagaacattagttaatgcaatccagaacaatctgcatatcaaatcaatcaaacatttgctttaagggacatactttgatagttatttacatgttgtattcaagaagtttctgaaagtcattctgaagctttgttgtaggtgaaagtaaatgtaacaaatgataaattgaaattataattgttcatttgtgttcctaaaggaaataaagacaaattttctttagattgcattcacactttaataaatgtatatatattcatatttcaggaggcagtatga

SEQ ID NO: 82197 - DNA, 600 bp, Chicken  19866894376610_2
tgtcacaaagaaaaaataagaacattagttaatgcaatccagaacaatctgcatatcaaatcaatcaaacatttgctttaagggacatactttgatagttatttacatgttgtattcaagaagtttctgaaagtcattctgaagctttgttgtaggtgaaagtaaatgtaacaaatgataaattgaaattataattgttcatttgtgttcctaaaggaaataaagacaaattttctttagattgcattcacactttaataaatgtatatatattcatatttcaggaggcagtatgaagcwatttatattcaaatacatttattattaaatttggacggctaccaatccattcaagagttgcatttaaattataaatgtgtttcatgaaataaagagaagtctgtatctatgcactcccatttccattaccccctaatttagtatatttcctgtgatttctaagagaaaacattwgcttaagtagcttaatgtagttaagttctcctaaaagaaggtaaaaactcacatttaaaggaagaagataaatatttctctgagttttatagcccgtgtaagagtttcaaagtttgttgctctgta

SEQ ID NO: 82198 - DNA, 600 bp, Chicken  19866894376610_3
atgataaattgaaattataattgttcatttgtgttcctaaaggaaataaagacaaattttctttagattgcattcacactttaataaatgtatatatattcatatttcaggaggcagtatgaagcwatttatattcaaatacatttattattaaatttggacggctaccaatccattcaagagttgcatttaaattataaatgtgtttcatgaaataaagagaagtctgtatctatgcactcccatttccattaccccctaatttagtatatttcctgtgatttctaagagaaaacattwgcttaagtagcttaatgtagttaagttctcctaaaagaaggtaaaaactcacatttaaaggaagaagataaatatttctctgagttttatagcccgtgtaagagtttcaaagtttgttgctctgtaatgtattatatatacactgtgaatcaataatgcaatagctagttaggctcatcataattgttaattccctgtgtatttcccactggatatgtttcaggtcttactgttgttgctttctattctagttggatgtgaaatagttattgacttcctttcatcactgatgaagttgca

SEQ ID NO: 82199 - DNA, 600 bp, Chicken  19866894376613_1
taacataagcattttaaagtaacatttcaattctttgactatgatctctatcagctacagcttatttccattttttcctcattttcagtatgcgctaccatgccatcagctcatggggttataagaaactactatttcatcaaggctctatagcttctgaaatgtcttgagacttgaatgtgttcaagaagtcctgagacttgaacattaccaagaaaccattaggttaaacactaattaaaacagcaaaagaattgcttctccccttgtgctacttataagcagcaacctgtagtactrctagttggaactgctcatgtaaaagtctgactgctattgctttagaggctacactgtagaaacatccattatttctcatcatttgccttttttaagctacagttgcataacataagtatttccttgcttatccttatgctattctagggctcaagaacaggttgagctccccatttctcttctttgctgcttctatccaagggacaattctagttcctacccatcaaacatctttcacaaacggaggtccttacagttggtgaagcctccaatcttaaataattccttgctaaacctgag

SEQ ID NO: 82200 - DNA, 599 bp, Chicken  19866894376615_1
  misc_feature (1)..(122): n is any nucleotide
nnnnnnnnnnnnnnnnnnnnnnnnnnnnnnnnnnnnnnnnnnnnnnnnnnnnnnnnnnnnnnnnnnnnnnnnnnnnnnnnnnnnnnnnnnnnnnnnnnnnnnnnnnnnnnnnnnnnnnnnnncttgccttggaagtctccagggacaggacatccaccatatctctaggcaacctgtgccagtgcctctctaccctcactgtaaaagattttttccttatatctaacttaaatctaccctcatttagtctgaaaccatttccccttagcctatcactgcagaccctgctgaagagtctgycctattctttccttagttcccctttagatactgaaaggcctctataaggtcacctcagagccttcttttctccaggctgaacagtctcagccctctcagcctgttctcataggagaggtgttccatctcttggatcatttatgtgaccctccttgtcttgggtgccttatcataccctgccaaataactcatcatgctgggggtctgtgcctcccacacaacctgagagccaggtaaaatgggaaatttgcttcctccatttgagaaattactcaygtgaaaggaacagagcactcagt

SEQ ID NO: 82201 - DNA, 600 bp, Chicken  19866894376615_2
tgcagaccctgctgaagagtctgycctattctttccttagttcccctttagatactgaaaggcctctataaggtcacctcagagccttcttttctccaggctgaacagtctcagccctctcagcctgttctcataggagaggtgttccatctcttggatcatttatgtgaccctccttgtcttgggtgccttatcataccctgccaaataactcatcatgctgggggtctgtgcctcccacacaacctgagagccaggtaaaatgggaaatttgcttcctccatttgagaaattactcaygtgaaaggaacagagcactcagtctcttctagccttagtctgcaagggacacgctgtttctggcttccaagcaccaggtctgcaaagtcatcttgaggaaataactscccactgacagaagagatggkattaatctgattcagctgagcggtctttaagtgagatatatgagtctgaatagttaccccaggcttcctttaatgtcagtgaagggaaacaaatgaaagcaattgcaccatgaattcaacaagtcaatctccagaagtacctttttctctccattaatattaaccaggagtc

SEQ ID NO: 82202 - DNA, 600 bp, Chicken  19866894376615_3
gtctcagccctctcagcctgttctcataggagaggtgttccatctcttggatcatttatgtgaccctccttgtcttgggtgccttatcataccctgccaaataactcatcatgctgggggtctgtgcctcccacacaacctgagagccaggtaaaatgggaaatttgcttcctccatttgagaaattactcaygtgaaaggaacagagcactcagtctcttctagccttagtctgcaagggacacgctgtttctggcttccaagcaccaggtctgcaaagtcatcttgaggaaataactscccactgacagaagagatggkattaatctgattcagctgagcggtctttaagtgagatatatgagtctgaatagttaccccaggcttcctttaatgtcagtgaagggaaacaaatgaaagcaattgcaccatgaattcaacaagtcaatctccagaagtacctttttctctccattaatattaaccaggagtctaggatgagtggttgtggttttgacatccagctgtaagaggtccaaagttaaggtaagtgaatccaaccccaaaagaccacttggatgttacagaacccatcacaag

SEQ ID NO: 82203 - DNA, 600 bp, Chicken  19866894376615_4
tctcataggagaggtgttccatctcttggatcatttatgtgaccctccttgtcttgggtgccttatcataccctgccaaataactcatcatgctgggggtctgtgcctcccacacaacctgagagccaggtaaaatgggaaatttgcttcctccatttgagaaattactcaygtgaaaggaacagagcactcagtctcttctagccttagtctgcaagggacacgctgtttctggcttccaagcaccaggtctgcaaagtcatcttgaggaaataactscccactgacagaagagatggkattaatctgattcagctgagcggtctttaagtgagatatatgagtctgaatagttaccccaggcttcctttaatgtcagtgaagggaaacaaatgaaagcaattgcaccatgaattcaacaagtcaatctccagaagtacctttttctctccattaatattaaccaggagtctaggatgagtggttgtggttttgacatccagctgtaagaggtccaaagttaaggtaagtgaatccaaccccaaaagaccacttggatgttacagaacccatcacaaggactccttcccacagagtgtc

SEQ ID NO: 82204 - DNA, 600 bp, Chicken  19866894376617_1
caggaggaaaaaaaaaagtagccaaatgagttgccaataatcacattggaagaaaaaaaaaatgcagtcttgcaggtgtgactgacttggcactcagaagtgcagcagtcactgactaagacaaaactatgttaaggaatggaatcatactgcgattcatgtaaagatattttgtaagatttcattggtatagaggagtgtcatggatcaaataaaccctcaataatagaacgtttggatactgtagtgattaggaacattcaagttagttgatttaaaaataaaaaaaataataataawaaagtttccattctgctctgtccacaggagtattctcctcatagaatacctaaagcacatttgtagtggccgcataagagaatactgtctgtttgaatcacagaaagatggctcaaaaggaccttaaagaccatacagttccaagccccttccatatacagggttgccacccatctgctcaggctgcccagtgccctatccaacctgaccttgacagctccagcgatggggcatccacatgttctccaggcagcctgctccactatcacaccatgcttttcctgagaaccattacccctt

SEQ ID NO: 82205 - DNA, 600 bp, Chicken  19866894376617_2
ggtatccctatgagtagagagccctctgatcatccttgtgtcctcctctggaccttgtccaacaactccatgtttttcttgtagctaggggccctaggccaggatgcagtactgcagctggggcctcatgagggcagagcagagagggactgtcacttccttctctctgctggccacccttctttttgtgcagcgcagggaatggtatggttgaaccatgggttcactggaagaaaatgaaaagccgtgtcattttgtcccatgtcaagcctgacagtctttaacatcaatggcttcaartagtgrgaacatcaacctgctttctttgtgtatgcttgagaagtaaattctcccaaaattaaaaataaaaataaaaaaaatcctggcatggtgttagcttgcaactgactatgaggctgagatagtagaaaaaattgaatacacttttaggcaagataggtcattttgctctgtgatgccattcaaagaaagtgattctatctgctgatcttgtgatgggatctatagaaatgtatagcttgacttctggaagaagctgtggcagcttgtaagtggtgtctttgaaatggaggccagaac

SEQ ID NO: 82206 - DNA, 600 bp, Chicken  19866894376617_3
cctatgagtagagagccctctgatcatccttgtgtcctcctctggaccttgtccaacaactccatgtttttcttgtagctaggggccctaggccaggatgcagtactgcagctggggcctcatgagggcagagcagagagggactgtcacttccttctctctgctggccacccttctttttgtgcagcgcagggaatggtatggttgaaccatgggttcactggaagaaaatgaaaagccgtgtcattttgtcccatgtcaagcctgacagtctttaacatcaatggcttcaartagtgrgaacatcaacctgctttctttgtgtatgcttgagaagtaaattctcccaaaattaaaaataaaaataaaaaaaatcctggcatggtgttagcttgcaactgactatgaggctgagatagtagaaaaaattgaatacacttttaggcaagataggtcattttgctctgtgatgccattcaaagaaagtgattctatctgctgatcttgtgatgggatctatagaaatgtatagcttgacttctggaagaagctgtggcagcttgtaagtggtgtctttgaaatggaggccagaacaggcaa

SEQ ID NO: 82207 - DNA, 600 bp, Chicken  19866894376637_1
tacctatactatataaaatgaatagttccttctctactgagcacagagcaactgattagtttcctgctctccacacacacatttgcaatgaaatttgacacaactgacagcaatattaaccagtatgctatttaacatgaaatagagtataaattgtaatgttgaaatgtagtacagaaaagaaagcaattgggtactgattgactcatccacttaagctattaaaatttgtgtgaatttttttttccatcttttaatttcattttgctagataatgaaactttggtctttgcttcttcyttacacactgcagtccaatttctttgagattttaaatatctcctgctaataacaatgagcagataattttccttttcacatctgtagcatttataacagaatgtttttatctcagtctgtcatgcttattctacagcagcagaactgataatttgacaaacagtccacattgttactgcatgattctaaagaggaagtttactgaaattgtttaagccattaactgaatctaatttagaaacaacttttcaaacatggcgatttattaacttttcaaaagttgaaattttctctgaggtg

SEQ ID NO: 82208 - DNA, 600 bp, Chicken  19866894376639_1
taccctaactctaacaaccctccgctaaatcatgtccctgagcaccacatccaaaccgtttttaaacacatccagggatggtgactcaaccacctccctggggagcctattccagtgcttaacaaccctttctgtaaagaagtttttcctgatatccaacctaaacttaccctggtgcaacttgaggccattcccctcatcctgtcacctgtcaccagtgagaagagaccaatcccgctctcactgtaggcacctttcagatattggaaaagagcaataaggtctcccctcagcctcctyttccccasactaaacagccccagttccttcagtctctccttgtagggcatattctcccttggccctattgaaactcatagagtttacmttggcccatygatccagtctatccaggtcatatcattttatatatcattaatatatatcatttaatatatcattttcttgcctgctctctgcctccagaattcagaatgctggagcatatactgacataaagctcatgttttcactcagtctgtaacacagggtttgaaaggccccatttgctgaatacactagagacaaaaccctgggaaa

SEQ ID NO: 82209 - DNA, 600 bp, Chicken  19866894376639_2
ctctaacaaccctccgctaaatcatgtccctgagcaccacatccaaaccgtttttaaacacatccagggatggtgactcaaccacctccctggggagcctattccagtgcttaacaaccctttctgtaaagaagtttttcctgatatccaacctaaacttaccctggtgcaacttgaggccattcccctcatcctgtcacctgtcaccagtgagaagagaccaatcccgctctcactgtaggcacctttcagatattggaaaagagcaataaggtctcccctcagcctcctyttccccasactaaacagccccagttccttcagtctctccttgtagggcatattctcccttggccctattgaaactcatagagtttacmttggcccatygatccagtctatccaggtcatatcattttatatatcattaatatatatcatttaatatatcattttcttgcctgctctctgcctccagaattcagaatgctggagcatatactgacataaagctcatgttttcactcagtctgtaacacagggtttgaaaggccccatttgctgaatacactagagacaaaaccctgggaaatgcatggt

SEQ ID NO: 82210 - DNA, 583 bp, Chicken  19866894376639_3
accacctccctggggagcctattccagtgcttaacaaccctttctgtaaagaagtttttcctgatatccaacctaaacttaccctggtgcaacttgaggccattcccctcatcctgtcacctgtcaccagtgagaagagaccaatcccgctctcactgtaggcacctttcagatattggaaaagagcaataaggtctcccctcagcctcctyttccccasactaaacagccccagttccttcagtctctccttgtagggcatattctcccttggccctattgaaactcatagagtttacmttggcccatygatccagtctatccaggtcatatcattttatatatcattaatatatatcatttaatatatcattttcttgcctgctctctgcctccagaattcagaatgctggagcatatactgacataaagctcatgttttcactcagtctgtaacacagggtttgaaaggccccatttgctgaatacactagagacaaaaccctgggaaatgcatggtgctacgacctcggtcagagccctccagcacaaaaaaaaaaccctcagcagatggactcaaatc

SEQ ID NO: 82211 - DNA, 573 bp, Chicken  19866894376639_4
tggggagcctattccagtgcttaacaaccctttctgtaaagaagtttttcctgatatccaacctaaacttaccctggtgcaacttgaggccattcccctcatcctgtcacctgtcaccagtgagaagagaccaatcccgctctcactgtaggcacctttcagatattggaaaagagcaataaggtctcccctcagcctcctyttccccasactaaacagccccagttccttcagtctctccttgtagggcatattctcccttggccctattgaaactcatagagtttacmttggcccatygatccagtctatccaggtcatatcattttatatatcattaatatatatcatttaatatatcattttcttgcctgctctctgcctccagaattcagaatgctggagcatatactgacataaagctcatgttttcactcagtctgtaacacagggtttgaaaggccccatttgctgaatacactagagacaaaaccctgggaaatgcatggtgctacgacctcggtcagagccctccagcacaaaaaaaaaaccctcagcagatggactcaaatc

SEQ ID NO: 82212 - DNA, 600 bp, Chicken  19866894376642_1
actgtgcctggtatccgatgccttctggcatgaaatatgcctgctgcctgattctcctgggcctgctacctgagacctgcctgcctctcctagagccgctgttggttgcctaccatctacctgcttgctgccaaaggccagccggtttgccaccaccttcccctgcacccttattcctgcatcagccttggactgttggaatggcacacaatgggacactgctgcatccttggtggtgattatcccactttacagaattcttgctctttttctatctttcctatcacccgccttctcttycccatagctgtaattagtaataatcaccagcctgtcccttcccttatttaattagataataaactggacagaaaacatttgacctcacttgtgtctcagtctcactcagagtgtatcaaagaatctcctctctcgctccaataatcagagcaagacagatgaaatttggaaacagttcagacagatattgcaagtaggacatcccatcagctgtgtgatcttctgaacaacactcaaagtgaacgttgaatcaaaccaaacaaatgtgaaatacagggtttttaaaatttggctagctaa

SEQ ID NO: 82213 - DNA, 599 bp, Chicken  19866894376650_1
  misc_feature (1)..(121): n is any nucleotide
nnnnnnnnnnnnnnnnnnnnnnnnnnnnnnnnnnnnnnnnnnnnnnnnnnnnnnnnnnnnnnnnnnnnnnnnnnnnnnnnnnnnnnnnnnnnnnnnnnnnnnnnnnnnnnnnnnnnnnnnnatacacaatgtgaaacagtgttttctttgagtttcagcttgctactgctacctgctacattaaatgaatattctctgtcactgtagaacagggtgatgcttccaatctacacttctctgactcactttgtagttttaagttttgttgtcactgccttttcatttatctgctttctaaartaaacaatcatagtctttttaaatctctcatcacaaaggagattttaagggccttcatttttattctgcctgtgactgatcctgcttcagcaatatgctgattgagrcaaagcagtcaaaacagtaattgtattccagctttgactgcaggaaaggtattacaaataaacacaccaaagaggaaattgtctaattctaagactgytctgtaaagtaacttgtctatrcacttactgttcctcttgaagcactggtgttaatgacatgctcatcttttcactctgtctttattgcctatt

SEQ ID NO: 82214 - DNA, 599 bp, Chicken  19866894376650_2
  misc_feature (1)..(14): n is any nucleotide
nnnnnnnnnnnnnnatacacaatgtgaaacagtgttttctttgagtttcagcttgctactgctacctgctacattaaatgaatattctctgtcactgtagaacagggtgatgcttccaatctacacttctctgactcactttgtagttttaagttttgttgtcactgccttttcatttatctgctttctaaartaaacaatcatagtctttttaaatctctcatcacaaaggagattttaagggccttcatttttattctgcctgtgactgatcctgcttcagcaatatgctgattgagrcaaagcagtcaaaacagtaattgtattccagctttgactgcaggaaaggtattacaaataaacacaccaaagaggaaattgtctaattctaagactgytctgtaaagtaacttgtctatrcacttactgttcctcttgaagcactggtgttaatgacatgctcatcttttcactctgtctttattgcctattcctggcaaaattggactgcaggtagattgatagacaccagtttacttcactttgagagtttgatacagaaaaaaagaattacagtcttggttggtagaggcaagtga

SEQ ID NO: 82215 - DNA, 600 bp, Chicken  19866894376650_3
agaacagggtgatgcttccaatctacacttctctgactcactttgtagttttaagttttgttgtcactgccttttcatttatctgctttctaaartaaacaatcatagtctttttaaatctctcatcacaaaggagattttaagggccttcatttttattctgcctgtgactgatcctgcttcagcaatatgctgattgagrcaaagcagtcaaaacagtaattgtattccagctttgactgcaggaaaggtattacaaataaacacaccaaagaggaaattgtctaattctaagactgytctgtaaagtaacttgtctatrcacttactgttcctcttgaagcactggtgttaatgacatgctcatcttttcactctgtctttattgcctattcctggcaaaattggactgcaggtagattgatagacaccagtttacttcactttgagagtttgatacagaaaaaaagaattacagtcttggttggtagaggcaagtgaaagagcgcacacatgtgccatcgctgacttcatggccaactgccttttctcttcacaaagctctacaaaaacgtctgcctctaaaaggacagccctttg

SEQ ID NO: 82216 - DNA, 600 bp, Chicken  19866894376650_4
ctacacttctctgactcactttgtagttttaagttttgttgtcactgccttttcatttatctgctttctaaartaaacaatcatagtctttttaaatctctcatcacaaaggagattttaagggccttcatttttattctgcctgtgactgatcctgcttcagcaatatgctgattgagrcaaagcagtcaaaacagtaattgtattccagctttgactgcaggaaaggtattacaaataaacacaccaaagaggaaattgtctaattctaagactgytctgtaaagtaacttgtctatrcacttactgttcctcttgaagcactggtgttaatgacatgctcatcttttcactctgtctttattgcctattcctggcaaaattggactgcaggtagattgatagacaccagtttacttcactttgagagtttgatacagaaaaaaagaattacagtcttggttggtagaggcaagtgaaagagcgcacacatgtgccatcgctgacttcatggccaactgccttttctcttcacaaagctctacaaaaacgtctgcctctaaaaggacagccctttgttaggctggggtttgacaactc

SEQ ID NO: 82217 - DNA, 600 bp, Chicken  19866894376651_1
aaggcgtcaaatccttatgcttggtagtgagaatctaaatacctgtgactgaggttttgcaggtatttccttactgctttatcaaaaaagctggaaaaacagtaaagaactaagaaagtcctagaacagataacatggctgcagaaaaccccttcacagtgcaagtgaagtaaaaagctagctccagagtggttgttatgtccagatcaaaaacattttagtacatggcaaggcccttttgctacacaactgtaaagcaaaagtaaaattgttctattattaaagaaaggacaaaaaaamccaatgaaatgtcacaaaaaacattcataaaaacacacacagacaatattgtcactaacaagactcctagaacttgtactgagttggactaccttaacggaacaacagcggttctccccccataaatgtatgaacgaccaattgcaattcttatgcaagtactacagatgtaaggaagagattaacagataaggactacagcaaagaaacaaacatacgtaacacatgaagttttgcactaaaacaaggtaagaataaacactagcgcatttgataatggaggagtggaaagtggttttc

SEQ ID NO: 82218 - DNA, 600 bp, Chicken  19866894376652_1
ttttttttccattttgtacgacaaagacccacaggaatggatgctgctgtcatgctgaagaaaaaataaatgcaacaatggttaacaggagatgggaaagaaatacagatgaaaaccaaaggaaaagagaaaaaagttgtccattacaggaataacacactggaaaaggatatgcatgaagatcaactgggaaagaaactacaaaacaggacagacatcccattgtaagaaatagatgcacatattgttgtcatatgacaatttctctttctaagctttagcattctaatcactgctctraagtaagcagaacaaatacacttaaaagcagccttacttyacaagtcttccaagattaagttttaaaaatagatcaaaaatcaatattaaaacttycaaaatatcaaaaggctttcattcatgatatatttcagaatgaaatcagagctccacctgaaaaaacaccagttttatctcctttttctagggcaaaaagcaattatttgatactcatttcccactaacagttttccaactcaaatacaatctaccttgtcttctacaaaaatatttttacgtgcaccctgccaaccactccct

SEQ ID NO: 82219 - DNA, 600 bp, Chicken  19866894376652_2
atgctgctgtcatgctgaagaaaaaataaatgcaacaatggttaacaggagatgggaaagaaatacagatgaaaaccaaaggaaaagagaaaaaagttgtccattacaggaataacacactggaaaaggatatgcatgaagatcaactgggaaagaaactacaaaacaggacagacatcccattgtaagaaatagatgcacatattgttgtcatatgacaatttctctttctaagctttagcattctaatcactgctctraagtaagcagaacaaatacacttaaaagcagccttacttyacaagtcttccaagattaagttttaaaaatagatcaaaaatcaatattaaaacttycaaaatatcaaaaggctttcattcatgatatatttcagaatgaaatcagagctccacctgaaaaaacaccagttttatctcctttttctagggcaaaaagcaattatttgatactcatttcccactaacagttttccaactcaaatacaatctaccttgtcttctacaaaaatatttttacgtgcaccctgccaaccactccctttctcaagggagattaaagcttgtcagcactgccattcta

SEQ ID NO: 82220 - DNA, 600 bp, Chicken  19866894376652_3
aaagaaatacagatgaaaaccaaaggaaaagagaaaaaagttgtccattacaggaataacacactggaaaaggatatgcatgaagatcaactgggaaagaaactacaaaacaggacagacatcccattgtaagaaatagatgcacatattgttgtcatatgacaatttctctttctaagctttagcattctaatcactgctctraagtaagcagaacaaatacacttaaaagcagccttacttyacaagtcttccaagattaagttttaaaaatagatcaaaaatcaatattaaaacttycaaaatatcaaaaggctttcattcatgatatatttcagaatgaaatcagagctccacctgaaaaaacaccagttttatctcctttttctagggcaaaaagcaattatttgatactcatttcccactaacagttttccaactcaaatacaatctaccttgtcttctacaaaaatatttttacgtgcaccctgccaaccactccctttctcaagggagattaaagcttgtcagcactgccattctacacagccaacaattgattatactcacaacaacaattcccactataattagcttccc

SEQ ID NO: 82221 - DNA, 600 bp, Chicken  19866894376652_4
ctccctttctcaagggagattaaagcttgtcagcactgccattctacacagccaacaattgattatactcacaacaacaattcccactataattagcttcccttaaattagccccataaacctgacatatactgcactttacacctcagatggagaaggcaacctgaaaagcagttcatgtggccaaccaaactccattgctacatttgaaacctctgtaaaagtgcacagggctccaccacaaagataaacctgctaaagcccaagcacagcaagcaagaagagggaaggattttttartatatcttgacttgcaatagcaaaaaatctctattcatccctcttgtttactctgcagtgtgtttcagaagaacaattagaaccagaaaataaactttgcacggacaatggcgacttgtatattgtgaaaataaatgcctatagcacatgcaaacaacagacaatggtacaataccacgtcaatctccatcgaaaagatcactgaaaattctgggttcacgtctaaaayggacaactgcatttgataaatgacgaaaagcagtctatcgaaaagagcattatgcaaactatgaacagcaa

SEQ ID NO: 82222 - DNA, 600 bp, Chicken  19866894376652_5
agggctccaccacaaagataaacctgctaaagcccaagcacagcaagcaagaagagggaaggattttttartatatcttgacttgcaatagcaaaaaatctctattcatccctcttgtttactctgcagtgtgtttcagaagaacaattagaaccagaaaataaactttgcacggacaatggcgacttgtatattgtgaaaataaatgcctatagcacatgcaaacaacagacaatggtacaataccacgtcaatctccatcgaaaagatcactgaaaattctgggttcacgtctaaaayggacaactgcatttgataaatgacgaaaagcagtctatcgaaaagagcattatgcaaactatgaacagcaattttgctcatccaacactcctccggccaaactgaatccggaacacagcaattgtcttcaaaaggcatttttaactgttcatacaagttcaggaaggtttttcaatgcatccagcaattgcaacatgtacatgcctttcagtattgactgctagctagcttacctgcatattagaacatggttatgcatacatgcaacaagacatgagaaaacgataccaggacgggtaa

SEQ ID NO: 82223 - DNA, 600 bp, Chicken  19866894376653_1
aggaatatacagatggtactttcacagcacataaaaaaaggcttccagaggaagaacatcttggtctcttaggtaaggtatttagaattacgataaagatttatcagagaaaagtatcaattctactgactggccaataatgccctttcacctcctccctccttggtgctcccttcctcctacagacactgatgcctgtagcttcctccaaaaggcacctcaggatgtatgcaaagttcttaaaggcaatgctgtggtcatccccaacttgcctgtgggagtatgccatggtcttcaaargatagacctgagttacaaagccagactaggcaattctacccctgcttataagctggctacttctgacacagtttgggagcaagtttgagattggtactaatgtctgcaggtccctttccaaagggaggaactgtcctgtttacacagggccttcatgggaggtgaacagtccatttgcagctaggatgccatgagatttgggccatgtagcagggacctggcttgtggccagacaagctcaggggcagttaaattacaatgggaaaagcaggcagccattcctatgagctcgtgctgatt

SEQ ID NO: 82224 - DNA, 600 bp, Chicken  19866894376655_1
agcactgcagtgatgttctgttacatacattattaatgtaacttattcagatcaatcttttttatcctgagtgatgaatccaagctccaagtcaccaaatggctagtttaggttcgtaaggtcaaagggaaatgcagaagaagagacagaaggtggagttttccaggccctgcaggtcaggaaaaagcttagaagtgacctgcagccatgcagggtaggatgctgtcctcctgctccaacttagagcctcactcaaccctagagctgtaaaacagcagcatgcttctgccatcatttcayagcaactgtttactttttgygcaggaaagcaacgccgtctctgatcctggctgcattttagatactataaacttcaattcatcacccatgggaagggtctgagatgcattgctccttgtaactcactctctccctacctctcattacagagtcacattttctacgcaggctgccatcttagggtgtttttctaactttattattggataggtttcttgctctccactcatgcaataccccctgtgctttgcagttgcaatttaatttccttccgatcaccgattttcctgtgtttatatt

SEQ ID NO: 82225 - DNA, 600 bp, Chicken  19866894376655_2
ttacatacattattaatgtaacttattcagatcaatcttttttatcctgagtgatgaatccaagctccaagtcaccaaatggctagtttaggttcgtaaggtcaaagggaaatgcagaagaagagacagaaggtggagttttccaggccctgcaggtcaggaaaaagcttagaagtgacctgcagccatgcagggtaggatgctgtcctcctgctccaacttagagcctcactcaaccctagagctgtaaaacagcagcatgcttctgccatcatttcayagcaactgtttactttttgygcaggaaagcaacgccgtctctgatcctggctgcattttagatactataaacttcaattcatcacccatgggaagggtctgagatgcattgctccttgtaactcactctctccctacctctcattacagagtcacattttctacgcaggctgccatcttagggtgtttttctaactttattattggataggtttcttgctctccactcatgcaataccccctgtgctttgcagttgcaatttaatttccttccgatcaccgattttcctgtgtttatatttcatcctgtgccccgtagct

SEQ ID NO: 82226 - DNA, 600 bp, Chicken  19866894376662_1
gttaagcccttaaaaacacttctgggttgaatgataatgcttaaaatcctgtgattccattccagtggaaagtgaatgaagggtgtgaaatgattctgattccaggagaaccgagatagccgtagtcatagggatgataggaatgtcgttctggagaggtgactcagtcttatttgtaggaatcattttgctcatgtgggttatactgtgtgctctgcagatgtctcttgatttcctcctcatgcatggtgtgagccatggttgaggtgggtatgtgaatcctgctgctggactctgccrgtgccgtccagtgtgggctctgatcactgatgcagactcgaacattatttttttttctggataactgctggtgtgctgatgcagctctttctggctatgtttctaaaactgcgtttcagggatagctaaagattgaagctctgctagacattgttgaaatataaatgaaatgacaaaaacccagggcatcttactgagcttcatggagctctgctgtaattctccctgctgcacctgccttcctcggtccccgtgtcacatcttcctgcagcaggtagctttcggatgctggcatctttg

SEQ ID NO: 82227 - DNA, 600 bp, Chicken  19866894376673_1
aaactagaaagtgtaagaatttcactcctgaaatttgtcgctgtcatgttccttcccactgggtgacagagccgatcattctcctgctcgtctctcctcctcctcctctcctttttggtgcatcttccagaaccttcatcagttttcagcctcatttcagagccctagaaaagcacaaagcttgcctgcaaagctgcaccctgcagaagtcagaggtgataaactgaacaagcagcaccagagcgtgctgaatggcagtgtaagtgctcactgcaagaggcaacgcattcttagcactcygcatttaaaccttaagagatgaaggtggctaagccaatatttattttaattcccttcttaagtgtcctcctaacacagccgtgacagagctgagaaagcttctcagattaacagagtagggccaaattaatgctaggggattctgcaggtggctctttgagcacgttgtgtgcagcaatccttgtcaagacacacacttggaggtgcttgggtgtctctgagtggccacaacacccgtgcaggccacacagccccactcagtgcttccttctgcctgtcacctcctggcccgggtcttcc

SEQ ID NO: 82228 - DNA, 600 bp, Chicken  19866894376675_1
gggccctcttggtgaaatcatgtctattatcatttcctacatcatcttatactcttttttcttgtgtctgtttctcccagacaaacctcatttttattatgttgtttggttaaattatattgtcttcactgcagtcatttctttagagcattcaagctgggtttacatagagatcttatttaagaataatagtttagagtgaggagcttgggaagataatttactaaatttcctcagtaaatcacagttttgactagacctaggccaaccctgaccaagacaatttagaactgatttggratacgtctccgttattcaaagaaagctgctataaatgtatacttggatggattttctgtwgctcttgcaagtctggactccgttttatggagttcacatttcttcagttgtgaaaacagaagaacatgatctagtatttaccttactccttcacatgccaaacatctcaaattgaaataatctctgtattgtaatgactcattcagtcagagaaacttaatgtacttcattcacatgaatgttttaaccatcataacactcctgtgaactcatcaggtattattgaccaccgctggatgt

SEQ ID NO: 82229 - DNA, 600 bp, Chicken  19866894376675_2
cttgtgtctgtttctcccagacaaacctcatttttattatgttgtttggttaaattatattgtcttcactgcagtcatttctttagagcattcaagctgggtttacatagagatcttatttaagaataatagtttagagtgaggagcttgggaagataatttactaaatttcctcagtaaatcacagttttgactagacctaggccaaccctgaccaagacaatttagaactgatttggratacgtctccgttattcaaagaaagctgctataaatgtatacttggatggattttctgtwgctcttgcaagtctggactccgttttatggagttcacatttcttcagttgtgaaaacagaagaacatgatctagtatttaccttactccttcacatgccaaacatctcaaattgaaataatctctgtattgtaatgactcattcagtcagagaaacttaatgtacttcattcacatgaatgttttaaccatcataacactcctgtgaactcatcaggtattattgaccaccgctggatgttggccatcctgccagtgtcgcctaggaaatttggcagacttggcagtgcatcttcggaat

SEQ ID NO: 82230 - DNA, 600 bp, Chicken  19866894376676_1
ttatcagcctctgtgagccttctttgagaagactttaagggttttacccttgaattttactagtgcacatatgcacttttgcccagggaagatagcgttcatcagactgtatcctcaactggaattaatcaagcccagcaaagtttttacactagtggagacactgggcaatggtcattagaaattggatgcagtaatctacacaaagggctctgtgggggccaatggcaaatatcccattggctttcccagagctcagactttgccgaaatgggtgtacgccctccttttagggccacrgataccctacagctgttagcaggttaatgaaagcaccatccttaagctgctataaaacacatttgtggtcatgcatgcagctcttgggacaggttttatctgttctcattgttcactgtgtgttttagcacaaagcctcaggacacagcttggctgccgtacagcattttgtataaagctgacccttaagccaaccacagctaagacgctataattttcatagagacatcatgtactttttatgctccttaactcgactgcagtcacaaatccctctttgtattggcagctcctgtgaaa

SEQ ID NO: 82231 - DNA, 600 bp, Chicken  19866894376683_1
cgctgctgatttttagtgttttctataaagatcagtaataatattctattagagtgatgagaccagaattaatttaaataactctgtgcccgattcatgaagaacaacaacaaaaaaatgcctccacagtcaggggccattatttctgtgttttttctatggaaaagtcatggtctgcattcaacttccagttcaaaaagagaagtttccaatttatacagatggggttttatcgtcacaatcagttccagaggaatgacttaactactaaaaggaaacccccctccattgtctagttcrgaaatacaccaacccctcaccaaaattcaaacagactttccttccagaagttatttaactgtcccccgctgcaagtgcaggcagaaagaagagtaaaatggacacacaaaagaaaactttttcatagggcgtattaaatggccctttgttttycagacatcagcgtcatttccattcttgattaaacacaaatgctaaaaagcttttgaaaacatgaatctaactaaaggtaggaatggatataagacacagatatgcgctgtgctcctgtaaygttcagaagtgttttctgtccaacag

SEQ ID NO: 82232 - DNA, 600 bp, Chicken  19866894376683_2
tttctatggaaaagtcatggtctgcattcaacttccagttcaaaaagagaagtttccaatttatacagatggggttttatcgtcacaatcagttccagaggaatgacttaactactaaaaggaaacccccctccattgtctagttcrgaaatacaccaacccctcaccaaaattcaaacagactttccttccagaagttatttaactgtcccccgctgcaagtgcaggcagaaagaagagtaaaatggacacacaaaagaaaactttttcatagggcgtattaaatggccctttgttttycagacatcagcgtcatttccattcttgattaaacacaaatgctaaaaagcttttgaaaacatgaatctaactaaaggtaggaatggatataagacacagatatgcgctgtgctcctgtaaygttcagaagtgttttctgtccaacagcccatatttacgtgcttcctcacagcagatttctaagcaaactctacccgtgctgtaaacgatgctttcattctactcttttgctcatgcatatttttctcctgtcgtgaagaaaaagctgtgtaccttggagagatatcccaggcagctgag

SEQ ID NO: 82233 - DNA, 600 bp, Chicken  19866894376683_3
gaaacccccctccattgtctagttcrgaaatacaccaacccctcaccaaaattcaaacagactttccttccagaagttatttaactgtcccccgctgcaagtgcaggcagaaagaagagtaaaatggacacacaaaagaaaactttttcatagggcgtattaaatggccctttgttttycagacatcagcgtcatttccattcttgattaaacacaaatgctaaaaagcttttgaaaacatgaatctaactaaaggtaggaatggatataagacacagatatgcgctgtgctcctgtaaygttcagaagtgttttctgtccaacagcccatatttacgtgcttcctcacagcagatttctaagcaaactctacccgtgctgtaaacgatgctttcattctactcttttgctcatgcatatttttctcctgtcgtgaagaaaaagctgtgtaccttggagagatatcccaggcagctgagacaaatcgcatgtctagcacaactttatgaaagagcattggttcgacgaggtacacgggagagactgtgccctcacaaaatcagatgagtattgcctgctgcttaggctatttctgtgaag

SEQ ID NO: 82234 - DNA, 599 bp, Chicken  19866894376689_1
  misc_feature (1)..(39): n is any nucleotide
nnnnnnnnnnnnnnnnnnnnnnnnnnnnnnnnnnnnnnncatcattacccactgacagcaacgcagccagatgcttcccaattcattttagggacagagcttaaagtttcagcctatatacatcccctgccttacgggtcgttacttacagcttgctgcagccgctcctggaaaggcagaagaggcagtgaaagagtaggggaggaagacaaggggcagggactcaggggcagcagggatgagctttgggagctgcggatgatctcctgtggaggaattcagtagacactgagtgtttgsggattgttacttgttctgccaagtacctaaagcacgattggcttggttgctctccagcaatgttttctcgtctctctcctgggacttccaattccatggtgacagctggggctgtgctcgttaattgttttatggagggctgctcttccttacccagtgtaccacattcattacgatggaagaagtcttgtttccctcgtttctggattgtctcagtgggagttcaggctttgacaaagagaactaatttctccatattcaagaaagaaatggtcttaaggcatgaatatgcatctctg

SEQ ID NO: 82235 - DNA, 599 bp, Chicken  19866894376690_1
  misc_feature (1)..(80): n is any nucleotide
nnnnnnnnnnnnnnnnnnnnnnnnnnnnnnnnnnnnnnnnnnnnnnnnnnnnnnnnnnnnnnnnnnnnnnnnnnnnnnnnctaccctatgttggacattttaatagaagtgctatagtctggatgttgagtatgttaccatttcttctcctttctatataatccattcaatatgatatatgttggttgtaagtatcttaatatctttatacccatggaaaaacttccataaggatgattgatctaaaaactgataaccatttcagtccaaagacatattcattcccttcccccattataraagccttaaattatctttctttactagtgtaactgcagtgactcccattgaattggagtatcctgtctaaaaagtaataattaaataggagaaaaaggtgaacccttctcacattgcaccctaaaaatgtcaagagatatttctgaacagctcataattggtattccacatatttcctatgtcaaaagtttatgactagcataaagctcttctgtagtagttttttccagaacttaaatcacagttttgaagcataatagcataaatacaagatctgcttttttactatttgttctatg

SEQ ID NO: 82236 - DNA, 600 bp, Chicken  19866894376690_2
gccttaaattatctttctttactagtgtaactgcagtgactcccattgaattggagtatcctgtctaaaaagtaataattaaataggagaaaaaggtgaacccttctcacattgcaccctaaaaatgtcaagagatatttctgaacagctcataattggtattccacatatttcctatgtcaaaagtttatgactagcataaagctcttctgtagtagttttttccagaacttaaatcacagttttgaagcataatagcataaatacaagatctgcttttttactatttgttctatgctyatttattataagataaattatgagaaaaataaataaaatgatattcacagatacgcaaaaagtcagaaggaattatgctctttaagtcttytaaaagttttcttctcaacatgtatctgttttactggggaaacattaatgtaatttattcatgctgggagaaacctgcagctccaggatgctggacaccacctccctatcagtatcaaaaacctcattagagattaaagcatgtacatacactttcagctttaataacaattaaaaataaaattaattgctaaatcaggcttttcagga

SEQ ID NO: 82237 - DNA, 600 bp, Chicken  19866894376690_3
aaaggtgaacccttctcacattgcaccctaaaaatgtcaagagatatttctgaacagctcataattggtattccacatatttcctatgtcaaaagtttatgactagcataaagctcttctgtagtagttttttccagaacttaaatcacagttttgaagcataatagcataaatacaagatctgcttttttactatttgttctatgctyatttattataagataaattatgagaaaaataaataaaatgatattcacagatacgcaaaaagtcagaaggaattatgctctttaagtcttytaaaagttttcttctcaacatgtatctgttttactggggaaacattaatgtaatttattcatgctgggagaaacctgcagctccaggatgctggacaccacctccctatcagtatcaaaaacctcattagagattaaagcatgtacatacactttcagctttaataacaattaaaaataaaattaattgctaaatcaggcttttcaggaggtggaaggctgtaccacaactcagtcatttctattttatgggggggggtttgctttttaagtgatttatcagagcagcattttcagttca

SEQ ID NO: 82238 - DNA, 600 bp, Chicken  19866894376692_1
ctcagcaacacttcttttcagaaaggagaaaacccttctgttgtaaatccctgtatacaacacacttgtatcttaatctggcaagtagtacctatgtctcattgcatctctgaacgctataagctgctgaaaccaggaatgccgaaacaagcagaatgccagtacacaaatgcttgtaaagtgcactgaagctgaaaagcacagcatattattactgctaggagatgacccgcatttaaacaacacttggtgtctaataatttcatcactgaaaacaaattcctggcctccttgaaaggmtgctgaagtccttccattgacttcctcaccctttggatcmgatgattcaactgctcagcgggataaattggtggatgggaccaacagccagagagagatcagacagtgtgagaaaactgggggagattaccactaattaattagatacaatttatactatttaatttttcacttatttgttaccctttcaagaacttacactaattaatttctgtcttcaacaacatgcatagataggagcctgatgctttaacccttaagaaggagttctgcagggtgtgccatcgggaggaagcactg

SEQ ID NO: 82239 - DNA, 600 bp, Chicken  19866894376692_2
ttgtaaatccctgtatacaacacacttgtatcttaatctggcaagtagtacctatgtctcattgcatctctgaacgctataagctgctgaaaccaggaatgccgaaacaagcagaatgccagtacacaaatgcttgtaaagtgcactgaagctgaaaagcacagcatattattactgctaggagatgacccgcatttaaacaacacttggtgtctaataatttcatcactgaaaacaaattcctggcctccttgaaaggmtgctgaagtccttccattgacttcctcaccctttggatcmgatgattcaactgctcagcgggataaattggtggatgggaccaacagccagagagagatcagacagtgtgagaaaactgggggagattaccactaattaattagatacaatttatactatttaatttttcacttatttgttaccctttcaagaacttacactaattaatttctgtcttcaacaacatgcatagataggagcctgatgctttaacccttaagaaggagttctgcagggtgtgccatcgggaggaagcactgcctcaccccacgagcagctcttgcactgatatgcactgca

SEQ ID NO: 82240 - DNA, 600 bp, Chicken  19866894376698_1
cactcttcagatggagccagccagcacttactgtctttagaagtacagatttaaaattgtccattttaagcatcttgtcattgaacagagattttaagctaaatactccaggtcactctacactttacaacaaagtattttacttctaaagtatttgtcatgttttttatgggatatctttgttttctacccagaaacttcctggaattgtttgtttacaaaatcgagggtgtaatggtccatttggtgcttttggacacgaagcaggtagttagtcaactgtaacagctcccaaatccyagatgtgcctactaagcacatagaaaaaagagaacattggctctgtggcagaagttcattccagmgatcccttatcagaaatcccttcactacactgttctgagaactctgttcgtagtagaagacttttgttgaaaacaaactacttttgctctgcacaacgagccaccccttgacacgagcagtttctctctgtctttaaatatccccatttgaggaatggtattgataaggttatgaaaaatcaagcgtggaatctcccagacattttagatttcctggagggtttccggcaacact

SEQ ID NO: 82241 - DNA, 600 bp, Chicken  19866894376698_2
ttaagcatcttgtcattgaacagagattttaagctaaatactccaggtcactctacactttacaacaaagtattttacttctaaagtatttgtcatgttttttatgggatatctttgttttctacccagaaacttcctggaattgtttgtttacaaaatcgagggtgtaatggtccatttggtgcttttggacacgaagcaggtagttagtcaactgtaacagctcccaaatccyagatgtgcctactaagcacatagaaaaaagagaacattggctctgtggcagaagttcattccagmgatcccttatcagaaatcccttcactacactgttctgagaactctgttcgtagtagaagacttttgttgaaaacaaactacttttgctctgcacaacgagccaccccttgacacgagcagtttctctctgtctttaaatatccccatttgaggaatggtattgataaggttatgaaaaatcaagcgtggaatctcccagacattttagatttcctggagggtttccggcaacactcagcttgtctgtaccacatttgactccatggtatctgaacaccaagctgagtcagagggacttga

SEQ ID NO: 82242 - DNA, 600 bp, Chicken  19866894376710_1
cacatccagagagtcttgcataaaattcaaaaggggttactgtcaaacaaaaacatgcagtggacagttttgccatatttaataaaataataaacttgatgctgacctttggcaagcgttcagggtcaccagggtgccgggggataaccttctgtaacctttggaaaccatagtcaatggtgggttcgttcagagctgaaacaacaataaaccaacgcagtgatgtgacaaacgcatagcaaacaggctccattgcactgcaaccattggtactgcactgccagaccaagcaaggaccasagcaaaatttactcttactgaaatcagcactgattacaaagtctggaaggaggttggctttgaggcttcagttgaaccagcaatgcaaaccttccctttgagtgcctatgacaaggtctctgcaaaatttaggatgctgtatatatatctaccaaacagaaagcaattattatttctgaaagtcatgawgaaattaaattgataaatgctttgcagcccatgtttcatgttgtttcttttttcctattttcctgttatgagaaaggtcctttgtaatgggaagagtaactctaagggagc

SEQ ID NO: 82243 - DNA, 600 bp, Chicken  19866894376710_2
tcagagctgaaacaacaataaaccaacgcagtgatgtgacaaacgcatagcaaacaggctccattgcactgcaaccattggtactgcactgccagaccaagcaaggaccasagcaaaatttactcttactgaaatcagcactgattacaaagtctggaaggaggttggctttgaggcttcagttgaaccagcaatgcaaaccttccctttgagtgcctatgacaaggtctctgcaaaatttaggatgctgtatatatatctaccaaacagaaagcaattattatttctgaaagtcatgawgaaattaaattgataaatgctttgcagcccatgtttcatgttgtttcttttttcctattttcctgttatgagaaaggtcctttgtaatgggaagagtaactctaagggagcctctcttcttccacactctattacacattttatatgatccatgtgcaatgatcatatacaattctgttgtgaactacagacgtttgtcatggcagaggctttattattcacccattgaaatgaagtaaagatataactcctactgcattcagcagcccagctcagaccccagtcaacatttaactgttc

SEQ ID NO: 82244 - DNA, 438 bp, Chicken  19866894376711_1
ctgctgagcaacactgccactgggcatacaaagctgctgctggatttacaatccattgcacagagactgattgtgaaagctcttttccccttaatttgatcatacttcagaaggagattaagttttgtaagtggctgctgccacaggtactttattgggaagccctcatattcagcatcaagaccttactcttgcttttataggaagaatgaaggctaagcctatattgcagatttatattgggcatttgggcacttgagagcacagctagattgtcccacacacctctgctgttagccygaaaattcatacattgtactgaatgtggttgtagctcctgccctttccaaccttggtagagactttttttcagccaatgtgtcacaaatcagagcctttcttagagaggaggaggaaacctgatgagcatagtggaag

SEQ ID NO: 82245 - DNA, 600 bp, Chicken  19866894376712_1
ggtattgtatgaattcaggcaaactcctttatagactagagtacccacagttcttgttaccttctttgaactacatgccatctcattttgagctgaggccagtaatcagtacattagctgcttacctaaaggtcaccaattaagcagcttaattggctttcagtaacactgcacagagtttggcagtagcattttagttaatattatttttaaaacataataaaatactaataactcttaagacttttcaaatagtattgaagtagttgtggcaaaaccaaaataatctatcatgtgatygactgttctgttgagtagctaacttcctttgagtttctattttcttcagcacagggaacatcagactgacctaagtcagaattctctttctataacttgataatttggattcttttgagctgatacattatasaattatagtctcactttaactatttacactcaaaaatagaggcacaagaaaatcatctgtacatggctttgaagtcactttgatacttctatttctacttgaatatctcaaaaaatctttctttaaaaagaactctgtagtctttttccagatgacttaaaaaaata

SEQ ID NO: 82246 - DNA, 600 bp, Chicken  19866894376712_2
caccaattaagcagcttaattggctttcagtaacactgcacagagtttggcagtagcattttagttaatattatttttaaaacataataaaatactaataactcttaagacttttcaaatagtattgaagtagttgtggcaaaaccaaaataatctatcatgtgatygactgttctgttgagtagctaacttcctttgagtttctattttcttcagcacagggaacatcagactgacctaagtcagaattctctttctataacttgataatttggattcttttgagctgatacattatasaattatagtctcactttaactatttacactcaaaaatagaggcacaagaaaatcatctgtacatggctttgaagtcactttgatacttctatttctacttgaatatctcaaaaaatctttctttaaaaagaactctgtagtctttttccagatgacttaaaaaaatatctcctctttttcagttttctccttattttttccacaggaggataaaaatatcccaaaacattatgcatgaaagaaggtcaagaaaacctacatcacagtcaaaaatctatatgattttgctgggaataatgg

SEQ ID NO: 82247 - DNA, 600 bp, Chicken  19866894376714_1
gactggtattacagaagctagaaagttcaggtagtgtatgtcaccagataggtcacatcccacatatagcaaagattgtttgaaactaccatttgttgcttgaggattttctgctgcacagacaacccaaaaagagccatgttaggtagcttctagttttaagccggccttagcaactgcagtgcaggtgagctgctgttagtatcttcatgtttagtaagtgtaatgagatccccccagaataattcacttacactgtacagtattgtccagcctctctattaagaaaaaaagttagcrttacaactaatatactcaataaagttccataaggtcaaggaataagctgtaatacacatagagtagcattaatatttgattgttgcagcagggaactgaactgatcgtayaagcccttgagagttctctccttccacctccatcccattttttttccaacagaagctgcattatgctctgtgtggctctgatgaagtatgacctttcttcagactactcttgtagcttactagtgaacaaattgctcttgatccaagtttagatactaagctcagttcaactcccctctcctcaaaatag

SEQ ID NO: 82248 - DNA, 600 bp, Chicken  19866894376714_2
ctgctgcacagacaacccaaaaagagccatgttaggtagcttctagttttaagccggccttagcaactgcagtgcaggtgagctgctgttagtatcttcatgtttagtaagtgtaatgagatccccccagaataattcacttacactgtacagtattgtccagcctctctattaagaaaaaaagttagcrttacaactaatatactcaataaagttccataaggtcaaggaataagctgtaatacacatagagtagcattaatatttgattgttgcagcagggaactgaactgatcgtayaagcccttgagagttctctccttccacctccatcccattttttttccaacagaagctgcattatgctctgtgtggctctgatgaagtatgacctttcttcagactactcttgtagcttactagtgaacaaattgctcttgatccaagtttagatactaagctcagttcaactcccctctcctcaaaatagtgctttctaacatattttacatggcagacttaccctttccaacagactacttcactgggctaaacaagctatctcctactcttctaatatcagtcatctacttagcctga

SEQ ID NO: 82249 - DNA, 599 bp, Chicken  19866894376716_1
  misc_feature (1)..(24): n is any nucleotide
nnnnnnnnnnnnnnnnnnnnnnnncagcaacgtgagctgttaaaggaaacaagggctgttctgtctggggggaaaagaaggaaggttgacaaactttgcaatgcttcagatgagaaatggaatatgaactagaggcagactgcggcattggggaattggctgtatttgcccataagcacagaaaaacacctcaaagatgaacacttcctgctatttctctttttaaaccctgacagcttaaattcctctaactacgtaggcattgacttcatcctgcctatcatctacgtaaaagccagygtgtcttcagatatactttaagcacaatttatctgcacaggaaaacaaaactaagcccctatttaagaagataccccaaataacaaatagagaaccccacrgaatctcaccagaactgcaaggtgcgcctctcaaagtcattctgccctcccatagctttgatgcataggactggatatgagagcacattagtaaatccaggaagsgaagtaaagcaaagggaacacctccagagctttagcctgagcactgccctgcactctgtgctgctttaatgcctggtctgtgatgggacagca

SEQ ID NO: 82250 - DNA, 600 bp, Chicken  19866894376716_2
tgcttcagatgagaaatggaatatgaactagaggcagactgcggcattggggaattggctgtatttgcccataagcacagaaaaacacctcaaagatgaacacttcctgctatttctctttttaaaccctgacagcttaaattcctctaactacgtaggcattgacttcatcctgcctatcatctacgtaaaagccagygtgtcttcagatatactttaagcacaatttatctgcacaggaaaacaaaactaagcccctatttaagaagataccccaaataacaaatagagaaccccacrgaatctcaccagaactgcaaggtgcgcctctcaaagtcattctgccctcccatagctttgatgcataggactggatatgagagcacattagtaaatccaggaagsgaagtaaagcaaagggaacacctccagagctttagcctgagcactgccctgcactctgtgctgctttaatgcctggtctgtgatgggacagcaactgtaggaatcacagggcccattttttgtcacatccatacaggttccatcttgcacaccctaagaatgagctagtaattcactactgcacgtagtgaatgc

SEQ ID NO: 82251 - DNA, 600 bp, Chicken  19866894376716_3
cctgctatttctctttttaaaccctgacagcttaaattcctctaactacgtaggcattgacttcatcctgcctatcatctacgtaaaagccagygtgtcttcagatatactttaagcacaatttatctgcacaggaaaacaaaactaagcccctatttaagaagataccccaaataacaaatagagaaccccacrgaatctcaccagaactgcaaggtgcgcctctcaaagtcattctgccctcccatagctttgatgcataggactggatatgagagcacattagtaaatccaggaagsgaagtaaagcaaagggaacacctccagagctttagcctgagcactgccctgcactctgtgctgctttaatgcctggtctgtgatgggacagcaactgtaggaatcacagggcccattttttgtcacatccatacaggttccatcttgcacaccctaagaatgagctagtaattcactactgcacgtagtgaatgctaacaagtagaacagcacaggcaggctgtgtgctcggcccaacgaccttgattcagccacagcaagtttgatactgtcactgaaactcagctgggagatttcaac

SEQ ID NO: 82252 - DNA, 600 bp, Chicken  19866894376716_4
acttcataatggcagttaaagcagaattagcagtgaaaacacttagaaatcaaactgactgttacatatcaaataccttaatgagacatctgctttttgaagatctcggaataggaaatgcaactgctttgtaaacatttcacactaatctctcccatcactcatccccatctccacgctcagaagaaagcaggcttcagagcaatgctggaggtttgttttccttgagcaagagtcaaggccctgtctgaagtccctccttgcagatgggaaccgctgaagcaaaactcctgcaggacrctattcctcacctccagcaaccgagcactgaaaggcttctcaaagaatttcaagctattttgctgataccacgtctcatgcatctgctttatgtgggattttaatactctaacctatgactgcaaatcctatttgtaaaataaacaagacccagtaagtctcatcactgacagcagatttccagtaactgcagtacaaatgacttaatcttttgaagatggctctaataatgtttattttgaacaagaaagctcctcgctgtgccttgtggtcccatgatgtgctcagttctctattatc

SEQ ID NO: 82253 - DNA, 600 bp, Chicken  19866894376719_1
gcagttctcttctgaaaaaaaaaaaagggtgaaagtttctgaagtagtgctgtgaaggctactacttctatgcatgcgggaacaccacacaaactgcgctgtggaacacagtgaagggacatctcaactggctcaggagtgcccacaagcttcagtgcgccacaacttgaacacaggagtgctcctggccctggtccagcaccagatggaccagtatctctacagcgtgctttacttacactgtggatgaactggataaaaccctactttattattgagggcctcattaagggacatggycagactgttccagttcttgcctgctgatgcttctggaccttaagcagtttactagtagggttttggacttgactaactttgacagagccaagttaggggcttattccatattctattaagctgrctgagggtaggtggtaaccactggtgaaagttgcagtgggctgtgatcagcagccgtgggtagaaatcagttttttctgaatagcacttgtgggctggttagctcaatgtaacttttgaactgagactcctgcatsagttacrcacttttagataacttatcttctctgaaatcca

SEQ ID NO: 82254 - DNA, 600 bp, Chicken  19866894376719_2
caactggctcaggagtgcccacaagcttcagtgcgccacaacttgaacacaggagtgctcctggccctggtccagcaccagatggaccagtatctctacagcgtgctttacttacactgtggatgaactggataaaaccctactttattattgagggcctcattaagggacatggycagactgttccagttcttgcctgctgatgcttctggaccttaagcagtttactagtagggttttggacttgactaactttgacagagccaagttaggggcttattccatattctattaagctgrctgagggtaggtggtaaccactggtgaaagttgcagtgggctgtgatcagcagccgtgggtagaaatcagttttttctgaatagcacttgtgggctggttagctcaatgtaacttttgaactgagactcctgcatsagttacrcacttttagataacttatcttctctgaaatccacactgctgtttaaatccacctttttgcagtgagccaactgaatctaagaattagctttcttgtcgtggtctctacaacaataaggatagattcccttcaggtatttctaagacctgtatctact

SEQ ID NO: 82255 - DNA, 518 bp, Chicken  19866894376719_3
accctactttattattgagggcctcattaagggacatggycagactgttccagttcttgcctgctgatgcttctggaccttaagcagtttactagtagggttttggacttgactaactttgacagagccaagttaggggcttattccatattctattaagctgrctgagggtaggtggtaaccactggtgaaagttgcagtgggctgtgatcagcagccgtgggtagaaatcagttttttctgaatagcacttgtgggctggttagctcaatgtaacttttgaactgagactcctgcatsagttacrcacttttagataacttatcttctctgaaatccacactgctgtttaaatccacctttttgcagtgagccaactgaatctaagaattagctttcttgtcgtggtctctacaacaataaggatagattcccttcaggtatttctaagacctgtatctactccttttgtcatcaaaagttaataaatactccaaagagattaataactcagagaa

SEQ ID NO: 82256 - DNA, 511 bp, Chicken  19866894376719_4
tttattattgagggcctcattaagggacatggycagactgttccagttcttgcctgctgatgcttctggaccttaagcagtttactagtagggttttggacttgactaactttgacagagccaagttaggggcttattccatattctattaagctgrctgagggtaggtggtaaccactggtgaaagttgcagtgggctgtgatcagcagccgtgggtagaaatcagttttttctgaatagcacttgtgggctggttagctcaatgtaacttttgaactgagactcctgcatsagttacrcacttttagataacttatcttctctgaaatccacactgctgtttaaatccacctttttgcagtgagccaactgaatctaagaattagctttcttgtcgtggtctctacaacaataaggatagattcccttcaggtatttctaagacctgtatctactccttttgtcatcaaaagttaataaatactccaaagagattaataactcagagaa

SEQ ID NO: 82257 - DNA, 600 bp, Chicken  19866894376723_1
aactaagcctgtacttcagtacaatgcttacaggactaatagtttgggttgctttctgtttgttttaatgtttttactgacatatagtaaacttagttacaagaaggacattctaaaaataatgtcaagatgatagactttcaaaataggactatgctttcttgtagcttgaagatggtgtcagaatccttatatcacaggttgttgtaatagaaagcttcacttggttaaaacctgtgcacgtggtatctgaggagatttgttatgtttatgagcaaagatttaaccagtttggtacarcagcagaaaatctagtatggtgagtttgtcatgagccacttattattttaaaataagtgaattgaggggagatagtaaaattattctttaatgtgttgctcattgttattactcttctagctttttcgtgggccatgtagaaatagatacctgttctacttacagcctaccagtcagtaaatactgatgttatgtcatcaggatatttttataaatgcaatagtattttcagtcctatagtttagttcagcctactgttgtgttgtttactggttgctttttttgaaaaggttttcctgt

SEQ ID NO: 82258 - DNA, 600 bp, Chicken  19866894376724_1
aagaaaggtttacacaaaagtgacagcctaatcccaaacacgacaaaggtctctttgttctaatatatatagcccagtttgacagatgtgaaagtcaagtttattatttagaatagagacaaacttttctgaagatctcctcagacagctcttttacactggaatgttttttgatgaactgtggaaactagagctgacctacgtagagcccaggacagagaattcaggagacagcactagctgatgacaccttcatgtccatccccaaattgtccagaatagttccagcaggctggtacrtcaaacttgatgatgctaaatcactgaagacatggcagatgcatggaaaggcagccacctaaacagaaacctgcagttcaggtggtgcacagagctctgtgcctggacagaatgaccttgcgcacctgtctaggctggaaagtgactggctgtacaggagccctgctgggaaggacctgaggattacagcggacaccaggytgaatatgcattagcagtgmgctgtcaccagacgtaaattaaacaggctaaatttgggaaaattcattcagcagataaaagaagttgctgtgtttcatc

SEQ ID NO: 82259 - DNA, 600 bp, Chicken  19866894376724_2
cgtagagcccaggacagagaattcaggagacagcactagctgatgacaccttcatgtccatccccaaattgtccagaatagttccagcaggctggtacrtcaaacttgatgatgctaaatcactgaagacatggcagatgcatggaaaggcagccacctaaacagaaacctgcagttcaggtggtgcacagagctctgtgcctggacagaatgaccttgcgcacctgtctaggctggaaagtgactggctgtacaggagccctgctgggaaggacctgaggattacagcggacaccaggytgaatatgcattagcagtgmgctgtcaccagacgtaaattaaacaggctaaatttgggaaaattcattcagcagataaaagaagttgctgtgtttcatctactggacactggtgaggccacacctgtaaaagcacactcagtttcatgtcccaagcccctgctaattaaaaagaaatggggagaagggggttgaggtccagcacaaagctgttgaggtagctgggacacgtgtgagctgaggctgagggagctgacattatytactccaacaaaagggcagctaaagaggtaccaaggaa

SEQ ID NO: 82260 - DNA, 600 bp, Chicken  19866894376724_3
attcaggagacagcactagctgatgacaccttcatgtccatccccaaattgtccagaatagttccagcaggctggtacrtcaaacttgatgatgctaaatcactgaagacatggcagatgcatggaaaggcagccacctaaacagaaacctgcagttcaggtggtgcacagagctctgtgcctggacagaatgaccttgcgcacctgtctaggctggaaagtgactggctgtacaggagccctgctgggaaggacctgaggattacagcggacaccaggytgaatatgcattagcagtgmgctgtcaccagacgtaaattaaacaggctaaatttgggaaaattcattcagcagataaaagaagttgctgtgtttcatctactggacactggtgaggccacacctgtaaaagcacactcagtttcatgtcccaagcccctgctaattaaaaagaaatggggagaagggggttgaggtccagcacaaagctgttgaggtagctgggacacgtgtgagctgaggctgagggagctgacattatytactccaacaaaagggcagctaaagaggtaccaaggaataacctacaaatatgtgaaa

SEQ ID NO: 82261 - DNA, 600 bp, Chicken  19866894376724_4
tgctgggaaggacctgaggattacagcggacaccaggytgaatatgcattagcagtgmgctgtcaccagacgtaaattaaacaggctaaatttgggaaaattcattcagcagataaaagaagttgctgtgtttcatctactggacactggtgaggccacacctgtaaaagcacactcagtttcatgtcccaagcccctgctaattaaaaagaaatggggagaagggggttgaggtccagcacaaagctgttgaggtagctgggacacgtgtgagctgaggctgagggagctgacattatytactccaacaaaagggcagctaaagaggtaccaaggaataacctacaaatatgtgaaaaacagtgacagagatgacagagacaaacacttctctgcagtgctggtaagacagcattggccacaaattcaagtgtgggagtccctagtgagacatcaagagaagttttctcacttggaggtggtgccgcactaaaacagacagcccaagggtgctggggcatttttgcatttatgaaaaaagcacacagagagaatgctacaagaagcacacgcaaactgggcttagcacaaaataacctg

SEQ ID NO: 82262 - DNA, 600 bp, Chicken  19866894376725_1
tacaaaaggaagcagaagataacagaaagaaaaatgtaagttcaatgacaagagcagttgagtttagcagctctgagcaacaatcccaaccttgacttcatcttaccatctccatttgatttgggcaagttacttaacccaaatttttcacaagcatcaatcgttcggatggttggactagatgatcttggaggtctttcccaaccttgatgattctgtgatttccctcctacatggaattttggttttaagttgctttgtgtgcctgcctttaggatgacttgcctcatgctccccaarcatatatttctagtccttacagtcagctagctcagatggaggtttctccaatgaaggtggttacagtttgargaaataagtgccctctacagatcttaattcaaaaaataattgagttatcacagcagcaacagaacagattgggagctatatacagacagagacaatcctcgagaatgcttaacagtctcttaaaaaaattcatctccaggtatcacataccagaccccaaatcactagattcttcagattttttttttttcacttataaaataaaattcccatttcattatccttgag

SEQ ID NO: 82263 - DNA, 600 bp, Chicken  19866894376725_2
ctgagcaacaatcccaaccttgacttcatcttaccatctccatttgatttgggcaagttacttaacccaaatttttcacaagcatcaatcgttcggatggttggactagatgatcttggaggtctttcccaaccttgatgattctgtgatttccctcctacatggaattttggttttaagttgctttgtgtgcctgcctttaggatgacttgcctcatgctccccaarcatatatttctagtccttacagtcagctagctcagatggaggtttctccaatgaaggtggttacagtttgargaaataagtgccctctacagatcttaattcaaaaaataattgagttatcacagcagcaacagaacagattgggagctatatacagacagagacaatcctcgagaatgcttaacagtctcttaaaaaaattcatctccaggtatcacataccagaccccaaatcactagattcttcagattttttttttttcacttataaaataaaattcccatttcattatccttgagggcttttgagaaaatgaactgattcatgttcaagaagcaatttgttattgtactgctgagtgctataaatgg

SEQ ID NO: 82264 - DNA, 600 bp, Chicken  19866894376727_1
gtgaatgacttcttacagcagctgaagcataaaattctgagtgagatactcactgtagacatgatgcctcctcattttatatagtcataggcttgttatctatccttatacattgttttcaagaattcaggagtagaaaaatgtctttcactgtcaaaatgtggatacacttccccattatgtcagcaagtttcagtgcaaaataaagcaggcaggatcaggagcacagacacctcgtgctgtgagtttggtgattaagaattcagctggcataccattttccccaaatgactgacttcytgaagttgcatggttcagtcctcaacttgtctggagatatctggaatagatatggtcttatctgctctctgctcccctgcaccttggttctcagctgatggctaggcaggagaattccttcctcttgcagtcaccttccaagaacttgcacttctatacattcttgcaaatgtccacttattcctcacttccctcgccctaattttaccatattttaatcctcaatctgtttcagaaaagctctggctacagaaatacctgacttttaattaactacagcctccaagtacaatcttgtag

SEQ ID NO: 82265 - DNA, 600 bp, Chicken  19866894376734_1
aaaaagcttcatgtatataagaacttaaaccatatggtaaggactgctttcatgcttcttatggattacgttatatttatttcaggccagttgcattacacaacactctctatacatggttagcaaacatgctgcaagtacttgtgttgtatccagtgccttagacaaaaagaaacagtcatcttattaaagagaaagctacaataataattggtacacacatggtttcggcaacatccaatgcttattgccatccaatgctcttgtggttaaattttgcaatagcccaagcaatttagrtttgttgttgttgttgttatgttctgccaaagccaggaatgtgtctattttacaccatgtttacaattgtttcttctccctgtgcagaaattctatggctatgtggaacagaccgagagctggctcagcagcaaagaggctttcctagccaatgaagacttaggggtaggtgctccaagtaatgacaattttatcaggtattggtttggagaacggggagatgtgaagtatgacgatgtgctccttctttctttctccatttttctccttttgaagttactgctttgtcttattgatgac

SEQ ID NO: 82266 - DNA, 600 bp, Chicken  19866894376736_1
ttattcttgcattgagttgtaaactgttagtttttctaacactgtgaattaagttaacaagctaaaattcaaactctagtatcattgatttcgttgcttaattctataatttttgaatacacttaggaattgtctttatttgccatggcttgggtcatcataaatgaaactgcatgttctcagacaaatctcttaatacttaaaaattctgaaacaaaaataccctgcagtattcagagtagttggagaatatcaccttacatattgaagcctgcagtttcctagagagaattctcaccyagacctraattgcaatttagtctttttctatggctcttatatccagagccttccatttgtatcttggtctctattaaaaattaaggcttcttaaaaaatgcttttttcttctttctgtgctgagaggatcttttaaaacactattataagcttatggtgtgttttcctcttaaaattgaggtgaggacctttcagtgtgtgtattacaaaatcattttctaatttcttgcttactacttgcagtctgacactccattctttgaaaattaacaagaccaaataggctcctgaatacgttta

SEQ ID NO: 82267 - DNA, 600 bp, Chicken  19866894376736_2
tgcattgagttgtaaactgttagtttttctaacactgtgaattaagttaacaagctaaaattcaaactctagtatcattgatttcgttgcttaattctataatttttgaatacacttaggaattgtctttatttgccatggcttgggtcatcataaatgaaactgcatgttctcagacaaatctcttaatacttaaaaattctgaaacaaaaataccctgcagtattcagagtagttggagaatatcaccttacatattgaagcctgcagtttcctagagagaattctcaccyagacctraattgcaatttagtctttttctatggctcttatatccagagccttccatttgtatcttggtctctattaaaaattaaggcttcttaaaaaatgcttttttcttctttctgtgctgagaggatcttttaaaacactattataagcttatggtgtgttttcctcttaaaattgaggtgaggacctttcagtgtgtgtattacaaaatcattttctaatttcttgcttactacttgcagtctgacactccattctttgaaaattaacaagaccaaataggctcctgaatacgtttatccaatt

SEQ ID NO: 82268 - DNA, 600 bp, Chicken  19866894376737_1
tgcactgggtatcggggctttgctgcagagaaacgcacactggaatgctccctgtctgccaccagtatgggaaaatcctgactgcatgtataaacattctgtctgctgaaaggtcctgctctgaagccccagagaaggcacttcctccccttacttcccacccacctcactgactaaagaggatgagtgtttccaggcaagttcaaacacctctgtgcaaagaagactcaagttcttacagtcattaacacagtggagcatcgttttggcctatctgtagtgtaaacaataaataataasaaaagcacaggtgttaactgtgagtgaaagtgatgattctgttctggagacactcactcttaatgggactgagaagaaggagggattttgtaatggctagtaaaaaacaatctcactgtactgaatttttcagtgttttcccattagtttctctcttgatagaatgaatagctccgtcttcactcagtattaaacacatcttgggcacattttgggtatctcttttttcattcttaacttttaaaatttattttccacttgatgattaagtagcatttattgccgaacagagaaacagcg

SEQ ID NO: 82269 - DNA, 600 bp, Chicken  19866894376738_1
accagtacttcatgtactgattctgaaattttgataactttggcggttgttgcatgctgggaacactgagctttgatatctaattgttgtagtgctattgctgcttagttttaagtgtaaatggggaaacaatattcttatattcatgctatcattttcttacatgtgctttttcttacatgcattcatttttgttgtcatgtggaacctgtactcatgtaatctattccatgtcaggctgtgtagcagttaatcagaccagaatgtttccagcaaaggcattcttgagtaacactgagragytggctgcctttcagatggctgacgttcacrcaktgcacaaccaaccaggagttcagcagttccccacactgtaaagagtcctctttgagcactgtatttgcattgggtttggtttggcttgtttcccaacctgaagtctaaatgaatggttcttgagcatttcagaattatagaatwtagatatgaagagataataaaacattcaaagccgtgtgctatttcccattgctcacgtatttcctggatttgaatgtttggtcacagaaaccaatagaatccactgagaaatctgtcaga

SEQ ID NO: 82270 - DNA, 600 bp, Chicken  19866894376738_2
agtacttcatgtactgattctgaaattttgataactttggcggttgttgcatgctgggaacactgagctttgatatctaattgttgtagtgctattgctgcttagttttaagtgtaaatggggaaacaatattcttatattcatgctatcattttcttacatgtgctttttcttacatgcattcatttttgttgtcatgtggaacctgtactcatgtaatctattccatgtcaggctgtgtagcagttaatcagaccagaatgtttccagcaaaggcattcttgagtaacactgagragytggctgcctttcagatggctgacgttcacrcaktgcacaaccaaccaggagttcagcagttccccacactgtaaagagtcctctttgagcactgtatttgcattgggtttggtttggcttgtttcccaacctgaagtctaaatgaatggttcttgagcatttcagaattatagaatwtagatatgaagagataataaaacattcaaagccgtgtgctatttcccattgctcacgtatttcctggatttgaatgtttggtcacagaaaccaatagaatccactgagaaatctgtcagaaga

SEQ ID NO: 82271 - DNA, 600 bp, Chicken  19866894376738_3
ataactttggcggttgttgcatgctgggaacactgagctttgatatctaattgttgtagtgctattgctgcttagttttaagtgtaaatggggaaacaatattcttatattcatgctatcattttcttacatgtgctttttcttacatgcattcatttttgttgtcatgtggaacctgtactcatgtaatctattccatgtcaggctgtgtagcagttaatcagaccagaatgtttccagcaaaggcattcttgagtaacactgagragytggctgcctttcagatggctgacgttcacrcaktgcacaaccaaccaggagttcagcagttccccacactgtaaagagtcctctttgagcactgtatttgcattgggtttggtttggcttgtttcccaacctgaagtctaaatgaatggttcttgagcatttcagaattatagaatwtagatatgaagagataataaaacattcaaagccgtgtgctatttcccattgctcacgtatttcctggatttgaatgtttggtcacagaaaccaatagaatccactgagaaatctgtcagaagatgagcttcaatcagatgtacaaagttatta

SEQ ID NO: 82272 - DNA, 600 bp, Chicken  19866894376738_4
actttggcggttgttgcatgctgggaacactgagctttgatatctaattgttgtagtgctattgctgcttagttttaagtgtaaatggggaaacaatattcttatattcatgctatcattttcttacatgtgctttttcttacatgcattcatttttgttgtcatgtggaacctgtactcatgtaatctattccatgtcaggctgtgtagcagttaatcagaccagaatgtttccagcaaaggcattcttgagtaacactgagragytggctgcctttcagatggctgacgttcacrcaktgcacaaccaaccaggagttcagcagttccccacactgtaaagagtcctctttgagcactgtatttgcattgggtttggtttggcttgtttcccaacctgaagtctaaatgaatggttcttgagcatttcagaattatagaatwtagatatgaagagataataaaacattcaaagccgtgtgctatttcccattgctcacgtatttcctggatttgaatgtttggtcacagaaaccaatagaatccactgagaaatctgtcagaagatgagcttcaatcagatgtacaaagttattattg

SEQ ID NO: 82273 - DNA, 600 bp, Chicken  19866894376738_5
tgcattcatttttgttgtcatgtggaacctgtactcatgtaatctattccatgtcaggctgtgtagcagttaatcagaccagaatgtttccagcaaaggcattcttgagtaacactgagragytggctgcctttcagatggctgacgttcacrcaktgcacaaccaaccaggagttcagcagttccccacactgtaaagagtcctctttgagcactgtatttgcattgggtttggtttggcttgtttcccaacctgaagtctaaatgaatggttcttgagcatttcagaattatagaatwtagatatgaagagataataaaacattcaaagccgtgtgctatttcccattgctcacgtatttcctggatttgaatgtttggtcacagaaaccaatagaatccactgagaaatctgtcagaagatgagcttcaatcagatgtacaaagttattattgtagtgaaaaggtgcattaaggatcactgttgctgttacagccttctcctcctgaagctgaagggtcacgtgtccctgtgaaatgagggcagtgattgtgagaagtgtctggggaagctcttctctgtccggatctgttccctgc

SEQ ID NO: 82274 - DNA, 600 bp, Chicken  19866894376745_1
ggaatgaattgcagggctgaaatagaacactacctcctaagagaataacgaggtgttaggaaaactctgttgcgtgctggtgtcaatatttggatttgattggaacttattattattattttttttattgttactttcttttacaagaattagcactataaaaataaccgttctttacttagcaccacatgtcaggaatgcttcccccatctaactttacaggcttggttgtttataaaaaggtacataaataatcttctggaagctgcaatgctttccgaaacatctataagaaacatytattatatccaacttaaaaaaaaaaaaaaatatgtatttacaaaatatttatttcttttatattccacaagaaggttaacatggacatttctcccattttacatgtgaaagaagattttaaaagagttccaaacacgggcactcctttttcatcttggaaacacttttctttcttaaatgcaatacagttcttctcaagactcagatattttcaaatactagaataaaactgtgtcttaaacaacttggttcatggtgcttcacatacagtattttgattataatttcatttgccctgga

SEQ ID NO: 82275 - DNA, 600 bp, Chicken  19866894376745_2
ctgaaatagaacactacctcctaagagaataacgaggtgttaggaaaactctgttgcgtgctggtgtcaatatttggatttgattggaacttattattattattttttttattgttactttcttttacaagaattagcactataaaaataaccgttctttacttagcaccacatgtcaggaatgcttcccccatctaactttacaggcttggttgtttataaaaaggtacataaataatcttctggaagctgcaatgctttccgaaacatctataagaaacatytattatatccaacttyaaaaaaaaaaaaaatatgtatttacaaaatatttatttcttttatattccacaagaaggttaacatggacatttctcccattttacatgtgaaagaagattttaaaagagttccaaacacgggcactcctttttcatcttggaaacacttttctttcttaaatgcaatacagttcttctcaagactcagatattttcaaatactagaataaaactgtgtcttaaacaacttggttcatggtgcttcacatacagtattttgattataatttcatttgccctggataaggtccaagtaaac

SEQ ID NO: 82276 - DNA, 600 bp, Chicken  19866894376745_3
tgaaatagaacactacctcctaagagaataacgaggtgttaggaaaactctgttgcgtgctggtgtcaatatttggatttgattggaacttattattattattttttttattgttactttcttttacaagaattagcactataaaaataaccgttctttacttagcaccacatgtcaggaatgcttcccccatctaactttacaggcttggttgtttataaaaaggtacataaataatcttctggaagctgcaatgctttccgaaacatctataagaaacatytattatatccaacttayaaaaaaaaaaaaatatgtatttacaaaatatttatttcttttatattccacaagaaggttaacatggacatttctcccattttacatgtgaaagaagattttaaaagagttccaaacacgggcactcctttttcatcttggaaacacttttctttcttaaatgcaatacagttcttctcaagactcagatattttcaaatactagaataaaactgtgtcttaaacaacttggttcatggtgcttcacatacagtattttgattataatttcatttgccctggataaggtccaagtaaaca

SEQ ID NO: 82277 - DNA, 600 bp, Chicken  19866894376745_4
gaaatagaacactacctcctaagagaataacgaggtgttaggaaaactctgttgcgtgctggtgtcaatatttggatttgattggaacttattattattattttttttattgttactttcttttacaagaattagcactataaaaataaccgttctttacttagcaccacatgtcaggaatgcttcccccatctaactttacaggcttggttgtttataaaaaggtacataaataatcttctggaagctgcaatgctttccgaaacatctataagaaacatytattatatccaacttaayaaaaaaaaaaaatatgtatttacaaaatatttatttcttttatattccacaagaaggttaacatggacatttctcccattttacatgtgaaagaagattttaaaagagttccaaacacgggcactcctttttcatcttggaaacacttttctttcttaaatgcaatacagttcttctcaagactcagatattttcaaatactagaataaaactgtgtcttaaacaacttggttcatggtgcttcacatacagtattttgattataatttcatttgccctggataaggtccaagtaaacac

SEQ ID NO: 82278 - DNA, 600 bp, Chicken  19866894376745_5
aaatagaacactacctcctaagagaataacgaggtgttaggaaaactctgttgcgtgctggtgtcaatatttggatttgattggaacttattattattattttttttattgttactttcttttacaagaattagcactataaaaataaccgttctttacttagcaccacatgtcaggaatgcttcccccatctaactttacaggcttggttgtttataaaaaggtacataaataatcttctggaagctgcaatgctttccgaaacatctataagaaacatytattatatccaacttaaayaaaaaaaaaaatatgtatttacaaaatatttatttcttttatattccacaagaaggttaacatggacatttctcccattttacatgtgaaagaagattttaaaagagttccaaacacgggcactcctttttcatcttggaaacacttttctttcttaaatgcaatacagttcttctcaagactcagatattttcaaatactagaataaaactgtgtcttaaacaacttggttcatggtgcttcacatacagtattttgattataatttcatttgccctggataaggtccaagtaaacact

SEQ ID NO: 82279 - DNA, 600 bp, Chicken  19866894376747_1
tgctcaggtgcctatgcagtaaatgggaggatggaatagatataactggaaactaaaaaaacaatgacaacttaaatgagtagctttcaatgggatgagttccccaatccatctcagcacacagccagaagtctagtagtcccggaacaagtaaagccacaggaaagtgttgtcatggatgaggcaaaggcaggacagttgaaaggcaacagctgatggccacccttgtttttgtcagattaaaataatgacagaatcacatccaaaaatggtacagaagaacataaaataagcaatgayagatctattttgtaaaggaaagaagtaaacaaaatcaaagacttgcattcaatttcttctaaaggataggctacatataaagagatgagccttcaagaaacctacattctgcagaaaattaggaaaagatggagatccccaaattaattccaactctctycctctgtttctgattattgtttttaatttgctcgtacatattcctcttctagtcttgtgaacttagtattctcattattcagcactaatacctaacaaaatgttaggggatttgagacttaacatctggttttggcacag

SEQ ID NO: 82280 - DNA, 521 bp, Chicken  19866894376747_2
aggaaagtgttgtcatggatgaggcaaaggcaggacagttgaaaggcaacagctgatggccacccttgtttttgtcagattaaaataatgacagaatcacatccaaaaatggtacagaagaacataaaataagcaatgayagatctattttgtaaaggaaagaagtaaacaaaatcaaagacttgcattcaatttcttctaaaggataggctacatataaagagatgagccttcaagaaacctacattctgcagaaaattaggaaaagatggagatccccaaattaattccaactctctycctctgtttctgattattgtttttaatttgctcgtacatattcctcttctagtcttgtgaacttagtattctcattattcagcactaatacctaacaaaatgttaggggatttgagacttaacatctggttttggcacagctaatgatatttttcaggctaaaaattaaattcatatgctttttgttgcttgaagcaagcatttagcacacacatgcactc

SEQ ID NO: 82281 - DNA, 600 bp, Chicken  19866894376751_1
agagggggatgataatttggatttgacattgggctgttaaaaatgttcatttaaatatgtatggaaatctttcagtgtttgacttggttttgcaatcatcattacattgatcctaaccactgttccagttattacagccaacagtttgcaccaggcagtttgtctgctcaagcttggacaaagacaccttaagtttacttctaagtaatagagcacttctggacacagcattgcaatatgtgtgccttgtttacaggcaaagcatttttaacagtgttttgagagccctttaataaaggrcaaagtagatgagcaytgacaaaataacaacaaaaaactgaagcatcataaaaataacgcttgaatagcgctaaacctaaattgaacataattaagattccacgaatagaaagaaacattatggttttcttccaaagtttaatgcagggaagaaggagttcaagagagatcacttcctatggaacaagtagggtaacaggaaaaaaaaaccaagaacacctggtactttctaccttcatgctctcaaggaaggatggagaactggtgccaaagactaaaatacattttccatgagaggaa

SEQ ID NO: 82282 - DNA, 600 bp, Chicken  19866894376751_2
ttggatttgacattgggctgttaaaaatgttcatttaaatatgtatggaaatctttcagtgtttgacttggttttgcaatcatcattacattgatcctaaccactgttccagttattacagccaacagtttgcaccaggcagtttgtctgctcaagcttggacaaagacaccttaagtttacttctaagtaatagagcacttctggacacagcattgcaatatgtgtgccttgtttacaggcaaagcatttttaacagtgttttgagagccctttaataaaggrcaaagtagatgagcaytgacaaaataacaacaaaaaactgaagcatcataaaaataacgcttgaatagcgctaaacctaaattgaacataattaagattccacgaatagaaagaaacattatggttttcttccaaagtttaatgcagggaagaaggagttcaagagagatcacttcctatggaacaagtagggtaacaggaaaaaaaaaccaagaacacctggtactttctaccttcatgctctcaaggaaggatggagaactggtgccaaagactaaaatacattttccatgagaggaaaagggagtgctctaat

SEQ ID NO: 82283 - DNA, 599 bp, Chicken  19866894376753_1
  misc_feature (1)..(5): n is any nucleotide
nnnnngttgtcatgtttgtacaattgacaggctcaatctattatgcaacagtcagactcgcagcctcgttcccggccatttgtatcaatacatcactgatgcaaaaattagaaacattggtccaactttggcctccccaacaagtctcatctgctttggggatttttctttattttgttgagttcaactttatcacttctaatccagcaaacgttcaatactgaaataaaccaaaattgcatccaggccttgggaaaacttcagtgatcacgctgagaaggaaggagagaattgaagggyggtcaaatgyaaggctgcctatcttagctgaacctgcagaactttttcttagctgtatgcactcagaactcacctttttctaagtcacttccataattctataatgcagcactgcccaacacactgctgcttctgcaaactagttttccccaatagttcactctggataccataaaatcccaaactgtacctcatccttctccatatcccatctgcaacatcaacagatacaccaactacaagatcaacagtactgacttgaactacaaccaacatcagaagaataataaacttgatcc

SEQ ID NO: 82284 - DNA, 600 bp, Chicken  19866894376753_2
catgtttgtacaattgacaggctcaatctattatgcaacagtcagactcgcagcctcgttcccggccatttgtatcaatacatcactgatgcaaaaattagaaacattggtccaactttggcctccccaacaagtctcatctgctttggggatttttctttattttgttgagttcaactttatcacttctaatccagcaaacgttcaatactgaaataaaccaaaattgcatccaggccttgggaaaacttcagtgatcacgctgagaaggaaggagagaattgaagggyggtcaaatgyaaggctgcctatcttagctgaacctgcagaactttttcttagctgtatgcactcagaactcacctttttctaagtcacttccataattctataatgcagcactgcccaacacactgctgcttctgcaaactagttttccccaatagttcactctggataccataaaatcccaaactgtacctcatccttctccatatcccatctgcaacatcaacagatacaccaactacaagatcaacagtactgacttgaactacaaccaacatcagaagaataataaacttgatcccatttgtatgg

SEQ ID NO: 82285 - DNA, 600 bp, Chicken  19866894376758_1
tctgatgacaatgtgagtaagtaataaactcggagttcctgtcctgggaaacttgttaaggccatgtaatgttctggagttatttagaaaaaaacaatttgctcatagacttgcagagacatctgtaacagagttttctttgtccctgtgctgttactcatttctgggggctttatgacaccttttccagaggttgttttgaaaaagttcaaaaggaaacatattgcccattatttctttcctgtggggtattttttttttctttacatgaatctttttttcttttttttttccttcatwttcacaaatcatgcaaacctcaacccatttgttttgctacttccccactgccagggaaaggaaccggcagccaggatcctaacagcattagtcaaaaattatgaggaaaacagtttgtcggaaatttagaggcaagtacgcacctgaaaccgcctgacagagcgctacaaaagagtctgttccgcatttggatggagggagatttgcccattaatgctgttaactctgttaagctacagtcattagcgagagaaaaaatgccaaaatgagggggagggagagagagacaaacaccctaag

SEQ ID NO: 82286 - DNA, 600 bp, Chicken  19866894376774_1
attttcactctgagtaagggaaatgcacaaaagtaatctaatggcttcagtgggactagtcttaatacaaaatgttacagatcctgtaaggactccaaaacctgggacaagcacaaacagttcttaaaaatagtttaagaaactaaaaacattctttttgaaatgcctatttttgcctaatattttctgtgttcctacaaaagcagaataattttcttgagatttcccacagtctgctgcacccattccttaaaatcagaagagaaaaaaagaatgtttatttaacagtttcacacttgrtatctgaataaattattataaaggatcgtgataaagaataacgtaagtcacatgaaagtattctaataaaaaacaatgcacagaagcaacaaaattcagccagaaatttgcactcaaaacttaagcaaagtcattttaatctactctcataattttcctgaattatgtttaggtttatgtgtatgtatacatacacgcgtatacatatgtaagaattttattcatgaactggggttactctgattttttaaattcatatacaagcagtttactgatgaaatcttgtataatttataactt

SEQ ID NO: 82287 - DNA, 600 bp, Chicken  19866894376776_1
tttttgtaccacagccgattgtataggagttgttggttacagtgatggcaagtcagtggaggtgccatgtggaggccaggtataactggattccagatttctttctgcagctgccttgcaaacccacccctcaagatcagcagatacttcagactgcattcatgttcttttctgagttgtcttcaattaagagcccccttgatctcgtctgtgagcaggcggttgagtgaagacagctgaagagcacaaatgcgtcctgcagctgtctctggtgtggcagggatgctcaacacatcttcygcatccttccatagccttctcctgaaaatgaagttcttgatggttgttgctgttatgatgagaaactggggagcgttgttccttgggttttagatgggggagcaaaaaaccattggatttatgtgattttaaacccacccaactaaagtagctcgaaccagaatggatgcaaggtctgaatttgatgtatctctttattctgaggtccaggtaattcagagtgctcttcaataattcagcactggtctaatattattgtttatcttttcaaaaatgaaaaatcaattaatgagtagcatg

SEQ ID NO: 82288 - DNA, 600 bp, Chicken  19866894376776_2
caataattcagcactggtctaatattattgtttatcttttcaaaaatgaaaaatcaattaatgagtagcatgtctgtaggatgcaattagtttcatacttcaagatcatccttcctgtgtgttgcagaatcctgagcaggattcatcagttcttctcttgccattgggtggtcttggtttttgtgtgctagaaaaaggctttaattaagtcagtggttgtggttttctctctgctgttacctgttgaagtttgcttttattttaaactatttcattaacggacgatcaaaccatctcacsagaggagtaaagcagtgcattgtgagaggagagctgcctgttggctcaggactgctcacctctcacccagactgtgtgctcagctcaggtttaggtgcgtgttggcagtgagtggtgagcaccgagggccaacccttaaagcaagagcccttccctgtcacctgccctcaacctgtaatggttatggcaaagtgatttagggagggagccagggaatggcaaggaggcagcagattggcatgtgcaatgagtgcactgctgtcatccttctgttgcatgcagggccatgggaccaaatga

SEQ ID NO: 82289 - DNA, 599 bp, Chicken  19866894376778_1
  misc_feature (1)..(161): n is any nucleotide
nnnnnnnnnnnnnnnnnnnnnnnnnnnnnnnnnnnnnnnnnnnnnnnnnnnnnnnnnnnnnnnnnnnnnnnnnnnnnnnnnnnnnnnnnnnnnnnnnnnnnnnnnnnnnnnnnnnnnnnnnnnnnnnnnnnnnnnnnnnnnnnnnnnnnnnnnnnnnnnnncttatatgctttactcttctatctaataaattccacacaaaattgtgaagaaattctgaaaatcttctggagcttttacaaatctttgtaagatccttgtaaaattcttgaacaaaacacatttccatatgagatgctytatctagccaggggattatcttctgccaaccacctttctgaagaattccaaacaagagagaatatttactttcatgtagataaaacatacaccattaattacatatattaactgcaygattttatcctccagctaatctttaaaacctacagaaagtagttacgctcacctgcgtcacagtaataaagaagtaatctatttcagtacttacaaagtcttgtcgaatatcattgaagtcctttccatatttttccaatgcctcttcaaacaaactagcttctgatgctgaccattcttcc

SEQ ID NO: 82290 - DNA, 599 bp, Chicken  19866894376778_2
  misc_feature (1)..(44): n is any nucleotide
nnnnnnnnnnnnnnnnnnnnnnnnnnnnnnnnnnnnnnnnnnnncttatatgctttactcttctatctaataaattccacacaaaattgtgaagaaattctgaaaatcttctggagcttttacaaatctttgtaagatccttgtaaaattcttgaacaaaacacatttccatatgagatgctytatctagccaggggattatcttctgccaaccacctttctgaagaattccaaacaagagagaatatttactttcatgtagataaaacatacaccattaattacatatattaactgcaygattttatcctccagctaatctttaaaacctacagaaagtagttacgctcacctgcgtcacagtaataaagaagtaatctatttcagtacttacaaagtcttgtcgaatatcattgaagtcctttccatatttttccaatgcctcttcaaacaaactagcttctgatgctgaccattcttccatttcatctctacacaagacaggtcctccaagtggcactaggacactgatggcactgctcaaatcatagttatgtttatgcaacgtatccattgcatgaaactaggaagaaggagag

SEQ ID NO: 82291 - DNA, 600 bp, Chicken  19866894376783_1
gacacttctgcaatgtaaagtggtgatgtccgaatggccctagtctagcctggaggtctgtgcacccactaacacttgaaatgttattagcaagtgctccaggaatgcatttttccctttagtttcatcttaaacagagtttacacactgaaatgattcatctgtgttgcaaattaaaaagtttacagaaataacaaaataacaatgtatttctgaaggaaacttgaactaaaatatagtggtagaaacacatactaaaaattgcagctgaacccatacctcaaggacacgctgggtagragacggtcaaatgttctgaagtattttcaaacctttcattttaatctgctttacccaggccttgagygttctgtaagacacctgaagaataaacaccatgcagttactatgtgttcctttattcatcraaacacagtaatgctatttctacagactggtataaaatccacacgtctaaaacagaatccaacaccctcccatttttcttcctatatactccttcttattcatagcacaccttgaatgtgttacattacacaagacagagataagcatcctagtacaatcctccatttcatt

SEQ ID NO: 82292 - DNA, 600 bp, Chicken  19866894376783_2
actaacacttgaaatgttattagcaagtgctccaggaatgcatttttccctttagtttcatcttaaacagagtttacacactgaaatgattcatctgtgttgcaaattaaaaagtttacagaaataacaaaataacaatgtatttctgaaggaaacttgaactaaaatatagtggtagaaacacatactaaaaattgcagctgaacccatacctcaaggacacgctgggtagragacggtcaaatgttctgaagtattttcaaacctttcattttaatctgctttacccaggccttgagygttctgtaagacacctgaagaataaacaccatgcagttactatgtgttcctttattcatcraaacacagtaatgctatttctacagactggtataaaatccacacgtctaaaacagaatccaacaccctcccatttttcttcctatatactccttcttattcatagcacaccttgaatgtgttacattacacaagacagagataagcatcctagtacaatcctccatttcatttgcagagcacagcttcttctgcgcacttggaggaggcagacctctttggtgcaactggcactttaac

SEQ ID NO: 82293 - DNA, 600 bp, Chicken  19866894376783_3
cttaaacagagtttacacactgaaatgattcatctgtgttgcaaattaaaaagtttacagaaataacaaaataacaatgtatttctgaaggaaacttgaactaaaatatagtggtagaaacacatactaaaaattgcagctgaacccatacctcaaggacacgctgggtagragacggtcaaatgttctgaagtattttcaaacctttcattttaatctgctttacccaggccttgagygttctgtaagacacctgaagaataaacaccatgcagttactatgtgttcctttattcatcraaacacagtaatgctatttctacagactggtataaaatccacacgtctaaaacagaatccaacaccctcccatttttcttcctatatactccttcttattcatagcacaccttgaatgtgttacattacacaagacagagataagcatcctagtacaatcctccatttcatttgcagagcacagcttcttctgcgcacttggaggaggcagacctctttggtgcaactggcactttaacagtaaccaaggctgcaacgtacacaactggcaggggaccaaattaatcctgcaaaggcagt

SEQ ID NO: 82294 - DNA, 600 bp, Chicken  19866894376788_1
ctggaagcttttatctagtgtgctgctaatagcaagaaagcttatatcattgttagctgtctctgatgtggctgagtgagttgctttacctctcagaaacacatctttgcagaagggtgggaagagggatggcaattgttgggcatgattactgtggctgcctgctacaaagttttgggtgtgttttttttttttctctaagcaaatttgctgtctatgaaatccaggcccaggtagctctgggaggggagaagggggaattatttctgtgaaccagtagtgcccttgggaactccagcmaagggttgaacatctttgcacctttagctttcagtgaactgaacccatgcttgaatcaggcctgcagcagaagttgaagtagctcctgccctttaaatagaaataaatctatttagtggaaaaccagtctttacaagagagttctttctactgcctcaagaaagaatgtagagaggatgtatttattcaaatgttataaggtattacttccaacagagaggtgagaatattgttttcatgtatggttgaagatactctgcgtgtgttcatagataacttccacaaaaaaaaaaacaaaaa

SEQ ID NO: 82295 - DNA, 599 bp, Chicken  19866894376793_1
  misc_feature (1)..(171): n is any nucleotide
nnnnnnnnnnnnnnnnnnnnnnnnnnnnnnnnnnnnnnnnnnnnnnnnnnnnnnnnnnnnnnnnnnnnnnnnnnnnnnnnnnnnnnnnnnnnnnnnnnnnnnnnnnnnnnnnnnnnnnnnnnnnnnnnnnnnnnnnnnnnnnnnnnnnnnnnnnnnnnnnnnnnnnnnnnncaaggatatgcagtagctggctttgcagctgtgtcctttaaagcttttcaatctttcatatcactttctcccaacctttagaaatgatgttaccaattcagtacataaagaatttaccattccttgagrtgccgtgccggcatcccatccttacggcacttaagatagcagtattccacagctttatttagtgtaaaagtaacctgattttacactcacatttaaataggattgcttggagtgagctttaaaaattacttgaattcaccccactacctgaatattcacagtgttgtcacatccatccacttaaatccagtgacatcataatggatctggggggggtcgggggtgctcaggcaagtggcttttcagcttaagtaattctgcagaattctttcttcatagaagctaaggtattttaaatc

SEQ ID NO: 82296 - DNA, 599 bp, Chicken  19866894376794_1
  misc_feature (1)..(92): n is any nucleotide
nnnnnnnnnnnnnnnnnnnnnnnnnnnnnnnnnnnnnnnnnnnnnnnnnnnnnnnnnnnnnnnnnnnnnnnnnnnnnnnnnnnnnnnnnnnnttgatctggacaacgctgcgggacctgagggatgagcaagtttctgcagcatggagcacccatgcatgaccacagcatctgacagaaaaccccagatctctagattcacccttttcacacttttttctcaatatggagaaaaccaaaggcagcatgcagacctgctctcagctcagctgtgtagcactggaagcacaggggctcttcwatgcatttgccccctgcttatgacagaggagaagctcactgctgagagcaggacttgatgccttgcatgtgctcttgagcttctgcagcctcaggggcygtgcaggcagagcatctccactggggcagctacctgcatcctaacagccccaaggaacctcccaagtgttaatcagtgtttgaaattattgttgccttatttaataagagtaggaattgtctctgtatcatcacagttgaatacactactctgaaactcccagggaaccaatgatgagattccatgtaaaacatccctga

SEQ ID NO: 82297 - DNA, 600 bp, Chicken  19866894376794_2
ggacaacgctgcgggacctgagggatgagcaagtttctgcagcatggagcacccatgcatgaccacagcatctgacagaaaaccccagatctctagattcacccttttcacacttttttctcaatatggagaaaaccaaaggcagcatgcagacctgctctcagctcagctgtgtagcactggaagcacaggggctcttcwatgcatttgccccctgcttatgacagaggagaagctcactgctgagagcaggacttgatgccttgcatgtgctcttgagcttctgcagcctcaggggcygtgcaggcagagcatctccactggggcagctacctgcatcctaacagccccaaggaacctcccaagtgttaatcagtgtttgaaattattgttgccttatttaataagagtaggaattgtctctgtatcatcacagttgaatacactactctgaaactcccagggaaccaatgatgagattccatgtaaaacatccctgatgttctttctaggactcaactgcatctggaatcccacagtcccatcagacagcgggtgttattctggaaaaatgggtcaggattttgggagatcattttc

SEQ ID NO: 82298 - DNA, 600 bp, Chicken  19866894376795_1
tctgccatatgtgaagatgtggtgcagaggaacattgataagagaacaataaagagtgaagaagaaatagtaatgaaggcagaagtacatgtatgctgattatacactcttccttgtttcaaagtatggaccaaagagagagacaaaatttactatctaggagttgggtgtaaggcagttatcaacccgtctctgcatttggcttaatctgcaggtttagtactgattgtgtgcaatgcatgtgaagcacctgcaccaagtcatggagctgattacaaatgtgatgacttcagaggtttkgggacaatttcagagagttgaagtcactcctatatgtttctgcagtgttagaaaagaaaggagggagctgtgagtcctgcagtttctggtacaaagcaggtatgtaggtcccagttaattatttctgtcttgtctcgacacactgaaacacttctacaagttctgccttccccttgacccatcctttcaaaaaatttaccactgctctttatttagaaggctcagagatggtatttcagtggtgattactacccagtggttgtctgtgacaacttgtagcctactattatttgcaattta

SEQ ID NO: 82299 - DNA, 600 bp, Chicken  19866894376796_1
ataacctctgttaatggagttgagtaagaatagcatttgagcacaggtctaacctaacctgattccatctcctgtaatgtatctttttgaaaataagtttctcttcagtttgttctagaagttacttagtctgcacatgttgtgtatttatgcatggctgcctctctgccgacctgtgggtatatttgtgtgaatttgttaatttagcttaaattaaagcaaatcacaatgctgttattactgtggtttttttttccctctctcctaaaggctctttacaatgtgagtaaacctgtaccyccattgaaatctcctgcaattacttctgaaactgaaaatgtgagaaatctcaaaggttctcctgctgctaagggtccacaagagaaatgttcagaagagaaagaatttctggttcatgagcaagtaaatatttccctaaaagaaaggcatatatcttctttaataggtttgatcgttcgtttcagtaatgtgggagtgggttttaaaacactttctaaagttacattttatagccgttattaatgacactgcactcaggcaatagtggttttgctgtgaaggactggaaataacactgtt

SEQ ID NO: 82300 - DNA, 552 bp, Chicken  19866894376797_1
agcattgctaatcctggaaggcaaatgactgccttgttttggaagcaggaagtcgagctagagcccagaaatgctgttgttctaaccccactggtgcagaacacctgtgtcctttccccgagatcacataagtgttccctgctcaaatttgagccttaacgtgtgctcttaataatccgtgctgttggtagttttcagtatagaaaactgtcccatctgaagggaaaccaaccaacctgttatgattcagaggtggcgaggtttgtgtaagaactgaatagtggcattacttttacctcratcagctgcaagcttgcagttttctgtggagacctcagaaacggtgaatcggtgaaatgtatttaaagaaaagctaactacgccaaatccacttgtttctctttcatgtcaactcttgtgactctacatgagtctcctgatatctttcactggtcacaggctaaaggtccagacccatgaaaagtaaccccaataaaacagctcttctgttaggttggtatcagtttgagatttgtattttaactctgaatg

SEQ ID NO: 82301 - DNA, 599 bp, Chicken  19866894376804_1
  misc_feature (1)..(73): n is any nucleotide
nnnnnnnnnnnnnnnnnnnnnnnnnnnnnnnnnnnnnnnnnnnnnnnnnnnnnnnnnnnnnnnnnnnnnnnnncaaagaaggaaaatctagaaaggcagccaaatgacccccatgtttcttttttttttttttcctgcagatatgcatacatttgtatgtgttctagatttctgtgagtgctcagacaacttgtccccatgcgggttttcttccagcaactttgaaccattctttccattgacttcagtggcaagagcttgattggaggcaaagaaacaaagccgtttgaaaagaaaagraaaaaaaaaagtgataaaatgtagatttagtcatgtgtatagaattgcgtttcctggaatttgagtgatttttgtgttcagatagaaatctgtcagcattctgctcattgcttcatgattccgctttgaaacttcttgaattcggtggagatagccaaaagccaaccactgcagaagcagtaacactgagaacagctgactccaagggaagcaaaactggttgggaaagacgttattcagggctcaagaaatatagactttctctctggttttgccagggagtttctgaatgattttgt

SEQ ID NO: 82302 - DNA, 600 bp, Chicken  19866894376806_1
ccaagctgcatgtaaaccttctttgtctagaaaatgtaaccttttcaagagtaacatattccaggggttagctgaaactagtcttaacagtgctgttctcctggcttcatgcctatgaaagtggttaatggttggaatttatgtcacagaacacataataatttgttagaagaaactggattcagtcacagcacaggcatttttctcttcctgtcattatattttgtgaggacttacttatttcctgcaatcctagctcgtgtgaagaagagaatgataaaatttctgaatatatatatwtttttttctgagaatacatttatactccagatgacctttggagtaaatttgaactattagattttcccatatatttatagctgtgtccatgcatctttgccagcaaatcttacagattttatccaccaactatttatttatggttaaaagaaacaatttggatttggaacactacagaaaaagatcaaagctgttacatttcaagttaagctttcttttatagacttatttttctgtgctctcatgaggcagtgttacattagtttaatgcctttctgtgctactatcgtctgtgaaagt

SEQ ID NO: 82303 - DNA, 599 bp, Chicken  19866894376814_1
  misc_feature (1)..(22): n is any nucleotide
nnnnnnnnnnnnnnnnnnnnnnaaaatatagctatatagggaactgggagtaggaaaaaatgaccaataaatgaataatttaaatctcctttaaaagagaaaagaagcagcaaactacttaattattccaaaggaaaaggaaacccattaattgggcttgacacaggtaaaagtataaacacttcatgatgcagcattttggatgcattccattttcttatttgaaacagctgtaatcaaagctccattcctgatagctttttacactaaaatcacaggcacctggggagggagtgggastttattttgtaagctctcttttaagcagagtgaggtggcttcttgttgctgctttttcatggagtagtggtcaaattcagcagggttgtttcctcstgtaggagattggtggtagagggttcaaagagcatccaacaagaagcaattgcagtagccctggtgaagctaaggtaacmygtgggatatatttagtaaaactgtgttattcagaagcttggttcttttaagctaaagacaaggcttggagcccaggtcctgcatgccgatgtagttgctctactgctttctgtttattctat

SEQ ID NO: 82304 - DNA, 600 bp, Chicken  19866894376814_2
gagaaaagaagcagcaaactacttaattattccaaaggaaaaggaaacccattaattgggcttgacacaggtaaaagtataaacacttcatgatgcagcattttggatgcattccattttcttatttgaaacagctgtaatcaaagctccattcctgatagctttttacactaaaatcacaggcacctggggagggagtgggastttattttgtaagctctcttttaagcagagtgaggtggcttcttgttgctgctttttcatggagtagtggtcaaattcagcagggttgtttcctcstgtaggagattggtggtagagggttcaaagagcatccaacaagaagcaattgcagtagccctggtgaagctaaggtaacmygtgggatatatttagtaaaactgtgttattcagaagcttggttcttttaagctaaagacaaggcttggagcccaggtcctgcatgccgatgtagttgctctactgctttctgtttattctattagttttgatcaatattttctcttgctttggtctttcccarcagccccttcttcaagggtgtggtaacaacagcctctccatagcacaatgtctctg

SEQ ID NO: 82305 - DNA, 600 bp, Chicken  19866894376814_3
aaacacttcatgatgcagcattttggatgcattccattttcttatttgaaacagctgtaatcaaagctccattcctgatagctttttacactaaaatcacaggcacctggggagggagtgggastttattttgtaagctctcttttaagcagagtgaggtggcttcttgttgctgctttttcatggagtagtggtcaaattcagcagggttgtttcctcstgtaggagattggtggtagagggttcaaagagcatccaacaagaagcaattgcagtagccctggtgaagctaaggtaacmygtgggatatatttagtaaaactgtgttattcagaagcttggttcttttaagctaaagacaaggcttggagcccaggtcctgcatgccgatgtagttgctctactgctttctgtttattctattagttttgatcaatattttctcttgctttggtctttcccarcagccccttcttcaagggtgtggtaacaacagcctctccatagcacaatgtctctgtagatttagcctgtggtgtgctttgcctgctgcgtaggtacaaagtgattttaaattaccctgtataactactaatatat

SEQ ID NO: 82306 - DNA, 600 bp, Chicken  19866894376814_4
aacacttcatgatgcagcattttggatgcattccattttcttatttgaaacagctgtaatcaaagctccattcctgatagctttttacactaaaatcacaggcacctggggagggagtgggastttattttgtaagctctcttttaagcagagtgaggtggcttcttgttgctgctttttcatggagtagtggtcaaattcagcagggttgtttcctcstgtaggagattggtggtagagggttcaaagagcatccaacaagaagcaattgcagtagccctggtgaagctaaggtaacmygtgggatatatttagtaaaactgtgttattcagaagcttggttcttttaagctaaagacaaggcttggagcccaggtcctgcatgccgatgtagttgctctactgctttctgtttattctattagttttgatcaatattttctcttgctttggtctttcccarcagccccttcttcaagggtgtggtaacaacagcctctccatagcacaatgtctctgtagatttagcctgtggtgtgctttgcctgctgcgtaggtacaaagtgattttaaattaccctgtataactactaatatatt

SEQ ID NO: 82307 - DNA, 600 bp, Chicken  19866894376814_5
tcttgttgctgctttttcatggagtagtggtcaaattcagcagggttgtttcctcstgtaggagattggtggtagagggttcaaagagcatccaacaagaagcaattgcagtagccctggtgaagctaaggtaacmygtgggatatatttagtaaaactgtgttattcagaagcttggttcttttaagctaaagacaaggcttggagcccaggtcctgcatgccgatgtagttgctctactgctttctgtttattctattagttttgatcaatattttctcttgctttggtctttcccarcagccccttcttcaagggtgtggtaacaacagcctctccatagcacaatgtctctgtagatttagcctgtggtgtgctttgcctgctgcgtaggtacaaagtgattttaaattaccctgtataactactaatatattctggaattattggtctgcctgaatgaagctgttgacgttaaaatagtggttattatactctctaatggggaacaaggtgactgctcttactgttctggtctgcagtgaaagcatttaggggggggaaaaagaactactctacgttcagacttcctgagacaac

SEQ ID NO: 82308 - DNA, 600 bp, Chicken  19866894376814_6
ttttttttctacttgaagtaaactactgaaactcactgctgctaataaagcttgctcatcacattagaggtagtgaatatatatagttttaatctttctgatcatcttgaaagagttcttttaactactatcatttctttctctttgaagttaaaggtgttacactaatcaaaaagcaaagtttatatgtgctgctttctccctgaggaatttgtcagatgcaggaggcagatccggagaatctctaagtagcctcttccttctgatggtctgtagatcatagatccacatatctctttrgaaggatatgtaggcaacagtaacaactgcagtactgtagacttccttcaggtccttacaagcaccaatggatgcacaaacttcagtaactcaggtccaaagtcctacttaccctctgcatctacactgattctctgggaaagtactgtcagaagaatgcccaagaaacccagcagaagtttgcagtgcytgtgacattgaaacacatttttgtccttctggctgtatcaggagaatcagggtcagaggatacttattctcaaggcaaaggtagtggaagttctataagtatagactttt

SEQ ID NO: 82309 - DNA, 600 bp, Chicken  19866894376814_7
gctgctttctccctgaggaatttgtcagatgcaggaggcagatccggagaatctctaagtagcctcttccttctgatggtctgtagatcatagatccacatatctctttrgaaggatatgtaggcaacagtaacaactgcagtactgtagacttccttcaggtccttacaagcaccaatggatgcacaaacttcagtaactcaggtccaaagtcctacttaccctctgcatctacactgattctctgggaaagtactgtcagaagaatgcccaagaaacccagcagaagtttgcagtgcytgtgacattgaaacacatttttgtccttctggctgtatcaggagaatcagggtcagaggatacttattctcaaggcaaaggtagtggaagttctataagtatagacttttaaaggttttgaagaccactatgtgtcttattctgtgaccccgaggcactcacaggtttaatgtttcatagatatttggtggaacaaaaatagcaacttcagccatttatttctttcttctgatgtcttgatatgaacaggcttattttatgtcaaagcaagccaatggatatgagataaagaatggggtt

SEQ ID NO: 82310 - DNA, 359 bp, Chicken  19866894376816_1
aatgtatcattatgaatggctatatgatacacagtataatatattatcagaattaacatatgtgttgggtactgtgggatataaggaatacgtgcaaatttgtccagatcattgtcagaacacaaatacagggaactggtgatccttgtttcggggatttcaactataagctctactagattggctccaaggttaatagctgttttgcataaaacgatgttaatttcttcttttctttctaaagagaaggtactgctgcaacagcagcatagtctatgtgcttcttcctaaataaaccargaatgtgtaatgttttgctggagaaaaatgtgaactctatgtaggccaaacaggattat

SEQ ID NO: 82311 - DNA, 571 bp, Chicken  19866894376829_1
aaattctaattagtttctccttcaattttcacaagaatgaacctcattcattttcattgtgactgaatgtaacattcctatttggtccttcaggatatagtgtttccgagtatgagattaattatgctgggacttttcttgatcttgacctataaattgcttccagatcagccttcagatatttaattctgaaccttcttggttttgcttatatgtacatctaatttgcaacctctggatcactgtcaaaatgttgaacttcctgttacagtaattgtaactccctcttgttaccatttyttccacatctgtgttttataaaatctaaggcagtgaagcacttaagatccaagtgatgaaataatatttcaccaataccatgaccctgtacaaaaccctatatttatgcagtttcaattatgcatttggatagttactgaattttctctacaatacagagagtagctataaattgtctcaaagaagctggaaaggaatcaaaaaaactttgtttcatagaataaaatgggttaagtttgctcagagctccataaagaggaaatatgacgaa

SEQ ID NO: 82312 - DNA, 599 bp, Chicken  19866894376841_1
  misc_feature (1)..(26): n is any nucleotide
nnnnnnnnnnnnnnnnnnnnnnnnnntttaccccagcgttcagctgcaagcttttaaagctcattcatgtaaatttcacaaccaaggaatgcagcagttttcacccttaatgaaatataagaatgtccttttcattccatatgactcacagttttgttttgaagtttctgagcttttcttaaggttatggagtggtcaagcgaagcggaacagggtttttgaaatcaggaagcctgggccgctgtttcattcagaaaaaaaacgtagagagcgagagagggagggaggggaaaaaagccytattcctgtgtttgattgaaaaataaaactgctgctctcagtgaacctttgaagtcccccagcccagtaattgtttcacgacatttgcagcttgaggcagcaagaatgtttgtggttgttttaaaggcatctcagtgtggattccatatggtttatttttatttttattttgttttttttcctaatttttttttcttccccatttggagcctcaagttcttggtcgttgcgcgatcctcagacccagcctactctgctcctgcacagactgtgaaagaactgagtgcatgtattgtagc

SEQ ID NO: 82313 - DNA, 600 bp, Chicken  19866894376843_1
cttggagggacagttacaaaaaatgtgtttcagtcacactgctcccttctaacctcctgacccctggatcaggggggttggatgtgagctagcagtgtgcccaagtagccaaaaaggccaatggtatcctggcttgtaccagaaatagtgcagccagcaggagcaggagctgatcgtctccttgtactcagctctgctgaggccgcaccttgagtgctgtgttcagtattcagcccctcactacaagaaagacagtcaggccttagagcaagtccagagaggggcagtggaactgtgaarggtctggagcacaagtcttatgaggagtggctgaaggaactgggattatwtggtctggagaagagaaggatcagaggagaccttacctctctctacaactccctgaaaggaggctgtggcaaggcgggggtcagcctctgctcccacatcactagtgataggatgggagggaatggcctcaagtcacaccagtggaggttcaggaaaaaatactggaaaaaaatattcctcaaaagagtggtgaggcactggaatgggctgcccagggaggtggtggagtcaccattccttggaggtgtt

SEQ ID NO: 82314 - DNA, 600 bp, Chicken  19866894376843_2
aacctcctgacccctggatcaggggggttggatgtgagctagcagtgtgcccaagtagccaaaaaggccaatggtatcctggcttgtaccagaaatagtgcagccagcaggagcaggagctgatcgtctccttgtactcagctctgctgaggccgcaccttgagtgctgtgttcagtattcagcccctcactacaagaaagacagtcaggccttagagcaagtccagagaggggcagtggaactgtgaarggtctggagcacaagtcttatgaggagtggctgaaggaactgggattatwtggtctggagaagagaaggatcagaggagaccttacctctctctacaactccctgaaaggaggctgtggcaaggcgggggtcagcctctgctcccacatcactagtgataggatgggagggaatggcctcaagtcacaccagtggaggttcaggaaaaaatactggaaaaaaatattcctcaaaagagtggtgaggcactggaatgggctgcccagggaggtggtggagtcaccattccttggaggtgttcaagaaacatggagatgtggtacttagggacaaggtttagtgggcaatat

SEQ ID NO: 82315 - DNA, 600 bp, Chicken  19866894376846_1
ggtgaggtgaactctaatcctacatttttcttagctaatgtttactgtttcctacatccatctgtgctagactgacagatctgaggatcccatgaatgcaactgcactacaaagaaagacaggaagcatccaatttagagcaaatcaacacttaaggcctcctatgcacactatttttgaagactagtggaaaatgctgaataatcttgttctattctgcctcagactaaagagcactgacatcatcattctgtgctgagtttctgctgaggacaccactcaaggcctatattgaatttrgtgtgatttgaaatgagatttcactatgctatttctgtcatcagaacgtatcaaatgtctcctttgctgctcttctcttttctacctgtgaacagaaaaagatcaagacacacaagcatcttggttatgtcagtcttctgcttactcttaaccaacacaaaaagcaaactgaaagaagatagagtgcagaacagcacggtgctaacagtaacaccttcgcttagtgtccccattccttctgctgcttctgcctctcctttttcccactctgttactcctcctgttattgcagagggaact

SEQ ID NO: 82316 - DNA, 600 bp, Chicken  19866894376854_1
tggtttctctggtggtgttccccatggggagtattattaacgtccatctggacaaggggattgattgcatcctcggtaagtttgcaggtgacacaaagttgggaggacgtgctgatctgtttgaaggtaggaaagttctacagggagatctggataggctgcatcaatgtgctgagccaacacgtccagaatttttttctctgaaagagcagtgctgcagtggcacagctgcccagggaggtggtggggtcaccatccctgggggtgttcagggaccgtggggatgtggcactgagggaygtggtcagtggacatggtggggtgtcttggggttgggtttggggatcttagtggtcttctccaacctaaatggttctttgaatctgtgattctgcaaaagcagtgaggacaaggccctgtgctaaattagcttgatgggattctagttttcatcacaggttaaagcaattcaggtacatctgtgttagaataaatcattgctgttgtagttctcctctgcagtgctgcaggtaactctggaacaaatccttcttctgtagcatcgaagcagtacggagctggtgagcctcatgcaacagc

SEQ ID NO: 82317 - DNA, 600 bp, Chicken  19866894376857_1
gcggaaaacaaatagatcaagcggattttgtcatgcggtaagatggaaacttcaatgacaaattgtctgcccttccccctgctcagcctcttgacttttcaaagctattcagttgtgattaatcaattataatttgccttgggtactttttttctccccttcgcaggatgttttacagaagtgatttgggtagaagtgtgagaaggggcaataaagagagttttgtctggcctctgcagatgtgtgtgtactgtgggggaaatctgaagatgggtgtgttgtggttgtgacagaccgtgmactgtcacagacagggatttaggagctgcttttctttttaattattccttatcagacggagtctcatcttgtactgtgcttcgtccttcacaactctaaatgcagtcatatgcaacccattgaaatcgtgatgagtagatactgatccataggggaaggcttaataagttgggacaagctaaaatatttccacatttttcctccctccagattaatttctaagagaagacaaaacctttttcctctatgcctttttttttttttttttaattccccacatttgctgtacctctggtcttt

SEQ ID NO: 82318 - DNA, 600 bp, Chicken  19866894376858_1
ttcattttatggatttcatgggatttagagactgaaggacttcaatagatttttgaatttgaggatctaagagaccttggaatttcattcatgtacccttcatgttgacctcaacagtttacttaagttgttgcatgccacatcagaaagcaagcttgaacagaggtcacactgaagatttgagatgcccacgtggatgagcagaggtaagggcttcaatcctgtgattcatactccttgctaagaaagaaagcagaagtacaagaccattgcaggaaacaccctctgggctttcgaatstggggagatgcttaaccagtagtggctgaatgccatgcatccatttaggcactgaagaagtgaaattctctgtataaccatagaatgtggctatattctatccagtgactcttgcagtggcacagcactctgaaggacctctgtactttgtggaagaaaataaaactggaatgtacaacagggaagtgtctccttctcagctgatgaagctacgaagtgtggttgtcattgctttgttacacagaactccaagtatcagtagcccttcaatgctgtactattagttacttgcctttggct

SEQ ID NO: 82319 - DNA, 600 bp, Chicken  19866894376861_1
cttcaatgtatgggtcagactgcaagtgctgaccaaccattccaaagggacatctatacggggtgagtcttcctgcctatatgggcacctctgagtggaagcatgcactgctaaccactgggactgctgggaaccacaaaataaaaagcaggatatctatccagcccttcaacctttttctgggtaattttgacacagcgatcgcttttcttcttcgtgtcattaaagagcattaacttctggttcagcagggatttagaggttggatttcattcatttaactttctgaggatggaacawgaatactccatgacatcacatctcatgtgatacctactaactcccatccatacacagccccacatctcctacatgttgggtacaaactatgtcaggagagaacgagctgctcagatatctctgtgctgtgcacactgaatggagccaacattaaagcccacaacagctggcacactaggaaaaataagatgttggccacatctgtcctttagctatttccttgagtaactgagcacttccacatatatctccaaagtgtaaccaagggggactttcaatgccatgggctgctccccagca

SEQ ID NO: 82320 - DNA, 600 bp, Chicken  19866894376867_1
gaacgtttgaaaattggtgttttggattcaggcactctgtgttcagtgacctctagcgacgtgtctgttgataccttttagtgacatggacaataggctcagctgtgaggtatcatgggaataataccacttttcttgtcatggggattttcaaagggtaggtatgctcaagtttgttcagtcttggatgtgattataatggtaccatgtgtgagtcaatgatgtatgtctagcagagccatctctgaagttttatttacacactatgagtacatacggtaaaactgcttctgtagcacyaaacgaatgtctgtatgtgattcaccagtctattcctggtgaacatgtgtggtttatttgttgacactactttctgcattcagcagtgggttttttttttttgtttgtgtgtgtgtgtgtgtgtgtgtgtgtgagctgttagagtaacagggcagtcacaggggggtgggttattctttgaaaataggtcattgatctgtaactgtacctactgtatgttccctttttgtaagtctctagattgttccattttctcataggttaaaaaagcttcagtaggctggtagaagtttctatgca

SEQ ID NO: 82321 - DNA, 599 bp, Chicken  19866894376870_1
  misc_feature (1)..(166): n is any nucleotide
nnnnnnnnnnnnnnnnnnnnnnnnnnnnnnnnnnnnnnnnnnnnnnnnnnnnnnnnnnnnnnnnnnnnnnnnnnnnnnnnnnnnnnnnnnnnnnnnnnnnnnnnnnnnnnnnnnnnnnnnnnnnnnnnnnnnnnnnnnnnnnnnnnnnnnnnnnnnnnnnnnnnnnacctcctccctccccctccaagatgctgccactcctctgcaaaaactaagtattactggcctatttgatctctcacttagacacaggctttacattttttacagtaactaatgcagaagatttacatttcacckaaggataaaatttaagcacagaacaaagtaaattaatagcaagcaggaaaacaaagtacaaatttggttcgtgttcttttggacattaaagaacccaccaaacatcgtcatgtcaaaagccaaggtcaraactaatgcagcttgagtactgcagtcatgctgacactaaaaagccctttcraaccagctaatcaaagacccattcatgctgcagaagataatcactaccttttctgaacagtgagacagagccagcaggtgtattatgccttatttttaacaaagtgtaactatttcac

SEQ ID NO: 82322 - DNA, 599 bp, Chicken  19866894376870_2
  misc_feature (1)..(37): n is any nucleotide
nnnnnnnnnnnnnnnnnnnnnnnnnnnnnnnnnnnnnacctcctccctccccctccaagatgctgccactcctctgcaaaaactaagtattactggcctatttgatctctcacttagacacaggctttacattttttacagtaactaatgcagaagatttacatttcacckaaggataaaatttaagcacagaacaaagtaaattaatagcaagcaggaaaacaaagtacaaatttggttcgtgttcttttggacattaaagaacccaccaaacatcgtcatgtcaaaagccaaggtcaraactaatgcagcttgagtactgcagtcatgctgacactaaaaagccctttcraaccagctaatcaaagacccattcatgctgcagaagataatcactaccttttctgaacagtgagacagagccagcaggtgtattatgccttatttttaacaaagtgtaactatttcacatcttgacagtggcaaaaaacaaaacaacaaagaacacatctcaagcaagctatatatgctatttatactaacactactatagtcctttttcgactttctgattcagatgcatctgtgtttgcattaag

SEQ ID NO: 82323 - DNA, 600 bp, Chicken  19866894376870_3
ctccaagatgctgccactcctctgcaaaaactaagtattactggcctatttgatctctcacttagacacaggctttacattttttacagtaactaatgcagaagatttacatttcacckaaggataaaatttaagcacagaacaaagtaaattaatagcaagcaggaaaacaaagtacaaatttggttcgtgttcttttggacattaaagaacccaccaaacatcgtcatgtcaaaagccaaggtcaraactaatgcagcttgagtactgcagtcatgctgacactaaaaagccctttcraaccagctaatcaaagacccattcatgctgcagaagataatcactaccttttctgaacagtgagacagagccagcaggtgtattatgccttatttttaacaaagtgtaactatttcacatcttgacagtggcaaaaaacaaaacaacaaagaacacatctcaagcaagctatatatgctatttatactaacactactatagtcctttttcgactttctgattcagatgcatctgtgtttgcattaagagagagaacagatctctcagatggtttctttaggaattcccaagtaccagagc

SEQ ID NO: 82324 - DNA, 516 bp, Chicken  19866894376871_1
agaagcatctctgagcacagatctgtgtggctattttgatgcatgaatgagaaacttagatggattttagttgattgtacttagtcttctactgttgagctgtgttgtttctgaaaattccagggcttagagtcctgtagaagattaccctcatggttcttccttcagacctaggattcctgtgtgtcctgataggcactcagcacttcttagaagtgggggataaaaaagcaacaggctttttccttgcgtttctgtgcttttattctacctcctcttcctgttctacatctgcttctycagtacacatctgtttttttggaacagaaaaggattaaaaagatgagaatagtcaaaggaaggtagcaaaagggaaaatagcatagttgtgggtgatttgctttttgttaagtaaaaacattggaactagtagcacatgcttcctttgcaaggaagatatctcagatttcttgcaagctcttcaaaagcttttccctctgtttacacagctgactg

SEQ ID NO: 82325 - DNA, 600 bp, Chicken  19866894376894_1
tttttgcaaacccatagagagactgaactcaaaacacagtccaacacaactactatctttcagtcactacgaacaattaatcataccttgacagacctgactcccagtttggggcctaccttattctacactttcttccaaactgcctcatgcccatgaggacattcttggtatgcatcttgtactttgccaccattccaaatctcttctccatgctctgaagtccaaattgattgacagctgccagactgttgggccactgtagttgatgtcaaccatgttggccaaacttgttcccakctcttcatgaccctctctgctcctgcgccaagattttcagctccatggggcaggcagtacctatacaaaagcaccctgtgccaggcttctgattttgagagcctgcaacattatatttaggtataaaggtggagctcagcttgagtcccttcctatttccaacgttacagcttaataggactgctttgctcttggctcattcttcatcccttttccttacgtatctcaaccacagatctgctcacatcacgtggaagtgttatgttttctggccctaagagcagaaagccacgtcatcag

SEQ ID NO: 82326 - DNA, 599 bp, Chicken  19866894376907_1
  misc_feature (1)..(195): n is any nucleotide
nnnnnnnnnnnnnnnnnnnnnnnnnnnnnnnnnnnnnnnnnnnnnnnnnnnnnnnnnnnnnnnnnnnnnnnnnnnnnnnnnnnnnnnnnnnnnnnnnnnnnnnnnnnnnnnnnnnnnnnnnnnnnnnnnnnnnnnnnnnnnnnnnnnnnnnnnnnnnnnnnnnnnnnnnnnnnnnnnnnnnnnnnnnnnnnnnnnatactggttttctcttcctggatagggttgaacaaagagtgggaatgctggagtgtgtgttatttaccttctgaatgtgaaagtgtaaagagcatgccagtctcyccagtgagagtttcccaaggagaaccagacagttcagactgccttatttttcacctggataagatttctccctttcttcttatgaggttaactaacatctgagcaacagataggaaaacaagacagaaagtgccattgggtgaaaagaagcrtagggcaaaaagcacaggaaaaaagattgtcttaagtgacaagtttataatctaaatttgattcctggaaattcagaaggttttttggctatagacctcaggtctgattctaatatgggtctctgacacatgacccatgtaartatg

SEQ ID NO: 82327 - DNA, 599 bp, Chicken  19866894376907_2
  misc_feature (1)..(43): n is any nucleotide
nnnnnnnnnnnnnnnnnnnnnnnnnnnnnnnnnnnnnnnnnnnatactggttttctcttcctggatagggttgaacaaagagtgggaatgctggagtgtgtgttatttaccttctgaatgtgaaagtgtaaagagcatgccagtctcyccagtgagagtttcccaaggagaaccagacagttcagactgccttatttttcacctggataagatttctccctttcttcttatgaggttaactaacatctgagcaacagataggaaaacaagacagaaagtgccattgggtgaaaagaagcrtagggcaaaaagcacaggaaaaaagattgtcttaagtgacaagtttataatctaaatttgattcctggaaattcagaaggttttttggctatagacctcaggtctgattctaatatgggtctctgacacatgacccatgtaartatgtggatatctcccacaaaccattcccagtgagttatctgcttctcacagagttcgaaaaacaggaggcaggacagggttaacctttcacactcttccttcacccctgcagatgggctgcggttttgttttcctggttaaaggagggaagctga

SEQ ID NO: 82328 - DNA, 600 bp, Chicken  19866894376907_3
tctcyccagtgagagtttcccaaggagaaccagacagttcagactgccttatttttcacctggataagatttctccctttcttcttatgaggttaactaacatctgagcaacagataggaaaacaagacagaaagtgccattgggtgaaaagaagcrtagggcaaaaagcacaggaaaaaagattgtcttaagtgacaagtttataatctaaatttgattcctggaaattcagaaggttttttggctatagacctcaggtctgattctaatatgggtctctgacacatgacccatgtaartatgtggatatctcccacaaaccattcccagtgagttatctgcttctcacagagttcgaaaaacaggaggcaggacagggttaacctttcacactcttccttcacccctgcagatgggctgcggttttgttttcctggttaaaggagggaagctgaggcatacattgtaactcgaactgaatactcctctgctgtaaactgttagcagctttctttgtatttgaggaaaacgagcaggagggagaggaggataactgcagattgggcaagtagtaaatgtgtggtaaacgcacaagggaa

SEQ ID NO: 82329 - DNA, 600 bp, Chicken  19866894376908_1
attagagaatttacaattatttgactaaaggtagatgttcttatgtgtatatctcaacattagttacagtcactggatatccagtcagtagttagtgcagcataggcatcaatttggctcatatgaaactgaatgctgattgctctgtaggttccactgactgtattgactgaaggctgttgattaaaatatgtacgttaatacatcttatccacttgtgcttatatatcttaatctcaaactgaatccagtcccttctattcatgaccttgataatggcaaagttttttatttttctaygtattactgagctatcttttcttctcaaagttgctaccgtgataacttcagtcaatcctgtgcagtgtgattagatgttactgaagattacctgaaaacatcacctactgcggaatgcagtgctgtatttattgtgccttttcagatattatccaataaatacgatccagaattttctttctttactgtttagttcatactcattaattacaatgtcttgtaaatgtctgcatgtgaagaaattgtttctttgcttttttttttctgaaattaaatgctaatctctgttctagttggatt

SEQ ID NO: 82330 - DNA, 600 bp, Chicken  19866894376918_1
aaaatcttgagagctgggttgtgttatgtcaggctaagtgtttcagtgtcacaaacgtgtgtggaatcagagctgactcagagctgaggactgtttctgtctggacacttctgtagtttgatggggtaggagcccatgagtactaattttctttcacccttttaaacaaaagtttacagaattttatagtggtctggggtgatgagggtatctgatgaacttctgatacaaaaagggaatggatgagaaaaggacaggtcaatcacacctttcctatgaacgtaagttcttggaaaggckcctgctgcattgagacaaatactcccaactaatctcaytaagaccttctgtatgagtaagctgaaagatagcaggaacacgggggggggttgcattatttgacagctgctgtatctaagccatttttcagtatttcactgtgtcattgactagctgggattattgcacttatattgaaatattatattatattgaaataatttttcttttagttacagcattctgcagtgagccatctcctcctttagtaacagcaggagacagagcaaaatcyccccaccaagtcctaagtaacagcac

SEQ ID NO: 82331 - DNA, 600 bp, Chicken  19866894376918_2
tgtttcagtgtcacaaacgtgtgtggaatcagagctgactcagagctgaggactgtttctgtctggacacttctgtagtttgatggggtaggagcccatgagtactaattttctttcacccttttaaacaaaagtttacagaattttatagtggtctggggtgatgagggtatctgatgaacttctgatacaaaaagggaatggatgagaaaaggacaggtcaatcacacctttcctatgaacgtaagttcttggaaaggckcctgctgcattgagacaaatactcccaactaatctcaytaagaccttctgtatgagtaagctgaaagatagcaggaacacgggggggggttgcattatttgacagctgctgtatctaagccatttttcagtatttcactgtgtcattgactagctgggattattgcacttatattgaaatattatattatattgaaataatttttcttttagttacagcattctgcagtgagccatctcctcctttagtaacagcaggagacagagcaaaatcyccccaccaagtcctaagtaacagcactgaagaaactacaaataaccatgaaaggcagaagcaga

SEQ ID NO: 82332 - DNA, 600 bp, Chicken  19866894376918_3
tatgaacgtaagttcttggaaaggckcctgctgcattgagacaaatactcccaactaatctcaytaagaccttctgtatgagtaagctgaaagatagcaggaacacgggggggggttgcattatttgacagctgctgtatctaagccatttttcagtatttcactgtgtcattgactagctgggattattgcacttatattgaaatattatattatattgaaataatttttcttttagttacagcattctgcagtgagccatctcctcctttagtaacagcaggagacagagcaaaatcyccccaccaagtcctaagtaacagcactgaagaaactacaaataaccatgaaaggcagaagcagaaggtagacaagggagcacaaacaacaatcagcaaacacttaccaccaggaaatgaacaacttgatacaaaacaaaacattaaaagtgcccaaatttccatcacctcctcatcctcctcacctttctcttcctcttcttcctcttctgcacctactcataactccttcatcttacagacctctcaatgctccatgactaaatcatcaaaacaacctcccatagttttcctgcccaaa

SEQ ID NO: 82333 - DNA, 600 bp, Chicken  19866894376920_1
gttcactgaactcagtcagtgacgtggaaaatgtttagaattagtaccaatgtcatatgatggggagggggatatcccaaccatcttcatctctagatgtgactcatcccaacttcttcatctatacgtgcaaccattttaattgcatttaaatgcttactgcaaagcaaccctggaactgttgtcttaatatacgttcttgtagaatctaaaacagaagagttaataaatctttaaaaatatgtagaggaaagcaccacagcaagaagctttaaaaagaaaaaaaaagtcacctgtgtrttctgcagtctctttctctgacagaggatagcaaatatagattttctgagatttttctgtgtggtttaatgagcagaaaacttatatgattgtttttttcttttccaggatttcctcaaatattctaaaaaagctaaccttgatacaacagaactagaggtacttgaaatgttttctctcagtgatttcaatgctctttattctgaacttgttttgacaatgttattttccttttctgatcttcttgaggatgtgcttattataagtgtttacttttcacattactttctgttctaaagt

SEQ ID NO: 82334 - DNA, 599 bp, Chicken  19866894376922_1
  misc_feature (1)..(134): n is any nucleotide
nnnnnnnnnnnnnnnnnnnnnnnnnnnnnnnnnnnnnnnnnnnnnnnnnnnnnnnnnnnnnnnnnnnnnnnnnnnnnnnnnnnnnnnnnnnnnnnnnnnnnnnnnnnnnnnnnnnnnnnnnnnnnnnnnnnnnntggatggggcaggagaaaacgtgtgagccatcccatggtgctggcagttccatggggccaaccagagctggggatgccgccgtgtccccgagcagcggctgccactcactggtgtcctgtccctgcagcagggcatggcgcagagcgaatagagttccccttcccyttaaccactggtcgcagggatgctcccggatgcagccctcctggatccaggtggaaggacggggtgatgcacacctggaaacgtgctccaaacccacgagttcagcactgctggatgtgggatggtcccctactacagctgctgggatgtggcatcgcatgggacccgcgccgggtttggctttggctgcgtggcctcatttttgagagctggaatgtgctcaaagatcggctttccgagttgctttttttggttttgttttgttttaaatgacagcatttcccctttaaatttacatc

SEQ ID NO: 82335 - DNA, 599 bp, Chicken  19866894376950_1
  misc_feature (1)..(137): n is any nucleotide
nnnnnnnnnnnnnnnnnnnnnnnnnnnnnnnnnnnnnnnnnnnnnnnnnnnnnnnnnnnnnnnnnnnnnnnnnnnnnnnnnnnnnnnnnnnnnnnnnnnnnnnnnnnnnnnnnnnnnnnnnnnnnnnnnnnnnnnnntgtttgaaggggaggaagctgaatgtttattgtcattagtggcaccatcaggaatctccggaattgttgtttaagctgacaattaagaacgtcacagggaagacaagaggcctacacaatggtgcttttttggaaagccagagtaactgcttcactggtgcaytaagcttctgtgcattaggttgttacaaagaccaagactttatggattggtaacaggcacaatatggaatgtaagtatttgggacatggctgagcttgcaaagaaaatgcagaagttaaatcccttcatgaagctgccatggcactcctttgtttttcttgactttttggctagaggacatctcttgtacaaggcatgtctcagaccttagactatttttcagtgtgtaatttattccactgcaggctctgaagatgtttaaacatgtgcgttcttggttgggaggaataactgatttt

SEQ ID NO: 82336 - DNA, 600 bp, Chicken  19866894376952_1
aggaagttttctcccagtgacagtacattctgagcatccagctacttctttctcactcctaaattaggatgacaacaccttcctaacaccttttcctaggaatgaagtttgcaacccatccatgggtaatatggctcttctcaatgccccattccatgcaactgtaacacacactgccacgttattgcacaaaaactccttcagtgccaaaaactattcccagcaaccacatcagcctttctggagagagcatcacgttttcctcagcacgctgaaatgctgacaattaccaaccatacmaacaccaactatgcaagtgccaattacactttctcctttcccccgagcgctcaatatttaggtccacattcatgctcactttgcccacactttttgctcccttccatttagcagtgaccccatattgggttttacccacatgcatcacataagtctaaagattttttagcaaactagcttctcaaatactcagattttatcaagatttcctacttaatatatcataaaaggttagtgcttaagaaatcctcagtggtaacttaagatcattagttggggatttaatacttcattgatatg

SEQ ID NO: 82337 - DNA, 600 bp, Chicken  19866894376952_2
tttacacaattgttccttcatgcatacagaacaccacaaatctctctcaacattttgcacccgtgcctgacctctctgctcttctctgctcaggaagggtccctgcatacactgatgtagccaattcaacagcccgttcagtcacagtttttgcaggctgcttcagaagactgaagaaccgtgcagttcctttagacctcttaattacatccagcacagccatgaacaattgatctgagtcacaataatcaactacacctgaatgctattttgtatctactgttcagaactcaggcagcrggcctttctccatcttggaagctgctgacattctagattccacaaactggtctgaaaggtatttgttgataggacctgaaatattattcacatgaacattttcccctcaacatgagatacagtcctaccctgctacccttgacaatctttaagctttcttcagttttgtttcaaaccacgtttcaggctgttctggaacaaacatgccctctgaacattgaacatcaagacatcatttctcacaatcaacacatttaaactccaactcaagttacactgttatttttaagaatgtaagga

SEQ ID NO: 82338 - DNA, 463 bp, Chicken  19866894376954_1
acctgatgacagtacagagctttgcatgccaccttatcaaggtttgtagatggcttattggaaacccctccaagcataactgtccccagctaatgacacttttgaaagtgttaggagggttactgcaccctgcatttcattctaaaggatcagttgccattaaaagatgtcagccccaaaatgttgtagattgggtcttgagaaaggttagtagcagacacttgtaagaggtatgaactggcactgaaggtcaacaaagagcgcagtactattttcctgcaggcatgttgggtctctaaratagcatgtcacaacctgttcaagtatgttgtattaaacaccttacatccaccacatatggaaatgatttacatacatatatacaatacactattatacaataaatgctttcatttatgcatattgcaatactatatcattaaatatcatatatgtattttag

SEQ ID NO: 82339 - DNA, 600 bp, Chicken  19866894376956_1
acatgagctgcttaagaaatgcccctctccaattgcaatggttgaaatttgaaaattagcatctttttatttttattttttgtgtaaccagattttcaaaagtttaggaagcctgcagctgctctcatataaacataacgactatctcgtgtttgcctccgcatttttgatttttgagagcaaaaaaatatatactagtttctattctttccttatgtatagaacaaatcatcacaaatctaacaaaataaaaagttattctggaaatctgctgtcaaacatttgtgataaattcagagkygaaaagaaaacaacttcaatgctgtgctaatttctggctaaatctggctaaattctaacttatgtcttggcaaagcttcctcctacctccccattttcttttaatagtagcattttgtgattagtgatgagtttatgcctttgaccacttttttttttcttttttgcatcttttcagaaacatttgtccagatttacgtattgtgtgactacactgaagtcttgtagagttacagcatggaaaaatcttgcctggtgttcacatagggttcagtgctttatggacaatattgattattg

SEQ ID NO: 82340 - DNA, 600 bp, Chicken  19866894376956_2
catgagctgcttaagaaatgcccctctccaattgcaatggttgaaatttgaaaattagcatctttttatttttattttttgtgtaaccagattttcaaaagtttaggaagcctgcagctgctctcatataaacataacgactatctcgtgtttgcctccgcatttttgatttttgagagcaaaaaaatatatactagtttctattctttccttatgtatagaacaaatcatcacaaatctaacaaaataaaaagttattctggaaatctgctgtcaaacatttgtgataaattcagagkygaaaagaaaacaacttcaatgctgtgctaatttctggctaaatctggctaaattctaacttatgtcttggcaaagcttcctcctacctccccattttcttttaatagtagcattttgtgattagtgatgagtttatgcctttgaccacttttttttttcttttttgcatcttttcagaaacatttgtccagatttacgtattgtgtgactacactgaagtcttgtagagttacagcatggaaaaatcttgcctggtgttcacatagggttcagtgctttatggacaatattgattattgg

SEQ ID NO: 82341 - DNA, 600 bp, Chicken  19866894376961_1
tatagtcaccgaacctatatcttttcagtgcctaaagcaatgtcatattttccttaatctagctgggagcccagaggctgatcttagtcttgtgttttcactaaagattttccattggttacactagaattgtcaataattgagaacaatttgccttggccaatttaatgtcatattcttgcattttggagtctttgaaatatttaaccttatttttgatagataattggtgtcaactctatgtaaaatttgagctcaaaaatctgcagtgtgctggttaaggaatattaaagattgaayttttttctatgctgtcctctctacatttattcagaaattctgctaggcagaatttgggtctatgtctaatcaatcagttttattgtacttgaggagtytgtattattcccctaattcatgataattctctgctagatactgtgtggttccttttctctggtcatcaaatgcagtcagatttgagaatttggaaataatttattcaaaacaaaatatatcaacatttatcacctatcagtacaaaagatcccagtagcaataagcccacaagcagcatctatgctgcttctaaktaaaact

SEQ ID NO: 82342 - DNA, 600 bp, Chicken  19866894376961_2
cactaaagattttccattggttacactagaattgtcaataattgagaacaatttgccttggccaatttaatgtcatattcttgcattttggagtctttgaaatatttaaccttatttttgatagataattggtgtcaactctatgtaaaatttgagctcaaaaatctgcagtgtgctggttaaggaatattaaagattgaatttttttctatgctgtcctctctacatttattcagaaattctgctaggcagaatttgggtctatgtctaatcaatcagttttattgtacttgaggagtytgtattattcccctaattcatgataattctctgctagatactgtgtggttccttttctctggtcatcaaatgcagtcagatttgagaatttggaaataatttattcaaaacaaaatatatcaacatttatcacctatcagtacaaaagatcccagtagcaataagcccacaagcagcatctatgctgcttctaaktaaaactcctcttccagactcttttttctcacctttcacacagaggcacacaaaggactcttggcagtttctgttacttcatctctaaaaccagacagtagtctg

SEQ ID NO: 82343 - DNA, 600 bp, Chicken  19866894376961_3
attgaatttttttctatgctgtcctctctacatttattcagaaattctgctaggcagaatttgggtctatgtctaatcaatcagttttattgtacttgaggagtytgtattattcccctaattcatgataattctctgctagatactgtgtggttccttttctctggtcatcaaatgcagtcagatttgagaatttggaaataatttattcaaaacaaaatatatcaacatttatcacctatcagtacaaaagatcccagtagcaataagcccacaagcagcatctatgctgcttctaaktaaaactcctcttccagactcttttttctcacctttcacacagaggcacacaaaggactcttggcagtttctgttacttcatctctaaaaccagacagtagtctgttgtcttcattgtaggctcttgaagtcctattacaccaatgacaattcaagcaaagagagcttctgagcttagcaaaggctacagtcttcctttcttctgcttcattcttcagaattctgtttgaggcgtgagaagggggggtgcagctcacctacaggtgagagtagtattcacagttgccaccaggccacata

SEQ ID NO: 82344 - DNA, 600 bp, Chicken  19866894376964_1
ctgagaacacacgagcatttgtgaactgcagcaaatgtcatttttcaggggaaaaataatctccagcaaaaaggagctgtaggctcttttttgtttgtttgtttgtttaatttaattgttttaatatattcagtatctgaaaagaggaataggtggatattctacgcaaaaggagcatgtgtacatcttatatgattagataaatactaatccgttcctgtaatccttccacaagacataaaagcattaggtagattggtaagattctattttcctttaagaacagtggagtgattttayactttcaaagatatttacatctgtttatgtcatctgctctctagcaactttggggtttgtacttccgaactcctgaaaattgtgaccacttaaggaccatctgaggaaacagagcctaatttaaatctttttaaacaaatgcaaatgataggaggcacatttgtcttgcagatttccataaatatgtacatacatatgcctatacacacataatacatacataagttatacttagacataaaacagacttgaaaaaatgtgcttgctctgtgatagttgttagtttgcagataaatattc

SEQ ID NO: 82345 - DNA, 600 bp, Chicken  19866894376966_1
caatttcctgaaaactccagtattttttcaacccacaccacacattagaatggagagtctactgtttcttcactgattagtgtgctcttagcaacacagaaatgaatgccagtcatattcagagagaagctgcatgtatacatccaatctactgttcagtgcagttttgacttcagtgagagcacttgtgtgtgcaaaacgaagcacagtggtgtttgtagattaggagttgtttactcctggtaaaagagcattaaaaaaaacaacttttagtcaaaatctatctgaaaattagagttrtctaaaacaaataccagtaagcaagaatactgcttaccaggtattataatawtttttttaaataaaaagctgatacgtttttcagtttaagctgttctaggaagtcaagcttatttttctgtttttgtcctaaagttactttggaaataggacttaaacttcctcaagtgctttgtttatgatttttttttcttttacctactactctagatacgtttaagatatttattttacttcacaatgtaattatcctacccaactaaagaaaaaattttgcgaacacattcaagacatttagat

SEQ ID NO: 82346 - DNA, 600 bp, Chicken  19866894376966_2
gagagtctactgtttcttcactgattagtgtgctcttagcaacacagaaatgaatgccagtcatattcagagagaagctgcatgtatacatccaatctactgttcagtgcagttttgacttcagtgagagcacttgtgtgtgcaaaacgaagcacagtggtgtttgtagattaggagttgtttactcctggtaaaagagcattaaaaaaaacaacttttagtcaaaatctatctgaaaattagagttrtctaaaacaaataccagtaagcaagaatactgcttaccaggtattataatawtttttttaaataaaaagctgatacgtttttcagtttaagctgttctaggaagtcaagcttatttttctgtttttgtcctaaagttactttggaaataggacttaaacttcctcaagtgctttgtttatgatttttttttcttttacctactactctagatacgtttaagatatttattttacttcacaatgtaattatcctacccaactaaagaaaaaattttgcgaacacattcaagacatttagatgttccgaaaggtttctttatttagtgcaatgttaccaggggtctgtactttt

SEQ ID NO: 82347 - DNA, 600 bp, Chicken  19866894376966_3
tccacagcctggactaaggtgcagcttcaagtcaaccatgtcacagagatgtgaactcttggcaaggtacccattttcccagtaaagtctgtgttatgcttgtgtcttccatgccagaagaggttaatcttgagaaaactctgatattctcaagggagacctagtttcttgctgatgacaataccaggatagagtccaactagtgacagtgtgttgtatgtgacacaaatgccaaatttactgaacaattttgtattaatgagcatctttctcagattctcctattagacatgttcttcyctataggtcaggtctgttctgaataagaagaaatagagaattcctgaggatgcttagctgaagtttgagatattcaggcttcttttacagtatatatttcatctacaagtgggaaacttgctccagactatctaagatcatggaagtatggacagtattttgtagatattcatctcagagagagaacaaattggaacctgttcttctgcctttaaaayaggtctgtcacaattttgaaatgaggatctgtcctcttcttggcctagcagtctaagccagacagaaacaccacctccttct

SEQ ID NO: 82348 - DNA, 565 bp, Chicken  19866894376966_4
tgtgacacaaatgccaaatttactgaacaattttgtattaatgagcatctttctcagattctcctattagacatgttcttcyctataggtcaggtctgttctgaataagaagaaatagagaattcctgaggatgcttagctgaagtttgagatattcaggcttcttttacagtatatatttcatctacaagtgggaaacttgctccagactatctaagatcatggaagtatggacagtattttgtagatattcatctcagagagagaacaaattggaacctgttcttctgcctttaaaayaggtctgtcacaattttgaaatgaggatctgtcctcttcttggcctagcagtctaagccagacagaaacaccacctccttctttgtatctttggttttccctggagtaactgaggtgactcagaggttttatttctaattctcaatgtaaaataattttaggtactaaacaaagaggcagtaaacaatctatatgtttagtgatggaaatgcctaactctctttaaagaaatagcattgaagtacttaactttcagtttttcatt

SEQ ID NO: 82349 - DNA, 561 bp, Chicken  19866894376967_1
cagggctatagattggactttcagtaatcttctgtgtgtgtgtatatatacatgcatgcattggatatctactacatagatcaaatataaaatgttatacgttgatccagaagtgcttgtcagcagttagtaaatgtggaagaaacaccaagatgtgtccttactggtagcactgacagttagacttctaaactcttcactgttacagctgtcagcattttcatttattttctcagtgtctgaactaaaacctagctggaggtggtaatttcacaaacagactactcgcttttcaaacarttttattgttcccgtggtcagggcagctgtggttcacaaccgtcgcttctggccggctatgaagatggatcagtgctcctttggaatttgtcaacggggaaagtgttgagccaacttatttgccaccaggagccggtgatgagccttgactttgactcagagaaggccaaagggatctcaggctcatctgaaaaggtgcttagcatctggagcctcaatgagcaacagaacctgcaggtcagtgccatggcccttcagtgt

SEQ ID NO: 82350 - DNA, 459 bp, Chicken  19866894376968_1
gttaattcagtgcatccagcttgctgctctctgtgttcccgctgagccagaaagtttgccatggaacctttgaagaggtgctctcctgcgtggtgctgataaaacacattaacatcacttgggcactcattaccgggctgctcgtcggcgtggtgtggcacatcagctgccaaacagcgcagcactaattggccctgtgctcaatgggcaccgccaaggccacggctgcagcgcccctcatgcaccctgctgtgctttggacaggaggaaggcagtgctttgcttctctctgccccacaytgctgcccaaatgaaataattccttaaagcagaggctgaagtggcagtgacagtcggcctacctcgtggctctcagttcctctaattgcataaaccaggaagaacacggttgaggacgttgccaggctactatcagcacaacaaattattcttcctgag

SEQ ID NO: 82351 - DNA, 556 bp, Chicken  19866894376969_1
tgaatggagaactcactgcctatgcatgagtttcaacagtttctaaaagatggagggtttgtattgatagtagataaatgagattaatcaaagcagttctgattaaatacaactatgaagtctgctgtggagttttgcaggtgctctcctttatttgtgtcatctgataattaaggtttttaggtttataatctgtagtaatcgctatgcatacattataatttctgatgaattactggtttaaaataaatgcttgtgtattgcctttaacttctgtttgcatgtaagcaatagacgggraactcctgtactgaagacagaaaaaaatatggccttactgtgttcttaaaaatactatagtgtatgtatgtgctgagttcttatattctcattagagatatgcaattggaacggcattatgaaatayagcatattgaaaaattaatataaagacagctaatgccaaaaatcatgcatagacctctcttgctgctgttttgttgttgtttttgttacatattattttaaaaacatccaacaactctgaactggtagg

SEQ ID NO: 82352 - DNA, 429 bp, Chicken  19866894376969_2
tggagttttgcaggtgctctcctttatttgtgtcatctgataattaaggtttttaggtttataatctgtagtaatcgctatgcatacattataatttctgatgaattactggtttaaaataaatgcttgtgtattgcctttaacttctgtttgcatgtaagcaatagacgggraactcctgtactgaagacagaaaaaaatatggccttactgtgttcttaaaaatactatagtgtatgtatgtgctgagttcttatattctcattagagatatgcaattggaacggcattatgaaatayagcatattgaaaaattaatataaagacagctaatgccaaaaatcatgcatagacctctcttgctgctgttttgttgttgtttttgttacatattattttaaaaacatccaacaactctgaactggtagg

SEQ ID NO: 82353 - DNA, 600 bp, Chicken  19866894376982_1
aaggattcaataaagtagtagccaaaggttccgattcttccccaagctgcaccttctgcagccttttgtcacctgcatcaatattgtatataagtcagggaataattggttcatggtgttcccgtctgggtgtacaaaagattgatgtgctgtaagtcccatcagtgctaatgtgcgttgttatatgcacataaattcttgcatgcccacaggcctcttggatttctttgaagcctttgggtaggtatcattatttttttctttctttcttcttccttcggatattacaagaacatgtgsagttctggatttgcttagagcacggtataattttacacatgtttatgaaaaataaactttgccgatcttgcagtacatmccattgtaatcatacagggctttttcaaagtagcagcaagaataggagtctagatcgtgcaaagtaactttgtgtaaggagggtgtagggttgttttttgttaaaatggtgctttgtttttccccattaaaatgtctccccctgatctcagctccaggkgcactgcaatggcttgggagagactgtcagaagccctgcatgaaaatggtgcacaagcgcat

SEQ ID NO: 82354 - DNA, 600 bp, Chicken  19866894376982_2
aatattgtatataagtcagggaataattggttcatggtgttcccgtctgggtgtacaaaagattgatgtgctgtaagtcccatcagtgctaatgtgcgttgttatatgcacataaattcttgcatgcccacaggcctcttggatttctttgaagcctttgggtaggtatcattatttttttctttctttcttcttccttcggatattacaagaacatgtgsagttctggatttgcttagagcacggtataattttacacatgtttatgaaaaataaactttgccgatcttgcagtacatmccattgtaatcatacagggctttttcaaagtagcagcaagaataggagtctagatcgtgcaaagtaactttgtgtaaggagggtgtagggttgttttttgttaaaatggtgctttgtttttccccattaaaatgtctccccctgatctcagctccaggkgcactgcaatggcttgggagagactgtcagaagccctgcatgaaaatggtgcacaagcgcatctgcctgagggtgtaaaggctgtgtgtatgcggtgatcagggggtattgacattccccacctcccgtgtctcagacgtg

SEQ ID NO: 82355 - DNA, 600 bp, Chicken  19866894376982_3
agggaataattggttcatggtgttcccgtctgggtgtacaaaagattgatgtgctgtaagtcccatcagtgctaatgtgcgttgttatatgcacataaattcttgcatgcccacaggcctcttggatttctttgaagcctttgggtaggtatcattatttttttctttctttcttcttccttcggatattacaagaacatgtgsagttctggatttgcttagagcacggtataattttacacatgtttatgaaaaataaactttgccgatcttgcagtacatmccattgtaatcatacamggctttttcaaagtagcagcaagaataggagtctagatcgtgcaaagtaactttgtgtaaggagggtgtagggttgttttttgttaaaatggtgctttgtttttccccattaaaatgtctccccctgatctcagctccaggkgcactgcaatggcttgggagagactgtcagaagccctgcatgaaaatggtgcacaagcgcatctgcctgagggtgtaaaggctgtgtgtatgcggtgatcagggggtattgacattccccacctcccgtgtctcagacgtgctcctcctaaccccaaa

SEQ ID NO: 82356 - DNA, 536 bp, Chicken  19866894376982_4
gggtaggtatcattatttttttctttctttcttcttccttcggatattacaagaacatgtgsagttctggatttgcttagagcacggtataattttacacatgtttatgaaaaataaactttgccgatcttgcagtacatmccattgtaatcatacagggctttttcaaagtagcagcaagaataggagtctagatcgtgcaaagtaactttgtgtaaggagggtgtagggttgttttttgttaaaatggtgctttgtttttccccattaaaatgtctccccctgatctcagctccaggkgcactgcaatggcttgggagagactgtcagaagccctgcatgaaaatggtgcacaagcgcatctgcctgagggtgtaaaggctgtgtgtatgcggtgatcagggggtattgacattccccacctcccgtgtctcagacgtgctcctcctaaccccaaagtttccagaacaagcagtgcatctccagaaaagaggcacagcctgcttcttccattcgacagtagaggaagaaatgca

SEQ ID NO: 82357 - DNA, 599 bp, Chicken  19866894376985_1
  misc_feature (1)..(129): n is any nucleotide
nnnnnnnnnnnnnnnnnnnnnnnnnnnnnnnnnnnnnnnnnnnnnnnnnnnnnnnnnnnnnnnnnnnnnnnnnnnnnnnnnnnnnnnnnnnnnnnnnnnnnnnnnnnnnnnnnnnnnnnnnnnnnnnnntcctgctgtgcccaataggaaaagcatgcagaatagagttttagtgactgttgcatgaggccaaagcataccaagtgtcaggagctttttcatattattttcggagtttctagggtagacactatatattgctatggactcatttcttttttattatttgatttgctcatmctcattttgtttataaaaggttgcaaacttttctcacttacttttgtgattatcttatactttgaatgcaaagttatgggagagacaactaatgcagtggtattaggaccatacaaaaatatttcagaaaatgtttttgcaaaaacaagcatggtactgcttttgcaaaaggatgtagcatttatgatcaagttgtactacagtagtggtctgtgtatatgtgcaggtcaaaaatactatatatattgaatcaagctgctggttatcctatgctgcagractacagggagctgagagaa

SEQ ID NO: 82358 - DNA, 600 bp, Chicken  19866894376985_2
ttattatttgatttgctcatmctcattttgtttataaaaggttgcaaacttttctcacttacttttgtgattatcttatactttgaatgcaaagttatgggagagacaactaatgcagtggtattaggaccatacaaaaatatttcagaaaatgtttttgcaaaaacaagcatggtactgcttttgcaaaaggatgtagcatttatgatcaagttgtactacagtagtggtctgtgtatatgtgcaggtcaaaaatactatatatattgaatcaagctgctggttatcctatgctgcagractacagggagctgagagaatggatattcatctcttccttgactgtctcataaatgtattagtgyatccatgtggaaataataacagtagtatagcatcaaaattcctaaatattttggagaagggtaaggtattccacattttctgtagcctcttgagagcttttacccctcctctcattgattaaaatagtgtattcttattaatgtgaaatatttatcaaaacagttatgaaaagcctttcccatgaaaatccttttgatagctttaaaaataccaccccacttataggagaacaca

SEQ ID NO: 82359 - DNA, 600 bp, Chicken  19866894376985_3
tgtgattatcttatactttgaatgcaaagttatgggagagacaactaatgcagtggtattaggaccatacaaaaatatttcagaaaatgtttttgcaaaaacaagcatggtactgcttttgcaaaaggatgtagcatttatgatcaagttgtactacagtagtggtctgtgtatatgtgcaggtcaaaaatactatatatattgaatcaagctgctggttatcctatgctgcagractacagggagctgagagaatggatattcatctcttccttgactgtctcataaatgtattagtgyatccatgtggaaataataacagtagtatagcatcaaaattcctaaatattttggagaagggtaaggtattccacattttctgtagcctcttgagagcttttacccctcctctcattgattaaaatagtgtattcttattaatgtgaaatatttatcaaaacagttatgaaaagcctttcccatgaaaatccttttgatagctttaaaaataccaccccacttataggagaacacaggaagggaaacaatcttgggctgacttcctcaaaaggaatacttaaaaaataatattcaatcttt

SEQ ID NO: 82360 - DNA, 600 bp, Chicken  19866894376991_1
agtaggaacaacacaactataagcaaagtgaagtatgcatttgcaatgtcaaaattacgttagtcagtcaaaaagacttgcaaaaatgtgggaacttagaaagcccaaaactgtatttatccctatatcagattcaagagagcccatggacctccatctgttggcaaggtataaaagtggatccactatgcatgggcaaaaattcaaatcctgcctgcatagtgtgccctcagagtcctgggtggtagaaggacagggaccctgagatgacaagctatccttctgtatccatttggaatyaaatacattaccgcccaacccacagatttcttattctttcttagcatatcactgactttcacccactgctttggaaattgtgatgttctttggcagagccaggtgcaattattgcctgttcagatgacagaaccagctaatggctgctttggtctttgattaggcacccaaatttagttcctgtacaggaaactagcttcagctccggttaggtatcatcctcaaacaaaatagatacagccagcaaatgatatagataagcctaaggttaaacatctccatttgtgctttagtagttgg

SEQ ID NO: 82361 - DNA, 600 bp, Chicken  19866894376991_2
ctttcacccactgctttggaaattgtgatgttctttggcagagccaggtgcaattattgcctgttcagatgacagaaccagctaatggctgctttggtctttgattaggcacccaaatttagttcctgtacaggaaactagcttcagctccggttaggtatcatcctcaaacaaaatagatacagccagcaaatgatatagataagcctaaggttaaacatctccatttgtgctttagtagttggataatttatagtctcacttctacatcatagactcaaaaacacttgcatggtgaamccacagttcactgtggttgcaaacttgcttccttgtgaagagggagaagaaatttttggtgctcactgtaggtctctggaagctatgcctccatrtacagatagttcagtgccataggaagagatccagtcggtggacttgatgtagcaatttttctcaatttcaggtttactttgaactaataccagtctgatccaaagggcaaaaagatcgttagcatttggagagcactacatatgctccttgatcccatcttcctgtttaatttaatttgaggaagaatctggtttgtatcttctg

SEQ ID NO: 82362 - DNA, 600 bp, Chicken  19866894376991_3
ggtctttgattaggcacccaaatttagttcctgtacaggaaactagcttcagctccggttaggtatcatcctcaaacaaaatagatacagccagcaaatgatatagataagcctaaggttaaacatctccatttgtgctttagtagttggataatttatagtctcacttctacatcatagactcaaaaacacttgcatggtgaamccacagttcactgtggttgcaaacttgcttccttgtgaagagggagaagaaatttttggtgctcactgtaggtctctggaagctatgcctccatrtacagatagttcagtgccataggaagagatccagtcggtggacttgatgtagcaatttttctcaatttcaggtttactttgaactaataccagtctgatccaaagggcaaaaagatcgttagcatttggagagcactacatatgctccttgatcccatcttcctgtttaatttaatttgaggaagaatctggtttgtatcttctgatccatcacatgaatcaaagcatgctaagtgcaacaattgagagatttgccttcaaaatcatgttcttgatctgaattagattcttgatctgaat

SEQ ID NO: 82363 - DNA, 600 bp, Chicken  19866894376991_4
aaaagatcgttagcatttggagagcactacatatgctccttgatcccatcttcctgtttaatttaatttgaggaagaatctggtttgtatcttctgatccatcacatgaatcaaagcatgctaagtgcaacaattgagagatttgccttcaaaatcatgttcttgatctgaattagattcttgatctgaattagagcacaaacatggacatgcttggcatgagaataaacacagctgcactaaaaagattcatttaatatcaggcgcccatatttagggatttgtatgtgaacttctaargaagtccaaaatgttgcatcttgccccttagcctcttctgcataaatgtctggatttattttttcattgtttttaacattttgcagattgcaaaacacagaaactcagaacatcctcatttaatttaataaattaaacccaaatatcccaagaaatcgaggttaaaaatcgcctctaataaactatgtaattatacaggaaaaaaacaacttcagtccaaacatattctgtatttgtagatcctttttccgtgatgttcacattcaggtgttgctggggttttacagcatgctctatatt

SEQ ID NO: 82364 - DNA, 600 bp, Chicken  19866894376994_1
tcttcagcaaatacagcaggcatatacaaaatctaaagcagttatctgactgaaaagtggctcctgggcagcttcacatcactgggcacgttttcagattcctgaaaatcttaatcaaaacggtaaatgacattttaaatgaactcagaatttgatctttaagatccaaatagcatgcagggtgttgtcttggtcttctgaatccatgtaacaaaactcctatccaattctaggaaattcagtatctgaccataaatggtaattaatcaaattccacaatatggaaaaattatgtagttkctgttaatttcattgtaaagtagcttaataacatttttaaaatcattatcatatcaaaacagccatcctacctagtaatatagatcttaataagtgcagatcattaaggaaattatacttygttactgtgcttttctattaggaaataacaactgaaaggttttggggagatcacctctcacacggaaagtgtaaaactaaacagctgagtaagtatcagttgtgaatttcaccccacatttaattttgtgaatgatatgaatgtcccatcatgaaaactaatagagrgaaaaaaaaatt

SEQ ID NO: 82365 - DNA, 600 bp, Chicken  19866894376994_2
ggtaaatgacattttaaatgaactcagaatttgatctttaagatccaaatagcatgcagggtgttgtcttggtcttctgaatccatgtaacaaaactcctatccaattctaggaaattcagtatctgaccataaatggtaattaatcaaattccacaatatggaaaaattatgtagttkctgttaatttcattgtaaagtagcttaataacatttttaaaatcattatcatatcaaaacagccatcctacctagtaatatagatcttaataagtgcagatcattaaggaaattatacttygttactgtgcttttctattaggaaataacaactgaaaggttttggggagatcacctctcacacggaaagtgtaaaactaaacagctgagtaagtatcagttgtgaatttcaccccacatttaattttgtgaatgatatgaatgtcccatcatgaaaactaatagagrgaaaaaaaaattaagtgatgttgtgtagactgatttcaaaataccttaaacaaattttttgaaatatgcagcatcacatgttgccagtaagggcagtcgggtatcctataagatacatcagtgttatgccatt

SEQ ID NO: 82366 - DNA, 600 bp, Chicken  19866894376994_3
attatgtagttkctgttaatttcattgtaaagtagcttaataacatttttaaaatcattatcatatcaaaacagccatcctacctagtaatatagatcttaataagtgcagatcattaaggaaattatacttygttactgtgcttttctattaggaaataacaactgaaaggttttggggagatcacctctcacacggaaagtgtaaaactaaacagctgagtaagtatcagttgtgaatttcaccccacatttaattttgtgaatgatatgaatgtcccatcatgaaaactaatagagrgaaaaaaaaattaagtgatgttgtgtagactgatttcaaaataccttaaacaaattttttgaaatatgcagcatcacatgttgccagtaagggcagtcgggtatcctataagatacatcagtgttatgccattaaagtcttcttgttagggaaatcgttggcagcttgaagcacctatttctcaattaacattgtaatatattgttatatattacatgttaatgaaatgaatagggctatatccaaagtagttagcattttgaaacagaaggtacatttcctagaaaatcaccacatttt

SEQ ID NO: 82367 - DNA, 600 bp, Chicken  19866894377009_1
taagcactggaataggctccccagggaggtggttgagtcaccatccctggatgtgtttaaaaatggtttggatgtggtgctcagggacacaacttagtggagggttgttagttagggtagtatggttaggttgtggttggacttgatgatctttaaggtcttttccaacctgagcaattccatgattctatgattctgagtggtaccagatttgcatatgttgctgtatagttatgtcacctgtaattctatatagaaatgctgtctttcgtgtattactgattacacacatgagacttsatattaattttgtgctgatttaatgctatcagaattccattaatttcagcaatgcttcatttctaacaagaagagtagaagctataaatactctgtgtatgcctttcattcattctgatgcatttaaattttgtttttatatgttgaaacagacagatgtgtttggttgatagtcttactccggggtatggcaattactatcagtgcttgttgctggggtatttggtagaaatgcaaacgaaaaaggcaggctctagaaggatgaaattacttaattagtagctcttcaatggaaagctg

SEQ ID NO: 82368 - DNA, 600 bp, Chicken  19866894377019_1
cagtacccagcaccagagtcaacttctgaccctgaagggttggtgatgccaattgctccccactcagataccagagaagcaagagcagcaaatccatagcaagttcccacagttaatctgacagtgtaagctagtttcagtggactttgagttaggcttgtcatctcattgctggtgcccacgataaatatacaacagctggatctctagagaaataaaaatgcagctcataagcctgtgcttctgccagttaatgtttatagggaatactgttcatataagaaatttctagagatccasttttttttctttgttttatgctgtgaaacaactgaaaaaattaaaaaggcagtgaaatagcttagctcaaagtgtgactatcattaagaagtggcatcttcttcaacaagtctgcttcttttgtatatttgcatacagagtatgagaataagacaaatcttccttgagctcattcaccttaatggaagggagccaaagtgtacctgtttcagtgaggacaacaggtctggacagatgctaaggagactatcatcttgaaatacatgaatatgaaagtttcagctttctaatcccactggg

SEQ ID NO: 82369 - DNA, 600 bp, Chicken  19866894377019_2
tttttctttgttttatgctgtgaaacaactgaaaaaattaaaaaggcagtgaaatagcttagctcaaagtgtgactatcattaagaagtggcatcttcttcaacaagtctgcttcttttgtatatttgcatacagagtatgagaataagacaaatcttccttgagctcattcaccttaatggaagggagccaaagtgtacctgtttcagtgaggacaacaggtctggacagatgctaaggagactatcatcttgaaatacatgaatatgaaagtttcagctttctaatcccactgggatytgtggagctggctgtgaatggtacaagggaactatatagctgtacttcgcatgtttgatctgaagatcacaaatagacaataaatacagaatcccacaatgccatttttagtgtcactttccagagaagaactatgctttaacaaggtttaaactgcagtttgaatgttttcacaagagctttgcagtgttgccactttgccttggggaattagcaaagatgtgttttgtacagaacagaatcataggacaaggcagcaaaccctgtaataaacacttgtccatgctacgaccaagttgt

SEQ ID NO: 82370 - DNA, 600 bp, Chicken  19866894377028_1
taagacatcccagatctttctttagtgcttatggttggggggggtgggggggcagaaaggactgtcaggtgggtctggggatcagatgtatcagaattacagtgctgttagtgtatcccatttgcacacttttgaaataaacttctggaaaaaacaaaccaagcccttttcaagcccatttgatatcttcagtctgaacgttatggactatttaaatgtgatgagagacttctctatgtcagttaactaatgacttgttattctaattaggtattaatcttgtagtattaagccaggackgaataagagctgaaaaacaagcttgtcacrtgtgccaaactcatggctttgccttgcaagtgccacagaattgctctctctttattactttyaacaaaaagaagcttttggtgctttatttctaatcccacatgtcctgagcaagataagcattacatcatgcgagcagcctgctggtagtgcaggtgtgacctggagtgacaggtgagcagtttaacctgatgaaggtccccagaggttgggcttctgcaccccrtgcagctgtcagcagcgctgtgcagctgcaaacttctcctgtgt

SEQ ID NO: 82371 - DNA, 600 bp, Chicken  19866894377028_2
atggttggggggggtgggggggcagaaaggactgtcaggtgggtctggggatcagatgtatcagaattacagtgctgttagtgtatcccatttgcacacttttgaaataaacttctggaaaaaacaaaccaagcccttttcaagcccatttgatatcttcagtctgaacgttatggactatttaaatgtgatgagagacttctctatgtcagttaactaatgacttgttattctaattaggtattaatcttgtagtattaagccaggackgaataagagctgaaaaacaagcttgtcacrtgtgccaaactcatggctttgccttgcaagtgccacagaattgctctctctttattactttyaacaaaaagaagcttttggtgctttatttctaatcccacatgtcctgagcaagataagcattacatcatgcgagcagcctgctggtagtgcaggtgtgacctggagtgacaggtgagcagtttaacctgatgaaggtccccagaggttgggcttctgcaccccrtgcagctgtcagcagcgctgtgcagctgcaaacttctcctgtgtattttcagagcacgtttcaggctttcaagg

SEQ ID NO: 82372 - DNA, 600 bp, Chicken  19866894377028_3
agaattacagtgctgttagtgtatcccatttgcacacttttgaaataaacttctggaaaaaacaaaccaagcccttttcaagcccatttgatatcttcagtctgaacgttatggactatttaaatgtgatgagagacttctctatgtcagttaactaatgacttgttattctaattaggtattaatcttgtagtattaagccaggackgaataagagctgaaaaacaagcttgtcacrtgtgccaaactcatggctttgccttgcaagtgccacagaattgctctctctttattactttyaacaaaaagaagcttttggtgctttatttctaatcccacatgtcctgagcaagataagcattacatcatgcgagcagcctgctggtagtgcaggtgtgacctggagtgacaggtgagcagtttaacctgatgaaggtccccagaggttgggcttctgcaccccrtgcagctgtcagcagcgctgtgcagctgcaaacttctcctgtgtattttcagagcacgtttcaggctttcaaggcctttgggtgcagtcttggactgtgagatggatgcagtatgtttctgattgataaggcataa

SEQ ID NO: 82373 - DNA, 501 bp, Chicken  19866894377028_4
gttattctaattaggtattaatcttgtagtattaagccaggackgaataagagctgaaaaacaagcttgtcacrtgtgccaaactcatggctttgccttgcaagtgccacagaattgctctctctttattactttyaacaaaaagaagcttttggtgctttatttctaatcccacatgtcctgagcaagataagcattacatcatgcgagcagcctgctggtagtgcaggtgtgacctggagtgacaggtgagcagtttaacctgatgaaggtccccagaggttgggcttctgcaccccrtgcagctgtcagcagcgctgtgcagctgcaaacttctcctgtgtattttcagagcacgtttcaggctttcaaggcctttgggtgcagtcttggactgtgagatggatgcagtatgtttctgattgataaggcataaacctttctcttttttttttctccaaccatagcattgtctaagagcaaccgtgtcttccacggagc

SEQ ID NO: 82374 - DNA, 600 bp, Chicken  19866894377032_1
cccttttaggctttttccttcagcgtgctcaaaagaaaggtaatgacttcagcaatgagccaaagtgctaacacctgacccagaaacaattttaaaaacaatacatgatgtaaagcacaaaagattaatgatcctctcagtggcaccatttgtttgttaccatttcactttcagttgttctgctgtcctgctactctgtgattaggagttttgcaacgatagaaggatgatttatttttatgagaaagattgttctaagtaacagaggtatttgggtgggttattttgttttatcaacaycgtgaaaaggcagatcctgcatcccataaacaaacaccaaaaaaaacccacccacaacagttcaaaacttctctgactggaaaggagctgcacatctgcacctccaaggaggccaaaaagcagagataaaaaaaccacacttagtggggaaagagcatctaaagttgttgaggtaaacaagggggaagggttttatttctttgctctctgctttgagaaaggggaatccctctcatcagtgagggatgaggacactcttgtaaaaaccagaactcagctggatcctgatggacttactcc

SEQ ID NO: 82375 - DNA, 600 bp, Chicken  19866894377042_1
tctttttgttttctctttttgctttaaaggttacacaatttaaaagatatacttcttaatttagagtcaaacagcagtgctcaagagcaaaatagattatttcccttttaactcaacaggttttcaaaatattcaacttgtcaaaaatggttagctccacatagcctcattctgaatacaaaacttatagataggagtactaactgggaatttaatttaacaatatttcctggactatatatgaatttctaattaaacctttaactgtgagttaacttttattttactatataaacctaygagagactacagtgcaaaaagagctcccttcttgacaggattctcttgtaaattctctrtcatgctttactaatgatatgtagattccttcaacacccatgctaaacccagatcaatgtttttttccttaagcgatgataaactgggattacagtaatcatactcatgccctaccaatgaatttctgaacatcattcattacactaattctgtacataccaataaaaatatgttttttcataatacaagtggtatggcaaaagtacaaaattaaccaatrgtgttttatcaaccctgata

SEQ ID NO: 82376 - DNA, 600 bp, Chicken  19866894377042_2
tttagagtcaaacagcagtgctcaagagcaaaatagattatttcccttttaactcaacaggttttcaaaatattcaacttgtcaaaaatggttagctccacatagcctcattctgaatacaaaacttatagataggagtactaactgggaatttaatttaacaatatttcctggactatatatgaatttctaattaaacctttaactgtgagttaacttttattttactatataaacctaygagagactacagtgcaaaaagagctcccttcttgacaggattctcttgtaaattctctrtcatgctttactaatgatatgtagattccttcaacacccatgctaaacccagatcaatgtttttttccttaagcgatgataaactgggattacagtaatcatactcatgccctaccaatgaatttctgaacatcattcattacactaattctgtacataccaataaaaatatgttttttcataatacaagtggtatggcaaaagtacaaaattaaccaatrgtgttttatcaaccctgatatagtattactgcaatgtttcctacagatataactaggaaaacacaaagggattagatct

SEQ ID NO: 82377 - DNA, 600 bp, Chicken  19866894377042_3
attttactatataaacctaygagagactacagtgcaaaaagagctcccttcttgacaggattctcttgtaaattctctrtcatgctttactaatgatatgtagattccttcaacacccatgctaaacccagatcaatgtttttttccttaagcgatgataaactgggattacagtaatcatactcatgccctaccaatgaatttctgaacatcattcattacactaattctgtacataccaataaaaatatgttttttcataatacaagtggtatggcaaaagtacaaaattaaccaatrgtgttttatcaaccctgatatagtattactgcaatgtttcctacagatataactaggaaaacacaaagggattagatctgacaagtttctatatattttcttacttaatatgacccttttaccttgataggaaccttgtaatctcatttactgtgatttgaatcactttcctgtacaagttctgccacgcactagacatttcatcttgcctcctaagctaaaatgaaaaggcaatgcaaacacaaacacatgaagattactctatgaaacctgtctgctctctgaagatattattgagta

SEQ ID NO: 82378 - DNA, 600 bp, Chicken  19866894377045_1
ctgaagccttgcagggtgtgtgaagcactactcctggggagccctgcagcccttgtgagtaagttagtaagacagtgttgttgcttgggctcttcgccccactctcaaaacagccccttttcacagaacctttattccacctacagcccggacctacatcttctgtcttctcttaagtgaaaacaccacgtaagaaggcttatttcaataatttaagtgcttttcttcacacactgtcattgtgtagcattctctctgaacatagttgtgtgcagaattgaattacaccctttctcaatktcttccaattggacgaaaggatttgaaaggtgaaaacagcacttacgaggaagcaaagctctgcctgcattaggttttagtaccaggctggatttacccatggtctgttctgaggctttattagggggcaggactgaaactccctgcactgcaaaagctttctggggctcctggggaagcagcagtccctgtgtgcagagaaaatagcctgtcatttcgatgtgagctgaccgactggctgccttstgctgcctgcttttctttttccagaagtgctgaacacgtacaattctcactgac

SEQ ID NO: 82379 - DNA, 600 bp, Chicken  19866894377045_2
gcattctctctgaacatagttgtgtgcagaattgaattacaccctttctcaatktcttccaattggacgaaaggatttgaaaggtgaaaacagcacttacgaggaagcaaagctctgcctgcattaggttttagtaccaggctggatttacccatggtctgttctgaggctttattagggggcaggactgaaactccctgcactgcaaaagctttctggggctcctggggaagcagcagtccctgtgtgcagagaaaatagcctgtcatttcgatgtgagctgaccgactggctgccttstgctgcctgcttttctttttccagaagtgctgaacacgtacaattctcactgactcctctgtgagcaagctgtggttttgacgggttagttgcacagtttggggggatttttatcacacttagtgtcatctgaaaaatggcagaatagcgtacagttcagccttggctctgtctgcatattggcatttttaccacgatcccagtgtgctagatgaacggtgtcacggtgtcttcccttggaagaaagaactcattgggtgtaactctgatgaaaaaccagatggatctgcccctttagtt

SEQ ID NO: 82380 - DNA, 599 bp, Chicken  19866894377050_1
  misc_feature (1)..(87): n is any nucleotide
nnnnnnnnnnnnnnnnnnnnnnnnnnnnnnnnnnnnnnnnnnnnnnnnnnnnnnnnnnnnnnnnnnnnnnnnnnnnnnnnnnnnnnncttggaggcagttcgttgagtggtctgatccttcctgtttggccctcgtgcatcacggtcatcctgccagcaatacttttgcctgtactcctttagaagaggcaaaaccacaacccaacactctttgtatttatgtttgtgctacccatttccattcctctgttatgttgttacagtgagatctggctaatccctgtaacttaatggggatcrgagtgaaggaaagctcaggtgtctgtggtgtgtgggtaataatgtatctgcaaaatgtctgggattttgcagatacaataataaaaatatctgcaatgtctgggatttgtcactgggtattggacattccagcaggtctgtattttgttcttcttgccaccgtggtggcagtggggacagcagagggagcaggtggatagcatttagctggaggagctgtgggatagggctgcgctgtctgtgggaaccaggtgagggtttggagtaatacagtggaaggaagaaatgtagtgtggatg

SEQ ID NO: 82381 - DNA, 600 bp, Chicken  19866894377055_1
gccactgcagctaaatctgccaagtcttatctgtcagagtacacagtttgtgcttttagtctcctgtgtttggaaccacaggattactacttaaatacaacgaattagcctggatgagatcaactggagaaaaatgcaagtgtaactagaacatctgagtgcttcaatgaaaagcatactgctaacacaatttagaaaaaaatacagaatcctaaactttgcacataatttaatactgttctttggagacaaaacaaaacaaaacaaaaaaagaaaagaaatgaaaaacaaaacacaacraactttcaatagaagatattatctgcttgcttgataaatgcttcaaacatacggaggtctgatcttcatctgttttaagtcagaatgacttcacttttgtcagaggagccatgaaagccaacagcagatgaagagctggcccttgttcaccattcattaatctcccgggaaggtataagattatggacagaacactttccttctccaagataaggaaatataatatccctagagtaactcttatctaccctcagatccaatctggaaagtcttctcttctaagcctgttgtagaatttct

SEQ ID NO: 82382 - DNA, 600 bp, Chicken  19866894377061_1
gaggtggcatggtatggtctctccactgctttgggcagacattcatgtttgtggaaagcacctctctgtgctgccaaatcagactgtgccattcatgttagcatttctggctggaatacaagcaccacctagtttttcattctgcaggtgagattcaggagcaggaatcacagctgggctgctgctccatacccagaatggcatgccattatgtttttcatcttcttcctttgagctgggtgagaagtgcttcaactctttgtgagcttctgttcaaccattaccacacctggcttagckggtatgagttagagtctctcctgctttctttgggggtgcaagctcagtagggagccactgataaagtggtgcaattctccttacaagttaggaacttctgagggttactgctcatgggctgtcttgctcgcatttttacagcacctgatgttgtcatagctgatagattgattattcagtggttgaacatagacaaattattttactgyatgactgtttgatctaggagatagcagagtcctgaatttccacctaatacacttttatctcatcctgagtctgctgctagaggtggctttg

SEQ ID NO: 82383 - DNA, 600 bp, Chicken  19866894377061_2
tatgtttttcatcttcttcctttgagctgggtgagaagtgcttcaactctttgtgagcttctgttcaaccattaccacacctggcttagckggtatgagttagagtctctcctgctttctttgggggtgcaagctcagtagggagccactgataaagtggtgcaattctccttacaagttaggaacttctgagggttactgctcatgggctgtcttgctcgcatttttacagcacctgatgttgtcatagctgatagattgattattcagtggttgaacatagacaaattattttactgyatgactgtttgatctaggagatagcagagtcctgaatttccacctaatacacttttatctcatcctgagtctgctgctagaggtggctttgccagcagaggcacagtgtggtggtcttctctagtgatgggagttttgatgcactgtgccagggtcccaggttaggagcgctggcacagaagagggtaatgctccatttttctgcatgcattatgcctattttcaccagccaagaaggtgtagtgagcaaaactgttagaaaaacaaaatatattcatcaatagtttatgcatcactggt

SEQ ID NO: 82384 - DNA, 600 bp, Chicken  19866894377066_1
tgattgacctttcattctgaggaactgttggatcactctcagtcacaggatcttcgtgactcacagaccttcgtgacatttagtaaagggtgtatttctcggagcctttcagcctgaaaagcagaacaccggtggggtcctctgcaaccccttcccccctccatcagcccctctggtggcttttttcttgctatgaatttttctggatacagctgcacacactcctcaataccacatggatgcaggcacggatgctaaagtctcacttctgctcactggtgctgtaaatattcctatctwattacccatcatctttgtattaataactttycacggaaacactattccccctctgcagtcagtgccttcacatataccagaggcttcagaggccctgacaagccagcgagagtctgtcctcccatagatgtttacagcaaaatcaaatgttgatatttgtatcattgaatggcttgggttggaagggacctcaaggatcatcaagctccaacycccctgccgcaggcagggctgccaacctccagatctaatacaagaccaggctggccatcactgatctctgtccatcactgatctctg

SEQ ID NO: 82385 - DNA, 600 bp, Chicken  19866894377066_2
atcactctcagtcacaggatcttcgtgactcacagaccttcgtgacatttagtaaagggtgtatttctcggagcctttcagcctgaaaagcagaacaccggtggggtcctctgcaaccccttcccccctccatcagcccctctggtggcttttttcttgctatgaatttttctggatacagctgcacacactcctcaataccacatggatgcaggcacggatgctaaagtctcacttctgctcactggtgctgtaaatattcctatctwattacccatcatctttgtattaataactttycacggaaacactattccccctctgcagtcagtgccttcacatataccagaggcttcagaggccctgacaagccagcgagagtctgtcctcccatagatgtttacagcaaaatcaaatgttgatatttgtatcattgaatggcttgggttggaagggacctcaaggatcatcaagctccaacycccctgccgcaggcagggctgccaacctccagatctaatacaagaccaggctggccatcactgatctctgtccatcactgatctctgtctctctaacataccagcatcttctgagtct

SEQ ID NO: 82386 - DNA, 600 bp, Chicken  19866894377066_3
tgcacacactcctcaataccacatggatgcaggcacggatgctaaagtctcacttctgctcactggtgctgtaaatattcctatctwattacccatcatctttgtattaataactttycacggaaacactattccccctctgcagtcagtgccttcacatataccagaggcttcagaggccctgacaagccagcgagagtctgtcctcccatagatgtttacagcaaaatcaaatgttgatatttgtatcattgaatggcttgggttggaagggacctcaaggatcatcaagctccaacycccctgccgcaggcagggctgccaacctccagatctaatacaagaccaggctggccatcactgatctctgtccatcactgatctctgtctctctaacataccagcatcttctgagtcttatttcactacttagctgtgcagtcctgccttgggactgcaatagagacagataaatgcttttcaagacaggatacatgttggcacatctcacgggcagtgtttggagggaagatagtgggggaaggggatacacattttgcacaaaggtttcctgccacatcccctagcacaccatgacat

SEQ ID NO: 82387 - DNA, 600 bp, Chicken  19866894377075_1
tggcagaactccttgtgcaagcactgtgcaacccagagctgttctgcagccctttctggggtgtctctgcagggccatgacttgctgaagattttaggagggcagaagtttgctgggtgtggttcagggactctctctcactggggctcaggttgcaccgagccccaatgaatgtggccatggagaagccacttcactctcttacactgcatctctgctctcgggattggaggaaggtcctctaaagcagcaagcatcacccagcagatgtagcctggacagcgatggagccatcgccaygactgtggtgtagagaggcccaagggatctggtaccatggtgggtggtcaggagggagactctacaaaccccatcaatctcctcctccagctcccatgcatctgcttgcaaagggaggaggaggcaataacctggccacccgctccccattggtgccgtgggaggcaggagggggaggaaggggggaaacgccatccccgattccttggcaactgcggcctgaaatattaactggaagaatgcacccaagccttggcccccaggctggcctgctcctgtgctgcctcctggggggcgcga

SEQ ID NO: 82388 - DNA, 600 bp, Chicken  19866894377077_1
atgagaaatgcaagttccagagctagaagaagtaatggtagcccatttagctcttgggtagctcgttctgctgtcaagtaaggctgttattccactgaggaaaagcttctgttgttttcttagtgatacttctaagctgttaacagaagttatcctgcaagagcttacatattctaagcacatttgaacctattcatacatggctgtagaactgatatgtgctcaggtcaccaaagtttgcttccaaaatcaatcagctgatcttcttcattgtaaatacagaaggttggtcagggtgaygatgggcttgtggtctagtctgggatactgagcaacagaagtgtctgttggctttgcccaacgtggcatccacctgttaatgcacgtagtgctgagcatgtcaaagatgagcttcctytaggttgtactgctgccaaataaagcttagtggaacagatctcccgctgactttcatggtakagttaacttgtggagaaaattaatcatcattttaagaacagcatgcatggtaaataatacagatagtaaaggcagttaaactatgtgtgtatgtgtattttgtagtatggcactataaat

SEQ ID NO: 82389 - DNA, 600 bp, Chicken  19866894377077_2
cttagtgatacttctaagctgttaacagaagttatcctgcaagagcttacatattctaagcacatttgaacctattcatacatggctgtagaactgatatgtgctcaggtcaccaaagtttgcttccaaaatcaatcagctgatcttcttcattgtaaatacagaaggttggtcagggtgaygatgggcttgtggtctagtctgggatactgagcaacagaagtgtctgttggctttgcccaacgtggcatccacctgttaatgcacgtagtgctgagcatgtcaaagatgagcttcctytaggttgtactgctgccaaataaagcttagtggaacagatctcccgctgactttcatggtakagttaacttgtggagaaaattaatcatcattttaagaacagcatgcatggtaaataatacagatagtaaaggcagttaaactatgtgtgtatgtgtattttgtagtatggcactataaatagaggcgatggaggatacgttgctgttagcatgytgacttatccttccgaaggcctggcatatcagtgatccaattgaaaatgtctmggttgtgatgagtcatgtgttagcctcattc

SEQ ID NO: 82390 - DNA, 600 bp, Chicken  19866894377077_3
catttgaacctattcatacatggctgtagaactgatatgtgctcaggtcaccaaagtttgcttccaaaatcaatcagctgatcttcttcattgtaaatacagaaggttggtcagggtgaygatgggcttgtggtctagtctgggatactgagcaacagaagtgtctgttggctttgcccaacgtggcatccacctgttaatgcacgtagtgctgagcatgtcaaagatgagcttcctytaggttgtactgctgccaaataaagcttagtggaacagatctcccgctgactttcatggtakagttaacttgtggagaaaattaatcatcattttaagaacagcatgcatggtaaataatacagatagtaaaggcagttaaactatgtgtgtatgtgtattttgtagtatggcactataaatagaggcgatggaggatacgttgctgttagcatgytgacttatccttccgaaggcctggcatatcagtgatccaattgaaaatgtctmggttgtgatgagtcatgtgttagcctcattctgtgactaatggatggaacagccattgatgtccaagctgagtcacagcttctgcatatctcc

SEQ ID NO: 82391 - DNA, 600 bp, Chicken  19866894377077_4
acagaagtgtctgttggctttgcccaacgtggcatccacctgttaatgcacgtagtgctgagcatgtcaaagatgagcttcctytaggttgtactgctgccaaataaagcttagtggaacagatctcccgctgactttcatggtakagttaacttgtggagaaaattaatcatcattttaagaacagcatgcatggtaaataatacagatagtaaaggcagttaaactatgtgtgtatgtgtattttgtagtatggcactataaatagaggcgatggaggatacgttgctgttagcatgytgacttatccttccgaaggcctggcatatcagtgatccaattgaaaatgtctmggttgtgatgagtcatgtgttagcctcattctgtgactaatggatggaacagccattgatgtccaagctgagtcacagcttctgcatatctcctgaaataatttttggttggtgatgaccgagcagttgaaatcgctctatttgtttttactgccatttgcagcctacaaaatattagtgtacgtgttgtttgatagatgagacaaatagctcgagcaatcccagacagacatttcagataagatgt

SEQ ID NO: 82392 - DNA, 600 bp, Chicken  19866894377077_5
agtgctgagcatgtcaaagatgagcttcctytaggttgtactgctgccaaataaagcttagtggaacagatctcccgctgactttcatggtakagttaacttgtggagaaaattaatcatcattttaagaacagcatgcatggtaaataatacagatagtaaaggcagttaaactatgtgtgtatgtgtattttgtagtatggcactataaatagaggcgatggaggatacgttgctgttagcatgytgacttatccttccgaaggcctggcatatcagtgatccaattgaaaatgtctmggttgtgatgagtcatgtgttagcctcattctgtgactaatggatggaacagccattgatgtccaagctgagtcacagcttctgcatatctcctgaaataatttttggttggtgatgaccgagcagttgaaatcgctctatttgtttttactgccatttgcagcctacaaaatattagtgtacgtgttgtttgatagatgagacaaatagctcgagcaatcccagacagacatttcagataagatgtgtgagtaaggagtggtgtcctgcaattacctccttttattttcctttgctctg

SEQ ID NO: 82393 - DNA, 525 bp, Chicken  19866894377080_1
  misc_feature (1)..(94): n is any nucleotide
nnnnnnnnnnnnnnnnnnnnnnnnnnnnnnnnnnnnnnnnnnnnnnnnnnnnnnnnnnnnnnnnnnnnnnnnnnnnnnnnnnnnnnnnnnnnnnctgaggctttggcacacagtactgtctgcttgagcgctggggaaggcgagcagggggggctgtgccctcctccccacatgggatgctgcaggagaggtgctgatgtggggctggagggcagagccgtgagctggcagagccgagccctgcctggcacagccttcagccccgaagtgccacgctcagaaccaaacccagctgtgccwacatcccactgcacctcctggccggctgccccagcacagcagcccaacgaaccccaractctgcagccacgtccctacrcccactgagcacagagcgtggcaccctgcaagcagccagggcttacctcatccaccaccaggttgtagtcactcttgtccccatcgctgtcctgcacaacgggaggaatgcagagggctttgctcagggctgaaagaggctgcatg

SEQ ID NO: 82394 - DNA, 468 bp, Chicken  19866894377080_2
  misc_feature (1)..(37): n is any nucleotide
nnnnnnnnnnnnnnnnnnnnnnnnnnnnnnnnnnnnnctgaggctttggcacacagtactgtctgcttgagcgctggggaaggcgagcagggggggctgtgccctcctccccacatgggatgctgcaggagaggtgctgatgtggggctggagggcagagccgtgagctggcagagccgagccctgcctggcacagccttcagccccgaagtgccacgctcagaaccaaacccagctgtgccwacatcccactgcacctcctggccggctgccccagcacagcagcccaacgaaccccaractctgcagccacgtccctacrcccactgagcacagagcgtggcaccctgcaagcagccagggcttacctcatccaccaccaggttgtagtcactcttgtccccatcgctgtcctgcacaacgggaggaatgcagagggctttgctcagggctgaaagaggctgcatg

SEQ ID NO: 82395 - DNA, 446 bp, Chicken  19866894377080_3
  misc_feature (1)..(15): n is any nucleotide
nnnnnnnnnnnnnnnctgaggctttggcacacagtactgtctgcttgagcgctggggaaggcgagcagggggggctgtgccctcctccccacatgggatgctgcaggagaggtgctgatgtggggctggagggcagagccgtgagctggcagagccgagccctgcctggcacagccttcagccccgaagtgccacgctcagaaccaaacccagctgtgccwacatcccactgcacctcctggccggctgccccagcacagcagcccaacgaaccccaractctgcagccacgtccctacrcccactgagcacagagcgtggcaccctgcaagcagccagggcttacctcatccaccaccaggttgtagtcactcttgtccccatcgctgtcctgcacaacgggaggaatgcagagggctttgctcagggctgaaagaggctgcatg

SEQ ID NO: 82396 - DNA, 599 bp, Chicken  19866894377090_1
  misc_feature (1)..(58): n is any nucleotide
nnnnnnnnnnnnnnnnnnnnnnnnnnnnnnnnnnnnnnnnnnnnnnnnnnnnnnnnnncagggagcctgctgttctgtctgttcttccaccacagctaatgtgactttccagacccctttcaaatgttagcagttagacctggaaaaccctgaaatgttctcatcttcatctgctaacttctctttagcttatgaagaacgaaagtagattttaagtgaaaagttgaattacttggattcattccagaggtagtaatgagcgtgctgggaatgccttggcttcctttacttctgactccytatasatatggaagaagttttccatctctttcccccattagtcatctgcttccagattccagtagcttactcatttgctcacttgtggtgtttgttgtttttttgtttatttgttttgtaagcggattttagggtaggaatgtgttctttcatccraccatacttctagcaaagaagaaagaatccttgagactgagcgagctttgacacttgttgatgttggcaccacaattgaaaatgaatggttaccttagctaaactaaactaattgatcatgtatacagtgtatcttgtctcag

SEQ ID NO: 82397 - DNA, 599 bp, Chicken  19866894377090_2
  misc_feature (1)..(53): n is any nucleotide
nnnnnnnnnnnnnnnnnnnnnnnnnnnnnnnnnnnnnnnnnnnnnnnnnnnnncagggagcctgctgttctgtctgttcttccaccacagctaatgtgactttccagacccctttcaaatgttagcagttagacctggaaaaccctgaaatgttctcatcttcatctgctaacttctctttagcttatgaagaacgaaagtagattttaagtgaaaagttgaattacttggattcattccagaggtagtaatgagcgtgctgggaatgccttggcttcctttacttctgactccytatasatatggaagaagttttccatctctttcccccattagtcatctgcttccagattccagtagcttactcatttgctcacttgtggtgtttgttgtttttttgtttatttgttttgtaagcggattttagggtaggaatgtgttctttcatccraccatacttctagcaaagaagaaagaatccttgagactgagcgagctttgacacttgttgatgttggcaccacaattgaaaatgaatggttaccttagctaaactaaactaattgatcatgtatacagtgtatcttgtctcagttgaa

SEQ ID NO: 82398 - DNA, 600 bp, Chicken  19866894377090_3
gttctcatcttcatctgctaacttctctttagcttatgaagaacgaaagtagattttaagtgaaaagttgaattacttggattcattccagaggtagtaatgagcgtgctgggaatgccttggcttcctttacttctgactccytatasatatggaagaagttttccatctctttcccccattagtcatctgcttccagattccagtagcttactcatttgctcacttgtggtgtttgttgtttttttgtttatttgttttgtaagcggattttagggtaggaatgtgttctttcatccraccatacttctagcaaagaagaaagaatccttgagactgagcgagctttgacacttgttgatgttggcaccacaattgaaaatgaatggttaccttagctaaactaaactaattgatcatgtatacagtgtatcttgtctcagttgaagaagccagatctcaaggcttccttaaaaaggtaggctacagcaatagatttacctttggccaagcatgctggtcgtggactctttcttttttttgggacttcctggccttcatccccttacatacacatattgtttcatactttagtcactg

SEQ ID NO: 82399 - DNA, 600 bp, Chicken  19866894377100_1
aatgctgtattcagacttatgaaacaaggtggtaaaatgtgcactggagtctgagtactaagcccataattttccacaagtaccaggaagaaaagaaacagaggggaaccctgctatttaaactgctcagttatcatgtttccctcccccacatacagagtagcatataacccattcatatttcaattttacatttcctaaactgtcatcttctcatgtttcaagttcatctgaaatgcaatctgcttatctgagcagcagtgaatgctcttgcagatcaagtgagggctgtctctcccygctaacaaatagatctgcagcaaatgggttggtgacataaggcaggtattgtggggttaggtgcctagagagttctagaggggagaattgctcagaccctttcttgcctcccaagttcaaacagggagagtataacctctctctctttactggagatgcagctaaaacaaataggtaaagtcagatagaactagatcacgtggaatggctgagtggcctcacttcagacaggtttcccacataacgtggccagccctgaggactcacagaagcagccaagctcccagagccctgggttgc

SEQ ID NO: 82400 - DNA, 600 bp, Chicken  19866894377103_1
aaaacttgcatccagatcctagtgtctgtgtgcctgggccccaacatgtatgccttaggtgtgcttccatgtttaggttggttacgttcatccctctggtagttggtggttaatccatgttatgttttcaggggcggaatttgggattttattgtttgtttttgttttaacgttgtctacgtagctacctttttatttctgccttgaaggagacatacacaggaactttgaccaggaagttttctatgaatcatcttaatttgacagacaggaaaatcagagcatattgtctcctgtatrtattgatttcttcaaaaaccataattaaatgtgccattattaaccatattttcccatttaattctattcctttttgttgcgtatgtcacattaagcttcctaccatgagggacttcattggtttaatcatatcatatatatatatatatatatatatatgatatatatattcctggaaatactttattaagaagtaaatacaacagtaagcaattttccttcacaccggtcctgtttaggacaggtctactatttcaaacgctcttagtgagcaattaaagggaaacagaatgttgccac

SEQ ID NO: 82401 - DNA, 600 bp, Chicken  19866894377129_1
cacagtgttacattaagtacttcttccattaagggaagatattttgctgaccctggaaaattatgtatttttttatctcagtgtttgtgtggcataatacatgctcctctaatgacatcctcgggtttactttttgttatgatttttttcttttccctgagtaaatttatatttttcattttaatgtgtgtgtagtttaatacatacccctccaatgacctttgtaggctttccatatgcttttgctcttctatattaatgagtagggcaagcagtggtggagattcttacatcattttrtacagagtaaatcagctctgagctgaaattcttctaaatgtcaacaatattattctgtaaactataactcattgcaatttatagcatttttcagaaggattaaccacactgcaaaagtaaaatattcaaaactccagcaaagtaaacaacaacaacaacaaaacccacctacaacagtcattggattttccttgaggaaccaaataatataatttatctctgtgctatctctccacattgaatgctctttatgagttttcgtggcttaataaaatagttatgagccttacaaatttccta

SEQ ID NO: 82402 - DNA, 599 bp, Chicken  19866894377132_1
  misc_feature (1)..(49): n is any nucleotide
nnnnnnnnnnnnnnnnnnnnnnnnnnnnnnnnnnnnnnnnnnnnnnnnncctgaggctgacgaaagcctttgtcaccacccccagggtgacagcatcccttgggtaagctgacaaagccaccctgggggcacagagaggggatgtgggatcctgcatggccaatggggccaacatgagcgccagcctttcctcgttctgtcagaggaagttctattctgattaaaacccgtttgatctcggaggaggagggggttgggtggggggtagggttgggtttctctccaactgttgggctttaytgggctaatgcatcagctcaaagcttcccagcaagatttaaaggagggaacggcgggggcacaacctggagatggattcattaaaacaagggatgcactgcagggagggaaggcatcacccagcatcaaacccgagctgagcagagcctgggggcaccactcgggcccccccagccccgaccaacctctctgctgcagttgatgccccttccttcttctcctatctgtcctgggcagggagaacagattgctcccctcccccttcaatcagaccccagaggtggtggtctcctccggat

SEQ ID NO: 82403 - DNA, 599 bp, Chicken  19866894377136_1
  misc_feature (1)..(181): n is any nucleotide
nnnnnnnnnnnnnnnnnnnnnnnnnnnnnnnnnnnnnnnnnnnnnnnnnnnnnnnnnnnnnnnnnnnnnnnnnnnnnnnnnnnnnnnnnnnnnnnnnnnnnnnnnnnnnnnnnnnnnnnnnnnnnnnnnnnnnnnnnnnnnnnnnnnnnnnnnnnnnnnnnnnnnnnnnnnnnnnnnnnnntgtggcacagtgatactgtgatatgattttagttttctcacttaacatctactttttggacagtgttgctttaatgtagataggggctagacttggatatccagtcctgaagctttcartgtatacggaaaaccattgtctgtggtaagctcttctccaaagagattgattgataagttaaagcaaagtagggtgacttcatgcagttctggtaattattccaggaggcaaagtaagctcatcttatattaaaggagattaactcatctaggattattatgatcaaaaccttcaacagtatctttgaggggagggggaagggaagaaggtaatttgaccgatcgtttaactgccagagggtacaaagttagctgaggacttaacaaggctttttggcgcacacgtgcactgaatgatg

SEQ ID NO: 82404 - DNA, 599 bp, Chicken  19866894377138_1
  misc_feature (1)..(126): n is any nucleotide
nnnnnnnnnnnnnnnnnnnnnnnnnnnnnnnnnnnnnnnnnnnnnnnnnnnnnnnnnnnnnnnnnnnnnnnnnnnnnnnnnnnnnnnnnnnnnnnnnnnnnnnnnnnnnnnnnnnnnnnnnnnnnnctgacatataaatcccctggggaaactcacctgcacctcaccaagctgtcactgacgtgccattagctacatccctcacacaaaggatgacccaaaactgaacagtctcatgggaaatgaaaactgcgtacagaaccataagtcacagctgcatgttaagtaccaaggcacaaygtagtggccatgcaaatcacttctataaagatgcttttaccatggtataagatgtcagattttttycccccccatctttcagtgctgaagtattgttttgccaaatgaagtttggacaggagtcttcagcctggagaagagatgcctttgccagagaaccccaaaatcacaagtagaagagaagggaaggggagagggattggcctcccactgtctcttccagtgcaacaaccagaagtgactaactgcattttgtagtaaaactcattaaggagatgctgcttctcaccctagagctt

SEQ ID NO: 82405 - DNA, 599 bp, Chicken  19866894377138_2
  misc_feature (1)..(60): n is any nucleotide
nnnnnnnnnnnnnnnnnnnnnnnnnnnnnnnnnnnnnnnnnnnnnnnnnnnnnnnnnnnnctgacatataaatcccctggggaaactcacctgcacctcaccaagctgtcactgacgtgccattagctacatccctcacacaaaggatgacccaaaactgaacagtctcatgggaaatgaaaactgcgtacagaaccataagtcacagctgcatgttaagtaccaaggcacaaygtagtggccatgcaaatcacttctataaagatgcttttaccatggtataagatgtcagattttttycccccccatctttcagtgctgaagtattgttttgccaaatgaagtttggacaggagtcttcagcctggagaagagatgcctttgccagagaaccccaaaatcacaagtagaagagaagggaaggggagagggattggcctcccactgtctcttccagtgcaacaaccagaagtgactaactgcattttgtagtaaaactcattaaggagatgctgcttctcaccctagagctttaggatctgtgaaaasccttacccaaagaggcagtggttgcaaagagttamtgcatcagtttgagg

SEQ ID NO: 82406 - DNA, 552 bp, Chicken  19866894377138_3
atcacttctataaagatgcttttaccatggtataagatgtcagattttttycccccccatctttcagtgctgaagtattgttttgccaaatgaagtttggacaggagtcttcagcctggagaagagatgcctttgccagagaaccccaaaatcacaagtagaagagaagggaaggggagagggattggcctcccactgtctcttccagtgcaacaaccagaagtgactaactgcattttgtagtaaaactcattaaggagatgctgcttctcaccctagagctttaggatctgtgaaaasccttacccaaagaggcagtggttgcaaagagttamtgcatcagtttgaggggacactggacctgtgctctgaagagaaatacattgaaaattactaaatagtgaagcaggctcaggaagtcccgagccactaaccagttttgggtacagggttgatctcttatacgtgcaccctgctcttaatcatctctgaacagccgcctccagccacagaggcaggacaccactttcagtaaccagaaactcaaacggt

SEQ ID NO: 82407 - DNA, 517 bp, Chicken  19866894377138_4
gatgtcagattttttycccccccatctttcagtgctgaagtattgttttgccaaatgaagtttggacaggagtcttcagcctggagaagagatgcctttgccagagaaccccaaaatcacaagtagaagagaagggaaggggagagggattggcctcccactgtctcttccagtgcaacaaccagaagtgactaactgcattttgtagtaaaactcattaaggagatgctgcttctcaccctagagctttaggatctgtgaaaasccttacccaaagaggcagtggttgcaaagagttamtgcatcagtttgaggggacactggacctgtgctctgaagagaaatacattgaaaattactaaatagtgaagcaggctcaggaagtcccgagccactaaccagttttgggtacagggttgatctcttatacgtgcaccctgctcttaatcatctctgaacagccgcctccagccacagaggcaggacaccactttcagtaaccagaaactcaaacggt

SEQ ID NO: 82408 - DNA, 599 bp, Chicken  19866894377144_1
  misc_feature (1)..(41): n is any nucleotide
nnnnnnnnnnnnnnnnnnnnnnnnnnnnnnnnnnnnnnnnnctggtttatatatctgcttcgattactgaagttattgctgaaggaggaaagaaagcgcacaagggttgattttgaagcctcactgtgtaggctgtgactcagcatggttaatcccatattcccagaacagtagaatgtgttggatgccacttttacattgctcctcagtttagccctaattattatcagataaggccattgtttccaatagagttcagtgtgagcagaccacaaggtgtgacaacagaaaacaattackctgggtatgttaaaagaatttggtattgtcagttcagcttttcaaagtgaaaaggtcctctttagaagatggtcttcttaaatctctgctgcaagtaagatccttgttagaagatgaatacctctaggtaaacacacacacacatatccacatgtaacccaccaacwtaggcactgaaacaacacmttcacctctgtttaaccaattttccaattctatttttggaacaagtgaaagaagcaataaaatctgaatagtaaggagttttctatagagtaaggcagcatctttttctcttt

SEQ ID NO: 82409 - DNA, 600 bp, Chicken  19866894377144_2
acagtagaatgtgttggatgccacttttacattgctcctcagtttagccctaattattatcagataaggccattgtttccaatagagttcagtgtgagcagaccacaaggtgtgacaacagaaaacaattackctgggtatgttaaaagaatttggtattgtcagttcagcttttcaaagtgaaaaggtcctctttagaagatggtcttcttaaatctctgctgcaagtaagatccttgttagaagatgaatacctctaggtaaacacacacacacatatccacatgtaacccaccaacwtaggcactgaaacaacacmttcacctctgtttaaccaattttccaattctatttttggaacaagtgaaagaagcaataaaatctgaatagtaaggagttttctatagagtaaggcagcatctttttctctttagagtaaggctttctcctcatatagagaagtacacagtgaagatagaaactgtatggaggaggttaacagcataatccagacaagaaagttatctttttcaagtattgccccacaaaaaaaaggcaggaatagtggctgcaggtttatgatgactgaggaaacagtag

SEQ ID NO: 82410 - DNA, 600 bp, Chicken  19866894377144_3
gccacttttacattgctcctcagtttagccctaattattatcagataaggccattgtttccaatagagttcagtgtgagcagaccacaaggtgtgacaacagaaaacaattackctgggtatgttaaaagaatttggtattgtcagttcagcttttcaaagtgaaaaggtcctctttagaagatggtcttcttaaatctctgctgcaagtaagatccttgttagaagatgaatacctctaggtaaacacacacacacatatccacatgtaacccaccaacwtaggcactgaaacaacacmttcacctctgtttaaccaattttccaattctatttttggaacaagtgaaagaagcaataaaatctgaatagtaaggagttttctatagagtaaggcagcatctttttctctttagagtaaggctttctcctcatatagagaagtacacagtgaagatagaaactgtatggaggaggttaacagcataatccagacaagaaagttatctttttcaagtattgccccacaaaaaaaaggcaggaatagtggctgcaggtttatgatgactgaggaaacagtagaggaggtagctaggaagac

SEQ ID NO: 82411 - DNA, 600 bp, Chicken  19866894377148_1
tcaaatgttgattaacacaaatttcttacatttccaacatgtattttaaaatctattttttccttataattgattgtgcaaaaacccccacttctaatactaggagagaaaagtttattgaaaagaggtttgggggaaaatgcaaagctgtaccactaatggaatctggatggaattggtgataatcaactaacaatttttacttttaaaatagattattggaattttcaagtgactgaactcggttgggaaatagccattattcagtagtaactagttgttagaattcatactggcagygtggtgggcattccgtaacacaggaattggaggagatcagatcataactggttgtggttcacagcaagcttcaactgtcatgtcattcttcatgcttgtacccattgtatagtgttagagttactcatctcaaaagtgtcaatgcaaaactctagacctggttaactgtaaaagaataaactaggtgtgtacaaagaagatagaaataaccggagatgctctggaaaagctgtgaaataatctggatcagaaaaatggttcagttcatagcagagttgctgcttaactgaactgaagaat

SEQ ID NO: 82412 - DNA, 600 bp, Chicken  19866894377155_1
caaaggggaatgtgcttgtaccaagcctccatctccctcctcttcccaccctgatggaaggcaagcctaacagaaagagcagtgctaatgatcacgaccccactactattttatttccaattggcagcccatgcaagcagccctattttcttttctaataggaaactttatgatgtaccaaattaccccgtaatagtctgtgctgagctgcctcctgaaaggtaaacgagtttgattttttatgatcggttattattacgtttttttgcctattccataaaaagtggggaattgcagtawagagactctcgggttgcagagcagagccgctggcagccagctggtgcccaaggagtgctgcaggtgctgcagtggtgacacatggrtgggtggctctgggggtccggtacagccctgaagctcatgtaagtgctgaaggtgcaagaaacttcaccatgcacagaagggaggtgctgggggctgcagagcccagcgttgctctgcacgatgtggagtgccatctcctggctcgataggaattaactggggctccgtcagcgctgctccatccgctggggcagctgcttctgctccctttgg

SEQ ID NO: 82413 - DNA, 600 bp, Chicken  19866894377155_2
aatgatcacgaccccactactattttatttccaattggcagcccatgcaagcagccctattttcttttctaataggaaactttatgatgtaccaaattaccccgtaatagtctgtgctgagctgcctcctgaaaggtaaacgagtttgattttttatgatcggttattattacgtttttttgcctattccataaaaagtggggaattgcagtawagagactctcgggttgcagagcagagccgctggcagccagctggtgcccaaggagtgctgcaggtgctgcagtggtgacacatggrtgggtggctctgggggtccggtacagccctgaagctcatgtaagtgctgaaggtgcaagaaacttcaccatgcacagaagggaggtgctgggggctgcagagcccagcgttgctctgcacgatgtggagtgccatctcctggctcgataggaattaactggggctccgtcagcgctgctccatccgctggggcagctgcttctgctccctttgggctggagtcttggtggggaaattatccagaaaaagaacagctgcaggaggtgggagtgcttgatgcagagctgctctcctgagtga

SEQ ID NO: 82414 - DNA, 600 bp, Chicken  19866894377159_1
gttcggtggtttttctttgtttggagaatattctttcttagcttcttcgtagttgagctctctttcaagctgggctgtgatgattagcaatagttgctttagctgctgttgtactttaatacgtgtggaatctaattacttaaatgtagtgcaatgtattccatcttggaaacaaaaaaatgtgcgaaataactgatttggggtcatttgtatgaagtattttcaagttataaagaaatcaataagacatggtcactgttctgttgtattttcttgtgtactatagcaaaaagggaaagyagcaaaggtgcacgttggaaaaattgcaattagaagaatataaataacatttaattamaatgatttattctttgcaggagatcaatgggatcactgctgctttggctgaagagctctttcacaaaggtaaataacttggaagaattagctgtgaatgaagtaacagttttcctctatctgcatgcattcatgcacctctgrtatttaatttccagacaggtagagatctgagtttttgatacgtaaagattaaaaggatgasatgcacttcctataactgcaatagctctaactgttcag

SEQ ID NO: 82415 - DNA, 600 bp, Chicken  19866894377159_2
tctctttcaagctgggctgtgatgattagcaatagttgctttagctgctgttgtactttaatacgtgtggaatctaattacttaaatgtagtgcaatgtattccatcttggaaacaaaaaaatgtgcgaaataactgatttggggtcatttgtatgaagtattttcaagttataaagaaatcaataagacatggtcactgttctgttgtattttcttgtgtactatagcaaaaagggaaagyagcaaaggtgcacgttggaaaaattgcaattagaagaatataaataacatttaattamaatgatttattctttgcaggagatcaatgggatcactgctgctttggctgaagagctctttcacaaaggtaaataacttggaagaattagctgtgaatgaagtaacagttttcctctatctgcatgcattcatgcacctctgrtatttaatttccagacaggtagagatctgagtttttgatacgtaaagattaaaaggatgasatgcacttcctataactgcaatagctctaactgttcagttaacagagtttggaatgattaagccatgcttgttttgccttaaaggacatgctaggt

SEQ ID NO: 82416 - DNA, 600 bp, Chicken  19866894377159_3
ggtcatttgtatgaagtattttcaagttataaagaaatcaataagacatggtcactgttctgttgtattttcttgtgtactatagcaaaaagggaaagyagcaaaggtgcacgttggaaaaattgcaattagaagaatataaataacatttaattamaatgatttattctttgcaggagatcaatgggatcactgctgctttggctgaagagctctttcacaaaggtaaataacttggaagaattagctgtgaatgaagtaacagttttcctctatctgcatgcattcatgcacctctgrtatttaatttccagacaggtagagatctgagtttttgatacgtaaagattaaaaggatgasatgcacttcctataactgcaatagctctaactgttcagttaacagagtttggaatgattaagccatgcttgttttgccttaaaggacatgctaggtgctagtggatgttccggatggctgaggaaataggtgaagcatgtttcagactgttgttccagattgttctggctcaaaattaacttcagttacagccatttcagagggtctgctctgcaaattttggaacattatggcaattg

SEQ ID NO: 82417 - DNA, 600 bp, Chicken  19866894377159_4
gttgtattttcttgtgtactatagcaaaaagggaaagyagcaaaggtgcacgttggaaaaattgcaattagaagaatataaataacatttaattamaatgatttattctttgcaggagatcaatgggatcactgctgctttggctgaagagctctttcacaaaggtaaataacttggaagaattagctgtgaatgaagtaacagttttcctctatctgcatgcattcatgcacctctgrtatttaatttccagacaggtagagatctgagtttttgatacgtaaagattaaaaggatgasatgcacttcctataactgcaatagctctaactgttcagttaacagagtttggaatgattaagccatgcttgttttgccttaaaggacatgctaggtgctagtggatgttccggatggctgaggaaataggtgaagcatgtttcagactgttgttccagattgttctggctcaaaattaacttcagttacagccatttcagagggtctgctctgcaaattttggaacattatggcaattgctgaagaaatctgtcctgtctttgtagcctgtgcagtctcactgctgtatatgggtataat

SEQ ID NO: 82418 - DNA, 600 bp, Chicken  19866894377166_1
aaactttaatgcatctaattctgttttgcttctgtgctttgaagtcagagccctaaaaagaggcacgtgagagcatgtttatttaagtgaggagcgagtttgatttgtaaaggtattgacagtctgcagttctcattagcttttgaagacaactgttcccctgaacacaaggctgttttctaggtgattaatgaagtattttgattctacatgtaaatgtgttgttgattaaaattcgcagaattggttaaggagcattgaacacacagctctctctggaaatagatgggagaagtaagkctaaattccacaagcaccttgcctctgcttctcagtgttygtaagatgctgtaagaaaatgaccttggatcttcatttgtagctcagtagaggttcctgtagcgaatgtcatggatatagaaaagtttactagtgtattcacatgtgttcttcaagtacagattaactcagagtaacccagattaacaatagtgctgcaaaggagcaagagacaattagaagaaaaaaaggataacacctccctctgcaaggtgacaaagctgcacatccaggaactgaacgttagcatcttggctcgtg

SEQ ID NO: 82419 - DNA, 600 bp, Chicken  19866894377166_2
gaagtcagagccctaaaaagaggcacgtgagagcatgtttatttaagtgaggagcgagtttgatttgtaaaggtattgacagtctgcagttctcattagcttttgaagacaactgttcccctgaacacaaggctgttttctaggtgattaatgaagtattttgattctacatgtaaatgtgttgttgattaaaattcgcagaattggttaaggagcattgaacacacagctctctctggaaatagatgggagaagtaagkctaaattccacaagcaccttgcctctgcttctcagtgttygtaagatgctgtaagaaaatgaccttggatcttcatttgtagctcagtagaggttcctgtagcgaatgtcatggatatagaaaagtttactagtgtattcacatgtgttcttcaagtacagattaactcagagtaacccagattaacaatagtgctgcaaaggagcaagagacaattagaagaaaaaaaggataacacctccctctgcaaggtgacaaagctgcacatccaggaactgaacgttagcatcttggctcgtgcttgtcaatcttgcagaggggctgaaaataacaagaagaa

SEQ ID NO: 82420 - DNA, 600 bp, Chicken  19866894377172_1
ttttctttttatttcaacaacagaaaaagttgagtgttgatgaaaaatacatcaaagatggttatgaaacagcgattttgttgctttgcaggaatgatcgctccttcacctgcccagcagaaggctgtggaaaaagcttttatgtcttacagaggctgaaggtgcacatgagaactcacaatggtgaaaaaccctttgtctgtacagagctgggctgtgggaaacaattcacaacagctggaaatctgaagaaccacctacgaattcacactggtgtgttttagacttcacctatttgtrgtctgaagaagtggggtctttagtgaggaataaagcactgcctcctccatcatcaagctcttgaaaatattatgcttgtatacccctggtcttcattaatgtcccttttcttttcaaatgaatagtaagcgaacacctctgctgtaacaattttcataaagaagctattttaatttcctgagaagcacaatagcttagatgtttcttcaktgtgagtccaggtagacagttgtagctgtactgacatttggctgaatctgcctactttatgctgcttgtagaatgactatgagtgagaga

SEQ ID NO: 82421 - DNA, 600 bp, Chicken  19866894377172_2
tgggctgtgggaaacaattcacaacagctggaaatctgaagaaccacctacgaattcacactggtgtgttttagacttcacctatttgtrgtctgaagaagtggggtctttagtgaggaataaagcactgcctcctccatcatcaagctcttgaaaatattatgcttgtatacccctggtcttcattaatgtcccttttcttttcaaatgaatagtaagcgaacacctctgctgtaacaattttcataaagaagctattttaatttcctgagaagcacaatagcttagatgtttcttcaktgtgagtccaggtagacagttgtagctgtactgacatttggctgaatctgcctactttatgctgcttgtagaatgactatgagtgagagatgtagggaagtgaggagtacagtggaatgagtatcaaaaagcagcaaagtctcayagaaaaaggcgttagttgaagaaagcattttagtgtgcaaactgttctatttgtagtaatgctaattcgggatgttgccatatattggatcctatgtactcttaactcatacacaaatttttatattaaataaaagaagaacctttatttcatag

SEQ ID NO: 82422 - DNA, 600 bp, Chicken  19866894377172_3
agctcttgaaaatattatgcttgtatacccctggtcttcattaatgtcccttttcttttcaaatgaatagtaagcgaacacctctgctgtaacaattttcataaagaagctattttaatttcctgagaagcacaatagcttagatgtttcttcaktgtgagtccaggtagacagttgtagctgtactgacatttggctgaatctgcctactttatgctgcttgtagaatgactatgagtgagagatgtagggaagtgaggagtacagtggaatgagtatcaaaaagcagcaaagtctcayagaaaaaggcgttagttgaagaaagcattttagtgtgcaaactgttctatttgtagtaatgctaattcgggatgttgccatatattggatcctatgtactcttaactcatacacaaatttttatattaaataaaagaagaacctttatttcatagcactgtattttatacatggtttgtttacgctgtttcatgtgcagagttctgccttgtcaatatttatagaagttttgccagccaaagccttgacaatgtatagagtgctttatatgcacttatcctagaaaggtgtttggagagc

SEQ ID NO: 82423 - DNA, 600 bp, Chicken  19866894377175_1
tctcgatccctgagcgggatcacagagctccagaagggcaggaatgctgcccagggacagcccccggatgctctggagctgctgggactcaacgcgcagtgcagccagagctgatggtgcccaaaggcaaggagcccgggctgtgggttgtgagcccgatggtgacctcagcctgtccctaagtgtgccacctccagccagcagcaccgtgagcctcgctgggatgaacagtgagcgtttggctcatcccccgcaagcacagagcagggcacgtcgccctgctgctcctggtcgggaccrgagctctgttagggaccaggcgtcaggaatcagccttgcttggatgagaggagcctgctggggctgaccgtgcagccagggagcatcgctcctcrkcmtcggccctcactgggtgagcgctgcttgccggcagcacacggagggctgctgctgacagatggccgttctgctgctaatactcccacagcatccttttgggcgaggagggggctgcacatccattacgctggcccarcccggtggagattgaagccgcaaagaagataagaagattgttttcccaatcccatccttgggttg

SEQ ID NO: 82424 - DNA, 600 bp, Chicken  19866894377175_2
gcagtgcagccagagctgatggtgcccaaaggcaaggagcccgggctgtgggttgtgagcccgatggtgacctcagcctgtccctaagtgtgccacctccagccagcagcaccgtgagcctcgctgggatgaacagtgagcgtttggctcatcccccgcaagcacagagcagggcacgtcgccctgctgctcctggtcgggaccrgagctctgttagggaccaggcgtcaggaatcagccttgcttggatgagaggagcctgctggggctgaccgtgcagccagggagcatcgctcctcrkcmtcggccctcactgggtgagcgctgcttgccggcagcacacggagggctgctgctgacagatggccgttctgctgctaatactcccacagcatccttttgggcgaggagggggctgcacatccattacgctggcccarcccggtggagattgaagccgcaaagaagataagaagattgttttcccaatcccatccttgggttggttatctgcgctggggatgtggtggggatgtgcggcgtacctcgcggctgggagacgctgcgtccaaccccgttggcccgggaaaggcttcggca

SEQ ID NO: 82425 - DNA, 600 bp, Chicken  19866894377175_3
cagtgcagccagagctgatggtgcccaaaggcaaggagcccgggctgtgggttgtgagcccgatggtgacctcagcctgtccctaagtgtgccacctccagccagcagcaccgtgagcctcgctgggatgaacagtgagcgtttggctcatcccccgcaagcacagagcagggcacgtcgccctgctgctcctggtcgggaccrgagctctgttagggaccaggcgtcaggaatcagccttgcttggatgagaggagcctgctggggctgaccgtgcagccagggagcatcgctcctcrkcmtcggccctcactgggtgagcgctgcttgccggcagcacacggagggctgctgctgacagatggccgttctgctgctaatactcccacagcatccttttgggcgaggagggggctgcacatccattacgctggcccarcccggtggagattgaagccgcaaagaagataagaagattgttttcccaatcccatccttgggttggttatctgcgctggggatgtggtggggatgtgcggcgtacctcgcggctgggagacgctgcgtccaaccccgttggcccgggaaaggcttcggcac

SEQ ID NO: 82426 - DNA, 600 bp, Chicken  19866894377175_4
gtgcagccagagctgatggtgcccaaaggcaaggagcccgggctgtgggttgtgagcccgatggtgacctcagcctgtccctaagtgtgccacctccagccagcagcaccgtgagcctcgctgggatgaacagtgagcgtttggctcatcccccgcaagcacagagcagggcacgtcgccctgctgctcctggtcgggaccrgagctctgttagggaccaggcgtcaggaatcagccttgcttggatgagaggagcctgctggggctgaccgtgcagccagggagcatcgctcctcrkcmtcggccctcactgggtgagcgctgcttgccggcagcacacggagggctgctgctgacagatggccgttctgctgctaatactcccacagcatccttttgggcgaggagggggctgcacatccattacgctggcccarcccggtggagattgaagccgcaaagaagataagaagattgttttcccaatcccatccttgggttggttatctgcgctggggatgtggtggggatgtgcggcgtacctcgcggctgggagacgctgcgtccaaccccgttggcccgggaaaggcttcggcaccc

SEQ ID NO: 82427 - DNA, 600 bp, Chicken  19866894377175_5
cgtttggctcatcccccgcaagcacagagcagggcacgtcgccctgctgctcctggtcgggaccrgagctctgttagggaccaggcgtcaggaatcagccttgcttggatgagaggagcctgctggggctgaccgtgcagccagggagcatcgctcctcrkcmtcggccctcactgggtgagcgctgcttgccggcagcacacggagggctgctgctgacagatggccgttctgctgctaatactcccacagcatccttttgggcgaggagggggctgcacatccattacgctggcccarcccggtggagattgaagccgcaaagaagataagaagattgttttcccaatcccatccttgggttggttatctgcgctggggatgtggtggggatgtgcggcgtacctcgcggctgggagacgctgcgtccaaccccgttggcccgggaaaggcttcggcaccctctgcttttcctgctggaggacggggtgggagctccccctgccgcctgtgcggctcggcacgcggtgtgtgctgccgacggtgccgataacgatgctgatgcagccccagcaagcagcaatatccccccccccgcca

SEQ ID NO: 82428 - DNA, 600 bp, Chicken  19866894377182_1
tgtgaatagcaaattaatgaattccactcttggccaatgagacaggattggaatatgttaactaaacagaaggaagatcaagtgagttgtcttttctgagtcagcttggattaaaacacacctatgtgtggttagataggtaaaatctgatttatgtttattgcattgtaaaagtaaacagtagaatatgctactcacatttttagtaattttttctaatataagtagttgtttactgaatagtgtaaattagttaacttgaagacaagttcttggaggtttaggagcaactctgtaccraggaattatgatgtcaactcaatgccaaagtgcaatccacaggctaatgtttttatcatatctgacttggacattagcagtaagaagttacttcagttactttcatatgtattttatgcaagtgtagctttagcatttttgagactggacagaagaatggacttaaacctaacaaataaatttgaaacataattagttgttcaaaattcccagctgcttctagtaagtggtctctgctttgcctgttggctgttgtggagctggtctcctgccatacaaaaactctagatacataacctg

SEQ ID NO: 82429 - DNA, 600 bp, Chicken  19866894377193_1
agcatctttattcctaatctgttagtacatatacttctgacgaattcattttctaattgtaagtgaagatgtgccatgctggtttatgatctcaacagaaatgatatgctacacagtaaatgcatgaggaagaattaaaataatgccttctaggtcaataatagaaaaacatgaatgtgtcttcatgaagtttaattcacgggtaaatgggcgaagtgcccattaatacaagtaggcagactagatggctaaatgatttgttcgtcttgaaatatagacactggcaactgtacaagaagyacagaagcagctaaatgccactgaaagtgcaattatgcagccaatttaatgtaatcaaaagagtaggtccctttcttccaccctctcaatcccttgcttaccctaggactcattgctctcacactggcattagggttcctaaagccacacagtgagctgaatgtgatcctgctgatacctaacctggcaaaatcaaaaaaacattttagtgtctaaggtcaaaatgagaggttctcttttaaatggtagcctgtgtaggatggtgggtataattatagggaccagaatgcctctctgaag

SEQ ID NO: 82430 - DNA, 600 bp, Chicken  19866894377198_1
caaacagtccatccttcaaatccattcctctctaatttagagagaaggatgtggtgagggaccatgtcaaaggatttgcagaagtccagatagatgacatccatcacccttcccctgtccactgatgctgtcactccatcatagaagcccacaagattggtcaagcacaatctgcccttggcaaagccatgctgactgtctcaaatcacctctttatctcatatgtgccttaacatagcttctagggggatcttctccattatcttcccaggcacagaggtgaggctcagtgtcctgtartttgatgggtcatcctttctccctttcttaaaagtgggagtaatgtttcccttttttcagtcaccggggacttcaccagacagccatgatttttcagatatgatggagagccgttcagcaaccacattagctatatctctcagagtgaaggtgataagatcctgagcaacatgtaagtgtttttctatcattgctcttctgatatgttctttctggtctatcttttgttatggttttatgattttttgttataggtatttcacatcataaaatcatgtagtgcactggaagctaaagggt

SEQ ID NO: 82431 - DNA, 600 bp, Chicken  19866894377202_1
ctggcagccaggattcctgtatttttcacatccttgagcctctaggcgggaaatgggggagtaaatctggccccactgttagggcagagcaagtccaagaccacctcatgagactgaatgtatatgagtctatggacctgggagatatgcaccccagggtcctaaaggagctggctgatgtggttgctgagctgctctccatcatatttgaaaagtcatggctgtcaggtgaagtccccagggactataaaaaaggaaatgtcactcccatttactcctctttgagacctcattgcattstcccagtaattaaarggggattataaaaaggaggggaatcaactttttacaagggtaggcagtgataggacaaggaagaatggttttgagctcaaggatggaaggtttagattggatgtcagagggaagttctttacagagagagtggtgagaggtgctggaacaggctgcccagagaggctgtggatgctccatcccggaggtgttcaagaccaggttggatggggccctgggcaacctgatctagtattaaatctggaggttggtggccctgcctgtggcagggggcttggaacttga

SEQ ID NO: 82432 - DNA, 600 bp, Chicken  19866894377202_2
cctgtatttttcacatccttgagcctctaggcgggaaatgggggagtaaatctggccccactgttagggcagagcaagtccaagaccacctcatgagactgaatgtatatgagtctatggacctgggagatatgcaccccagggtcctaaaggagctggctgatgtggttgctgagctgctctccatcatatttgaaaagtcatggctgtcaggtgaagtccccagggactataaaaaaggaaatgtcactcccatttactcctctttgagacctcattgcattstcccagtaattaaarggggattataaaaaggaggggaatcaactttttacaagggtaggcagtgataggacaaggaagaatggttttgagctcaaggatggaaggtttagattggatgtcagagggaagttctttacagagagagtggtgagaggtgctggaacaggctgcccagagaggctgtggatgctccatcccggaggtgttcaagaccaggttggatggggccctgggcaacctgatctagtattaaatctggaggttggtggccctgcctgtggcagggggcttggaacttgaagatccttgaggtcc

SEQ ID NO: 82433 - DNA, 600 bp, Chicken  19866894377202_3
aaggaggggaatcaactttttacaagggtaggcagtgataggacaaggaagaatggttttgagctcaaggatggaaggtttagattggatgtcagagggaagttctttacagagagagtggtgagaggtgctggaacaggctgcccagagaggctgtggatgctccatcccggaggtgttcaagaccaggttggatggggccctgggcaacctgatctagtattaaatctggaggttggtggccctgcctgtggcagggggcttggaacttgaagatccttgaggtccattccaacccaygccattctatgattctatgataattacttgtgttataacaggaaaaggaaccatcttgagtttgtcattttttaaattgcgttattgtagcatgcttgccttaagtatggctgaagaatatctgagattattattgttaataatagtaattattattattgaaactgtcacagtcagtagtacaaactcaagtttcaaaatgtaaaatttccagattcatacccttaccacctggattgttatgtcagcaaatactacctacagacttggtgttaagagagataccacattgcagctaga

SEQ ID NO: 82434 - DNA, 600 bp, Chicken  19866894377209_1
catacttactgcactaataggcttcttatttagagtatagtaggttttagggataacctgtaaaaggttaagttgtgaagaaatgtgccagattgagttcaatcaatatgttcttccataaccatgaaaaaatttcacatgaaaggcaaaaacaggagtctgtgttcttgctactttgaagttatatcactgccttagcgtggggaaagtaagagaaggaaaaagctgaagacctgataattctggatgaggagttataagaacctttgtgccttactgatttactgacctgtttaaatmtgcatgcttattagtgcttaaaatgtattttgtctttgggaaaaagaaatgtaatgggtggccctcatctctccyttttttttaataagtctatagagatggtgagtaaagttgtgaaagaaagcaggagcactgatgctaaacagacctctcttccttcttatgttgtagacacgttatgaggaaatgccagaacctaagttcatgtatgggagccactattcatccccgggttatgttttgttttaccttgttagagttggtaagatttctcttatgtgctctctgttcagacagttg

SEQ ID NO: 82435 - DNA, 600 bp, Chicken  19866894377209_2
tgaagaaatgtgccagattgagttcaatcaatatgttcttccataaccatgaaaaaatttcacatgaaaggcaaaaacaggagtctgtgttcttgctactttgaagttatatcactgccttagcgtggggaaagtaagagaaggaaaaagctgaagacctgataattctggatgaggagttataagaacctttgtgccttactgatttactgacctgtttaaatmtgcatgcttattagtgcttaaaatgtattttgtctttgggaaaaagaaatgtaatgggtggccctcatctctccyttttttttaataagtctatagagatggtgagtaaagttgtgaaagaaagcaggagcactgatgctaaacagacctctcttccttcttatgttgtagacacgttatgaggaaatgccagaacctaagttcatgtatgggagccactattcatccccgggttatgttttgttttaccttgttagagttggtaagatttctcttatgtgctctctgttcagacagttgcctcagaagcaggcaaggtttgaagaaagaatatgacttttcatttctctctagctccagaatacatgctctgtt

SEQ ID NO: 82436 - DNA, 600 bp, Chicken  19866894377209_3
aagtctatagagatggtgagtaaagttgtgaaagaaagcaggagcactgatgctaaacagacctctcttccttcttatgttgtagacacgttatgaggaaatgccagaacctaagttcatgtatgggagccactattcatccccgggttatgttttgttttaccttgttagagttggtaagatttctcttatgtgctctctgttcagacagttgcctcagaagcaggcaaggtttgaagaaagaatatgacttttcatttctctctagctccagaatacatgctctgtttgcagaatggraagtttgatcatgctgacagaatgttcaacaggtttgtttacgttttgtctgtatgtaagttgtcattttaaaatagacatcaggggagtgcaaagcattttaaatgttttctaacaamtgtgtaattgatatgttctcaagtgttgcagaaacctggaaaaactgtttggatggcgcaacagatttcaaggaggtaaatggccagaaaataactcaagtctgagcacttgtgcagaacttttctcagatgtctcctgttgatcttaattcatttatatttttatctcagctactgatgg

SEQ ID NO: 82437 - DNA, 586 bp, Chicken  19866894377209_4
tgtatgggagccactattcatccccgggttatgttttgttttaccttgttagagttggtaagatttctcttatgtgctctctgttcagacagttgcctcagaagcaggcaaggtttgaagaaagaatatgacttttcatttctctctagctccagaatacatgctctgtttgcagaatggraagtttgatcatgctgacagaatgttcaacaggtttgtttacgttttgtctgtatgtaagttgtcattttaaaatagacatcaggggagtgcaaagcattttaaatgttttctaacaamtgtgtaattgatatgttctcaagtgttgcagaaacctggaaaaactgtttggatggcgcaacagatttcaaggaggtaaatggccagaaaataactcaagtctgagcacttgtgcagaacttttctcagatgtctcctgttgatcttaattcatttatatttttatctcagctactgatggcatttcatgtatcctttcacgttctgaacctttattctctgtaattgtgtgattccttgtatgtcttactgtcttttcatttgacataaatgtcattatgaatgt

SEQ ID NO: 82438 - DNA, 599 bp, Chicken  19866894377212_1
  misc_feature (1)..(144): n is any nucleotide
nnnnnnnnnnnnnnnnnnnnnnnnnnnnnnnnnnnnnnnnnnnnnnnnnnnnnnnnnnnnnnnnnnnnnnnnnnnnnnnnnnnnnnnnnnnnnnnnnnnnnnnnnnnnnnnnnnnnnnnnnnnnnnnnnnnnnnnnnnnnnnnnaaaatcctggacagtcatacttttttgggggtggattttacatccaccagctccaagaagcatagatggtcctgcagagagactgaaggagctaaggaagtttggtcagagatggcagcaagcaagttacttctgcacctgcagtacagctctacmtaatggcagggaacacggacctggagaatccagaggagctttctacaccctcccaagaagccttggaatgcagacacactgctgcacatctttgctttcccaaccgcccctacgtttagcccaagtcctatcccttgaaatgctcagacacaagacaagaaagcagggacaaaggatacatagccttctctcaccatggtccctggagtcctccagcttggctgctctgaggtctgtgctgtggatcttggagaggacttcactcatggcagcataaatagcccgccgctggctaggca

SEQ ID NO: 82439 - DNA, 600 bp, Chicken  19866894377212_2
tcccactcaaggttccagctgccatagcaagatcctacttcccctgacatgctgtgagagctgtgttgtgctttgtggcttggatgaatctgcagtgtaggagtgaggaggatgtgtttcaaaggcagagagtcctaaatgcacgctcaccaccagctgccttctcacctgtattcccttccaacagcaggacctgaaggaagcaggctgtcagggagttccttcttcagcaccagagaacgatctccaaacttgacaaaataggtccgggtagactgtccacagccaaactgccgcagygtcagtggacctgaagatttgagagcagagggtcagcagacaaagcataagctgggattacttctcaccacttctccaagttttacttttcattcctgtgcctgtgccttacaggtcaggaatactgctggtatttcttctgcagcttttctcaatacctcagaaataatgaagtcttaaaatgttgctttttggtccatcagtggtgcgccactgaaacctgaatggctgcaatgtttgcttggagattaggagactttcattaatatcgtttttcagtccatttttttatataacgga

SEQ ID NO: 82440 - DNA, 600 bp, Chicken  19866894377218_1
tccacgttgaaaaaaaatacggagaaaagggaatatgtaaaatgcagaatcaagagtttttattacgttaattattgctgtcggtaatgcaatggagataaatcgtgtttccccagtgcaaatgccattaaccattatagaaaagagacaggtaacaacctatgctggcacggaaatcctctcctccaaagacgactgcatccagatgaaagccaacctgggatcctgttctcaatgcttcttcacagacagcctacaaatgggagcatattgttaatttctacagaaatgcaagaagcrgagagactaagaggatattacatcaactcggtattaccaaaacctggtgatcctctggctaaaatcgctcctattaagtaaaaccattgtaggtactcgagtgtgcacaatgctttaaaatgactcagcagaatagaaaacattatctcgccctgagcacctatatgcctccggtgtggagatgcaggacatcgcaacagcttcgctgcctcttggctggagcttaccataatgcccttgcgatcgctgcctcggatattcaggcagcaatacggaacgaaacacccctcaaaggctgct

SEQ ID NO: 82441 - DNA, 600 bp, Chicken  19866894377223_1
catttgtgctgaatgcctgaaattggatggtgctacagcttcagcctaggaagtaatgcaagactttttcctatgagcaggaagttcagcagctgaagactttgaaggagaaaggtctgtgtgagggtaagtgggttagggtttatatctgggctgtcagtgtgacacccgtgcgaaaatgatggaagggatccaggaaagtgtcaggagaggtatatgcagttgagggagggagagcatctcagctgggtgcatctgggctgggacctgatctggtgtaagtgcacagcacttattgcrgtccaaaaacttgagctcatcgtgtgacagrtgtggaggagggctacagggatgttcaaaggaatgatgttacaggaggagtctgaaacagctgtgttggaaatgtcaggaaggataggaaaatgtgaattttaattgctccagctgtgcagctggaataatgaggggcttgggattgtgactaacatcgggtaggttataacaagcaaggatgtctgtagttcaccagaggactgatgacagtctatgtaacagcaytgtrttgtaggaaggcagtaatgtagaaacagaagtgtctga

SEQ ID NO: 82442 - DNA, 600 bp, Chicken  19866894377223_2
gctacagcttcagcctaggaagtaatgcaagactttttcctatgagcaggaagttcagcagctgaagactttgaaggagaaaggtctgtgtgagggtaagtgggttagggtttatatctgggctgtcagtgtgacacccgtgcgaaaatgatggaagggatccaggaaagtgtcaggagaggtatatgcagttgagggagggagagcatctcagctgggtgcatctgggctgggacctgatctggtgtaagtgcacagcacttattgcrgtccaaaaacttgagctcatcgtgtgacagrtgtggaggagggctacagggatgttcaaaggaatgatgttacaggaggagtctgaaacagctgtgttggaaatgtcaggaaggataggaaaatgtgaattttaattgctccagctgtgcagctggaataatgaggggcttgggattgtgactaacatcgggtaggttataacaagcaaggatgtctgtagttcaccagaggactgatgacagtctatgtaacagcaytgtrttgtaggaaggcagtaatgtagaaacagaagtgtctgaatacatgatttagaggaaataggaacttcat

SEQ ID NO: 82443 - DNA, 600 bp, Chicken  19866894377223_3
ggctgggacctgatctggtgtaagtgcacagcacttattgcrgtccaaaaacttgagctcatcgtgtgacagrtgtggaggagggctacagggatgttcaaaggaatgatgttacaggaggagtctgaaacagctgtgttggaaatgtcaggaaggataggaaaatgtgaattttaattgctccagctgtgcagctggaataatgaggggcttgggattgtgactaacatcgggtaggttataacaagcaaggatgtctgtagttcaccagaggactgatgacagtctatgtaacagcaytgtrttgtaggaaggcagtaatgtagaaacagaagtgtctgaatacatgatttagaggaaataggaacttcatatggaaaacatatttagccagtgtagacatgtgtgtcaatagccccataatatcaggcagtagtcagtaggagaattctcaatttatatttaaggaggagcttgaagatttatgaaggacaattactgctttggttctttggatttaggctgtttagcagcttgtgcttttgatcattagtatacagtgtgagacttgctgccttctgtgttgccctgcagtttacc

SEQ ID NO: 82444 - DNA, 600 bp, Chicken  19866894377223_4
gggacctgatctggtgtaagtgcacagcacttattgcrgtccaaaaacttgagctcatcgtgtgacagrtgtggaggagggctacagggatgttcaaaggaatgatgttacaggaggagtctgaaacagctgtgttggaaatgtcaggaaggataggaaaatgtgaattttaattgctccagctgtgcagctggaataatgaggggcttgggattgtgactaacatcgggtaggttataacaagcaaggatgtctgtagttcaccagaggactgatgacagtctatgtaacagcaytgtrttgtaggaaggcagtaatgtagaaacagaagtgtctgaatacatgatttagaggaaataggaacttcatatggaaaacatatttagccagtgtagacatgtgtgtcaatagccccataatatcaggcagtagtcagtaggagaattctcaatttatatttaaggaggagcttgaagatttatgaaggacaattactgctttggttctttggatttaggctgtttagcagcttgtgcttttgatcattagtatacagtgtgagacttgctgccttctgtgttgccctgcagtttacctgta

SEQ ID NO: 82445 - DNA, 600 bp, Chicken  19866894377225_1
ggataggcaactaaattgtgtgtactccatttctgagtattgaatcttctctgtgtttctaagattgccctgcattgcaggcaagcagttaattccctggtctgaagagagatggcgagtttagttgttaattagctattaacagggtgttggggtatcagaagctttgtgctggttgttattaaatgtttttgttgaagaattacaggtcttcaaagaagtgtacgcatgatttagttcatttaggagcgaggatcaaccaggggctgtgacggtgatcaacatgcagagcagcagttswgctcccaactcttctgtgatgtgatgtgatctctctgtgccaaaatggcacatcctacataaaaatgaacgccgtgcctccattagagatcctctaatgaggtcggtgcaggagacttcaatgcttaatcctcattttcacaaactgggagcgagatgcagaaatctaatttctgtcttcaaggtcattcattttcacttgacaaaacttaatagacctgcctctgaccgctgcattacaccgcctgccctgcagcatgaacctgcaggtgaggtgtaggcagtgcatgaacctgaagg

SEQ ID NO: 82446 - DNA, 600 bp, Chicken  19866894377225_2
gataggcaactaaattgtgtgtactccatttctgagtattgaatcttctctgtgtttctaagattgccctgcattgcaggcaagcagttaattccctggtctgaagagagatggcgagtttagttgttaattagctattaacagggtgttggggtatcagaagctttgtgctggttgttattaaatgtttttgttgaagaattacaggtcttcaaagaagtgtacgcatgatttagttcatttaggagcgaggatcaaccaggggctgtgacggtgatcaacatgcagagcagcagttswgctcccaactcttctgtgatgtgatgtgatctctctgtgccaaaatggcacatcctacataaaaatgaacgccgtgcctccattagagatcctctaatgaggtcggtgcaggagacttcaatgcttaatcctcattttcacaaactgggagcgagatgcagaaatctaatttctgtcttcaaggtcattcattttcacttgacaaaacttaatagacctgcctctgaccgctgcattacaccgcctgccctgcagcatgaacctgcaggtgaggtgtaggcagtgcatgaacctgaaggc

SEQ ID NO: 82447 - DNA, 600 bp, Chicken  19866894377226_1
aaaaagacagagcccatttcatgtacaccagctggctgcaggacccctcatctggtaatagggacagctgggattgaaggttctccacttctactgcagagatggcccagcagcactgcggctgtaaaaagcagctgtacagcctcccagtctacaagcatttcccatccgtgttgcaagttgaagctgtgcattggcaattctgaaatctcttggatgttgcaaatgtgaggctggcgccaagaaaacagcatctgccatcagcatgggtagctcagctaactgtggcttcagcttaaytcagtgccatcagcccctggccaatggggaacmgaagcaccagsaccgcaggacagccctgcaggaggaaatgtgtgaaacactgcagcagtgcccttcacctggggggaaggggagccacattctgggagggtgcttggtgagactgagtgctttcctcctccacatacaccctcagggatgttttatggccagattttctctcggctctgtttaatagagaaaaatagcatagagatcttctgcacttgctggcagaggtggcaactgatgaacagataatgaaggctttattctcca

SEQ ID NO: 82448 - DNA, 600 bp, Chicken  19866894377226_2
ggctgcaggacccctcatctggtaatagggacagctgggattgaaggttctccacttctactgcagagatggcccagcagcactgcggctgtaaaaagcagctgtacagcctcccagtctacaagcatttcccatccgtgttgcaagttgaagctgtgcattggcaattctgaaatctcttggatgttgcaaatgtgaggctggcgccaagaaaacagcatctgccatcagcatgggtagctcagctaactgtggcttcagcttaaytcagtgccatcagcccctggccaatggggaacmgaagcaccagsaccgcaggacagccctgcaggaggaaatgtgtgaaacactgcagcagtgcccttcacctggggggaaggggagccacattctgggagggtgcttggtgagactgagtgctttcctcctccacatacaccctcagggatgttttatggccagattttctctcggctctgtttaatagagaaaaatagcatagagatcttctgcacttgctggcagaggtggcaactgatgaacagataatgaaggctttattctccatttgttcagctgtttaggagggacaaaatgagt

SEQ ID NO: 82449 - DNA, 600 bp, Chicken  19866894377226_3
ccctcatctggtaatagggacagctgggattgaaggttctccacttctactgcagagatggcccagcagcactgcggctgtaaaaagcagctgtacagcctcccagtctacaagcatttcccatccgtgttgcaagttgaagctgtgcattggcaattctgaaatctcttggatgttgcaaatgtgaggctggcgccaagaaaacagcatctgccatcagcatgggtagctcagctaactgtggcttcagcttaaytcagtgccatcagcccctggccaatggggaacmgaagcaccagsaccgcaggacagccctgcaggaggaaatgtgtgaaacactgcagcagtgcccttcacctggggggaaggggagccacattctgggagggtgcttggtgagactgagtgctttcctcctccacatacaccctcagggatgttttatggccagattttctctcggctctgtttaatagagaaaaatagcatagagatcttctgcacttgctggcagaggtggcaactgatgaacagataatgaaggctttattctccatttgttcagctgtttaggagggacaaaatgagtgagagctcgta

SEQ ID NO: 82450 - DNA, 600 bp, Chicken  19866894377229_1
aagagcccttcagacgtacacctgctggaaacaacaaatgtgacaggaaacaggaaaagataaaactttatgtttaaatacaacactatgtaaggacaaagacgacaatgaagcacactttgaataaccacagaacaggctgttgaagagacaggcttcaaatgaaagccaacacaataccataaagctgagaatacatccccagtgctcccctttgctatgtttctgcttttctcttcattcccaattgtaaaatacaactacaaattgctgcatacaaatggaagactaaaattattygagcagaataggaaggatcacttccataactcaatcaaaaaccttaaaaacatctccagcaggcttaccactgcaggcagctagagcctaacacactcatgctgccttcttcctctatgaacttctactttctggggcacattcttcagttcctattccatctccctctgattatggacattttcacagaacacgagcatggatcttcgggataattacatttacaggaaacaaaaccagcagtaattcaaatacttcaagaacttactttgtcgcagtacaaagttagatgccacacta

SEQ ID NO: 82451 - DNA, 600 bp, Chicken  19866894377229_2
agcaattcctaggaaaagggcaaggtaacaaaatttccatgtcagtgaaagcctcaaacagatccatttgcttctggtttttttttccccaaatgtattcacagctgaaaatattttctcatgctacatagaaactgaggattactatggaaacaaactctcatctctttgatttagaaggaaaaaacccaagccagatttctgacaccagcagacaaaagcagcatggaggaaaaacaggaagcaagctttagtatggggttaatctggaggtttcaaagcatggccgttgttgtgccrtaagtcatcatctgggcactgataccacttcagtctcaaactcagaattcatatacctgactccatataactgacgtgagggctggagcaactccctacaaagacagtctgagggagctgggtttgttcagcctggagaaaagaaggctgtgggggtgacatcactgtacactttcaatacctaaagggagcctacagaaaggaggggagtcaaccctttgaaagggtagataatggcaggacaaggggaagtgggtttatgttgaaggagggaagatttaggttggatgtcagggggaa

SEQ ID NO: 82452 - DNA, 600 bp, Chicken  19866894377237_1
cagatggaatcgcaggcaagcagaaacaacacagtcatgcttcagccctttgtcctaccaagtgataagaacatttcatacatgcaaaagatctccagccttttccccacgaggacagatatcagggacgctatcaccgccccacacaggattttgataaggggagggttggatccgaaagcagctagaatggagccaagcacagccccacctcgagcccgcggcccggaatgggacggggccgtgaaacgggagcttcccatcctattcgcgtgggcccgtagcgcccattgccggcaytggggaggggcggccacagcgcagcgggcaccgggtgcgaacccgaaccgggtcaccgctcacctggcggtcgcggacctcctcgcccacggtgcacacggtaccggcgcactccatgccggggcagaagggtagagacggcaagcggtcgtacagcccctgccgcatcatcacgtcggcgaagttgaggccgcacgcacggacgcgcaccgagagctccccgggaccggggctgccgctccgccgcgtctgcaccttcaccttctcgtagccaccgaaacccgtcagaaccagcgcccg

SEQ ID NO: 82453 - DNA, 600 bp, Chicken  19866894377241_1
tctacaaatagggactaaacactgtcacaaattcaatccagatagatggctatccctgctgaataacaaattaatgagaaacaccttttgagttgttctattgccaaaagaaaacattcaattaaagacagcttacagctttacttaataaagattaatgaaacaaggagaagaacacaagcaattctctataatgagaaaagccaaaatctaacagacgtattatatgaaactttgcaatgtcagagctgccaaagaagtttgcaaaaccagtacaacttggaaaatgcttgccatgtrttggtcagaaggaaaggaagtaaaacttcctgggtaggcaagcgtaygggagatcaggactgatatgaagaagttgaagtcagagcaagctctcaggagagatgaaagaagtaaaacataaactttagtcagcacacataaaatctcaccaacaatatgataaatacatttcatttttccactgatgactgtgaagtcatacagtatatcaattactttattgcttttacacatgatgatttaagcattcaaaccagtattaaacaatatcatgtgttataaattggaaggcaaagataa

SEQ ID NO: 82454 - DNA, 600 bp, Chicken  19866894377241_2
ggctatccctgctgaataacaaattaatgagaaacaccttttgagttgttctattgccaaaagaaaacattcaattaaagacagcttacagctttacttaataaagattaatgaaacaaggagaagaacacaagcaattctctataatgagaaaagccaaaatctaacagacgtattatatgaaactttgcaatgtcagagctgccaaagaagtttgcaaaaccagtacaacttggaaaatgcttgccatgtrttggtcagaaggaaaggaagtaaaacttcctgggtaggcaagcgtaygggagatcaggactgatatgaagaagttgaagtcagagcaagctctcaggagagatgaaagaagtaaaacataaactttagtcagcacacataaaatctcaccaacaatatgataaatacatttcatttttccactgatgactgtgaagtcatacagtatatcaattactttattgcttttacacatgatgatttaagcattcaaaccagtattaaacaatatcatgtgttataaattggaaggcaaagataaaataaaatgattaaattcaatcataactttccaccagtatttagcta

SEQ ID NO: 82455 - DNA, 571 bp, Chicken  19866894377242_1
tggactcaacggtacattgttgtcaatagcattcaattaagaaaacaccgtttgtgttcagcaatttttttgctgttaacatacacaggatgactagagatgaaaacataattatgttgtttctgctccttccctgcatcccagtgaactgcacacgaattgttatcaaaagtacaattcaagctcaccatttcctttgatttttgtgcaggtcttttgcaacagtgaggaggatctctgaatgtgaaaagctattaaaactggagaatccatgtgcagatttctcttaaacttaattcrttatttacaattctttgagttgtgagtcaatgatgactgtaagttggagtttcccctgaaattctgcctttacaagcaacttttttcaggactcagtccaraagaggaaaattaatgattcttggaatcgttattatcttttgggtcactttttttttttcctttttttcttttttttttcccgttttgtttaagacatgaatgttctgaaacacatgtccatcaagaacagtactggttgtttggttttttttttttttttaagctttca

SEQ ID NO: 82456 - DNA, 470 bp, Chicken  19866894377242_2
gaaaacataattatgttgtttctgctccttccctgcatcccagtgaactgcacacgaattgttatcaaaagtacaattcaagctcaccatttcctttgatttttgtgcaggtcttttgcaacagtgaggaggatctctgaatgtgaaaagctattaaaactggagaatccatgtgcagatttctcttaaacttaattcrttatttacaattctttgagttgtgagtcaatgatgactgtaagttggagtttcccctgaaattctgcctttacaagcaacttttttcaggactcagtccaraagaggaaaattaatgattcttggaatcgttattatcttttgggtcactttttttttttcctttttttcttttttttttcccgttttgtttaagacatgaatgttctgaaacacatgtccatcaagaacagtactggttgtttggttttttttttttttttaagctttca

SEQ ID NO: 82457 - DNA, 600 bp, Chicken  19866894377249_1
tagagaggcaaaaaatctttaatcctgctatgtgcagaacaaaagcatatttaataccctttcaaaatgtgtgatggtgtataaattcccaggtctctgtcaattctttttataaccatgctgaaaatggatttgccctgtcaacattagctgagaaacccttgttgcctataattgaaacatgcaatagcaatagatttttttttctaagaataaatgggctttgagatccttcagtataactcaatgtaaaatagtctctattatcagctgatgtttttaccagcccaattgcctcartgtctgttttcagcatttctactttataaacgtaaggaaaagaatacattgagagtcttggtattgcaaacatatttagaaagtgactgctctgtagactataaccctgcaattctgttaaaatgttttcattctcaaacctttgagtaataaataatttcctgaatatcrcctatttgcctgctattgtgaagagttcctagcgatcttaaaggtgttgaagtgacctggaactgcagtgggggacccctgttcgggtcagtggaagtcgtggtttacctgtgcatgattcatagcaga

SEQ ID NO: 82458 - DNA, 600 bp, Chicken  19866894377249_2
taattgaaacatgcaatagcaatagatttttttttctaagaataaatgggctttgagatccttcagtataactcaatgtaaaatagtctctattatcagctgatgtttttaccagcccaattgcctcartgtctgttttcagcatttctactttataaacgtaaggaaaagaatacattgagagtcttggtattgcaaacatatttagaaagtgactgctctgtagactataaccctgcaattctgttaaaatgttttcattctcaaacctttgagtaataaataatttcctgaatatcrcctatttgcctgctattgtgaagagttcctagcgatcttaaaggtgttgaagtgacctggaactgcagtgggggacccctgttcgggtcagtggaagtcgtggtttacctgtgcatgattcatagcagaaaaaaagaagtgcattttgtagtttcatccatgattaaaacttcatggctattttgagttttgtgartttaagaatggagctggatttcacagcaatcacttctgtcttctttatgtagtgcaaacccaggtgaatagatttcacagaaaataatgtatgatgcaatgtat

SEQ ID NO: 82459 - DNA, 600 bp, Chicken  19866894377249_3
aaacatatttagaaagtgactgctctgtagactataaccctgcaattctgttaaaatgttttcattctcaaacctttgagtaataaataatttcctgaatatcrcctatttgcctgctattgtgaagagttcctagcgatcttaaaggtgttgaagtgacctggaactgcagtgggggacccctgttcgggtcagtggaagtcgtggtttacctgtgcatgattcatagcagaaaaaaagaagtgcattttgtagtttcatccatgattaaaacttcatggctattttgagttttgtgartttaagaatggagctggatttcacagcaatcacttctgtcttctttatgtagtgcaaacccaggtgaatagatttcacagaaaataatgtatgatgcaatgtattggaaataaaggcctaaaaaggttttgattttagaagctgctatcagatgamgagagaatttagaatggaaacaactatttaggacacattagtaactcactacaagtaataaatactgagcagtgcagtttggtactgacccagtgtatgcttactttaagcacctgttcatatggaaaaaaaattaagaaatct

SEQ ID NO: 82460 - DNA, 600 bp, Chicken  19866894377249_4
tgacctggaactgcagtgggggacccctgttcgggtcagtggaagtcgtggtttacctgtgcatgattcatagcagaaaaaaagaagtgcattttgtagtttcatccatgattaaaacttcatggctattttgagttttgtgartttaagaatggagctggatttcacagcaatcacttctgtcttctttatgtagtgcaaacccaggtgaatagatttcacagaaaataatgtatgatgcaatgtattggaaataaaggcctaaaaaggttttgattttagaagctgctatcagatgamgagagaatttagaatggaaacaactatttaggacacattagtaactcactacaagtaataaatactgagcagtgcagtttggtactgacccagtgtatgcttactttaagcacctgttcatatggaaaaaaaattaagaaatctaacagagtgatagactttttcacgcttgtttttccagcgcatacataaatgaaattgcttcactagagctatatgcatggtaaaatattcatctaatgaaaaagaagaatgtgatgcatttgaaaaatgtaagcattgaagttcctttgcctgaat

SEQ ID NO: 82461 - DNA, 600 bp, Chicken  19866894377254_1
tcccagccagaggcatagaaatactgtagttatgtttgcttctggctgtttggattctaagaaatgctttatcttctgttgtcattttatcaggctttggttttgctgtttggtactaagtgtgtacagagaagaagattatagcatctgcagaaaaggaaagatacgagggcaggctggtggattgggagctccctggctgtggctgcgtgagatgttgccagaaggcctaaagtaggaacgtgctgcagaactgagcagatgaaaaatgtttctggatctataaagcttttatcccayrgtgcacttaaacatcagttatttatctgtgcggtttgcagtacaagttttagcatactgtgctgttttaaccagactagaatggatatctaagggatcgcattgcatggaatacaacataaccactggtcatacctgtgactagtgaaatctaggatctagcattgactccttcaaattttttttttctattgaaaataggaattttttccagttgttttgatatttccttctcgtgtttgttctttgtttttcaaggaagttcaatgaccataataagaatcacaattaggaagtact

SEQ ID NO: 82462 - DNA, 600 bp, Chicken  19866894377254_2
cccagccagaggcatagaaatactgtagttatgtttgcttctggctgtttggattctaagaaatgctttatcttctgttgtcattttatcaggctttggttttgctgtttggtactaagtgtgtacagagaagaagattatagcatctgcagaaaaggaaagatacgagggcaggctggtggattgggagctccctggctgtggctgcgtgagatgttgccagaaggcctaaagtaggaacgtgctgcagaactgagcagatgaaaaatgtttctggatctataaagcttttatcccayrgtgcacttaaacatcagttatttatctgtgcggtttgcagtacaagttttagcatactgtgctgttttaaccagactagaatggatatctaagggatcgcattgcatggaatacaacataaccactggtcatacctgtgactagtgaaatctaggatctagcattgactccttcaaattttttttttctattgaaaataggaattttttccagttgttttgatatttccttctcgtgtttgttctttgtttttcaaggaagttcaatgaccataataagaatcacaattaggaagtactt

SEQ ID NO: 82463 - DNA, 600 bp, Chicken  19866894377258_1
cagcctgtgaggcctgctttactttcttattctgctccacacttgctggatatccagggtcaaggtgtttgaggcctctgttggcaacagggggtggtgtacagtgagtcacatctgaggttcagattcatcagtaccattctgggtgtggatcaaagaacaaagcagcaaactgctggcttcctgctcatgtctcccaaattcctcacccagcccaaagcactggaacagaggtatggctgcttggaggcaagagcagagtggtgagaccaaccacaagagaccaccaatggtggtttwttttcaccactgtccagcacagaccccacacaacaggctgtgggtagggtgatgtyaccaacagttgggctggtctgtgctccccatgttgagttggacgcattaggttttgtgtaaggtgtggacttgatcttccactgtgccagacgtctttggaggtgttagctccttggtagccttgcttgggaagtagtctgaagcagtcttgggaagcatcctgtctgggagcaggcacagaggaaaatggctgtgctatcctattttgtttacctgtgggtgataaagccacaatttatgacc

SEQ ID NO: 82464 - DNA, 600 bp, Chicken  19866894377258_2
gggtcaaggtgtttgaggcctctgttggcaacagggggtggtgtacagtgagtcacatctgaggttcagattcatcagtaccattctgggtgtggatcaaagaacaaagcagcaaactgctggcttcctgctcatgtctcccaaattcctcacccagcccaaagcactggaacagaggtatggctgcttggaggcaagagcagagtggtgagaccaaccacaagagaccaccaatggtggtttwttttcaccactgtccagcacagaccccacacaacaggctgtgggtagggtgatgtyaccaacagttgggctggtctgtgctccccatgttgagttggacgcattaggttttgtgtaaggtgtggacttgatcttccactgtgccagacgtctttggaggtgttagctccttggtagccttgcttgggaagtagtctgaagcagtcttgggaagcatcctgtctgggagcaggcacagaggaaaatggctgtgctatcctattttgtttacctgtgggtgataaagccacaatttatgaccttcaggcttcttttgcagctgaggcctgcagcaccactgaggatggagatgagcct

SEQ ID NO: 82465 - DNA, 599 bp, Chicken  19866894377259_1
  misc_feature (1)..(169): n is any nucleotide
nnnnnnnnnnnnnnnnnnnnnnnnnnnnnnnnnnnnnnnnnnnnnnnnnnnnnnnnnnnnnnnnnnnnnnnnnnnnnnnnnnnnnnnnnnnnnnnnnnnnnnnnnnnnnnnnnnnnnnnnnnnnnnnnnnnnnnnnnnnnnnnnnnnnnnnnnnnnnnnnnnnnnnnnncttccagtggctgtgcatggagcgcctggcgctgtgctgcccgcccggcacctacgggccccgactgcctgcgtgagtcctgcgatgggcacgggggaatggaaaggggggtgtcctgtgtcctcaccttyccccccaacgtcctcgcagcctgcgctggtggcccccagcagccctgcagcggcaacgggcgctgtgatggagaagggacgcggggtggcaccgggctgtgcgtctgcagccctggctacgggggtcccttctgtgccgagtgcggagatggctactatgaggcatcacgcaaccaaagccagctgctgtgtgccggtaagcaccgtgccgtgctgcgctgagggctctgtgcccacccycttgtgcccaccaccctgtgctcaccgccctgtgtccacccctgcagagtgttaccctg

SEQ ID NO: 82466 - DNA, 600 bp, Chicken  19866894377259_2
cgtgagtcctgcgatgggcacgggggaatggaaaggggggtgtcctgtgtcctcaccttyccccccaacgtcctcgcagcctgcgctggtggcccccagcagccctgcagcggcaacgggcgctgtgatggagaagggacgcggggtggcaccgggctgtgcgtctgcagccctggctacgggggtcccttctgtgccgagtgcggagatggctactatgaggcatcacgcaaccaaagccagctgctgtgtgccggtaagcaccgtgccgtgctgcgctgagggctctgtgcccacccycttgtgcccaccaccctgtgctcaccgccctgtgtccacccctgcagagtgttaccctgcctgtgggcgctgcacggggccggaggactccagctgcctgcgctgcaagaggggctgggtgctgcacgagcaccgctgcatcggtcggtgcacggggacgtggggctggattttggggtyggggtcccggggagcgcygtggaatcgttccctctgatccacagatattgatgagtgcggcacggagatggcacactgcagggccaaccagttttgcgtcaacactgagggctcctacga

SEQ ID NO: 82467 - DNA, 600 bp, Chicken  19866894377259_3
gggggtcccttctgtgccgagtgcggagatggctactatgaggcatcacgcaaccaaagccagctgctgtgtgccggtaagcaccgtgccgtgctgcgctgagggctctgtgcccacccycttgtgcccaccaccctgtgctcaccgccctgtgtccacccctgcagagtgttaccctgcctgtgggcgctgcacggggccggaggactccagctgcctgcgctgcaagaggggctgggtgctgcacgagcaccgctgcatcggtcggtgcacggggacgtggggctggattttggggtyggggtcccggggagcgcygtggaatcgttccctctgatccacagatattgatgagtgcggcacggagatggcacactgcagggccaaccagttttgcgtcaacactgagggctcctacgagtgccgaggtgcgagggcagcggggtagcgatgggatggcagtgttgggtggcccccttcagctgtggcagccccccatcttcctttctgtcccctcaatatgccgcagactgctctaccgcctgcatcggctgcatgggcgcagggccggcacgttgcaagaagtgcaacaagggctac

SEQ ID NO: 82468 - DNA, 600 bp, Chicken  19866894377259_4
gagtgcggagatggctactatgaggcatcacgcaaccaaagccagctgctgtgtgccggtaagcaccgtgccgtgctgcgctgagggctctgtgcccacccycttgtgcccaccaccctgtgctcaccgccctgtgtccacccctgcagagtgttaccctgcctgtgggcgctgcacggggccggaggactccagctgcctgcgctgcaagaggggctgggtgctgcacgagcaccgctgcatcggtcggtgcacggggacgtggggctggattttggggtyggggtcccggggagcgcygtggaatcgttccctctgatccacagatattgatgagtgcggcacggagatggcacactgcagggccaaccagttttgcgtcaacactgagggctcctacgagtgccgaggtgcgagggcagcggggtagcgatgggatggcagtgttgggtggcccccttcagctgtggcagccccccatcttcctttctgtcccctcaatatgccgcagactgctctaccgcctgcatcggctgcatgggcgcagggccggcacgttgcaagaagtgcaacaagggctaccggcgggacggggccaag

SEQ ID NO: 82469 - DNA, 600 bp, Chicken  19866894377260_1
tctcagatctcagacacttgcaccacttccacaggggtcagcatttcatattacactaagtcttggggcatcgtcatgtctgggctccaaaattggagtgcccgccacataccgatccaggaggtacttgagatactccgagcagtcctgctgagcaccgggggtaaaccagggtggccaggaggcagagaagaagctctcaggtgagatggcaggtcgctggcaccgggagggaaaaacacatttaagccactggctctcaattcatacagaagacttgcttggtttgctgcaaccagyactggaaaggtaaatttcagccctgctgagcatccctttgctggactgtcatgaagataagagcttctatgtgctcacttttactggtttgtatcacttaggtactcatatgaactatccatgcatttatttcttcattcagtttcaaaatggtttctgttcctgacccagagacttctacttaattcagcctgaacttaatttgatccttaatttgataccaagcccatttatgaaaaaaaaaatccactaaacttccacccatccctctgatcactgtaggcaggcaatctgcattac

SEQ ID NO: 82470 - DNA, 600 bp, Chicken  19866894377270_1
tcagttgtgatttactgccagtgtcacggcagcggtgcaagcctttgtgctgattgtagctgtattggtttgcagttgttcctgtccatgtaagctttctctgctactcacatgggaattaggtcctgtcagttcaactgcatccatgccaggggctgtcctggtttaattataacagctgtatttaaagcactacccaaaaccatttaggtaagcccccatgcgtcaagtgagagcaaagcagggctctcccatagaatgaggatgccctctggtaatctattaatttccaccccacarcagcccatgagtgaggcctgggcagttactattcatcagcacctgacctcgtattttcctacaggagtccttaatgcagcatttttctttcatgtcagtgaattcttccattctatgcccgtctttcagattctttttcccttcctattttcacaccctcaattgcattcactgtaggcttactgtgacctccatagcataggcctaagttcggttctacagctttgtgtagtgattagagactccaagacttaaacacagctcaagaaccaagtttcattgttctgctaagcaggtaag

SEQ ID NO: 82471 - DNA, 600 bp, Chicken  19866894377274_1
tcaattgagaaaaaatgaatttaaaaaagcagcaggaaaatgggaaagagattctgggaaaaaaaaatgtaaatgtttttatttggactctttcaaagtaatttgaggtgatgtttcatttgaaaatatactttagttttatttagagtagaataaacatcctttgcaagggttcagaactaaaacatttcacttcagcctggagaaaagtagactagaaatgaaattctttattttgcagctgtttgccttgctcccacctctcttttttgttacttaaaataaaattagaagccatawaggaaaaattgccattaaatctaggcctttcagaactcttacatttagccataaatctgttgtgcttagcatttttcatgtgtctaactgtactcatttttataacaacactacatatcttagaggaactatctgctaccaaaatgaaacagayacttccaggtaaagggaaaacaaactgttattttggctagtaataaggttatgtagttagcagaaatgtgaataccagtgtaggcttctctgagaaggggctattgcctgtgtacagatcttgcactttttacaaagatccacaat

SEQ ID NO: 82472 - DNA, 600 bp, Chicken  19866894377274_2
aaacatcctttgcaagggttcagaactaaaacatttcacttcagcctggagaaaagtagactagaaatgaaattctttattttgcagctgtttgccttgctcccacctctcttttttgttacttaaaataaaattagaagccatawaggaaaaattgccattaaatctaggcctttcagaactcttacatttagccataaatctgttgtgcttagcatttttcatgtgtctaactgtactcatttttataacaacactacatatcttagaggaactatctgctaccaaaatgaaacagayacttccaggtaaagggaaaacaaactgttattttggctagtaataaggttatgtagttagcagaaatgtgaataccagtgtaggcttctctgagaaggggctattgcctgtgtacagatcttgcactttttacaaagatccacaatacaataattttcaatagcttttctcatttctttccttttccttgcccaacttccaaacaggaggtcaggtcaaacttctggctggtataatagctaattacaccccctgtttggcttaggatgcaaggtagggcataaattaggacctgatagc

SEQ ID NO: 82473 - DNA, 600 bp, Chicken  19866894377279_1
caaggctttatgataggattttaaacctttattcataaaaacaaggagtggggggatgttgtgacttgtttccatatttgcaaaggtcttggttgagtgagggtgagatgaggctgctgggactaagggtgaggaggctgaacgagcagtgcatcatggcaggccactgcaatgcctcctatgagattcaggaactcctggaagtccagctgcccatcgctgttgatatcaagccgcttcatcatcctgtccacaacagcggggtccttctgattctgcaagagaccaaaggatgggatygatccctgcctgaagggaaaggcaccccccaggtatggacctgcagctggctgcattcagcccccagcacagcttkggyaaaaggaggagcatctatttggggcagcgctcatcagattgtgctctgctcttggaagtcaggagcttttcccctgtgctctgtggcacagccagaggttttcactgccctgggagcctcctggcctggctttcactcacctttgtgaaggaagccagctcggtgttcatgaaagtccggaattctttcttggagagcttgaggttgtctccttcacgccc

SEQ ID NO: 82474 - DNA, 600 bp, Chicken  19866894377279_2
tttgcaaaggtcttggttgagtgagggtgagatgaggctgctgggactaagggtgaggaggctgaacgagcagtgcatcatggcaggccactgcaatgcctcctatgagattcaggaactcctggaagtccagctgcccatcgctgttgatatcaagccgcttcatcatcctgtccacaacagcggggtccttctgattctgcaagagaccaaaggatgggatygatccctgcctgaagggaaaggcaccccccaggtatggacctgcagctggctgcattcagcccccagcacagcttkggyaaaaggaggagcatctatttggggcagcgctcatcagattgtgctctgctcttggaagtcaggagcttttcccctgtgctctgtggcacagccagaggttttcactgccctgggagcctcctggcctggctttcactcacctttgtgaaggaagccagctcggtgttcatgaaagtccggaattctttcttggagagcttgaggttgtctccttcacgccctgcgtacctctggaagacggccagcagcgactcaatgcagcgctcggtctcagtgggggaaaccttggactatgga

SEQ ID NO: 82475 - DNA, 600 bp, Chicken  19866894377279_3
gcaaaggtcttggttgagtgagggtgagatgaggctgctgggactaagggtgaggaggctgaacgagcagtgcatcatggcaggccactgcaatgcctcctatgagattcaggaactcctggaagtccagctgcccatcgctgttgatatcaagccgcttcatcatcctgtccacaacagcggggtccttctgattctgcaagagaccaaaggatgggatygatccctgcctgaagggaaaggcaccccccaggtatggacctgcagctggctgcattcagcccccagcacagcttkggyaaaaggaggagcatctatttggggcagcgctcatcagattgtgctctgctcttggaagtcaggagcttttcccctgtgctctgtggcacagccagaggttttcactgccctgggagcctcctggcctggctttcactcacctttgtgaaggaagccagctcggtgttcatgaaagtccggaattctttcttggagagcttgaggttgtctccttcacgccctgcgtacctctggaagacggccagcagcgactcaatgcagcgctcggtctcagtgggggaaaccttggactatggagca

SEQ ID NO: 82476 - DNA, 524 bp, Chicken  19866894377279_4
tggaagtcaggagcttttcccctgtgctctgtggcacagccagaggttttcactgccctgggagcctcctggcctggctttcactcacctttgtgaaggaagccagctcggtgttcatgaaagtccggaattctttcttggagagcttgaggttgtctccttcacgccctgcgtacctctggaagacggccagcagcgactcaatgcagcgctcggtctcagtgggggaaaccttggactatggagcagaaaaggaactcagggtatgcttgcagattgctctgcctttgcagaagggtmctggatcctagacgaaggctcagggccacctgtcgctcattgcttcctgtgcccaacctgtccagctgcatttttctttggtattcatttctttcttgctcagcacagccttgtggtgaggagagatgggagtggtgcagagcagggagtggttgtggctgctctagggacgcagcggctcctaggaactttgggagcaggaaacttccctggggatccatcag

SEQ ID NO: 82477 - DNA, 599 bp, Chicken  19866894377285_1
  misc_feature (1)..(186): n is any nucleotide
nnnnnnnnnnnnnnnnnnnnnnnnnnnnnnnnnnnnnnnnnnnnnnnnnnnnnnnnnnnnnnnnnnnnnnnnnnnnnnnnnnnnnnnnnnnnnnnnnnnnnnnnnnnnnnnnnnnnnnnnnnnnnnnnnnnnnnnnnnnnnnnnnnnnnnnnnnnnnnnnnnnnnnnnnnnnnnnnnnnnnnnnnnatatatagtccagatctcacgctacagtaaatcaaggaggttttattgacaacagaggagttctgctgatttactgatttgcgtgagctgaatgtttgctccaatactggtgcrggattatttctacttgagagataccttgcagaagaaaacttttcattgagtatgtcgatggctctcagctctacaaaattaacaggttaggactccagcagggacgctgcccagcaagcagccgccagcctacaccaggccttcagctcagctgccaggccacagcgggcagcggcagtgtgctcggcgctgagcaggcctgggctggctgcatccacgccctctyaatggcaaggmaaagggtgcaccatctctgtttgagatgccacaaaactgcygtcctgggttaccttctggca

SEQ ID NO: 82478 - DNA, 600 bp, Chicken  19866894377285_2
ttttattgacaacagaggagttctgctgatttactgatttgcgtgagctgaatgtttgctccaatactggtgcrggattatttctacttgagagataccttgcagaagaaaacttttcattgagtatgtcgatggctctcagctctacaaaattaacaggttaggactccagcagggacgctgcccagcaagcagccgccagcctacaccaggccttcagctcagctgccaggccacagcgggcagcggcagtgtgctcggcgctgagcaggcctgggctggctgcatccacgccctctyaatggcaaggmaaagggtgcaccatctctgtttgagatgccacaaaactgcygtcctgggttaccttctggcaagatctggtattgctcattcgcactctgttgcccaggagtgtttgtccctggctctgctcctcatttaggatcgccttacagagttcaactgtacgcatttctcacggagctagggatgtttgaacaaaaagatgggttaagcccttttcaagagggaatgttccctacacatacatgaacccagtttccttgcatgaccaacgtctgctgcccaggtgggtggtcc

SEQ ID NO: 82479 - DNA, 600 bp, Chicken  19866894377285_3
acagaggagttctgctgatttactgatttgcgtgagctgaatgtttgctccaatactggtgcrggattatttctacttgagagataccttgcagaagaaaacttttcattgagtatgtcgatggctctcagctctacaaaattaacaggttaggactccagcagggacgctgcccagcaagcagccgccagcctacaccaggccttcagctcagctgccaggccacagcgggcagcggcagtgtgctcggcgctgagcaggcctgggctggctgcatccacgccctctyaatggcaaggmaaagggtgcaccatctctgtttgagatgccacaaaactgcygtcctgggttaccttctggcaagatctggtattgctcattcgcactctgttgcccaggagtgtttgtccctggctctgctcctcatttaggatcgccttacagagttcaactgtacgcatttctcacggagctagggatgtttgaacaaaaagatgggttaagcccttttcaagagggaatgttccctacacatacatgaacccagtttccttgcatgaccaacgtctgctgcccaggtgggtggtcctggccagggag

SEQ ID NO: 82480 - DNA, 600 bp, Chicken  19866894377285_4
tgtttgctccaatactggtgcrggattatttctacttgagagataccttgcagaagaaaacttttcattgagtatgtcgatggctctcagctctacaaaattaacaggttaggactccagcagggacgctgcccagcaagcagccgccagcctacaccaggccttcagctcagctgccaggccacagcgggcagcggcagtgtgctcggcgctgagcaggcctgggctggctgcatccacgccctctyaatggcaaggmaaagggtgcaccatctctgtttgagatgccacaaaactgcygtcctgggttaccttctggcaagatctggtattgctcattcgcactctgttgcccaggagtgtttgtccctggctctgctcctcatttaggatcgccttacagagttcaactgtacgcatttctcacggagctagggatgtttgaacaaaaagatgggttaagcccttttcaagagggaatgttccctacacatacatgaacccagtttccttgcatgaccaacgtctgctgcccaggtgggtggtcctggccagggagcgagccagctctgttccaccatcccagcagcacaagtctct

SEQ ID NO: 82481 - DNA, 600 bp, Chicken  19866894377286_1
caaggtctctgcattcacaatcatttcttcctcagaagacatgcacactaccccccgccagctcagctttcaatgacagaaacacttaaaatactcttctaccaatctacccagcctgcagagactgttgcaggctgcttccaatacctgtccctcagaggagtcttttcatccctttgaaagctgcgctcttcttttttagctctgtagagaaatctgactaaatagaaatcttgaggccattatactgcagttctcccatcttccagccagcattcattattaatggcttatcattamattttaataaattgaatatcagaagtttaaggcttgtttggcacctttccttcccttcttcttccaggtgcatttgcggatgagttcattcaaygtcacgtaggggaagctgtctattgatgacaggcatacatcacacagaaagctgtaacgtttttgcttgcagactctgcttacagaacaaaaggtgttgctttgggttgctttcctttttcttttaataacaaaatacaaagaaaaaccccaaacagcagataatttttggtctcaacttgctcttcactctaccttattagagca

SEQ ID NO: 82482 - DNA, 600 bp, Chicken  19866894377286_2
tcttctaccaatctacccagcctgcagagactgttgcaggctgcttccaatacctgtccctcagaggagtcttttcatccctttgaaagctgcgctcttcttttttagctctgtagagaaatctgactaaatagaaatcttgaggccattatactgcagttctcccatcttccagccagcattcattattaatggcttatcattamattttaataaattgaatatcagaagtttaaggcttgtttggcacctttccttcccttcttcttccaggtgcatttgcggatgagttcattcaaygtcacgtaggggaagctgtctattgatgacaggcatacatcacacagaaagctgtaacgtttttgcttgcagactctgcttacagaacaaaaggtgttgctttgggttgctttcctttttcttttaataacaaaatacaaagaaaaaccccaaacagcagataatttttggtctcaacttgctcttcactctaccttattagagcaggagctgtcctaattaatcctagcttccttccatcatgggctggcttcacgggaaacagaaagactgaagcagcctgactatgtaagattgctg

SEQ ID NO: 82483 - DNA, 600 bp, Chicken  19866894377292_1
taacattcagtgaagctgtgctgtggggcatgaggggcatggacagagctactggaaaagctgtaggtgagctgccaggaacaatagggacgcctggtttgaaggcatggccaaggggcttcatgtagctcccgactatgtattgtccaattccagcctttgtttttgtctccttgcttccataaacatcgtgaagttcaaagcagaaaaccaacagaaattcttacagtgcagcccccatcccctctgggtactgaatattttctgagttcagcagagcagcttagaccagctgctttyttgaataagtcaaggaagatggcaggagccgggaggcagggagcacaagcaccagctctgactgagctcggcatgttctacacatgaccagtttaaacgcctgcctaactcttcacaaacactaaatcactgcctctctcttcacaggaaatgttatctttccatcctgctttacaagtgctgtagaccaagacaagccagagttaccggacaattggcacccttgggtgcagaaccctacccccagccaaaagctaattgcttgcagcaagacaaactctcttctttatcatctgtgga

SEQ ID NO: 82484 - DNA, 599 bp, Chicken  19866894377302_1
  misc_feature (1)..(83): n is any nucleotide
nnnnnnnnnnnnnnnnnnnnnnnnnnnnnnnnnnnnnnnnnnnnnnnnnnnnnnnnnnnnnnnnnnnnnnnnnnnnnnnnnnnggaactcccaaagagagtgcagcggagggccacaaggatgaggaggggtgtggagcatgttccttatgaggaaaggctgagagagctgggactgttcagcctggagaacagaaggctgagagcggatcttatcaatgcttataaatatttgatgggaaggtatcaagtggatgggaccaggctcttttcaatggtgtccagtgacagaataaagtgyaacaggcacaaactggaacactggaagttccatcaaacatgagaaagaactgttactttgaggttgacagagcagtcgaacaggctgcccamagatgctgtggagtctctggcactggagatattttaaacccactcagacactttcctgtgcagcccactgtagggaacttgttttctaaggcagtttggactagatgatctccagagttcccttccaaccccttccgttctgtgattctgtgccacattcacacatctcctaaacacctccaggggtggggactgcaccactttcct

SEQ ID NO: 82485 - DNA, 600 bp, Chicken  19866894377302_2
aaagagagtgcagcggagggccacaaggatgaggaggggtgtggagcatgttccttatgaggaaaggctgagagagctgggactgttcagcctggagaacagaaggctgagagcggatcttatcaatgcttataaatatttgatgggaaggtatcaagtggatgggaccaggctcttttcaatggtgtccagtgacagaataaagtgyaacaggcacaaactggaacactggaagttccatcaaacatgagaaagaactgttactttgaggttgacagagcagtcgaacaggctgcccamagatgctgtggagtctctggcactggagatattttaaacccactcagacactttcctgtgcagcccactgtagggaacttgttttctaaggcagtttggactagatgatctccagagttcccttccaaccccttccgttctgtgattctgtgccacattcacacatctcctaaacacctccaggggtggggactgcaccactttcctgggcagcccactccagtgcctgaccaccatctatgagcagaaattcttcctgataaacaacctaaacaaaccctaaaggataggaagttgcac

SEQ ID NO: 82486 - DNA, 600 bp, Chicken  19866894377304_1
ctgtgaccagttctggactccccagtaggagagacatggaactgctagagatagtccagcaaagatgaccaagtgatcggagaatctctcatatgaataaggctgagtgggatgggattgttcagcctggagaagagaagggagggtgcaaagaaagaagttacgctctttccagtggtgctggaacataaaagactccatgtggacgtcaggaagcactcatttactgtaagggtgactgaacactggcacaagtgtgccaaagagtttgtggagtggtgatgtggaaatatttaaaawatgactggacatggtcctgagcaactaactgactctagattttcttgcttgagcaggggacctgggccaaattatakccacagtttccttccaacctcaactatcctgtatctatctctgtctttcctatatgcgagttttgtgcagcatttttatgtttgatgctacatttagcatgactcactgatagtgttctcagaggactgctccaatagacagtagcaaattccaaattctaatcctatatagtcatgaaatactagacttgaaagcaacgaacaaattttggtacaggaaaac

SEQ ID NO: 82487 - DNA, 600 bp, Chicken  19866894377304_2
cggagaatctctcatatgaataaggctgagtgggatgggattgttcagcctggagaagagaagggagggtgcaaagaaagaagttacgctctttccagtggtgctggaacataaaagactccatgtggacgtcaggaagcactcatttactgtaagggtgactgaacactggcacaagtgtgccaaagagtttgtggagtggtgatgtggaaatatttaaaawatgactggacatggtcctgagcaactaactgactctagattttcttgcttgagcaggggacctgggccaaattatakccacagtttccttccaacctcaactatcctgtatctatctctgtctttcctatatgcgagttttgtgcagcatttttatgtttgatgctacatttagcatgactcactgatagtgttctcagaggactgctccaatagacagtagcaaattccaaattctaatcctatatagtcatgaaatactagacttgaaagcaacgaacaaattttggtacaggaaaacttttattagtgcagaactaaagctttctagttttaggtctcaggaggatgaaaaatcttttctgaaggatgatacag

SEQ ID NO: 82488 - DNA, 600 bp, Chicken  19866894377310_1
cagcactgaagtcttccccacgcctcctgtattcttccaaggttggtgaccacgtggagattttggtaatgactcttcagagcatttagaagctgatagggatcagagtctttcatcatgtctctgtgattcatcaggatttgttcattactctttttcttctgatctgtgtttcttgcaaaactacacacagatgtgctggtcttcatgatctgggaatttggatgccattagcacagatccttttattgctgcttgcttagtcaacacccagacattgccattcattctccattcgcwccagcttcagcctttcatttatgcccagaggcagagaaaacactcttaaattgtgataattaaaagcatggtaaccctgagaatcaagacctggctgctgaatggagggggtgacttagaatcatagaatcactgaatcgctaaggttggaaaagacccacaggatcatccagtccaactgtccacccatcaccaatggttcttgctaaaccatgtccctcaacacaacatccaaacgctctttgaacaccaccaggctcagtgactccaccacctctctgggcagcccatttcagtgcc

SEQ ID NO: 82489 - DNA, 599 bp, Chicken  19866894377312_1
  misc_feature (1)..(15): n is any nucleotide
nnnnnnnnnnnnnnncatcctgtcagcacatgacatgaggatgctacacaatattttttccaagccacagacacagatttcaagcccaattgctacaaaggctgctgccagagctcactcacacctctgtgattaggcacagtctgtccactccttctgctttgaggagatgctcagttggcctctgccaattcctactgcacccaatatgtgcgcttctgacttcatttccttaaaagcacagcatcctctctcagccatattgtgtcagcagcaggaggaaatctgctgtgcttccarcaaagcaagcagacagcagtctggataattttgacaccatttgttccctcttgcagattttagatccaygagacaaagactatcacagtaagatcttgctcggattgggagcctgagaagagctcacctttgctgattcagagacacagggctaccaaaagcttatgcaacwgatgccatgcaggcatctcagagctgctagacttgagcggtgcaaatgggctcttgctctggtaaaatgactttaacaggattttccagccagcaaatgagctttgacagacacacccaggacattc

SEQ ID NO: 82490 - DNA, 600 bp, Chicken  19866894377312_2
gacacagatttcaagcccaattgctacaaaggctgctgccagagctcactcacacctctgtgattaggcacagtctgtccactccttctgctttgaggagatgctcagttggcctctgccaattcctactgcacccaatatgtgcgcttctgacttcatttccttaaaagcacagcatcctctctcagccatattgtgtcagcagcaggaggaaatctgctgtgcttccarcaaagcaagcagacagcagtctggataattttgacaccatttgttccctcttgcagattttagatccaygagacaaagactatcacagtaagatcttgctcggattgggagcctgagaagagctcacctttgctgattcagagacacagggctaccaaaagcttatgcaacwgatgccatgcaggcatctcagagctgctagacttgagcggtgcaaatgggctcttgctctggtaaaatgactttaacaggattttccagccagcaaatgagctttgacagacacacccaggacattcagccataagcaacaccactgtgtgctgaatgctcttggccagccagactgggaaggggtatttaaacaca

SEQ ID NO: 82491 - DNA, 537 bp, Chicken  19866894377312_3
ctcagttggcctctgccaattcctactgcacccaatatgtgcgcttctgacttcatttccttaaaagcacagcatcctctctcagccatattgtgtcagcagcaggaggaaatctgctgtgcttccarcaaagcaagcagacagcagtctggataattttgacaccatttgttccctcttgcagattttagatccaygagacaaagactatcacagtaagatcttgctcggattgggagcctgagaagagctcacctttgctgattcagagacacagggctaccaaaagcttatgcaacwgatgccatgcaggcatctcagagctgctagacttgagcggtgcaaatgggctcttgctctggtaaaatgactttaacaggattttccagccagcaaatgagctttgacagacacacccaggacattcagccataagcaacaccactgtgtgctgaatgctcttggccagccagactgggaaggggtatttaaacacaagtttcttgcattcatctttacagcctgctcttttcctca

SEQ ID NO: 82492 - DNA, 600 bp, Chicken  19866894377313_1
gatattattttacagatgccaagaaatagagcttcactataaaaaaaatgctaagtaccttaatgttatccatagaagagaagccattagctgcattacttacaagcttagaaagggaacaaatgtggaaggagtgttatctctaatagtgattaagttcacagaataacaggaggattcctcaaccacttcttctattgtccaataattcacagttctaatgtttttctaactgtatggtagaagaattcacctcattaatccagcagggtagtagtgcaataaatgcaatgactggtrttgttctttgccggtgagctcagtttgtttatggcagggtcagaaaagctcaagagctgatgcaaagagtatgcaagcccaccagagcaggacccmcaggatgagtggaaaaggacaaactgctcccttctctttagtccccactcactgcatgatctctgccatgctgcctaaccactcctgcagagcctgaagttgcaaggatggagaaaggatggcttcatctccaaaaagtttaatgtctagagagcactraaaatatttgtgcagtccagcaacaaatccagacaccacgtaggg

SEQ ID NO: 82493 - DNA, 600 bp, Chicken  19866894377313_2
tacttacaagcttagaaagggaacaaatgtggaaggagtgttatctctaatagtgattaagttcacagaataacaggaggattcctcaaccacttcttctattgtccaataattcacagttctaatgtttttctaactgtatggtagaagaattcacctcattaatccagcagggtagtagtgcaataaatgcaatgactggtrttgttctttgccggtgagctcagtttgtttatggcagggtcagaaaagctcaagagctgatgcaaagagtatgcaagcccaccagagcaggacccmcaggatgagtggaaaaggacaaactgctcccttctctttagtccccactcactgcatgatctctgccatgctgcctaaccactcctgcagagcctgaagttgcaaggatggagaaaggatggcttcatctccaaaaagtttaatgtctagagagcactraaaatatttgtgcagtccagcaacaaatccagacaccacgtagggaccacaaaatatctgattagagaagcactgctgaagatcaaaatagccttctaattcctgaaaatagctgtcctcaggatcaaacacaattgtatg

SEQ ID NO: 82494 - DNA, 600 bp, Chicken  19866894377313_3
cattaatccagcagggtagtagtgcaataaatgcaatgactggtrttgttctttgccggtgagctcagtttgtttatggcagggtcagaaaagctcaagagctgatgcaaagagtatgcaagcccaccagagcaggacccmcaggatgagtggaaaaggacaaactgctcccttctctttagtccccactcactgcatgatctctgccatgctgcctaaccactcctgcagagcctgaagttgcaaggatggagaaaggatggcttcatctccaaaaagtttaatgtctagagagcactraaaatatttgtgcagtccagcaacaaatccagacaccacgtagggaccacaaaatatctgattagagaagcactgctgaagatcaaaatagccttctaattcctgaaaatagctgtcctcaggatcaaacacaattgtatgataattcaggtggagataatctagaatctttgctagcttggtagatgaacggacgaatagaatccaaacatattgtaatataagcaacagccgaaactttactggggtgttttccttatatttacgtggtataatgcaagtcaattctttaggaatgag

SEQ ID NO: 82495 - DNA, 600 bp, Chicken  19866894377314_1
atttgaggagcaagaaatcttaatagaaagaccccttaatagaaggagcactcgcagggaggagatgtgtcattattttgaggtgcattgagccacaacacccaggagatctcagttaatctcaaattgtaaaatcatgaaggctggaaaagacctctcagatccccaagtctaaccccagcccatccccaccatgtccactgaccacgtccctcagtgccacatctccactctctggaacccctccagggacagggactccacctcttccttgggcagtcagtttcaacgcattaccaytctttcagaggagatatttttcccaatatccaacctgtaccacctcaacactaagacccagatgagcacctttccaacatttctgcacccagcaggatcacagggtgctgcagcccagcctgacctgcctgcagggctctgcagcccccaggacagctactgaagccccagcaagcagcaatgagcagctccccttgccaaaggcaagcagaagtcagctttcagtgagtgtaatgtgatccagagcccaccttgtctaggcaaggatcagggttgagacacaacctcaaagaaaccagc

SEQ ID NO: 82496 - DNA, 600 bp, Chicken  19866894377320_1
tgcaatgctatacaacccccaataagatgtcacccatgacatcattcccttccagctttgcctcccttcttcagggcttgacagggcttgacagaacatgtcccatgttcccagccagtggccacaatgtgttgagccctcagagaggacagctgtgcccttgggaggagcagggagccaggtgaccgtggaggatggcaggcaatgtcctagctcctcatgggaatcccagacctttccagggagccccatatgcacacagggctggtctgtgtcttgccaataaaaatgagagcaggrcacaactgaggttacatttagtttattctctgtgtgctttatttaacctctgtcaaaagcttgccaaaggatgccacatccctggcttgtcccaaagctcttgcacaggcaggagatcgtttctatgccactggagataatagagcaaggttgatgttcacaggcatctcactgtggctccagttgccttgcagtgcacagggactgcttctcctctgtgagagttgccccctccaccccagttgtacttttgcatataagaaaaaggttttttacaataagagtagtgaagcaccacca

SEQ ID NO: 82497 - DNA, 600 bp, Chicken  19866894377339_1
attagggcactgagtgacattctcacactgcagatttgaagagtaagtgaggggaaggacttgttcattgcatggcacaccattcacctatggagattccagaagtgattagactgctcctggatacactactgcaagctaatctttgtctcaagatttcaccaaaaaccttcagtgagcagacactgtgaaggatgatatattgaaggatcactgaatgctagccttgcctattatgcccgttccctacagatcttatgttgaccacaggagacaatagcacacagtcttaagtactayggccattcccgtttgtttgtttgcttgttttccttacttctccctctagagctaaataactgtatttaaacagacatagtggcttcctgttaacttgaaaacactcatgatgtgaaaaaagacaagcaaagtgaagcaaagaccccattcttcaatatctgagcaccttggtgatggcagtgggagaaaaccattggaattattttcactgccttagcttacctcttccaaaagaacctctccatcatgattctgggctatttcttcaaaaagattgggagagacttcaccgttccatac

SEQ ID NO: 82498 - DNA, 600 bp, Chicken  19866894377352_1
ttaatgattttgtatttttatgattctatgtttagtagcagaaagcattttggagttggagctcaaaacctggctgtagttcagtgtaacatccagagggaggctttagatctggttgacaaagacccttaattctcaggccggtttagcccttagttcaaacacaacatctagatatttcttatctctgtaagtaatacctggaggtgggtacggtcatggctcatttgagagggttcagcagctgtgctttgccagtatgtcatgtggcaggaacataagccagaccaggcagtgctraaggagaaatgtgcatactttacagtgaagaattttggttctttccaaattcttcttcttgaatacttaacatgtgatggaaattgatgctgtaactttggtacgatataatgcaaacccagtgtattctgaagagtagctatgacaactgttaggttgatagtgagcgaaagcaattcttccatcatgctgaatgatactatctaattatttttgtataccatgtctctaacgttactaatttttctacttggatactaatatttttggcttctttgtgtgtctgtctttgtattttgt

SEQ ID NO: 82499 - DNA, 600 bp, Chicken  19866894377352_2
caggtgcagctttcagcagaaagcaatctaaaagcaattacaaatactctgagaaactccatatgaaatgttagaactcactgacaagtacagaagcatcctgggttagaggagaggtgctacccactactgaaaaggtcaagcctggtgcagaaataagagaccacaaacactgccctaacagcgatggcttggtcaagtcctgagatgggaggcggtcttcctgagtcaatgaaatgccaacagagcactgtgcacagtggtaaagaatgaattcatactcagatgggtcgtttctcrttatgatgtctgccaatcctgtgcacatacagggagacrttgatgattccagcaggtcatgctcacacactgaaaagatgaggcaggccagtgatatgatgctgcagccctcattcacgcccactgttatgggctttgggtacaggcacagcccttccytgtcctcagtggtaccagtgctcagtgtgggggctgcctcagtgctcctcagcctgctgggatctgtggttggtggggtgggacaggtcctggctaaagccatccccaaggagcccccactgcccctggggccctacgagg

SEQ ID NO: 82500 - DNA, 600 bp, Chicken  19866894377352_3
acaaatactctgagaaactccatatgaaatgttagaactcactgacaagtacagaagcatcctgggttagaggagaggtgctacccactactgaaaaggtcaagcctggtgcagaaataagagaccacaaacactgccctaacagcgatggcttggtcaagtcctgagatgggaggcggtcttcctgagtcaatgaaatgccaacagagcactgtgcacagtggtaaagaatgaattcatactcagatgggtcgtttctcrttatgatgtctgccaatcctgtgcacatacagggagacrttgatgattccagcaggtcatgctcacacactgaaaagatgaggcaggccagtgatatgatgctgcagccctcattcacgcccactgttatgggctttgggtacaggcacagcccttccytgtcctcagtggtaccagtgctcagtgtgggggctgcctcagtgctcctcagcctgctgggatctgtggttggtggggtgggacaggtcctggctaaagccatccccaaggagcccccactgcccctggggccctacgaggagccaggatctggttacaaggattttgtggtcagatcca

SEQ ID NO: 82501 - DNA, 600 bp, Chicken  19866894377352_4
gagaccacaaacactgccctaacagcgatggcttggtcaagtcctgagatgggaggcggtcttcctgagtcaatgaaatgccaacagagcactgtgcacagtggtaaagaatgaattcatactcagatgggtcgtttctcrttatgatgtctgccaatcctgtgcacatacagggagacrttgatgattccagcaggtcatgctcacacactgaaaagatgaggcaggccagtgatatgatgctgcagccctcattcacgcccactgttatgggctttgggtacaggcacagcccttccytgtcctcagtggtaccagtgctcagtgtgggggctgcctcagtgctcctcagcctgctgggatctgtggttggtggggtgggacaggtcctggctaaagccatccccaaggagcccccactgcccctggggccctacgaggagccaggatctggttacaaggattttgtggtcagatccacttcctgacacgtgcacctgaaatccatcttctttgttctgcgctgtccctgaggaaaattaaagcccaccccggactggcacagaaattaaataagaagagctatttgaaaagattcca

SEQ ID NO: 82502 - DNA, 600 bp, Chicken  19866894377357_1
tcggggtgtgagactgttcctcaggaactgtaaacaggttttgagagtgccttaatttgcttcagcagagctggaaacctgacctgctgcaggttacagatctgcctcctctgctcagaaggaatgaacaaggaaacaacctgttcagaaggtgcatatttggggtgatgtttccaatgagcttatgttgaagccttgactagttctttcctttgctgggtcagtgcaggctggtgacaggacagctgactggatcctatggcttgaaccttcacagagttgtgcctattgctgcttacmcgtaatatactggaggtgctgtcagactattctagtttaattacaggaaacatttggtatgcttaatggaatgtatctgtgtttatacttctccctcartctgcacagtgtcctggttttcatgtatggcagaaagaaacatgacttcctaacttaagctttcacttcccccaaagtttcctgcagatgctctgtccgtgcccagtatctttgggagcagtttccactcatccttcctttccaatggccttttctgtgttggacctcrccctgccttttgtctctcccctytgcttttcc

SEQ ID NO: 82503 - DNA, 600 bp, Chicken  19866894377357_2
atctgcctcctctgctcagaaggaatgaacaaggaaacaacctgttcagaaggtgcatatttggggtgatgtttccaatgagcttatgttgaagccttgactagttctttcctttgctgggtcagtgcaggctggtgacaggacagctgactggatcctatggcttgaaccttcacagagttgtgcctattgctgcttacmcgtaatatactggaggtgctgtcagactattctagtttaattacaggaaacatttggtatgcttaatggaatgtatctgtgtttatacttctccctcartctgcacagtgtcctggttttcatgtatggcagaaagaaacatgacttcctaacttaagctttcacttcccccaaagtttcctgcagatgctctgtccgtgcccagtatctttgggagcagtttccactcatccttcctttccaatggccttttctgtgttggacctcrccctgccttttgtctctcccctytgcttttcccaggtcctgcggtatgtgcagagaggtttattgtttgctttggaagggatcgaaatattttaagacctgcaagtagaaatactgtactgatatttttct

SEQ ID NO: 82504 - DNA, 600 bp, Chicken  19866894377357_3
ccttcacagagttgtgcctattgctgcttacmcgtaatatactggaggtgctgtcagactattctagtttaattacaggaaacatttggtatgcttaatggaatgtatctgtgtttatacttctccctcartctgcacagtgtcctggttttcatgtatggcagaaagaaacatgacttcctaacttaagctttcacttcccccaaagtttcctgcagatgctctgtccgtgcccagtatctttgggagcagtttccactcatccttcctttccaatggccttttctgtgttggacctcrccctgccttttgtctctcccctytgcttttcccaggtcctgcggtatgtgcagagaggtttattgtttgctttggaagggatcgaaatattttaagacctgcaagtagaaatactgtactgatatttttcttgctggtgactggctgttaactggctctttcttgggctagcctttggaaagggggtaataggaaagtcctgagtgacatcagggaaaggaggtgtgatctctatgtatgtgtttgttctgacctcttgaaattcttaattaaggagcaacagaccagaattttttgaaa

SEQ ID NO: 82505 - DNA, 600 bp, Chicken  19866894377357_4
ctgcttacmcgtaatatactggaggtgctgtcagactattctagtttaattacaggaaacatttggtatgcttaatggaatgtatctgtgtttatacttctccctcartctgcacagtgtcctggttttcatgtatggcagaaagaaacatgacttcctaacttaagctttcacttcccccaaagtttcctgcagatgctctgtccgtgcccagtatctttgggagcagtttccactcatccttcctttccaatggccttttctgtgttggacctcrccctgccttttgtctctcccctytgcttttcccaggtcctgcggtatgtgcagagaggtttattgtttgctttggaagggatcgaaatattttaagacctgcaagtagaaatactgtactgatatttttcttgctggtgactggctgttaactggctctttcttgggctagcctttggaaagggggtaataggaaagtcctgagtgacatcagggaaaggaggtgtgatctctatgtatgtgtttgttctgacctcttgaaattcttaattaaggagcaacagaccagaattttttgaaatatctgagaggtctggagagtga

SEQ ID NO: 82506 - DNA, 600 bp, Chicken  19866894377357_5
gtactgatatttttcttgctggtgactggctgttaactggctctttcttgggctagcctttggaaagggggtaataggaaagtcctgagtgacatcagggaaaggaggtgtgatctctatgtatgtgtttgttctgacctcttgaaattcttaattaaggagcaacagaccagaattttttgaaatatctgagaggtctggagagtgattagggagggaaaatgtttcaatatacagaagctgatttatggtcatatcaaacttagaggtattttctcccataaatctaaccagctcatrtctgkgcactcaacaaagcctagatgatgagcagagtgatggggtataatttcaggtatgctataatttagtaattagtgccacagtcttcccagtgcttaatacctcttgcttgaagtagaattcctgtctctcaaacaaactgataattgaaagtaactctaagggtgagaggttggacattgcttacctttccccatggcttggttgctctccaaagatatcatcgctgaatataaaagaaggtcattttccagcccaaatagtagactaggtcttactcacactctttcacttggt

SEQ ID NO: 82507 - DNA, 600 bp, Chicken  19866894377357_6
gatatttttcttgctggtgactggctgttaactggctctttcttgggctagcctttggaaagggggtaataggaaagtcctgagtgacatcagggaaaggaggtgtgatctctatgtatgtgtttgttctgacctcttgaaattcttaattaaggagcaacagaccagaattttttgaaatatctgagaggtctggagagtgattagggagggaaaatgtttcaatatacagaagctgatttatggtcatatcaaacttagaggtattttctcccataaatctaaccagctcatrtctgkgcactcaacaaagcctagatgatgagcagagtgatggggtataatttcaggtatgctataatttagtaattagtgccacagtcttcccagtgcttaatacctcttgcttgaagtagaattcctgtctctcaaacaaactgataattgaaagtaactctaagggtgagaggttggacattgcttacctttccccatggcttggttgctctccaaagatatcatcgctgaatataaaagaaggtcattttccagcccaaatagtagactaggtcttactcacactctttcacttggtacctt

SEQ ID NO: 82508 - DNA, 600 bp, Chicken  19866894377358_1
gctttaactgtgggaagctgtttaggcttcagtggccagcatgagaagattcacattacctcgatttcttggtttgtttgtggagcttgtcagctcacacaagctgacaaggccagggaaaatataccccctttggtaggtggcattagggtctgtttcgtggcacagaaagttaatacatgagccccgtgttcacatatgctaaatacaataagggtaaatgacctcagtgagaggagttcttgactttgtctagtcagtggaggagaagcatcatgccctgtgtttgtttccttcgcygcagacctgagctgtactgttttttatagaggagaaaatgcctggggaaggggtaaccactgcaatgcggcacttggaacaagagtgtgcttggagattatttctctatttgtattacgattgctcagaggtgagaaaggaaatcatagaatcaccaaggttggaaaagacctccaagatcatcagtcatccacctaccaccagtatttcccactaaaccacgcctctagttgatctgaaaggtcccttccaacccaaaccattctatgattctacacacagctcttgaacacagtacac

SEQ ID NO: 82509 - DNA, 600 bp, Chicken  19866894377372_1
cctcagtgccacatctacatggttctggaacacctccaaggacaatgattctaccacctccctgggcagcctattccagtgcatcatcactctaagaagagatttttcctcatttccaaactaaacctttcctggtgcaacttaaggccattactacttgtgctatcactgttagctgggagcagaggccaactcccccctcgccacaatctcccttcaggtcactgtagagagcaatgaggtctcctctgagctcctcttcttcagactgaacaaccccagttccctcaacaactcccyataaaacttgtgcttcagacccctcacagctacactgcccttcactagggcctccaggacctcagtgtcgatctttgctttggagtgggcagaacctgggcatcttctcaccgctttgggaggaccaagccttccatggcctcactggtgctcagctctgagaagttttgcccaaaagcaatatctgcacagtatctggcaagcaatgttcacactgcactgatgctcagacccagctggaattcatagtatcacaccagcacagcactcagccctttgccctcaacatgacttaacgct

SEQ ID NO: 82510 - DNA, 600 bp, Chicken  19866894377378_1
tcttccccttacatgggtccaggaggacacagacccagcatacagcagatcccagccctaactgtttctctgaggaaggagacagggtgaggacacggccttggaaagtagccatgaaagttagctgaggattcccatgttcagtccccatacacaggggttcacttccagaaacaccagcgagctgctcaaccttgttaccaaggtcggttatccctggtgtagtcaacaagcagcttgagtcttaaggagtcttgcttgtttgtatgaaagaggctttgttagttgctgacttgcagyrggccatgtgatatgggcctggagcaaaccagtaaattcagaagccaagctaatgtatgaagagagaattttctcttgagaaggtaagggtggggcagaggacatggtaattacatgctcttcatgagccctgcttttcttcctttgcccaaagcaactttggagaaagcattcctatttgtgtatctcgcatcagctctgccctccccccacacaagaaaaattcccattaagaagcttggttttcctttgaagggaattcaacagcaatggggggggataacataatccatggttaat

SEQ ID NO: 82511 - DNA, 600 bp, Chicken  19866894377378_2
cttccccttacatgggtccaggaggacacagacccagcatacagcagatcccagccctaactgtttctctgaggaaggagacagggtgaggacacggccttggaaagtagccatgaaagttagctgaggattcccatgttcagtccccatacacaggggttcacttccagaaacaccagcgagctgctcaaccttgttaccaaggtcggttatccctggtgtagtcaacaagcagcttgagtcttaaggagtcttgcttgtttgtatgaaagaggctttgttagttgctgacttgcagyrggccatgtgatatgggcctggagcaaaccagtaaattcagaagccaagctaatgtatgaagagagaattttctcttgagaaggtaagggtggggcagaggacatggtaattacatgctcttcatgagccctgcttttcttcctttgcccaaagcaactttggagaaagcattcctatttgtgtatctcgcatcagctctgccctccccccacacaagaaaaattcccattaagaagcttggttttcctttgaagggaattcaacagcaatggggggggataacataatccatggttaatg

SEQ ID NO: 82512 - DNA, 600 bp, Chicken  19866894377381_1
caacataggaaggacaacttgaacatcagcctgagaggtgcctgctgttgattcagccaggataacttaaatgactcttacatgggaaagtcatgccctaagaaaaagaaaaggcactaaatttgtggaacgtgcattgctaatgactaactacttgtacggtgtatgccactgatgcctaaggagtcggacaagtgtcataaagcagctaattcagctgcatgacataaatcctggtaccaagaaatgaaagaaaatctgacttgatcatcacagtgcaggcggctggactacaagacrtctttaaatgttaacagagaaccctggacatggaaatttaaaaacagcgcagaaatccatttttagagttatttttcaaagccagagcacaatcattggatgtttgtatggtgtyktaaataattcacttaccgatctgggctgaaaatcctcttcttgaagtccccatttgtctttgtggtactggtaatagaccatgttctgtttcattacttcatctttctggtcaaatagaaggtaactagcagcacaagaggctgcattcttcatgtcattcactaattaataaacacagaaaca

SEQ ID NO: 82513 - DNA, 600 bp, Chicken  19866894377381_2
actaaatttgtggaacgtgcattgctaatgactaactacttgtacggtgtatgccactgatgcctaaggagtcggacaagtgtcataaagcagctaattcagctgcatgacataaatcctggtaccaagaaatgaaagaaaatctgacttgatcatcacagtgcaggcggctggactacaagacrtctttaaatgttaacagagaaccctggacatggaaatttaaaaacagcgcagaaatccatttttagagttatttttcaaagccagagcacaatcattggatgtttgtatggtgtyktaaataattcacttaccgatctgggctgaaaatcctcttcttgaagtccccatttgtctttgtggtactggtaatagaccatgttctgtttcattacttcatctttctggtcaaatagaaggtaactagcagcacaagaggctgcattcttcatgtcattcactaattaataaacacagaaacaaatccacacaaggtaaataaacaaagcatattgccaccttcccagcatctgcaytgaacatacattaaaaaaaaatgtttccaaggaagaatttgctatttttgtgctctgaaac

SEQ ID NO: 82514 - DNA, 600 bp, Chicken  19866894377381_3
ctaaatttgtggaacgtgcattgctaatgactaactacttgtacggtgtatgccactgatgcctaaggagtcggacaagtgtcataaagcagctaattcagctgcatgacataaatcctggtaccaagaaatgaaagaaaatctgacttgatcatcacagtgcaggcggctggactacaagacrtctttaaatgttaacagagaaccctggacatggaaatttaaaaacagcgcagaaatccatttttagagttatttttcaaagccagagcacaatcattggatgtttgtatggtgtyktaaataattcacttaccgatctgggctgaaaatcctcttcttgaagtccccatttgtctttgtggtactggtaatagaccatgttctgtttcattacttcatctttctggtcaaatagaaggtaactagcagcacaagaggctgcattcttcatgtcattcactaattaataaacacagaaacaaatccacacaaggtaaataaacaaagcatattgccaccttcccagcatctgcaytgaacatacattaaaaaaaaatgtttccaaggaagaatttgctatttttgtgctctgaaaca

SEQ ID NO: 82515 - DNA, 540 bp, Chicken  19866894377381_4
atccatttttagagttatttttcaaagccagagcacaatcattggatgtttgtatggtgtyktaaataattcacttaccgatctgggctgaaaatcctcttcttgaagtccccatttgtctttgtggtactggtaatagaccatgttctgtttcattacttcatctttctggtcaaatagaaggtaactagcagcacaagaggctgcattcttcatgtcattcactaattaataaacacagaaacaaatccacacaaggtaaataaacaaagcatattgccaccttcccagcatctgcaytgaacatacattaaaaaaaaatgtttccaaggaagaatttgctatttttgtgctctgaaacaggtaaggtcatgattcagaaatggagacttacctaacacaagcttatggctacaaaagtcaggtcatgaacaagaacaatacaagttacttggcttccgtaagaactaccttctttgtagggaaaatggggataacttaccatcaacacaaaagatagttttcctatgacattatttt

SEQ ID NO: 82516 - DNA, 600 bp, Chicken  19866894377387_1
gggagcacatgagcccatgctggggcactgtgctgatgccagctccacatgggaagacagctctgactccagcattcagccacgtgggtgctttggggacactgcatgagcacagccagggctcaggaatgtcctgctgtgttctcaagggatgtgctgggagagctgagatgttcctatgggacagcatggaacccatggactgaaataaggcagtgacaattgatgtcccccttcccgctccccccacagactctgttatgtctgacgctaacctgttacagctgatcacagccacaracgctgctgctgctttcataaaaattcgtgggatgccagattatttccacgcgcaatgggagccctggggccgcgtctgcacrggctccttcccaaacatctcccaccacagccactgtgggaacrgcgctgggaatgtcctgaggctggggctgcccaaaataccgaccactggctggggacgatggacagatagacacacgactcctgtaagagattctaagcactggagatcctccatgaacacgtcccagtggaagctgagttcctcagtcccatgggaacatccggagygtgttc

SEQ ID NO: 82517 - DNA, 600 bp, Chicken  19866894377387_2
gtgggtgctttggggacactgcatgagcacagccagggctcaggaatgtcctgctgtgttctcaagggatgtgctgggagagctgagatgttcctatgggacagcatggaacccatggactgaaataaggcagtgacaattgatgtcccccttcccgctccccccacagactctgttatgtctgacgctaacctgttacagctgatcacagccacaracgctgctgctgctttcataaaaattcgtgggatgccagattatttccacgcgcaatgggagccctggggccgcgtctgcacrggctccttcccaaacatctcccaccacagccactgtgggaacrgcgctgggaatgtcctgaggctggggctgcccaaaataccgaccactggctggggacgatggacagatagacacacgactcctgtaagagattctaagcactggagatcctccatgaacacgtcccagtggaagctgagttcctcagtcccatgggaacatccggagygtgttccagccaacagccccgtgcrtatgccccgagcaggatgtgctcccacggagcagcgcagggagggcrcagagagagcagttggc

SEQ ID NO: 82518 - DNA, 600 bp, Chicken  19866894377387_3
gaatgtcctgctgtgttctcaagggatgtgctgggagagctgagatgttcctatgggacagcatggaacccatggactgaaataaggcagtgacaattgatgtcccccttcccgctccccccacagactctgttatgtctgacgctaacctgttacagctgatcacagccacaracgctgctgctgctttcataaaaattcgtgggatgccagattatttccacgcgcaatgggagccctggggccgcgtctgcacrggctccttcccaaacatctcccaccacagccactgtgggaacrgcgctgggaatgtcctgaggctggggctgcccaaaataccgaccactggctggggacgatggacagatagacacacgactcctgtaagagattctaagcactggagatcctccatgaacacgtcccagtggaagctgagttcctcagtcccatgggaacatccggagygtgttccagccaacagccccgtgcrtatgccccgagcaggatgtgctcccacggagcagcgcagggagggcrcagagagagcagttggcaggagcgcagctgcggctcggtgtgagtttctggggggatttt

SEQ ID NO: 82519 - DNA, 571 bp, Chicken  19866894377387_4
ccacaracgctgctgctgctttcataaaaattcgtgggatgccagattatttccacgcgcaatgggagccctggggccgcgtctgcacrggctccttcccaaacatctcccaccacagccactgtgggaacrgcgctgggaatgtcctgaggctggggctgcccaaaataccgaccactggctggggacgatggacagatagacacacgactcctgtaagagattctaagcactggagatcctccatgaacacgtcccagtggaagctgagttcctcagtcccatgggaacatccggagygtgttccagccaacagccccgtgcrtatgccccgagcaggatgtgctcccacggagcagcgcagggagggcrcagagagagcagttggcaggagcgcagctgcggctcggtgtgagtttctggggggatttttatagggggaaggctgatgagtaataaacaaggtgctgcctgattcttgtttggaggaaaaagggggagggagagaggggctgaggaaaagggagaagcacagggaagaggagaaggagagagaaatgaccttggtgag

SEQ ID NO: 82520 - DNA, 546 bp, Chicken  19866894377387_5
aaaaattcgtgggatgccagattatttccacgcgcaatgggagccctggggccgcgtctgcacrggctccttcccaaacatctcccaccacagccactgtgggaacrgcgctgggaatgtcctgaggctggggctgcccaaaataccgaccactggctggggacgatggacagatagacacacgactcctgtaagagattctaagcactggagatcctccatgaacacgtcccagtggaagctgagttcctcagtcccatgggaacatccggagygtgttccagccaacagccccgtgcrtatgccccgagcaggatgtgctcccacggagcagcgcagggagggcrcagagagagcagttggcaggagcgcagctgcggctcggtgtgagtttctggggggatttttatagggggaaggctgatgagtaataaacaaggtgctgcctgattcttgtttggaggaaaaagggggagggagagaggggctgaggaaaagggagaagcacagggaagaggagaaggagagagaaatgaccttggtgag

SEQ ID NO: 82521 - DNA, 499 bp, Chicken  19866894377387_6
ggggccgcgtctgcacrggctccttcccaaacatctcccaccacagccactgtgggaacrgcgctgggaatgtcctgaggctggggctgcccaaaataccgaccactggctggggacgatggacagatagacacacgactcctgtaagagattctaagcactggagatcctccatgaacacgtcccagtggaagctgagttcctcagtcccatgggaacatccggagygtgttccagccaacagccccgtgcrtatgccccgagcaggatgtgctcccacggagcagcgcagggagggcrcagagagagcagttggcaggagcgcagctgcggctcggtgtgagtttctggggggatttttatagggggaaggctgatgagtaataaacaaggtgctgcctgattcttgtttggaggaaaaagggggagggagagaggggctgaggaaaagggagaagcacagggaagaggagaaggagagagaaatgaccttggtgag

SEQ ID NO: 82522 - DNA, 600 bp, Chicken  19866894377415_1
tataaatgttctggaaaaacaggctttaaaaaacaacaataaaataatatttcaaggatcttagatcatttgataaacttttaaaggattagctgcttccataaaacctatccttaaaataaagacactgaacaaaattattaaaatgaaactcgtttttgttagtaatttttgatctgggaaatatctttaatcacttaggattttttttagtgtatcaggcttccctgtggccaagtaaaaagtcattacgtttaaaagaatagggaggaacttttcatacagcaagaagaaaacacrctcactgaaatcctgcttcatttctagaattatttttgaacaataaggttgctgctgcggtgtgaaacaactacactaatatttattgtaataataataattttgttctgttatgcagaaacagtactatgctgaagacaaaaattaaataaaaatctacatcctcattgactcattcatgaggcatactgtttgcaaaattgtataatcttaaacagaatttgcatacacttacagaaaccagtgctaggtggtaacagcttttctaacaaaaactctatttctgaaaataaaaaaaaa

SEQ ID NO: 82523 - DNA, 600 bp, Chicken  19866894377418_1
ggtctcttctcactggtgacaggtgacaggtgacgaggggaaatggtctaagttgtgccaggggagtagtagtatggtaccagtaggtacaacctaatggtatccaacctttaggttggatatcaggaaacacttctttacagaaagggttgttaagcactcgaataggctccccatggaggtggttgagtcaccatccctggatgtgtttaaaaactgtttggatgtggtgctcagggacatgattgagcggagggttgttagagttaaggtagtatggttaggttgtggctggacttkatgatctttagggtcttttccaacctgagcaattctacgattctatgattttgtctttgctagttttcatctcatacttcattttcccaaatccactgcctacagatggctgcactagattaacagcagtcaggaattatttttctttctattcattgagtaaatttcttccttcgaaacataaatgtgagctcctctatggaggaattaactcactaagtgtgctaactaaatcagyacactttaactaactagtccagtaaaccactgaacgcttcctagtactcccatgagccactt

SEQ ID NO: 82524 - DNA, 600 bp, Chicken  19866894377418_2
gacatgattgagcggagggttgttagagttaaggtagtatggttaggttgtggctggacttkatgatctttagggtcttttccaacctgagcaattctacgattctatgattttgtctttgctagttttcatctcatacttcattttcccaaatccactgcctacagatggctgcactagattaacagcagtcaggaattatttttctttctattcattgagtaaatttcttccttcgaaacataaatgtgagctcctctatggaggaattaactcactaagtgtgctaactaaatcagyacactttaactaactagtccagtaaaccactgaacgcttcctagtactcccatgagccacttccagtayacagcagtcacagcatcaataaatacaaatttctcacagtaaatggacagagtaatgaatatgcaataaaygcttttagtctcaatctaaattacatgcaaaatcatgtttgataccgtgttagctgaaagttattttctaacacactttatttttctggtatagatgtagtttgtcatgtcttactgttgaaagaatgctagctttccaaatgtgataagccaagccgga

SEQ ID NO: 82525 - DNA, 600 bp, Chicken  19866894377418_3
ttagggtcttttccaacctgagcaattctacgattctatgattttgtctttgctagttttcatctcatacttcattttcccaaatccactgcctacagatggctgcactagattaacagcagtcaggaattatttttctttctattcattgagtaaatttcttccttcgaaacataaatgtgagctcctctatggaggaattaactcactaagtgtgctaactaaatcagyacactttaactaactagtccagtaaaccactgaacgcttcctagtactcccatgagccacttccagtayacagcagtcacagcatcaataaatacaaatttctcacagtaaatggacagagtaatgaatatgcaataaaygcttttagtctcaatctaaattacatgcaaaatcatgtttgataccgtgttagctgaaagttattttctaacacactttatttttctggtatagatgtagtttgtcatgtcttactgttgaaagaatgctagctttccaaatgtgataagccaagccggaatctcaatcactggctgttcttgttttaatgaaaagagattggtatctaaagaatcctgtggggataat

SEQ ID NO: 82526 - DNA, 600 bp, Chicken  19866894377418_4
tcattttcccaaatccactgcctacagatggctgcactagattaacagcagtcaggaattatttttctttctattcattgagtaaatttcttccttcgaaacataaatgtgagctcctctatggaggaattaactcactaagtgtgctaactaaatcagyacactttaactaactagtccagtaaaccactgaacgcttcctagtactcccatgagccacttccagtayacagcagtcacagcatcaataaatacaaatttctcacagtaaatggacagagtaatgaatatgcaataaaygcttttagtctcaatctaaattacatgcaaaatcatgtttgataccgtgttagctgaaagttattttctaacacactttatttttctggtatagatgtagtttgtcatgtcttactgttgaaagaatgctagctttccaaatgtgataagccaagccggaatctcaatcactggctgttcttgttttaatgaaaagagattggtatctaaagaatcctgtggggataatgcagatatgatgcaaagcagagcacagataacaactctgacatactctgaatatacacaatgcaagcttgc

SEQ ID NO: 82527 - DNA, 600 bp, Chicken  19866894377418_5
atctaaattacatgcaaaatcatgtttgataccgtgttagctgaaagttattttctaacacactttatttttctggtatagatgtagtttgtcatgtcttactgttgaaagaatgctagctttccaaatgtgataagccaagccggaatctcaatcactggctgttcttgttttaatgaaaagagattggtatctaaagaatcctgtggggataatgcagatatgatgcaaagcagagcacagataacaactctgacatactctgaatatacacaatgcaagcttgcaaatccctccccmtatcgccaccacaataacatctcttatgaaattttcaactgtttggggaggtaggctctccacaaatgtaagtctgttcatattcaattccaaagtgaaacatgcacttgtataaattaaaactgtggaacatgccaaaaattttaatggtttggctgctttctgttcaaagaaggcagatatattgtgctgcttatggagtatggaggaaatctctttcatatcttagcacaacaggtcaacagaactttaatttctgtccccgatttatgcgtttcatacacactcctacactgaaac

SEQ ID NO: 82528 - DNA, 599 bp, Chicken  19866894377422_1
  misc_feature (1)..(260): n is any nucleotide
nnnnnnnnnnnnnnnnnnnnnnnnnnnnnnnnnnnnnnnnnnnnnnnnnnnnnnnnnnnnnnnnnnnnnnnnnnnnnnnnnnnnnnnnnnnnnnnnnnnnnnnnnnnnnnnnnnnnnnnnnnnnnnnnnnnnnnnnnnnnnnnnnnnnnnnnnnnnnnnnnnnnnnnnnnnnnnnnnnnnnnnnnnnnnnnnnnnnnnnnnnnnnnnnnnnnnnnnnnnnnnnnnnnnnnnnnnnnnnnnnnnnnnnnnnnnnnnnnnnncctcgcctccacacgcacaggctcaccacaaaaccagaamctcgtaggaaacttgtttatcagccttaaaaataaaataacaagtgacatccaaagagctcctctgcatatttaacaatgagaacataaaaatatatcccagaaggatcacatctgcaatcagaaatcacattctccatagaacacacaaaatcctctaacctgcatgcttctccctgtgcctctgyaactcatcactttccaaaaaagtttgataacactctgctcttttyagaaaggcccaggagacataaggaattgttattaactactactgtgatgayagagcaaccatacttc

SEQ ID NO: 82529 - DNA, 599 bp, Chicken  19866894377422_2
  misc_feature (1)..(73): n is any nucleotide
nnnnnnnnnnnnnnnnnnnnnnnnnnnnnnnnnnnnnnnnnnnnnnnnnnnnnnnnnnnnnnnnnnnnnnnnncctcgcctccacacgcacaggctcaccacaaaaccagaamctcgtaggaaacttgtttatcagccttaaaaataaaataacaagtgacatccaaagagctcctctgcatatttaacaatgagaacataaaaatatatcccagaaggatcacatctgcaatcagaaatcacattctccatagaacacacaaaatcctctaacctgcatgcttctccctgtgcctctgyaactcatcactttccaaaaaagtttgataacactctgctcttttyagaaaggcccaggagacataaggaattgttattaactactactgtgatgayagagcaaccatacttcatccagaaaacagcaaatccccccacagctgtcccaccacctccagaaatgttgctcacamtgtaatgacaaattctgacatcctctgatagaaaaagaaggtcgtgttttcagtcaccatcaagaattaatttcccacccacatctaagctgtgttcagatgtcttacacataaataactacttac

SEQ ID NO: 82530 - DNA, 599 bp, Chicken  19866894377422_3
  misc_feature (1)..(28): n is any nucleotide
nnnnnnnnnnnnnnnnnnnnnnnnnnnncctcgcctccacacgcacaggctcaccacaaaaccagaamctcgtaggaaacttgtttatcagccttaaaaataaaataacaagtgacatccaaagagctcctctgcatatttaacaatgagaacataaaaatatatcccagaaggatcacatctgcaatcagaaatcacattctccatagaacacacaaaatcctctaacctgcatgcttctccctgtgcctctgyaactcatcactttccaaaaaagtttgataacactctgctcttttyagaaaggcccaggagacataaggaattgttattaactactactgtgatgayagagcaaccatacttcatccagaaaacagcaaatccccccacagctgtcccaccacctccagaaatgttgctcacamtgtaatgacaaattctgacatcctctgatagaaaaagaaggtcgtgttttcagtcaccatcaagaattaatttcccacccacatctaagctgtgttcagatgtcttacacataaataactacttacagcaactttgtaggcagcttctatgtaaaaaacaagattctgaat

SEQ ID NO: 82531 - DNA, 600 bp, Chicken  19866894377422_4
caccacaaaaccagaamctcgtaggaaacttgtttatcagccttaaaaataaaataacaagtgacatccaaagagctcctctgcatatttaacaatgagaacataaaaatatatcccagaaggatcacatctgcaatcagaaatcacattctccatagaacacacaaaatcctctaacctgcatgcttctccctgtgcctctgyaactcatcactttccaaaaaagtttgataacactctgctcttttyagaaaggcccaggagacataaggaattgttattaactactactgtgatgayagagcaaccatacttcatccagaaaacagcaaatccccccacagctgtcccaccacctccagaaatgttgctcacamtgtaatgacaaattctgacatcctctgatagaaaaagaaggtcgtgttttcagtcaccatcaagaattaatttcccacccacatctaagctgtgttcagatgtcttacacataaataactacttacagcaactttgtaggcagcttctatgtaaaaaacaagattctgaataaaggtaacttcatcaagggtgaaaataatacgtaaccctaaaaacaagaga

SEQ ID NO: 82532 - DNA, 600 bp, Chicken  19866894377422_5
cctctgcatatttaacaatgagaacataaaaatatatcccagaaggatcacatctgcaatcagaaatcacattctccatagaacacacaaaatcctctaacctgcatgcttctccctgtgcctctgyaactcatcactttccaaaaaagtttgataacactctgctcttttyagaaaggcccaggagacataaggaattgttattaactactactgtgatgayagagcaaccatacttcatccagaaaacagcaaatccccccacagctgtcccaccacctccagaaatgttgctcacamtgtaatgacaaattctgacatcctctgatagaaaaagaaggtcgtgttttcagtcaccatcaagaattaatttcccacccacatctaagctgtgttcagatgtcttacacataaataactacttacagcaactttgtaggcagcttctatgtaaaaaacaagattctgaataaaggtaacttcatcaagggtgaaaataatacgtaaccctaaaaacaagagaagaaagaaattacattatattagagctatttcctcttcaaaaaatttcaagcttttgtatattcgttaccagctacc

SEQ ID NO: 82533 - DNA, 599 bp, Chicken  19866894377438_1
  misc_feature (1)..(239): n is any nucleotide
nnnnnnnnnnnnnnnnnnnnnnnnnnnnnnnnnnnnnnnnnnnnnnnnnnnnnnnnnnnnnnnnnnnnnnnnnnnnnnnnnnnnnnnnnnnnnnnnnnnnnnnnnnnnnnnnnnnnnnnnnnnnnnnnnnnnnnnnnnnnnnnnnnnnnnnnnnnnnnnnnnnnnnnnnnnnnnnnnnnnnnnnnnnnnnnnnnnnnnnnnnnnnnnnnnnnnnnnnnnnnnnnnnnnnnnnnnnnnnnttagcaaacattctctcagggtgctggtgagttgcccgaggcactatgtctactattgccytgcatggtgggaactccaatcaacctgtccatcacaggaaggttacagattacacagtattttataaacagtttacagcagaacaaaatgcaaatgctctactataaacagaagccacacgcatgtccaattgtttgttctgaaatgtagatatttacaacagcacaagaaaaagaagtttaacaatgaacaaaccaaacatggagtgtttgctgcagcttttaaaaatatgtcagtaaagcatgaggtcagtgtttagttctgcttgcaatgactgaatcytcctagcagcaatatct

SEQ ID NO: 82534 - DNA, 600 bp, Chicken  19866894377438_2
ctatgtctactattgccytgcatggtgggaactccaatcaacctgtccatcacaggaaggttacagattacacagtattttataaacagtttacagcagaacaaaatgcaaatgctctactataaacagaagccacacgcatgtccaattgtttgttctgaaatgtagatatttacaacagcacaagaaaaagaagtttaacaatgaacaaaccaaacatggagtgtttgctgcagcttttaaaaatatgtcagtaaagcatgaggtcagtgtttagttctgcttgcaatgactgaatcytcctagcagcaatatctggagatgtttatgggaaaactcgtgtttaataacagatcagctggtaaattactaacttagtacacagcagaagtgggtacttgttttttagaaggctgtgaagtgctgaagcagaaatttcctaagcacacttgaaataaygtgggcataggttatgaccaagtgataccctgatacttctcttagcttttccataggaattcagagtaatacccatacccacacttttcatggcctgggatccatcacaactgccaggttgctctctctgctatttgcgcc

SEQ ID NO: 82535 - DNA, 450 bp, Chicken  19866894377438_3
gaaatgtagatatttacaacagcacaagaaaaagaagtttaacaatgaacaaaccaaacatggagtgtttgctgcagcttttaaaaatatgtcagtaaagcatgaggtcagtgtttagttctgcttgcaatgactgaatcytcctagcagcaatatctggagatgtttatgggaaaactcgtgtttaataacagatcagctggtaaattactaacttagtacacagcagaagtgggtacttgttttttagaaggctgtgaagtgctgaagcagaaatttcctaagcacacttgaaataaygtgggcataggttatgaccaagtgataccctgatacttctcttagcttttccataggaattcagagtaatacccatacccacacttttcatggcctgggatccatcacaactgccaggttgctctctctgctatttgcgcccctaacttt

SEQ ID NO: 82536 - DNA, 600 bp, Chicken  19866894377440_1
cacacagctcctacaaaataaagaaagaacatcatcattaataaacatattttcttcatttacagatgatctatatcagcagaaatccaaaagatactgccgtttccatgtatcattattaccgagagaatccaaaccttcccactgtagatacctggactgctttccttgacttgttcttagaaggagatggtaaggataggtgttacgttttcttccttcagcttatgttattattgttaatataatattattattctgaacagaaacagttaagaaatattaattaagtgaaaactycttgctgaactcgtaattcacacatccttagatttattatttttccaagataaattctaatgctaaactaagaacaagtaataggatgctgtcttcagccttacaaggatgtattttgataggtggctgcaggctggtggggtagacaccgtttgaagatgcccagagggcaatatatggcttagtgtcctgcagaagtgcaggtggcacacacggaggttctgtccaggctgctcagagagccacgtttacaagcttagtgccttctctaatcttgaaggtggtcttgggtgatccttc

SEQ ID NO: 82537 - DNA, 600 bp, Chicken  19866894377441_1
tttttccaagagtttgttttctctatggaagaaattcttaattgaattgctaatatggcagttctgttcaatgaatcaagatacatgttgtcttgcactgacttgtaagaaaataaaataccaaagatcagaatgctgtgttctaaaagaatgcgtggggtgctcttcatctggtttttggagcagctttactattctttaggtctcctgtatttgaactcagttgtactcttacaagtaggcaaagacaagtagctagacctctggctagctatactaatgagaagattaaggataacwwgttatttgctctcagatcagagagggacagattttaaatgcatattttgaaagcagcttctctttttttttcctgggtttggggcatctaatgtagtttttctttctgaaaatagttgattgctacatcttttattgcatttgctcttggagatacattgcatttgcatctagaatacttcaaaacattactttgacgccacaaagtgctaagttggttttaaaggtgtttcctgttttaggttacatgaattctgaactctaaagcagtttaatctcagaatgattactgtggaggtt

SEQ ID NO: 82538 - DNA, 600 bp, Chicken  19866894377441_2
ttttccaagagtttgttttctctatggaagaaattcttaattgaattgctaatatggcagttctgttcaatgaatcaagatacatgttgtcttgcactgacttgtaagaaaataaaataccaaagatcagaatgctgtgttctaaaagaatgcgtggggtgctcttcatctggtttttggagcagctttactattctttaggtctcctgtatttgaactcagttgtactcttacaagtaggcaaagacaagtagctagacctctggctagctatactaatgagaagattaaggataacwwgttatttgctctcagatcagagagggacagattttaaatgcatattttgaaagcagcttctctttttttttcctgggtttggggcatctaatgtagtttttctttctgaaaatagttgattgctacatcttttattgcatttgctcttggagatacattgcatttgcatctagaatacttcaaaacattactttgacgccacaaagtgctaagttggttttaaaggtgtttcctgttttaggttacatgaattctgaactctaaagcagtttaatctcagaatgattactgtggaggttt

SEQ ID NO: 82539 - DNA, 579 bp, Chicken  19866894377448_1
aagatgagcagttttagcttctgctcttccattagtgtgcaaactgttaaaagatgaggaaaactgcaataataaacatgagcgagcttgctgcagctgtgcctgtcagctccagacattagtgtggctaattccaattgggaacagttcctgagcttggtgataaattaatcccagctctgatagtatgtaaagatttctccatgcataagctgagaggaaacttctcaaactgtttgcaaatttcccctcacagttattttggtgactacgcaccaaaatatttaggctgcgtatctyttttggacagagcacaacatattttttatgttgattaaatatattggaataagttaggcttcatgcgaaggaaaaaatgacacagaggtttgcatttacattgcagatgtatgaagtacagccgatggggtttatgccctctttcctggagataagctgctatggcttcataggaaaaaagcagcgctgttgaactcctctgagaacagctgacattttactttagattgctggtttggaaaaaaaaaaaaacccacaggctgactgctaaaatcagga

SEQ ID NO: 82540 - DNA, 599 bp, Chicken  19866894377454_1
  misc_feature (1)..(58): n is any nucleotide
nnnnnnnnnnnnnnnnnnnnnnnnnnnnnnnnnnnnnnnnnnnnnnnnnnnnnnnnnngctgagggagctggatctctgtagcttggagaagagacagagatgacctcattaacgtttttaagtatgtaaagagtgtcaggaggatggatccaggctcttgtcagggacatccaacaacagtacaaggggcagtgggtgcaaactggaatgtaggagtttccacgtaaacatgaaaagacttcttcacggtgagggtaacagaacacaggaatgggctgcccagagaggttgtggggttytcttctctggagacattcagaacccacctggaggcattcctgtgtgacctgatctaggtgttcctgctccggcagggggatggatctttcaagrtccattccaatccctgacattttgtgattctgtgatctttcaacctgtccttcagaagcttacttgaagagcagatgtgtttgtcttagcataggtatctgatatttaatgacttacttctgctgttctgtactgatagttgtttaagtagtcccgagcttagtctggtacacttgcaagtaatacaagtaatttccattgctga

SEQ ID NO: 82541 - DNA, 600 bp, Chicken  19866894377454_2
acagagatgacctcattaacgtttttaagtatgtaaagagtgtcaggaggatggatccaggctcttgtcagggacatccaacaacagtacaaggggcagtgggtgcaaactggaatgtaggagtttccacgtaaacatgaaaagacttcttcacggtgagggtaacagaacacaggaatgggctgcccagagaggttgtggggttytcttctctggagacattcagaacccacctggaggcattcctgtgtgacctgatctaggtgttcctgctccggcagggggatggatctttcaagrtccattccaatccctgacattttgtgattctgtgatctttcaacctgtccttcagaagcttacttgaagagcagatgtgtttgtcttagcataggtatctgatatttaatgacttacttctgctgttctgtactgatagttgtttaagtagtcccgagcttagtctggtacacttgcaagtaatacaagtaatttccattgctgagaaatacagtgataaattagtttgttttcagagaccagaaagggagcatttaaataattactgttgcactgtctttttttttttttttttttctt

SEQ ID NO: 82542 - DNA, 599 bp, Chicken  19866894377456_1
  misc_feature (1)..(161): n is any nucleotide
nnnnnnnnnnnnnnnnnnnnnnnnnnnnnnnnnnnnnnnnnnnnnnnnnnnnnnnnnnnnnnnnnnnnnnnnnnnnnnnnnnnnnnnnnnnnnnnnnnnnnnnnnnnnnnnnnnnnnnnnnnnnnnnnnnnnnnnnnnnnnnnnnnnnnnnnnnnnnnnnncaagctcccagagcatccacctctcagcacgtacagagcagtggttccaagcaacagaacatccacctcagagctgagaaaggtggttttctcctggtttttggaaaggaagaagtcgcaagcagggactcccaactcrtcagcttcatccattataaaggcatccaccaaaacctccacagggcactgggagaacagcacaccyccagcttaccaccctcccaccttaccgccagcctctctgcagcagatattcccaccctgcagccaccaacagacaatactggaaagcttgtggcctcttaagtgttgcttaaggcagctagagctggaaaacagcaatgcaggaaagaggagactcctttcagtagttgtacccctgggctattcacagaaacatcctctgaagcctcagtgcatcaaactgcgagtgaacct

SEQ ID NO: 82543 - DNA, 599 bp, Chicken  19866894377456_2
  misc_feature (1)..(95): n is any nucleotide
nnnnnnnnnnnnnnnnnnnnnnnnnnnnnnnnnnnnnnnnnnnnnnnnnnnnnnnnnnnnnnnnnnnnnnnnnnnnnnnnnnnnnnnnnnnnnnncaagctcccagagcatccacctctcagcacgtacagagcagtggttccaagcaacagaacatccacctcagagctgagaaaggtggttttctcctggtttttggaaaggaagaagtcgcaagcagggactcccaactcrtcagcttcatccattataaaggcatccaccaaaacctccacagggcactgggagaacagcacaccyccagcttaccaccctcccaccttaccgccagcctctctgcagcagatattcccaccctgcagccaccaacagacaatactggaaagcttgtggcctcttaagtgttgcttaaggcagctagagctggaaaacagcaatgcaggaaagaggagactcctttcagtagttgtacccctgggctattcacagaaacatcctctgaagcctcagtgcatcaaactgcgagtgaacctgcaggatttacataagccttgaagttttggataagcatcgaggaagaaattcagaaggcagtcctg

SEQ ID NO: 82544 - DNA, 600 bp, Chicken  19866894377458_1
caccagccatttatgttgcttttaaacaagtttgtttgttgatgttatttttatagcttcaaagatgggaagaaagattaactaattaaaaatgaactatttgtcattcagtcatacaaatagcatactcagatttcattttttctccttacctcactaatgttagttattctgtatataaatgcagataataagacttcaagcctcatttaagaaatgcataatgtacacttagcacaaaaagaaaaaatagaaaagaagtaattagaaattcatgagaaataaaaaaattgtctaaaraaagacattactttctccacactcaaaatacttgtgtgttttggctttttaaaatgytttgttcatttttttgttgttgttttcagataggttccctttgtcacagttgagatgcagtaatggctggtttatttccataaaagcaagggaatttacaagtaacatttcctctttgttggcccaattttgcttacactgatcagtaaagggagcaggagcccagcctctccttgtctcagtatgtccgtatcagcagcagcagcacatgggcacagcaggagccctgagccagtgatggat

SEQ ID NO: 82545 - DNA, 600 bp, Chicken  19866894377458_2
ttcaaagatgggaagaaagattaactaattaaaaatgaactatttgtcattcagtcatacaaatagcatactcagatttcattttttctccttacctcactaatgttagttattctgtatataaatgcagataataagacttcaagcctcatttaagaaatgcataatgtacacttagcacaaaaagaaaaaatagaaaagaagtaattagaaattcatgagaaataaaaaaattgtctaaaraaagacattactttctccacactcaaaatacttgtgtgttttggctttttaaaatgytttgttcatttttttgttgttgttttcagataggttccctttgtcacagttgagatgcagtaatggctggtttatttccataaaagcaagggaatttacaagtaacatttcctctttgttggcccaattttgcttacactgatcagtaaagggagcaggagcccagcctctccttgtctcagtatgtccgtatcagcagcagcagcacatgggcacagcaggagccctgagccagtgatggattttgcatcttgccaccacatcttactttgtgtttcaataaccacaacatcttcttag

SEQ ID NO: 82546 - DNA, 600 bp, Chicken  19866894377459_1
agatactgtggcttgtcctgtaatagggctctctatattccagcttgcatatctgagctgctctttttgccctctttgggtttctaatcctgtagaacttgcggaaacagaagctctttactaaatggaaggtatgcatgggttctttcatggaactgttgctttggggacatattgttggtacaaaatctagtttattatatatttttttcaaagtgttcagaaagctaatattccaaatctgtttttgataatgcattttgggagcgagagaggatatcagatgaaagagaagaatcrtaaatagggtgctcagaaaatgttaattagggtaaaaaaattaattaagtgttaagatggcatagtagagttggaatctttcacatttttctgtgtagggaattttgctcattgaagactttcgtaatagtgaaaatctcaaaaggtttttttttaacatttattagaacttgcaatccatggtggccaaatgtctgtcataacctgatcttaatcgaatgagatttggagtgcaatttgttgccttgcctgtttcataaatattagactggaagcattccttttagtattttcctaaat

SEQ ID NO: 82547 - DNA, 599 bp, Chicken  19866894377461_1
  misc_feature (1)..(70): n is any nucleotide
nnnnnnnnnnnnnnnnnnnnnnnnnnnnnnnnnnnnnnnnnnnnnnnnnnnnnnnnnnnnnnnnnnnnnnttacccactaaaccctgtgcctaagtaccacatctctacgtttcttgaacacctccagggacagtgactccaccactcctctgggcagcctgttccagcacagtacttgcagaacactccaatctgaagcttagattgtattaaggatacacttatatatatgtatatatgaataggtaactctgtagctttctttcgtcttctgaaatgcaaagttttgaaaccatagsaaatagtctgaagtctatctggaaagtgattaactctgtctctgggatcaagacgtgttcgttgctagacagaggaggggaagtagatactctccgtttcagtgtgtctatatatatatacaccacatattaccagtagcactcttgtaaacaggaggaattagcagcagcttcagcaaagtatcagctcttctctgtagtctcacagacagatggtgcttcacaatgtgtcttttttaagtgaaagttctgaaggaagcttctctttatccttccagcataggaaacctcttctattt

SEQ ID NO: 82548 - DNA, 600 bp, Chicken  19866894377461_2
taactctgtctctgggatcaagacgtgttcgttgctagacagaggaggggaagtagatactctccgtttcagtgtgtctatatatatatacaccacatattaccagtagcactcttgtaaacaggaggaattagcagcagcttcagcaaagtatcagctcttctctgtagtctcacagacagatggtgcttcacaatgtgtcttttttaagtgaaagttctgaaggaagcttctctttatccttccagcataggaaacctcttctatttcctgtgtcaagactttattagcagcctctcrtaatgcaaaatggcagcccacaaattgcagctagtgggatatccagttagccagatgtattagtgctgttctgaaggtaatgtctcctatttgattatactgacccataatgccagaggcagatattggtggtacagcagtagaggcttcccaccaacattccattgcactttgttgccatgtgacagagggcagcataggggcagtctggcataatgttgcctgacatggaagtgcactataaagcaaaggggtgtcactgaattcctcctcgtggaataaatggcacctgctgacatt

SEQ ID NO: 82549 - DNA, 600 bp, Chicken  19866894377465_1
gaacttctctcccgatagctattttccttgtcttttcatttctttgggatttcaagacagtaatagagaggaagaggaaaccaagatgactcgagagtaccctaggttgagtcaccagcagtgagtttgttagacagccacagcattcgaaatgacccctagagaatgcagagatgaggagggagtttcatttcctgccccaaataccccaaaatgcacactctgatgaattagcatttcccagaccagcagattttcctatgaaatttgtgggctgaagagaaagaagaaccaagctgrtgagctccagagcaacacaaactgtttggtgccagtctgcgacccacggctggtcagtgaaaaataaaaataggtaaatacaaaaaaaaaataacccacttccaccatgcatctcctccactgcggggtgttttaatgccatggactgcttgtccctggagtgctaattagcacaaaatatagagcagacagctgccagcatagtgcccaggatgtgctgctgagctgtagatggattcattacagtgctggcatttaaaacccgaaatgcccttctggccccatgtgccttttggcaaa

SEQ ID NO: 82550 - DNA, 600 bp, Chicken  19866894377481_1
tagttggtgtaatttattacagtcccctagagcaaacaaacaatatcttcacaaagactttttaaaatgtatagcctcctctgcttctcaaatttagccacagagttaaatcagtgatgatttggaatattttaatacccataattgatagaactctataaagaaaatttgaagaataaaacgaccaattttgagaatgacacagaatgctttcagacacctgttttactctccttgtaacaagttcatacttcacactcgcagtagtcagaaagtgatggcagcagaagctacaaaacraaaagaattatattttaccacatgtgatagagtattgaagatgtttgataatagactttgatatacatatctggccatgaattcctgaaatgaaccttttcttagctcccatgttcttttcagaggaaactattggtgatagaaatgacatttgatctaattttagaaggaaaaaaaaaaaactgttaaaaaaacccaaaacatatttaaggaccagaatgtccatgaactggaggagtcctatctgcatgaaatcctttggaccatctcccttatgaggaaaagttcagagacctgaga

SEQ ID NO: 82551 - DNA, 466 bp, Chicken  19866894377482_1
caactccatgcattgctacaggcttggcgcagagtggctggaaagttgcacagagaaaaagggtctggaggttttagctgacagctggctgaatgtgagccagcagtgagcccaggtggccaagaaggccaatggcatcctggcttgtgtcagaaatagcacagccaccaggagtaaggaggtgctgatccccctcatcttggtacggatgaggctgcacctcgagtgctgtgttcagtgttgggcctcttgctacaagaaagatattgagaccatggagtgtgtccagagaaaggcaayggagctgtgaggggtctggagcacaagattatgaggagcagctgagggaactgggatggctcagtctggagaagaggaggctcagggggaaacctcatccctctctacaatcatctgaaaggatgttgtaatgaggtgagggtcacctttttctcccagctgatta

SEQ ID NO: 82552 - DNA, 600 bp, Chicken  19866894377485_1
tttttcttggggaacttaaattttgtcctgtgttgcgtgagaactcaagtaataaattactactccccatgacaagaagaggggaattgaagtctatacagcttgtcatctccatcacttatatttagaaatgaatgcgtctaatgctttgcctgctagaatttgtatcctgtaatatttgctaaacctcagtcttcattgtttttcgtcttaaagatgtgaaaaaaattattataagaaactgctttcaaaacataataatattttcttcacaaatcagtgctttcagttctgaggtgsattttccaccgtattactccacttgcacatctatgagagttaacagagcagagatgacattttttgaagaaacaggtctttctttgctctgctccagccctcttatcacccattcaaagtcacacgaagtaatctggaaagcagtgccatcgagttcagtttcatttatctgagtatcaggcttttaatcacgcattactagtagaccagcttgcaagccagcagtcagatattgtggtggcatcacccacagatgttacacagaaagtgagacacaggggagttgtcaacacactgtga

SEQ ID NO: 82553 - DNA, 556 bp, Chicken  19866894377488_1
gtgttaattttgtctctgcatatccaggcctgtactggctattaggattaggatacagttatgccaaaaaggaaagaatcattttcagcctaaatattcttggttttgacaggttttcattttccaaggtttagattacatgtcgggggaagttctttactacagagagagtgatgaggtgctggaacaggctgcccagagaggttgtgaatgctccatccccggtggtgttcaagaccaggttggatggagccctgggcagcctgatctagaaccagatctggaggttgatggccctcmctgttgcagggggattggaactggatcccttggggtcccttccaacccaagccaatctgtgataccaaaacctggatgcccttcatggaatcagctgccttctgatgagctctgacacatacataattttatacgctcttctgtttttaatatacatatatgtgcatataaaactacttatactcccagacagaaatatatgaagatattttcaatggtttaagcagcactccagttctttttcaggtacatttta

SEQ ID NO: 82554 - DNA, 600 bp, Chicken  19866894377505_1
tgagcacttcccatcatgatgacatttaaactattaattaattaggagagagcaagatgagaagatttggaattctcccctttggataattactgtcgaacacatttgttactgtaatgaacgaacaggatgtgacttcagcgagcgcgttctccctgcatgtgtgtattttcacattattattgtttcagcctgccttaaaaggtgccagagaacattttccccccccctgcaaccacaaatagaggtcacttgtgtttttagcactttggcaaagctgttgttgggaaggaggacgcrgataacaagagtgagcgtgcccaagagctgcactgggagctgagctccgcaggtgggctggctcctcactgggcacatctgagcgaggacctccacttgtgcagtrctgggccccytgtcctctcagtaagcccaccaggctggcagcagccctcctggcaaagcttaccttgggaatgggctgagacagtgctgggtgcaggctgtgccctccgagctgtgcagcaggcgctgcccaaggctgagcagcagcaccaaggtctcctctggctttgyctgggacgggcactgagctgaggc

SEQ ID NO: 82555 - DNA, 600 bp, Chicken  19866894377505_2
tgttactgtaatgaacgaacaggatgtgacttcagcgagcgcgttctccctgcatgtgtgtattttcacattattattgtttcagcctgccttaaaaggtgccagagaacattttccccccccctgcaaccacaaatagaggtcacttgtgtttttagcactttggcaaagctgttgttgggaaggaggacgcrgataacaagagtgagcgtgcccaagagctgcactgggagctgagctccgcaggtgggctggctcctcactgggcacatctgagcgaggacctccacttgtgcagtrctgggccccytgtcctctcagtaagcccaccaggctggcagcagccctcctggcaaagcttaccttgggaatgggctgagacagtgctgggtgcaggctgtgccctccgagctgtgcagcaggcgctgcccaaggctgagcagcagcaccaaggtctcctctggctttgyctgggacgggcactgagctgaggctccaccggtgcctcccacctctrcaggccctccttgcccctctgctcagaaagcgtttggaaggctgccctggatgtccccatgtccacaggttttctttctctga

SEQ ID NO: 82556 - DNA, 600 bp, Chicken  19866894377505_3
atgaacgaacaggatgtgacttcagcgagcgcgttctccctgcatgtgtgtattttcacattattattgtttcagcctgccttaaaaggtgccagagaacattttccccccccctgcaaccacaaatagaggtcacttgtgtttttagcactttggcaaagctgttgttgggaaggaggacgcrgataacaagagtgagcgtgcccaagagctgcactgggagctgagctccgcaggtgggctggctcctcactgggcacatctgagcgaggacctccacttgtgcagtrctgggccccytgtcctctcagtaagcccaccaggctggcagcagccctcctggcaaagcttaccttgggaatgggctgagacagtgctgggtgcaggctgtgccctccgagctgtgcagcaggcgctgcccaaggctgagcagcagcaccaaggtctcctctggctttgyctgggacgggcactgagctgaggctccaccggtgcctcccacctctrcaggccctccttgcccctctgctcagaaagcgtttggaaggctgccctggatgtccccatgtccacaggttttctttctctgaaagcagtcag

SEQ ID NO: 82557 - DNA, 600 bp, Chicken  19866894377505_4
gctgttgttgggaaggaggacgcrgataacaagagtgagcgtgcccaagagctgcactgggagctgagctccgcaggtgggctggctcctcactgggcacatctgagcgaggacctccacttgtgcagtrctgggccccytgtcctctcagtaagcccaccaggctggcagcagccctcctggcaaagcttaccttgggaatgggctgagacagtgctgggtgcaggctgtgccctccgagctgtgcagcaggcgctgcccaaggctgagcagcagcaccaaggtctcctctggctttgyctgggacgggcactgagctgaggctccaccggtgcctcccacctctrcaggccctccttgcccctctgctcagaaagcgtttggaaggctgccctggatgtccccatgtccacaggttttctttctctgaaagcagtcaggactccctagcagcatctcagcatcccgctggctgagatccttgtttactcctccagtgttaatatgccctttcgcagataatcaatcttgcttggcaggatcaattagaatgaagtggggatgctccacgcacctcagtctggaatttaactccagctg

SEQ ID NO: 82558 - DNA, 600 bp, Chicken  19866894377505_5
agagctgcactgggagctgagctccgcaggtgggctggctcctcactgggcacatctgagcgaggacctccacttgtgcagtrctgggccccytgtcctctcagtaagcccaccaggctggcagcagccctcctggcaaagcttaccttgggaatgggctgagacagtgctgggtgcaggctgtgccctccgagctgtgcagcaggcgctgcccaaggctgagcagcagcaccaaggtctcctctggctttgyctgggacgggcactgagctgaggctccaccggtgcctcccacctctrcaggccctccttgcccctctgctcagaaagcgtttggaaggctgccctggatgtccccatgtccacaggttttctttctctgaaagcagtcaggactccctagcagcatctcagcatcccgctggctgagatccttgtttactcctccagtgttaatatgccctttcgcagataatcaatcttgcttggcaggatcaattagaatgaagtggggatgctccacgcacctcagtctggaatttaactccagctgccctcccacgtcccgcgcagtgaggtgtgagctgggctgcccaaggt

SEQ ID NO: 82559 - DNA, 600 bp, Chicken  19866894377506_1
tctttaattaaaaggaataaaatgaggggcttctgcaaatgcgcggtcctgatcactctgtggtgtggtctcttcagcttcgagatgataattatgtttgctgagggagttacgggatgatggaaactctagcggtagataaagtgtttctatttctggcgctgtagggatagagtatcaattcaccacaacagatggagcaaaagcccttgaagtgctattgttgaaatagctttgggacccgtcacccgccagcagatagcaggcactgaggggtttcaggtttatggcatgagatcstgccaaacgtccatcacggctgtgctgtaagcaaagcctgacagggaaacaaggtaggcaaactgcaggctgtatgggaactaaggttggctggaaagcagctctttacacatctgtagggtaaagctatggacatgatggcatcattcagctcatttgtttcttactgtgccaacaggttggcttggaaatrctggctgttttagtgggtgtcatcagatacaataaaagcacagttaaattcattttggttttgtacctgaggttgggtatggagaggatctctttttttgagtgtgt

SEQ ID NO: 82560 - DNA, 600 bp, Chicken  19866894377506_2
gatggagcaaaagcccttgaagtgctattgttgaaatagctttgggacccgtcacccgccagcagatagcaggcactgaggggtttcaggtttatggcatgagatcstgccaaacgtccatcacggctgtgctgtaagcaaagcctgacagggaaacaaggtaggcaaactgcaggctgtatgggaactaaggttggctggaaagcagctctttacacatctgtagggtaaagctatggacatgatggcatcattcagctcatttgtttcttactgtgccaacaggttggcttggaaatrctggctgttttagtgggtgtcatcagatacaataaaagcacagttaaattcattttggttttgtacctgaggttgggtatggagaggatctctttttttgagtgtgttgagaaatgaaatcccacagttgattcactgaaaagcccgtgarcatggaatgtgaggctgaaggatccggtccaaagcgttcgtgaatcaggggaaaaggaaagccaatgaacatgcctgttacttaccagccaggctttgctgcatccttcattttttgaccttagactcctgctgggaatrcttttttta

SEQ ID NO: 82561 - DNA, 600 bp, Chicken  19866894377506_3
ggaaacaaggtaggcaaactgcaggctgtatgggaactaaggttggctggaaagcagctctttacacatctgtagggtaaagctatggacatgatggcatcattcagctcatttgtttcttactgtgccaacaggttggcttggaaatrctggctgttttagtgggtgtcatcagatacaataaaagcacagttaaattcattttggttttgtacctgaggttgggtatggagaggatctctttttttgagtgtgttgagaaatgaaatcccacagttgattcactgaaaagcccgtgarcatggaatgtgaggctgaaggatccggtccaaagcgttcgtgaatcaggggaaaaggaaagccaatgaacatgcctgttacttaccagccaggctttgctgcatccttcattttttgaccttagactcctgctgggaatrctttttttagtgtctgacctcttgatgagttcattcacgctcaggggtccaacagggaaaaaattaaaagcggtagacccaatgagtgtgcggtgtttatcacaggtcgtttggaaaagatcatttgtatcagaaagaaagcttgaacttgtcccagtgt

SEQ ID NO: 82562 - DNA, 600 bp, Chicken  19866894377506_4
ttggaaatrctggctgttttagtgggtgtcatcagatacaataaaagcacagttaaattcattttggttttgtacctgaggttgggtatggagaggatctctttttttgagtgtgttgagaaatgaaatcccacagttgattcactgaaaagcccgtgarcatggaatgtgaggctgaaggatccggtccaaagcgttcgtgaatcaggggaaaaggaaagccaatgaacatgcctgttacttaccagccaggctttgctgcatccttcattttttgaccttagactcctgctgggaatrctttttttagtgtctgacctcttgatgagttcattcacgctcaggggtccaacagggaaaaaattaaaagcggtagacccaatgagtgtgcggtgtttatcacaggtcgtttggaaaagatcatttgtatcagaaagaaagcttgaacttgtcccagtgtttggtgtctgagaatttatatgggagggaaatatcgttaactgtgacccagcaggacagctgtttattcttattagacaacagagagtctactcatttgacttctcctctcatatacctttctatcactgaccaaagcgt

SEQ ID NO: 82563 - DNA, 600 bp, Chicken  19866894377508_1
tgcaccccttgagatgctcagtctgtgtggcacccaagagaaaaaaagaggttctggaaaagagatatgagaaagggaaacttctcctcgagactgggagatcttttagcaggcctagggctgtcacatggtgctcaaatacatcgagactcagtgcccccctgaccggcccttgctgacttcacagccagccttcaaagtccctcagcactcattctggggctaggaaggaccagcagatatcaaactttattcttagtgtaacgaatgcccatgtgattcatttgtaacacaaatacyggtggctctttccagggaaaccactgacttcacgcattttgtgtactgcatagatacttgatatgaaagcagaattagagaagctttcccaaatctccaggctggatggggttttgtgccgcctgaccttctggaagggctgaagttataatacttaaagtccctcccaacccagaccacgctgtgactcttgtgaagaggctgaacttaacacaaaaccgtgttattgtagcacactaatctggaaaggaatgctgcggaatcctggcgcagactccacagagccgccgaggcgcgcag

SEQ ID NO: 82564 - DNA, 554 bp, Chicken  19866894377508_2
gcagaattagagaagctttcccaaatctccaggctggatggggttttgtgccgcctgaccttctggaagggctgaagttataatacttaaagtccctcccaacccagaccacgctgtgactcttgtgaagaggctgaacttaacacaaaaccgtgttattgtagcacactaatctggaaaggaatgctgcggaatcctggcgcagactccacagagccgccgaggcgcgcagtgaggtgggcgcagagctccgctccttcgctcccgacacccctcgcacatcccccacgccagctcctrctccgcggagccccgcgcggcgcagcggcgccccctggcggcgcaggcgggaagcctgagcacgagtgggggcagcggcccacagaggcccggtggtggcgcccggcggcgcgcccgccgagatgccaggtgcggcgctcgcagtgctcacggcaccgagctcacagcggagctggcagcgagcggcgagcccactgctcagcggccccgcactcccttccctcgtccgcccacctagcccgcagccggccccg

SEQ ID NO: 82565 - DNA, 537 bp, Chicken  19866894377513_1
gggccgaggtgacgctcagccctgtgaaatggctggtgtcggacacacggccccgagaccggctttatcctgcctttatataatggtctttgtgcatgtacgtgggtattttatcttatataaaagggccctggtgcaaaatggtgtgtgtgtgtgtgaggggagcgacacgtagtatttgtagtatgttgtaggtgtgaggtggatattaacgtgagcgcacgctttgctttgaggtggtggtggtggtgtgttaatcccgtgtggaaaacgcaatgggttaagggacacacagccttrggggagctgctttggccggaggggtcgggtctgctggggttggtggtggtagtggtggaggggaagggggtgaacaacacacggccttttaattgtaagcatctataaatgatccaccgagtgatgtaattgtttaaatatcacaatataaatcgcatgtgcgaggtcttcgttctgtaatagtagacccgaagatgagataaaggcaggaactgtagatgggggtatgtgtgtgga

SEQ ID NO: 82566 - DNA, 600 bp, Chicken  19866894377515_1
tagattcaattattcgactttgctctgattctgttacttaattcaagaatgctgctgctgagtctcccatttctgtttctaatttgtgaatatgaacattttgtacttagaactctaccgcaggttttcaaatatgactgttgtctgtaatctcacataatctttctgggttttttttgttgtcgttgttttgtttttcccaaggaattaaaactctcaaagcataattaaatccccacagtagagacaaaaggacatttatcaggacaaaggaatagcaagcttttcccagattgctcrctcttcactaactgkaggatagtgtaagcttcccttgagtagacaagtgagctgctattcttactgaaraataaagggtaagaataaatctgttttcaatactgttcttttcttcaaagtgttctagcaatcacgctaatgttctgatcatgctctgaagccctatccttgctcttcccagcagaaagaaaaggtgatttagttcgtaaagaaagttctcccacttctcctaactaccactcctctaaaacctcctaatgtgtcttttgcctttctttattcctttggtttttaagacta

SEQ ID NO: 82567 - DNA, 600 bp, Chicken  19866894377515_2
gactttgctctgattctgttacttaattcaagaatgctgctgctgagtctcccatttctgtttctaatttgtgaatatgaacattttgtacttagaactctaccgcaggttttcaaatatgactgttgtctgtaatctcacataatctttctgggttttttttgttgtcgttgttttgtttttcccaaggaattaaaactctcaaagcataattaaatccccacagtagagacaaaaggacatttatcaggacaaaggaatagcaagcttttcccagattgctcrctcttcactaactgkaggatagtgtaagcttcccttgagtagacaagtgagctgctattcttactgaaraataaagggtaagaataaatctgttttcaatactgttcttttcttcaaagtgttctagcaatcacgctaatgttctgatcatgctctgaagccctatccttgctcttcccagcagaaagaaaaggtgatttagttcgtaaagaaagttctcccacttctcctaactaccactcctctaaaacctcctaatgtgtcttttgcctttctttattcctttggtttttaagactaatcaaatacaactga

SEQ ID NO: 82568 - DNA, 600 bp, Chicken  19866894377515_3
tttctgtttctaatttgtgaatatgaacattttgtacttagaactctaccgcaggttttcaaatatgactgttgtctgtaatctcacataatctttctgggttttttttgttgtcgttgttttgtttttcccaaggaattaaaactctcaaagcataattaaatccccacagtagagacaaaaggacatttatcaggacaaaggaatagcaagcttttcccagattgctcrctcttcactaactgkaggatagtgtaagcttcccttgagtagacaagtgagctgctattcttactgaaraataaagggtaagaataaatctgttttcaatactgttcttttcttcaaagtgttctagcaatcacgctaatgttctgatcatgctctgaagccctatccttgctcttcccagcagaaagaaaaggtgatttagttcgtaaagaaagttctcccacttctcctaactaccactcctctaaaacctcctaatgtgtcttttgcctttctttattcctttggtttttaagactaatcaaatacaactgaatgatgcagcaaaagccattcatatattcaaagtacgtttagttttgcttcaaa

SEQ ID NO: 82569 - DNA, 600 bp, Chicken  19866894377516_1
gacagtgactccacccacctccctgggcagccattccagtgcctgaccactctctgagagaaaaagtttttccttatgtctaatataaatctcctctggtgcaacttgcagccatttccttgggtcctgtttgttgcctgggaggagaggccaaacccctcctcatcacaaccctcctcttccccttcaggaagctgtggagtacaatgaggtctcccctgagcctcctcttctccagactaaacaatcccagctccctcagctgctcctcataggacttgtgctccagacccctcaccrgttttgttgtgckttrgttttttaaagaacctacaaaatgaatttagtggccaagcatgctaaatggctttatgtattcaattgtctttcttcagaatgcaatcacagcrttacacatggtcaccccttgtgaaagatttgattgtatccggtgatgaaaaaggggtaattgtttgttactggcatagcagaagcgatagccagcaattcttcccggagcctcgaacaatcttttgtctcacttgttctcctcatcatgaaaacctggtggctgttgggtaagtgctacgttttactttc

SEQ ID NO: 82570 - DNA, 600 bp, Chicken  19866894377516_2
cccacctccctgggcagccattccagtgcctgaccactctctgagagaaaaagtttttccttatgtctaatataaatctcctctggtgcaacttgcagccatttccttgggtcctgtttgttgcctgggaggagaggccaaacccctcctcatcacaaccctcctcttccccttcaggaagctgtggagtacaatgaggtctcccctgagcctcctcttctccagactaaacaatcccagctccctcagctgctcctcataggacttgtgctccagacccctcaccrgttttgttgtgckttrgttttttaaagaacctacaaaatgaatttagtggccaagcatgctaaatggctttatgtattcaattgtctttcttcagaatgcaatcacagcrttacacatggtcaccccttgtgaaagatttgattgtatccggtgatgaaaaaggggtaattgtttgttactggcatagcagaagcgatagccagcaattcttcccggagcctcgaacaatcttttgtctcacttgttctcctcatcatgaaaacctggtggctgttgggtaagtgctacgttttactttccgttcttcatctg

SEQ ID NO: 82571 - DNA, 600 bp, Chicken  19866894377516_3
acctccctgggcagccattccagtgcctgaccactctctgagagaaaaagtttttccttatgtctaatataaatctcctctggtgcaacttgcagccatttccttgggtcctgtttgttgcctgggaggagaggccaaacccctcctcatcacaaccctcctcttccccttcaggaagctgtggagtacaatgaggtctcccctgagcctcctcttctccagactaaacaatcccagctccctcagctgctcctcataggacttgtgctccagacccctcaccrgttttgttgtgckttrgttttttaaagaacctacaaaatgaatttagtggccaagcatgctaaatggctttatgtattcaattgtctttcttcagaatgcaatcacagcrttacacatggtcaccccttgtgaaagatttgattgtatccggtgatgaaaaaggggtaattgtttgttactggcatagcagaagcgatagccagcaattcttcccggagcctcgaacaatcttttgtctcacttgttctcctcatcatgaaaacctggtggctgttgggtaagtgctacgttttactttccgttcttcatctgaaa

SEQ ID NO: 82572 - DNA, 600 bp, Chicken  19866894377516_4
gccatttccttgggtcctgtttgttgcctgggaggagaggccaaacccctcctcatcacaaccctcctcttccccttcaggaagctgtggagtacaatgaggtctcccctgagcctcctcttctccagactaaacaatcccagctccctcagctgctcctcataggacttgtgctccagacccctcaccrgttttgttgtgckttrgttttttaaagaacctacaaaatgaatttagtggccaagcatgctaaatggctttatgtattcaattgtctttcttcagaatgcaatcacagcrttacacatggtcaccccttgtgaaagatttgattgtatccggtgatgaaaaaggggtaattgtttgttactggcatagcagaagcgatagccagcaattcttcccggagcctcgaacaatcttttgtctcacttgttctcctcatcatgaaaacctggtggctgttgggtaagtgctacgttttactttccgttcttcatctgaaagtgtcttgtttggatttcttgctgcacagttgtaaggttacttttaagaagttttggtggctattttttcattgtattccaaattgtatacaac

SEQ ID NO: 82573 - DNA, 600 bp, Chicken  19866894377517_1
acaacttcactgaactccagaaggggtagaatttggatgggaataatggaataaaatctttgaaaccttctaaactgatctacattttgtgtgctattgcatgcaaacaaaacctaacattttctattcccaatgtcctctgtaaatctgatgaatgcagatttttttatgtgctgtaggaaaacgtgattaaaattaacattaggtaagggacttaaacatgtcaggaaatcaggagggactggaaggaatttctcttagaagaaaatgctgaagatttttattttagtttgctttatrttagctgatgcgctttccttgtagtttggctgtactgctgtcagagatacattgaactcctcttgctgtatgctgagtatagtttcactatattgtgaagacttccaacagagaaattttcttttccagtcaatccaaagagtttgtagagaattggattcttaagggaagtcagttttctgtgaattgcacagaggaagacatcttaactggatgacagcttaatatttcaaatattttgataaaaacaactctttcttcacataatagccagcttggtacactttcttttgtatatta

SEQ ID NO: 82574 - DNA, 600 bp, Chicken  19866894377518_1
tgctgttgaatgtattatctgttcatttcagtatcttaatttttcttaagctgccattgcagtagctaaaaattatgaccatggataagagtgagggaggagaccttactgccttgcaggatagtctgttcttcagcttctcttcatcttgatcgtagatcctcagtaccatcagtggagaaaaggtgctgctgcctcagtgccagggagctgggagcagcatagtacatggcagagatggggctgcagcgacagggggcatgaaaagcattggcctcgcttgacaggcactgaacctcragccttgtttgcccaaagtataggtgtatgagcactaatgtgacagcagctactgaactgtgagagctggacttagcaaataaataagataggattttgctgatctgtgtgtggtcagtcactccttccagttcctgtttagcaaagacaaagtcaccttggagcaaaactttccattctcacagctccaaccattacactgggcatgggagttggtcaagttaccgagaggtttcctcaacagctctatttgctgcctttttacatgtttcactgctttcccgagccagaaaaacagct

SEQ ID NO: 82575 - DNA, 599 bp, Chicken  19866894377524_1
  misc_feature (1)..(47): n is any nucleotide
nnnnnnnnnnnnnnnnnnnnnnnnnnnnnnnnnnnnnnnnnnnnnnntatttttctgtgctactgtgacctctgtgatacaagaggagctacagacctcagaactggctactgacctgaaggttcaagagcacatcatcagggattcccattgtcatgtaaacctcatgtgtacgtggggaaaaaatgataatgaggtacagcccagtcctatacattctagcatgcttcaaaatatattacttaggtgtaagtaaatataactgaactaaagcacagaagattgccttcatgttgaagrctgaataccagatatttctgttgctcacaaatcaattaaacttaaaatcttctcagcatttctgaaaaaacaaagcaaaaacataaaccccaaacaaacaaacaaaaacaacaaccaaaaaaacaaaacaaaacaaacaaacaaaagacagtgtttatttctcctgatttctgtttttcacttttaatggaaagagaacttgctcatgtcttcatattgatggatctggcatttttctttaataatcaaactgaaatcgaggaaattcagcatacatggcatagtgataagtagaatta

SEQ ID NO: 82576 - DNA, 591 bp, Chicken  19866894377524_2
aaatcttctcagcatttctgaaaaaacaaagcaaaaacataaaccccaaacaaacaaacaaaaacaacaaccaaaaaaacaaaacaaaacaaacaaacaaaagacagtgtttatttctcctgatttctgtttttcacttttaatggaaagagaacttgctcatgtcttcatattgatggatctggcatttttctttaataatcaaactgaaatcgaggaaattcagcatacatggcatagtgataagtagaattaataagcatgattcctcgatttaggaaatacttatttaatattcayggtgacagttattttaaaatattatattatcatccaacttgttgctactttgaatcaacaatattttctaaattttctcaatgcagttttttcttaattttctgtgtgacacttaatcattaaagaaaaaatctttttgcacattccagtatggaccatttggactgtagacacaagattgcgtatcactaacaagacagacagaatttttatctttgcctactgaaacttccaactggcatcaattcatttaactggacagcagaaagatagtcatgttcacatctccat

SEQ ID NO: 82577 - DNA, 600 bp, Chicken  19866894377526_1
gctgatatgttctgcaattgacctgattcactggttagattttacttccagggtttctgaacattctttaggcaaaaggttctgaatggtgttaggcaaatagttctttctcactaggaacattcttattgccctgtcagttatgcattatacaatcaagctgaatgttttacttggtgtcattttggcttggcacagtggattactttcagaatcaggccactgttaatgaaagttaatgaaaagttttgtgtttcagtttctactgcaaggcagaaactccacttcatgtttcctaawgaatggctattagtatggcactcaggattctcttctctctttcttctattgcagtgcatgcaaatctaagtcacctttctgcatattcttctcctttttaatgcattgtgttgctgccatcattttatttttcttctcagattgttcgtgagctctgtatatgcagtttgcactgaaacaaataggtttctgtctaggtgcttcttcattcttcacaattggatcccttctactggctctaaaccggatgtgattatctgtctcttaaacgttgtcacttttcctaaaagtgaaacagtg

SEQ ID NO: 82578 - DNA, 600 bp, Chicken  19866894377542_1
aaaaatctttgagtaagtaataaccagttgcattatgtcaatgtatgtttaatagtgaaataccgtgaggtttctttgctgtgtttttaatgcagtaatgtgtctagaactgagtattcctagagcctgtttcctactgctcctctacacaacgtgatatttccatgcgttctctgtcagagtgggaggaggaagcaacgcggaatagagttctgcagaactagcagccatcatcaggaagttacgagaggcttctgtttggggctttttaaatctcttaaacatactgtgcatgtactrttgatgagttttcctaagcagttcgtttcaagagattctctttgctcaaacacaaatgcattttttgttgcaacaaatgcagttttcattttttttcagtaatttctttgtgtatttcagaaaataacattagaatacttttaaattccaattaaattaaaaaggtgaggatgcttaccaacagcttctttatggaaagccttctgtacatgagaaaatagtttagcttataaaaaatactgtataacctgctaaaacaattaatagtccagatagctatgagaatagaaggaatagcag

SEQ ID NO: 82579 - DNA, 599 bp, Chicken  19866894377546_1
  misc_feature (1)..(8): n is any nucleotide
nnnnnnnnatttctgatagctgtgatgaaaggataggtatacgtcacatttttttttagggtaagtacacatagaatcggatttctgatgagagttcagttgcattttgtgtatagtttttaagttatattacactttcaggaatgggattgtatttatcttcttaattttacgtatgcatttttggtcttaatccctatgaaaggatgcaggtaggaacatcatttcatttagtcacagttctactgaatggacttgaagttctgctccctggacttttatgcaatttcaggagtttgsaaagatttgtctggtcatttaacttcatgagatgggtcacttattttccagttacagtcatttagttcatgttatggcactaaagctgccactatatactgtttttttccatttctttccagtggtatatgataagcatcgtgcacatctataatcgctggagaaacagtgaaataaggtgttatgtgaatggtcagctggtatcctatggtgacatggcgtggcacgttaatacaaatgacgtaagattttgttttttcttttcttacagcactcagcaaatcaaactgttcgatttg

SEQ ID NO: 82580 - DNA, 600 bp, Chicken  19866894377546_2
acagtcatttagttcatgttatggcactaaagctgccactatatactgtttttttccatttctttccagtggtatatgataagcatcgtgcacatctataatcgctggagaaacagtgaaataaggtgttatgtgaatggtcagctggtatcctatggtgacatggcgtggcacgttaatacaaatgacgtaagattttgttttttcttttcttacagcactcagcaaatcaaactgttcgatttgttttaaagtaaatgcaaaaagaaaaagaactgtattttctctagatctttgaawtttttccttttttaaaaaattttatactttaacctaccaagttatgtatttcataaatttaatattgktgcttttccttagggtatcatgctttttttctagctgtattttttcatgactgctttaaggaaatttgtggagattttgttggagagactgctatagagaatatttttaatatatgatattgtatagaggagactgataacaacagattaatatttcttttttttttttttccatgagaagttattcgggagcaacagagttaaaagatatagattaaggaaagcacttaag

SEQ ID NO: 82581 - DNA, 600 bp, Chicken  19866894377546_3
gtggtatatgataagcatcgtgcacatctataatcgctggagaaacagtgaaataaggtgttatgtgaatggtcagctggtatcctatggtgacatggcgtggcacgttaatacaaatgacgtaagattttgttttttcttttcttacagcactcagcaaatcaaactgttcgatttgttttaaagtaaatgcaaaaagaaaaagaactgtattttctctagatctttgaawtttttccttttttaaaaaattttatactttaacctaccaagttatgtatttcataaatttaatattgktgcttttccttagggtatcatgctttttttctagctgtattttttcatgactgctttaaggaaatttgtggagattttgttggagagactgctatagagaatatttttaatatatgatattgtatagaggagactgataacaacagattaatatttcttttttttttttttccatgagaagttattcgggagcaacagagttaaaagatatagattaaggaaagcacttaagaaaaattgattcattcagccaaatggttatgcatgctgccaagcactcatttttgtatcacattaagt

SEQ ID NO: 82582 - DNA, 600 bp, Chicken  19866894377546_4
atatatacaccctaaatgttaactggactgatttcaagttgtcctaacagtgcattataacaggaaatgcatcagatttcgtattttaaaaaatataaattattttactgaaatctatttatgtttcaaaacaaatttttagtccgttttcttatcttctaccttggaagagatgagggtacacacctaatggtgcaggagaaaggtactttttctggcccaaagatttgaatgagggaggcagacaaaacaattagctcttgtgctttaccttcaagttaaacctgtagtagactttcmaagatgtatgattcatcagctcactacgcattgctatttcttatttatcatatgaatcttgtctgttctgagtgcgtttgtaggaarcacgttagtacttagggaaattaactgtttgtcatttgctaaattgtagaggtaaagttgggtttgataaaaaggttttaaatattgtgtgataattaaagtagatgggctctgcttgtcacagcttctggtcatcattctttatgttcttgcaagaaaaggcaagacattgaggtttttttcaaaggatgggttctccttggtagtgtaaac

SEQ ID NO: 82583 - DNA, 571 bp, Chicken  19866894377546_5
aaaaaatataaattattttactgaaatctatttatgtttcaaaacaaatttttagtccgttttcttatcttctaccttggaagagatgagggtacacacctaatggtgcaggagaaaggtactttttctggcccaaagatttgaatgagggaggcagacaaaacaattagctcttgtgctttaccttcaagttaaacctgtagtagactttcmaagatgtatgattcatcagctcactacgcattgctatttcttatttatcatatgaatcttgtctgttctgagtgcgtttgtaggaarcacgttagtacttagggaaattaactgtttgtcatttgctaaattgtagaggtaaagttgggtttgataaaaaggttttaaatattgtgtgataattaaagtagatgggctctgcttgtcacagcttctggtcatcattctttatgttcttgcaagaaaaggcaagacattgaggtttttttcaaaggatgggttctccttggtagtgtaaacatgtttgtttggtgagaatgtgggattcaaaagccagttgacgtgttgggggatctat

SEQ ID NO: 82584 - DNA, 600 bp, Chicken  19866894377547_1
caagagcttgggtttgtctgaatgttagcaggcttccagacttagcccaacgtatcccttatgtgccatcgatgccaaaatagtgtgtgtgaggcgaatgcctgacccacatcgtgcttcaaggctgcctctgagaataggaatgtgagagcttccaaaagtaaaataaaatgtggtcagtttgcttttttccccccaagcacaaatggtatctttcttcctaatcttattattgagaatggcagaacagtttgagctcaaactgagcctggggaatgtgctcaacaacctaaacagccrcagctcagtggaattatggacagctgcaagtgatgagtttataatgggagtactcagtggcagggtttaaagtggttgctttgcaaagagagatcaactgctcagtgctggtggagtgtatataaattcatgggcataaatgcagacttcagatggtygcagcagagctctgrgctgtgtcacttttmagcactgatgtttgcagaggaaaagcattctgccttctgggttaccttctgtagtaggaaacaagcaagaaaaagattaaggaggaaaaaatattcttctttctatttaatt

SEQ ID NO: 82585 - DNA, 600 bp, Chicken  19866894377547_2
aagtaaaataaaatgtggtcagtttgcttttttccccccaagcacaaatggtatctttcttcctaatcttattattgagaatggcagaacagtttgagctcaaactgagcctggggaatgtgctcaacaacctaaacagccrcagctcagtggaattatggacagctgcaagtgatgagtttataatgggagtactcagtggcagggtttaaagtggttgctttgcaaagagagatcaactgctcagtgctggtggagtgtatataaattcatgggcataaatgcagacttcagatggtygcagcagagctctgrgctgtgtcacttttmagcactgatgtttgcagaggaaaagcattctgccttctgggttaccttctgtagtaggaaacaagcaagaaaaagattaaggaggaaaaaatattcttctttctatttaattaaatgaactttgctgttgctactgttttctgttttatcacaaaggcatttggaaactctgcttttaaaggaatcctatagaagggctgccagcagaatttgtaagtgctcacttctgttttgcaaatagctccgatggctcagttctgtagttgagtt

SEQ ID NO: 82586 - DNA, 600 bp, Chicken  19866894377547_3
tggtcagtttgcttttttccccccaagcacaaatggtatctttcttcctaatcttattattgagaatggcagaacagtttgagctcaaactgagcctggggaatgtgctcaacaacctaaacagccrcagctcagtggaattatggacagctgcaagtgatgagtttataatgggagtactcagtggcagggtttaaagtggttgctttgcaaagagagatcaactgctcagtgctggtggagtgtatataaattcatgggcataaatgcagacttcagatggtygcagcagagctctgrgctgtgtcacttttmagcactgatgtttgcagaggaaaagcattctgccttctgggttaccttctgtagtaggaaacaagcaagaaaaagattaaggaggaaaaaatattcttctttctatttaattaaatgaactttgctgttgctactgttttctgttttatcacaaaggcatttggaaactctgcttttaaaggaatcctatagaagggctgccagcagaatttgtaagtgctcacttctgttttgcaaatagctccgatggctcagttctgtagttgagttctcttttggtgttta

SEQ ID NO: 82587 - DNA, 600 bp, Chicken  19866894377547_4
tttccccccaagcacaaatggtatctttcttcctaatcttattattgagaatggcagaacagtttgagctcaaactgagcctggggaatgtgctcaacaacctaaacagccrcagctcagtggaattatggacagctgcaagtgatgagtttataatgggagtactcagtggcagggtttaaagtggttgctttgcaaagagagatcaactgctcagtgctggtggagtgtatataaattcatgggcataaatgcagacttcagatggtygcagcagagctctgrgctgtgtcacttttmagcactgatgtttgcagaggaaaagcattctgccttctgggttaccttctgtagtaggaaacaagcaagaaaaagattaaggaggaaaaaatattcttctttctatttaattaaatgaactttgctgttgctactgttttctgttttatcacaaaggcatttggaaactctgcttttaaaggaatcctatagaagggctgccagcagaatttgtaagtgctcacttctgttttgcaaatagctccgatggctcagttctgtagttgagttctcttttggtgtttatctggagaatgctcc

SEQ ID NO: 82588 - DNA, 600 bp, Chicken  19866894377551_1
attcctccatatggaaaaaatggcacccactgacatccattggtgcttgctgaatgtttgcagagaccaagcactggatatgagcacagtgaggggtggggtgttgcatttcagcagtggcaacagtgggtaacctccactagtgcttcatgagtgcactatgcaggctcttgttcatcactgctgaaaatgccaatggtgtctatgctgaaaaagtattttgtagctgctaatttgctctatgaaatgttattcttgtgctctttatatctttggtagtttccatggaaatcaataggwggcattacttttggagcaactttagatatatgtcactgtggtttaactggattgcagtagttactgaaggagtttaggattctaagtaggtcagtgcccctattaggtaagaatttactatgacttctatgagtattgttgggactgactaatgaagtcaaatccataatattttgaaaactgggtaaatcagcaagtttgagctgtttttgacattgtatttgacaaaataatggagtgttgagaaggtgctgaagctttggagcattcaggcaaacaaaccctgattgcttaactgtt

SEQ ID NO: 82589 - DNA, 600 bp, Chicken  19866894377551_2
ttgcttattttagacttcttaatcaggaatataacctactcccactgtcctcaataaaaataactggatggcgtcacagttggcttcttgaaagctgtttgctgtatgtaatccattgtaatataactcatctgtcacattcttctactaacgtacgtcagcatctgttaactggttctcagtacacgtcactgtaatggacttcaggttcctcagttcatggttcatctttctgcatcatccagacaaggattattttggtctcagtgagcattttgcctaagaagagcaaatctaacrctagtgattaattaaaaaaaaaagtatatgaaaaaaatgtatttcattgatgcaaatgcatttctgctgaattcgtgttggagacatgtttgagtatatcctacaatatttgaactctgtgtatgtaaatgtcattttaccaagttgtttgttatgccaattgtttcgtaatttgattttaaaactacytccagatttcttttttcattcttctgtcattgcagtatttgaagagagtagggaaataagctcacgtagcattttggtcttataaacattcatggttttaatctcaaattt

SEQ ID NO: 82590 - DNA, 600 bp, Chicken  19866894377551_3
cactgtaatggacttcaggttcctcagttcatggttcatctttctgcatcatccagacaaggattattttggtctcagtgagcattttgcctaagaagagcaaatctaacrctagtgattaattaaaaaaaaaagtatatgaaaaaaatgtatttcattgatgcaaatgcatttctgctgaattcgtgttggagacatgtttgagtatatcctacaatatttgaactctgtgtatgtaaatgtcattttaccaagttgtttgttatgccaattgtttcgtaatttgattttaaaactacytccagatttcttttttcattcttctgtcattgcagtatttgaagagagtagggaaataagctcacgtagcattttggtcttataaacattcatggttttaatctcaaatttagcaaatcatgaattattcacatgtacttgtcttccgttcttgcatggctgtattttccaggaaaatggaaaattatattccagacaaatgcagtttgcctataaagttagatgtggcaagcatttgtttttgtacaaatgcatatgagcgggccattgagtatggataagcatcattttcctgctgta

SEQ ID NO: 82591 - DNA, 600 bp, Chicken  19866894377551_4
aatgtaaatacagtgtgtctgtgaggctttgtgaagtaaagctgatttccctagatttcaggcattctatttcagctatgagaaaattgaggtatttatagcagcttagtagagttttagaaccaacacaaaaacctctatgtcacacccttgtttttctccctgcataagattaaatagattgtggtttacaaggaagtttattttcctaataagaaaaagaacaaacaccaaaactcgaacaccaaacaaaaagccaaaggtccccaaacctgattcatcaaactttccgatttgccytatatgtcttactctttggtgagttgtcttcattttctttttccttctggggaggagggcaaatccagtgcctctggtaatctcttctggttttgcttggttgtcattttgcagcagttgctcagctatcttctgtgaacacccacaacaatttacatttttwaaatatgtcagaattcacacagacccacacacagaaacttagggtatggtgtgtcatctaatccttcttctcgcttttgcttcaacttccttgagattgttcctctctcttctcagtgaatactgatggcagggata

SEQ ID NO: 82592 - DNA, 600 bp, Chicken  19866894377551_5
tgcataagattaaatagattgtggtttacaaggaagtttattttcctaataagaaaaagaacaaacaccaaaactcgaacaccaaacaaaaagccaaaggtccccaaacctgattcatcaaactttccgatttgccytatatgtcttactctttggtgagttgtcttcattttctttttccttctggggaggagggcaaatccagtgcctctggtaatctcttctggttttgcttggttgtcattttgcagcagttgctcagctatcttctgtgaacacccacaacaatttacatttttwaaatatgtcagaattcacacagacccacacacagaaacttagggtatggtgtgtcatctaatccttcttctcgcttttgcttcaacttccttgagattgttcctctctcttctcagtgaatactgatggcagggataataagataaaygtgtagattcttggcttgagctagcagttgatcggttgccttcctgggatattggcctgtacataatttgtcaaattttttacaataaaaaagcttgagaaagtttggaacgtttaaaaatttttgtaatgatcaccttcttcctcatagca

SEQ ID NO: 82593 - DNA, 600 bp, Chicken  19866894377551_6
ctctttggtgagttgtcttcattttctttttccttctggggaggagggcaaatccagtgcctctggtaatctcttctggttttgcttggttgtcattttgcagcagttgctcagctatcttctgtgaacacccacaacaatttacatttttwaaatatgtcagaattcacacagacccacacacagaaacttagggtatggtgtgtcatctaatccttcttctcgcttttgcttcaacttccttgagattgttcctctctcttctcagtgaatactgatggcagggataataagataaaygtgtagattcttggcttgagctagcagttgatcggttgccttcctgggatattggcctgtacataatttgtcaaattttttacaataaaaaagcttgagaaagtttggaacgtttaaaaatttttgtaatgatcaccttcttcctcatagcattgtgatgtgctttgtgaagcctacagaatatgtgagaaatgtgttaagaaacatatayaacatataacaaatcatagaataattctagtgaagggcatctgtggttggttgaccttagccaacagccaaataccaacccagcacctt

SEQ ID NO: 82594 - DNA, 512 bp, Chicken  19866894377551_7
aatccttcttctcgcttttgcttcaacttccttgagattgttcctctctcttctcagtgaatactgatggcagggataataagataaaygtgtagattcttggcttgagctagcagttgatcggttgccttcctgggatattggcctgtacataatttgtcaaattttttacaataaaaaagcttgagaaagtttggaacgtttaaaaatttttgtaatgatcaccttcttcctcatagcattgtgatgtgctttgtgaagcctacagaatatgtgagaaatgtgttaagaaacatatayaacatataacaaatcatagaataattctagtgaagggcatctgtggttggttgaccttagccaacagccaaataccaacccagcaccttgctcattcccctctcccatgggatgaagataaaatggaaggtaagaacactcattgcttgattgctgataatgattgtttaatagggaaaacaaaagcctcatgctcaagtaaagcataaaaa

SEQ ID NO: 82595 - DNA, 600 bp, Chicken  19866894377558_1
caaaacgtatcattatgcaaaatccatgtcccatttattgacaaacaataagaatgttaatactgaatgtgaaagagaagcatcaaagaaaaataggaattatttagttttaaaaggataaatagaaagaagtaaaacaaaatcataaatagatgaaaagattcaaatgtttccattactcagttctgttctaaagataaatggaacagataatttgtccattctgagaggaaagtattcatcaaataagagctgaataataatttttctgctagatgaaaatttgcatagcatgtaatyatagattgcagagtaccgcatgattataatctgagaacatcaagaaatattttgttttttagatttatgaaataaatcttagtaatataacagttgattttattttcatttttcagaatgaaagaatgaatatagatgctaaaatataaataatagaaaagtctttctagacacattttaaatacaatgttattatttgtagagctgttcctggaatacagtatgataaagaaaaggcagaagtaaaatagtagatatcatttttgattaatactaaattctgaataagtgcttcaataa

SEQ ID NO: 82596 - DNA, 600 bp, Chicken  19866894377561_1
aaggtaatatcacttgctggtgttacacaaaaaaaaaaaacaccagtttttccccaagatatcttacgtatgcccagaatttagctgacagattactttcagaaggatacaaagaataggatttgtcttatattaatgaagaataaatattattttatcctataagtaaacagctacacatcatttttataccggtgagattaattccatgtaaggtaaaaattcatatctgctgacttgctagttgaggcatagctagcatacttgaaacacgtatagtaaactaagacattatgctayttttaaattatattaagaattattatttttgttgctgtcaaaaaacttaatttaattagtgagaggttggaaaacagcaataacattgcctcttcattcactcactcactcattcattcartcattaggaaatcaacatggagcaaaagcaaatgggcatatagctctggaatgagacagttcaaaatgagacagaaactgacaatcctcttagtttctatgctaaaggaataaccattgcagaaaaaaagaatacctgatttacaaacattcattcaattattttcttatcagctatgg

SEQ ID NO: 82597 - DNA, 600 bp, Chicken  19866894377561_2
tttgtcttatattaatgaagaataaatattattttatcctataagtaaacagctacacatcatttttataccggtgagattaattccatgtaaggtaaaaattcatatctgctgacttgctagttgaggcatagctagcatacttgaaacacgtatagtaaactaagacattatgctayttttaaattatattaagaattattatttttgttgctgtcaaaaaacttaatttaattagtgagaggttggaaaacagcaataacattgcctcttcattcactcactcactcattcattcartcattaggaaatcaacatggagcaaaagcaaatgggcatatagctctggaatgagacagttcaaaatgagacagaaactgacaatcctcttagtttctatgctaaaggaataaccattgcagaaaaaaagaatacctgatttacaaacattcattcaattattttcttatcagctatggtagtcaagagaaatgtcattatataaagctgatgttttttccagtagtaaagggaatgagaatgaagcattttataaacacctccaagggactgataaatgatgactatagttatctgcgt

SEQ ID NO: 82598 - DNA, 600 bp, Chicken  19866894377563_1
gccttacacccataatggcaccttgaaactgttctaagatctggcctgcaaatctttgttaaaattactggttggttgactggtgagagctttgctgagatcagaagacaggtatgtaagtcctgagggcagtgctacatcagaaatgtaacaaaccagcacggactgtgcaagcaaggaaaaaaggcaagcttctgtggctgagatggctctgctttggtgggatgtgctgattgcctgagtcttcattcagacgtccatgtcctgcttatggcacttgccagcagtgacggtggctcrgtggcctctggctgttctccatgatggttgctggagaagggctgctcaatcagaagccccctgcattgctgtctctttgaaatagagatttcctgctctggaccaacatttttaaaagcttttccctttccttttgaaaaccctttctcactttggggttaaatctgtccttgctgtaactcccccagggctaacctggccctgtttttccttatctctcagccagagagccaattaaaagagatcctgacaaatcacggagcagagggagttatttcctcactaaatgctctccctggg

SEQ ID NO: 82599 - DNA, 600 bp, Chicken  19866894377565_1
taaaactgtctaaaactttttaaatggatttatatcttatgaagattactacattttaatatacattttacagactggaaggagcaatccttctcaagcaatccttgaaaccaccgagtagccctgcagagaaggacctggggctcctggtggatgaaaaacttaacatgagccagcagtgtgctcttgcagctcggaaagcaaatggtatcctggactccatcatgagaggggtggccagcagggacagggaggtgattgtccctctctactctgctttcttgaggtcccatctggacwactgcatccgggtctggggccctcagtacaagaaagacatggagatgttggagagggtccagaggtcacaaagatgatcagaaggctgaagcacctcccctacgaagacaggctgagggagctgggcttgttcagcctggagaaaagaaggctgaggggtgacctcattgcagtcttccagtacctaaagtgtacctacaaacaggaggggagtcaactatttgaaatggtagatgatggcagaagaaggggaaatgattttaagttgaaagagggaagatttaggttggatatcaacag

SEQ ID NO: 82600 - DNA, 599 bp, Chicken  19866894377567_1
  misc_feature (1)..(42): n is any nucleotide
nnnnnnnnnnnnnnnnnnnnnnnnnnnnnnnnnnnnnnnnnnacaggctgagagagctgggctgtgcagcctggagaggagaaggctgcgggagacctgagagcggcctgttgtatctaaaggggggctgtaagaaagacagggacagactcttcagcagagtctgttgtgacaggacaaggggaaatggcttcaaactaaacaaagggagatttagattggatatacagaagaaatttttttataatcagggtggtgaagcaccagtaccaggctgcccagagatgcagtggatgcccyatccctggagacactcaaggtcagggtagatcagggtctgaacaacctgatggagctgtgggtgtccctattcactgtaggggagttggactacgtgtcttttaatggtctcttccaactcaaatgattctatgattctacaactttatgattctacgtcctactttggggctgggattatatctaggttttacaatcaaatgaagactgtgggtatcacccattcactattactacatctatttttgagtggcactcatttcagagagcaccctggcaatatttcaagactcctgatc

SEQ ID NO: 82601 - DNA, 599 bp, Chicken  19866894377568_1
  misc_feature (1)..(59): n is any nucleotide
nnnnnnnnnnnnnnnnnnnnnnnnnnnnnnnnnnnnnnnnnnnnnnnnnnnnnnnnnnnactgctcttacagagatctttgcctgattagaaatttttgattttgagcatgtttctcacagagggaaggtctccatttcccagactctctctcttccctccagggtccaggagtcccgagggggagtctttgaagtgaagaccaaagcaaagaaggcattcatcatctccaccttctcagcatcccctgttaccaggacaattcccttgttcaacaggggacccacatcatccctagtcytccttttactgttagcatacttaaacaaacaaacaaacaaacaaaaacaaaacaaagaaaactcttcttattatcctttagctccttcaccagttttagccccacatgagctacagccttccttgccacttccctgcaggccctgacaacactcctatgctcctcccaggaggacaggccctttttccacatttcataaagcttcctttcccctttggtcttatgcatgagctccttgctcatccacatctcttgcctcccttctccgattttctttttttagggatgcaccgatcttg

SEQ ID NO: 82602 - DNA, 600 bp, Chicken  19866894377581_1
acacaaattatccaagcacttagacatctttagatgttacagttcaatagcagtttactgccattttggtaaattgtgctcagcagtgtgccacaattaaatgaaatcttcattctaaatgtctccaagataagggtgtagatttactttcctcaaaacgctctatatctttattaaatgcacatgtcattacaacataaaaaggctggctcctaaagcagactctgaaaggtggctgcatttattttacttgcttcctaagatgactacagaaatgcctacagcaagattcagatcctwgtaaatactctgcaatctgggagctttcttcttttgcaaacctaccccattcactggggcttgggttgtaggcttagttatkagaggaaaaaaacaaccaataaaacctctcagaactctccccaccacactgcccagaaaatacacttgctacaaggcttagccataaaagcagtaagtactccatacgtaagtgtcccggttatttctaatgtgtcaaatataccacaatcatttcaaagagatatggatgcttgaraggaaagagctgatcctacatcttatagtagcgtgaccgtt

SEQ ID NO: 82603 - DNA, 600 bp, Chicken  19866894377581_2
gcagtgtgccacaattaaatgaaatcttcattctaaatgtctccaagataagggtgtagatttactttcctcaaaacgctctatatctttattaaatgcacatgtcattacaacataaaaaggctggctcctaaagcagactctgaaaggtggctgcatttattttacttgcttcctaagatgactacagaaatgcctacagcaagattcagatcctwgtaaatactctgcaatctgggagctttcttcttttgcaaacctaccccattcactggggcttgggttgtaggcttagttatkagaggaaaaaaacaaccaataaaacctctcagaactctccccaccacactgcccagaaaatacacttgctacaaggcttagccataaaagcagtaagtactccatacgtaagtgtcccggttatttctaatgtgtcaaatataccacaatcatttcaaagagatatggatgcttgaraggaaagagctgatcctacatcttatagtagcgtgaccgttttgactgtggtggagaagctgggagaaaaaagatgatacagctgcagtttgttacttttccagtgctgcaagcagggagaca

SEQ ID NO: 82604 - DNA, 596 bp, Chicken  19866894377581_3
aagatgactacagaaatgcctacagcaagattcagatcctwgtaaatactctgcaatctgggagctttcttcttttgcaaacctaccccattcactggggcttgggttgtaggcttagttatkagaggaaaaaaacaaccaataaaacctctcagaactctccccaccacactgcccagaaaatacacttgctacaaggcttagccataaaagcagtaagtactccatacgtaagtgtcccggttatttctaatgtgtcaaatataccacaatcatttcaaagagatatggatgcttgaraggaaagagctgatcctacatcttatagtagcgtgaccgttttgactgtggtggagaagctgggagaaaaaagatgatacagctgcagtttgttacttttccagtgctgcaagcagggagacattatggacgaaatctgcctcagactaagctccaaaatcctgtatttattttttttgtgcatgtctggacagtaattctagtactggtacacacagtgtgcccagagaccaccagctgaagctggatgctttcctctgtgcaaagagaggcagccttccgggagcttggattta

SEQ ID NO: 82605 - DNA, 599 bp, Chicken  19866894377587_1
  misc_feature (1)..(54): n is any nucleotide
nnnnnnnnnnnnnnnnnnnnnnnnnnnnnnnnnnnnnnnnnnnnnnnnnnnnnngcccataggaatctatgctggcccatagcggcccagagtggtctatgctgctccatactgatctatactggcccatactggtccatactggtccatactggcccatagtggcctacgctggcccatgctggtccatactggcttatactggtctatactggtcgatagaagcccatactggcctatactggcccatactggtctatcctggcccataggaatctatgctggcccatagcggcccakagtggtctatgctgctctatactgatctatactggcccatactggtccatactggtccatactggcccatagtggcctacgctggcccatgctggtccatactggcttatactggtctatactggtcgatagaagcccatactggcctatactggcccatactggtctatcctggcccataggaatctatgctggcccatagcggcccatagtggtctatgctgctctatactgatctatactggcccatactggtccatactggcttatactggtctatactggtcgatagaagccca

SEQ ID NO: 82606 - DNA, 600 bp, Chicken  19866894377589_1
caagatctgttattgggaatgagcttctttaatatttgcattaataatacacacacatgaaagtttgtgtttgctaattaaatttggaggtggtgaagttggcaggcaacagtaaaggagagaagaatggggctcacacgggaaaaattgatgttcttaagccctggaattacaaaaatgagacaagatggaaatgaacagaataaaatgttgaatctgggcttcaaggattagaaacaagaatatcttccacaaactacaggactatcacctggaaatgacagagtagaatgggggttygtaactgcttctgaacaaactttaaatacaggtgggaaaaaggcaagcaagatccccttatgatgaaggtaatggctgataatcataaaatcacggtatccttagagttgaaagggtcctttaaaggccatctagcccaactccccagcagtacacagggacaccacagctccatcatgttgcccagggcctgatccagcctggccttgacagtctccagggatggggcagccaccacctctctgggcaacctgttccaggttgtaattatttgtaattcacaaaatgctggaaagactt

SEQ ID NO: 82607 - DNA, 600 bp, Chicken  19866894377599_1
tgaaacaacaaggaaaagggggaaaaatactctgagtcaaaaaaaacaacttactttcaaaacaatatatacattctagatttttattttttgacacagcagaagtggtgataaactttaaaaaagaaaagagataaaccaggcaatactgttttcttgagtgtgataatagctgctgatgcttacagtttttggaaatggacaagatacttgtcaaaaatcatagctgccactcagaaattgagtgccaacttcaccgctactctttagactatagagtgtctcacaacagacattcamaacagacaaggaattgtgcgttttcttttaccctgttgtgttatcatctaactcctggtgcttcagattagcttttttagctagtagtttttggtttaaatacatttaaaaattaaaattaaatcctgtagagaacattttcctaataaaaaaaaaaagagaatttaaaatattcactcaaatgtacacataaaacagacaatacggtcctcatgctaaaaagatagttaacaccatcttttattaacacaatgagcttttacaaatgaagaactcaaagttatccactatagccaaaag

SEQ ID NO: 82608 - DNA, 352 bp, Chicken  19866894377604_1
tatattttcaagagattctttcagtaacaacagagagaggccatgcaagcaccggttttttacatgacaaaacagttagcaatagcacttgcacttctgcaagaagggccaatgttgggaaacctcctgtcaatctcaggaagcacgtttagaaatgtaagcaaaagcagagattatcaggacagaaaaaaataagcatccaattattgtaacaaaacagatgtctgtaaccaaaggacctgggaggtctacagaggatatgtgtggaaccagaagaggaaatcaactgaagaaatccamatatatcatatgaagatactttggactaactgaatatagatgcatccagtga

SEQ ID NO: 82609 - DNA, 600 bp, Chicken  19866894377606_1
tgagtcatgtccttgggcttgacctcatttctttccgcagaatggacttctcttgaacttttatcttgagctctgcagagaaggacctaggtgtcctggtggtttagaggctgaccatgagccagccatgtgacttcatggtcaaggggtgaatgggcacaaaccggaataagggaagttccatctgaacttgaaaaactgttactttgaggttgacagagcactgagacaagcttattgaacaagctatggagatgccttttctggagatatttaaaaccagcccagacaccttcctckacaacctgctgtaggggactgtccttggaagggggattagattaggtggtctgcagaggttcacttccaactcctacaattctgtgatttatacaaaggagtaaaataagtgctttgaccattataagtgttaaacataaattgtgatgatgatagcatacctgatttaatcacatttttaagcaagtggaaggaattcaggaagaatcccctaatcttttataagctcgtgcttaaagtcaaaattttgatactatatactactatttcttcttcacaaagaaaataatagattaaaga

SEQ ID NO: 82610 - DNA, 599 bp, Chicken  19866894377608_1
  misc_feature (1)..(47): n is any nucleotide
nnnnnnnnnnnnnnnnnnnnnnnnnnnnnnnnnnnnnnnnnnnnnnnctcttcgtctaagtaaaaccactggatggaaaagtcaacttgcacaccgatatttttactccttgattttttgagcttttctgtgaggagaaagagttgaattgcaatttaaagctcaaatacaaggtatgaaaacacctgagggcagagcagtagcctgagaatactcagcctgagaattggctgagtacagctgcagctcagcctcctgctcagctgcaggaccctggaggagcaaagtcccacatcatcwtcttgtagatgtatggttctttgctagcttgctgctcaattctgctacacactagcattcctaaggcacatcacaccacaggtaaatgttgtttctttctcatcctgttattaatagatgtgtcagaaattgctgtgatatgcacaaattcttgattggtgttattatttgtgctttcttttttccataagctgggactttggcccatgatacttagttactttcagatatgccaaatccctgttacatgacaaatttacttgtttttctgtggtacaccaatcagcctttttactgct

SEQ ID NO: 82611 - DNA, 600 bp, Chicken  19866894377609_1
attttgctcctgccacttcataagaaatgattattgtacaccattttaatacacctttaacttcatgttactgactcctttgcttgcttgttagaaagaaaaaaaaatacagtagcatacatacaatcatatgcaggcacataggaatcattacagacttactgatgaaatcacctcatttttggggggaaatagttagattatactcctgggtcatgacttaactattaaagcatgcatgtttttggattgtctgcatgtcacttataagaatatgtacaagtaattatgttagcacayatattcctataagctgttaactagaataacttcattcctcagctgctgacaataggttatgagaaggaaatcagtgtatttttcacagtaaaccgccagtgctgcaggcaaaccattcacaacctctaggaatggaaacagctattaattaatactttgactgagcaagacctgagcagtactgcccaaacaatttaacagacacttcaaaagtacccactgatgtaacagcaaacatttcaaaaagaaaaaataattttacttcctgttacataaattcaagatagtgaaagaccaccc

SEQ ID NO: 82612 - DNA, 600 bp, Chicken  19866894377611_1
gctgtaactggtcaggaacattagatgttgatcttcttgtttacaaagggaatctcttccacagatcatctaacaaactgtacattttactgcattcccaagatgaaatgaattgctgctaacaaatgtacctttctgtccttgggtttgtagaacaggaaagaaaacttaaaatggaaaaattcagtgtgatgtggaagacagagcaacttagtaaggctattgccctgcaattctacagttctcctacttcaaggacttcagcattacctacaacaactgcaaattctttccacaacratgagttcctgccctgttgaaataaatctgaattcattacctgtgtaccaccgtctgacaaggttccagaagaccaagaggttgtactgtcttccttatgcttttccttgtattttaatgagggccagaagctcacatctatctctgtagttgtatttccctttgaaagtaataacaactcagcattggcttgtgaacataaagctcaggcattccttcaggcaatgtaaattactacaaacctttactaacacttagctctctttctgccttgtttatctaccttgtgtttctcaaatc

SEQ ID NO: 82613 - DNA, 599 bp, Chicken  19866894377616_1
  misc_feature (1)..(171): n is any nucleotide
nnnnnnnnnnnnnnnnnnnnnnnnnnnnnnnnnnnnnnnnnnnnnnnnnnnnnnnnnnnnnnnnnnnnnnnnnnnnnnnnnnnnnnnnnnnnnnnnnnnnnnnnnnnnnnnnnnnnnnnnnnnnnnnnnnnnnnnnnnnnnnnnnnnnnnnnnnnnnnnnnnnnnnnnnnnttatgatttaattaaggatattcagcgtggtttcaaaaaaaggaagatcatatgcaacaaaaccaatacaatctttggaaaaaaacacctaactctcccacatccccccaaagaatgaaggaagccacrgatatgacatacacatgccctatgcaagctaacactgtaccatcaagttattatgttctaagttttgatgagagggagacctaaacaacatataacgaacccaacggggtgtgagggcacaggctcagcatgtcagcatcaggagatgcagccaatgggagctgctgcatcccaaggatccccagcaaagctgattttgctcctctctatttcaatgacatgcaaaaaagcagatgaaatttattcaaagtacaaaatggaggagaagctgcagacaatatgaatgaagagacagcata

SEQ ID NO: 82614 - DNA, 600 bp, Chicken  19866894377616_2
gacatacacatgccctatgcaagctaacactgtaccatcaagttattatgttctaagttttgatgagagggagacctaaacaacatataacgaacccaacggggtgtgagggcacaggctcagcatgtcagcatcaggagatgcagccaatgggagctgctgcatcccaaggatccccagcaaagctgattttgctcctctctatttcaatgacatgcaaaaaagcagatgaaatttattcaaagtacaaaatggaggagaagctgcagacaatatgaatgaagagacagcatatacatraaaaaaatccagcctgcctcttggtgatcagggatagtggtgtgatgcaatccaataaagaagaaacatcaagtaacaatgtggtaagaacaaaaggaacgcaacgctcaccgctctgyctcacagagacagaaggggcagaagcgcggtgaataattagaaatcaaaccccaacatcttaaacttaggacttaatgtcagcataaaagaagcagagacattactggaatttccaaaygcaggcatagagtgcaaaatcatccccgcagtgtgtaacaggatagcgaggaactatttata

SEQ ID NO: 82615 - DNA, 600 bp, Chicken  19866894377616_3
tcagcatgtcagcatcaggagatgcagccaatgggagctgctgcatcccaaggatccccagcaaagctgattttgctcctctctatttcaatgacatgcaaaaaagcagatgaaatttattcaaagtacaaaatggaggagaagctgcagacaatatgaatgaagagacagcatatacataaaaaaaatccagcctgcctcttggtgatcagggatagtggtgtgatgcaatccaataaagaagaaacatcaagtaacaatgtggtaagaacaaaaggaacgcaacgctcaccgctctgyctcacagagacagaaggggcagaagcgcggtgaataattagaaatcaaaccccaacatcttaaacttaggacttaatgtcagcataaaagaagcagagacattactggaatttccaaaygcaggcatagagtgcaaaatcatccccgcagtgtgtaacaggatagcgaggaactatttatacgcctgtcccctaactttggctatctttgtcattagacatgtaaagaacatccaaaaagctgagtgacaaattacacccgtgagtccaaaacaaaccagacgagcattctttaggatgc

SEQ ID NO: 82616 - DNA, 600 bp, Chicken  19866894377616_4
ttcaaagtacaaaatggaggagaagctgcagacaatatgaatgaagagacagcatatacataaaaaaaatccagcctgcctcttggtgatcagggatagtggtgtgatgcaatccaataaagaagaaacatcaagtaacaatgtggtaagaacaaaaggaacgcaacgctcaccgctctgyctcacagagacagaaggggcagaagcgcggtgaataattagaaatcaaaccccaacatcttaaacttaggacttaatgtcagcataaaagaagcagagacattactggaatttccaaaygcaggcatagagtgcaaaatcatccccgcagtgtgtaacaggatagcgaggaactatttatacgcctgtcccctaactttggctatctttgtcattagacatgtaaagaacatccaaaaagctgagtgacaaattacacccgtgagtccaaaacaaaccagacgagcattctttaggatgcctcttttaggaggcaaggatcagacctgctaaagtagcctcaagttacagctgtatctaacaacaggggcgtgagctggagctaaggaaaagcaggcactactggaatttcagtggaat

SEQ ID NO: 82617 - DNA, 600 bp, Chicken  19866894377618_1
atgaagggctgctgtgtgggagccaactttatgatacagtcaggattcattttcagtggagctgaccttgggcatgcagtgctattaagtcaacagctgagaatggcatatgggcagaagacaacctgatttgatttggaacatagtcttgttctctttatttgatcacattccgtggagcctcctgggttgccaatctgctgtttttcgtaatcagtggactctaattaaaattacttctaaatcagaaacatgcagtgttcagaaggaaaaaagagtgaatgcacctgaaatgctcayagggcttctgtgtggtcactataatagcatgtstcttagaggtgtgtacctctctagccacttagcttctgttgatttccctgtaagacttgattttggatggggaatatgttgttacacactcctctaagcattcatatttagaagtggcaagtaattctttctgagttttatttgcctagtcaaaaaactgagtttgtgcctaaattttcaatgtttcgtggagctactgttctacagtaaagtatagcatcactagcaaaaggtgcttattggcaacatgagtactgattgggcagc

SEQ ID NO: 82618 - DNA, 600 bp, Chicken  19866894377618_2
atacagtcaggattcattttcagtggagctgaccttgggcatgcagtgctattaagtcaacagctgagaatggcatatgggcagaagacaacctgatttgatttggaacatagtcttgttctctttatttgatcacattccgtggagcctcctgggttgccaatctgctgtttttcgtaatcagtggactctaattaaaattacttctaaatcagaaacatgcagtgttcagaaggaaaaaagagtgaatgcacctgaaatgctcayagggcttctgtgtggtcactataatagcatgtstcttagaggtgtgtacctctctagccacttagcttctgttgatttccctgtaagacttgattttggatggggaatatgttgttacacactcctctaagcattcatatttagaagtggcaagtaattctttctgagttttatttgcctagtcaaaaaactgagtttgtgcctaaattttcaatgtttcgtggagctactgttctacagtaaagtatagcatcactagcaaaaggtgcttattggcaacatgagtactgattgggcagcccaaagatagggtgttggagcatctcagtagtg

SEQ ID NO: 82619 - DNA, 599 bp, Chicken  19866894377631_1
  misc_feature (1)..(84): n is any nucleotide
nnnnnnnnnnnnnnnnnnnnnnnnnnnnnnnnnnnnnnnnnnnnnnnnnnnnnnnnnnnnnnnnnnnnnnnnnnnnnnnnnnnnccatgttttttgcatgtcagtcagctaacagtttggactgcaggtgatagaaaggataccatagagttttgctttgttttactttccatagaaaagaaagccatctggccaagatacatttagttttctgcatgcatgaaataggtatgcgatgagtcacttcagcctacatttctaaaagtatctgttctatttttcctccatttctgggaaaayagggactgatttgcagactttcatrttacttactgttygatgataagtggagtaatatatattgaatgtaccaggtcctaacattcccaaaaatggaagaytyaaatatggcaggaatacttgtatactgtagttacacactttggctgtctattggtatgttctcaattgtgctttagtttcagatgttctgggttagaccaggactgtggttgttgaagagatagcccaacagtctcatctaagagatcatttcgcacacttgtctaggtttatgtcaattttattcccttcagatg

SEQ ID NO: 82620 - DNA, 599 bp, Chicken  19866894377631_2
  misc_feature (1)..(59): n is any nucleotide
nnnnnnnnnnnnnnnnnnnnnnnnnnnnnnnnnnnnnnnnnnnnnnnnnnnnnnnnnnnccatgttttttgcatgtcagtcagctaacagtttggactgcaggtgatagaaaggataccatagagttttgctttgttttactttccatagaaaagaaagccatctggccaagatacatttagttttctgcatgcatgaaataggtatgcgatgagtcacttcagcctacatttctaaaagtatctgttctatttttcctccatttctgggaaaayagggactgatttgcagactttcatrttacttactgttygatgataagtggagtaatatatattgaatgtaccaggtcctaacattcccaaaaatggaagaytyaaatatggcaggaatacttgtatactgtagttacacactttggctgtctattggtatgttctcaattgtgctttagtttcagatgttctgggttagaccaggactgtggttgttgaagagatagcccaacagtctcatctaagagatcatttcgcacacttgtctaggtttatgtcaattttattcccttcagatgaaactagagatgaagacactttcca

SEQ ID NO: 82621 - DNA, 599 bp, Chicken  19866894377631_3
  misc_feature (1)..(46): n is any nucleotide
nnnnnnnnnnnnnnnnnnnnnnnnnnnnnnnnnnnnnnnnnnnnnnccatgttttttgcatgtcagtcagctaacagtttggactgcaggtgatagaaaggataccatagagttttgctttgttttactttccatagaaaagaaagccatctggccaagatacatttagttttctgcatgcatgaaataggtatgcgatgagtcacttcagcctacatttctaaaagtatctgttctatttttcctccatttctgggaaaayagggactgatttgcagactttcatrttacttactgttygatgataagtggagtaatatatattgaatgtaccaggtcctaacattcccaaaaatggaagaytyaaatatggcaggaatacttgtatactgtagttacacactttggctgtctattggtatgttctcaattgtgctttagtttcagatgttctgggttagaccaggactgtggttgttgaagagatagcccaacagtctcatctaagagatcatttcgcacacttgtctaggtttatgtcaattttattcccttcagatgaaactagagatgaagacactttccagaagaatatctaa

SEQ ID NO: 82622 - DNA, 600 bp, Chicken  19866894377631_4
cagtcagctaacagtttggactgcaggtgatagaaaggataccatagagttttgctttgttttactttccatagaaaagaaagccatctggccaagatacatttagttttctgcatgcatgaaataggtatgcgatgagtcacttcagcctacatttctaaaagtatctgttctatttttcctccatttctgggaaaayagggactgatttgcagactttcatrttacttactgttygatgataagtggagtaatatatattgaatgtaccaggtcctaacattcccaaaaatggaagaytyaaatatggcaggaatacttgtatactgtagttacacactttggctgtctattggtatgttctcaattgtgctttagtttcagatgttctgggttagaccaggactgtggttgttgaagagatagcccaacagtctcatctaagagatcatttcgcacacttgtctaggtttatgtcaattttattcccttcagatgaaactagagatgaagacactttccagaagaatatctaaaaaccttcaaccactaatggatgtccagcatcctggacaagcactagtctggtcctaagttatc

SEQ ID NO: 82623 - DNA, 600 bp, Chicken  19866894377631_5
gtcagctaacagtttggactgcaggtgatagaaaggataccatagagttttgctttgttttactttccatagaaaagaaagccatctggccaagatacatttagttttctgcatgcatgaaataggtatgcgatgagtcacttcagcctacatttctaaaagtatctgttctatttttcctccatttctgggaaaayagggactgatttgcagactttcatrttacttactgttygatgataagtggagtaatatatattgaatgtaccaggtcctaacattcccaaaaatggaagaytyaaatatggcaggaatacttgtatactgtagttacacactttggctgtctattggtatgttctcaattgtgctttagtttcagatgttctgggttagaccaggactgtggttgttgaagagatagcccaacagtctcatctaagagatcatttcgcacacttgtctaggtttatgtcaattttattcccttcagatgaaactagagatgaagacactttccagaagaatatctaaaaaccttcaaccactaatggatgtccagcatcctggacaagcactagtctggtcctaagttatctc

SEQ ID NO: 82624 - DNA, 600 bp, Chicken  19866894377632_1
acctaagaaagacctaaaggtgactgcaggtaaaattagccatgtaattcagtttctgtatgtggtgcttctgagtgatgcaggagaagggtcaaagctaggctatttttggctatgtacacatgaaggggcgatagagaaatctaaagcatactgccatgtcaaaacaactgcagtggatatgtagtgtgaactgttcagtctctgcagattactaaggagacagaaaaagtaaagaaaatacaagtaaggacaacaaaaaatgatctaaggagagagtaagagagacaaattaatacrgtctataaataagaagactcctgggctgtgaaccacctataaataccttcaaagtactgtgtgtagaggcacataattcatctagctcataagacagtaggacaaggagtaattgcttaagtgtagggatggaaacattcaggatgtacggtaagaaaaagttatttgaagagacaactgctcaacagtacagattctgcaggtagtagccaaggcacacttactgaatgcatccaagaataactggctctgggaaatgatgtagtctcagccttctatagtccaaagagctcaccacat

SEQ ID NO: 82625 - DNA, 600 bp, Chicken  19866894377635_1
ttctactttcagttttcatgatcaaggatcctttacaatcaaactagcacctccatgtgatgaggcatcacatctatttgaggcactacattagggcaagctaaactgcgctctggaattgtctgctactctcttttgacttttgtgagaacttagatgatttcctcagcggtacttagaatggatgcttgacttaggacaattcatcactgctctctgagactctctatgtttctgtggtagtcaatatttggacaaacagtagagtgatgctttgataagagggaccatatgtgcagsagtgtaaacagttctgccctctctaaactccagtccagggtggaactgtgtacaagttcagatcctatgcaatcccactgaagtcagtagttgtctggggggaataagctgaggcaacatttgaactctagttatcctcattttttcctaattcttccatcaaaatggcccagtctcctgcagcttttgcaatagtgacagcagccactgtttccctctgttcttttatttttattcctcctaagttttgagatttttgttgtgttttttttttttccttcccccttcattctgattcat

SEQ ID NO: 82626 - DNA, 448 bp, Chicken  19866894377639_1
cccattgacattcattgatgcttgcagaacatttatggagaccaaagagtggatgtgagcacagtgagttgatgggtgatacattttggcagtgctgacagcagtgtgaaagatgggccatgttctggatggccctgcacagctgtcacaccatgaaatgaagagtgtcccaatgtgctcatccatggaaattggcagattgcaaccagggagctgtgtttgtagctaaatgtcagctttgatgcattggaaacaatggtggcaatgctgccatatggcaaacacgcaggatcagaaagracaccacatgcaagtttttcagtgcctgttgaaccaatacaaggctgaaagtgacagtttcctcaatcacatcattatcaatgattctgttttgccagaagctgaacaaatcatcaactctgaccacygcattgctgatgctgactaa

SEQ ID NO: 82627 - DNA, 320 bp, Chicken  19866894377639_2
atggccctgcacagctgtcacaccatgaaatgaagagtgtcccaatgtgctcatccatggaaattggcagattgcaaccagggagctgtgtttgtagctaaatgtcagctttgatgcattggaaacaatggtggcaatgctgccatatggcaaacacgcaggatcagaaagracaccacatgcaagtttttcagtgcctgttgaaccaatacaaggctgaaagtgacagtttcctcaatcacatcattatcaatgattctgttttgccagaagctgaacaaatcatcaactctgaccacygcattgctgatgctgactaa

SEQ ID NO: 82628 - DNA, 599 bp, Chicken  19866894377640_1
  misc_feature (1)..(203): n is any nucleotide
nnnnnnnnnnnnnnnnnnnnnnnnnnnnnnnnnnnnnnnnnnnnnnnnnnnnnnnnnnnnnnnnnnnnnnnnnnnnnnnnnnnnnnnnnnnnnnnnnnnnnnnnnnnnnnnnnnnnnnnnnnnnnnnnnnnnnnnnnnnnnnnnnnnnnnnnnnnnnnnnnnnnnnnnnnnnnnnnnnnnnnnnnnnnnnnnnnnnnnnnnnntctttttttttttctttttctttttttttttattttggtctgtgtcatgacaatgtaatcctgagaaattgaaaggaatatgagtttcagagcctayctaggasagcagtgagaactttgacacagcattaagrtcccaggtagattttagaaggtcttgcatcttctttgccaaaatgttgctaacatttgacattgctagtgaaaaaacwatttgtgatattcttaaagccactgtagctagtttataaatattgtacgtgtacaagaaaggaaaagaaacactaaattaaaaacaaaagtgtgttaccattgatcactgagagaaataacaggacacagctgttttctcttttctgaaaacaggatagttgttaacctcttcatcagcaactc

SEQ ID NO: 82629 - DNA, 599 bp, Chicken  19866894377640_2
  misc_feature (1)..(196): n is any nucleotide
nnnnnnnnnnnnnnnnnnnnnnnnnnnnnnnnnnnnnnnnnnnnnnnnnnnnnnnnnnnnnnnnnnnnnnnnnnnnnnnnnnnnnnnnnnnnnnnnnnnnnnnnnnnnnnnnnnnnnnnnnnnnnnnnnnnnnnnnnnnnnnnnnnnnnnnnnnnnnnnnnnnnnnnnnnnnnnnnnnnnnnnnnnnnnnnnnnnntctttttttttttctttttctttttttttttattttggtctgtgtcatgacaatgtaatcctgagaaattgaaaggaatatgagtttcagagcctayctaggasagcagtgagaactttgacacagcattaagrtcccaggtagattttagaaggtcttgcatcttctttgccaaaatgttgctaacatttgacattgctagtgaaaaaacwatttgtgatattcttaaagccactgtagctagtttataaatattgtacgtgtacaagaaaggaaaagaaacactaaattaaaaacaaaagtgtgttaccattgatcactgagagaaataacaggacacagctgttttctcttttctgaaaacaggatagttgttaacctcttcatcagcaactcaggtgct

SEQ ID NO: 82630 - DNA, 599 bp, Chicken  19866894377640_3
  misc_feature (1)..(166): n is any nucleotide
nnnnnnnnnnnnnnnnnnnnnnnnnnnnnnnnnnnnnnnnnnnnnnnnnnnnnnnnnnnnnnnnnnnnnnnnnnnnnnnnnnnnnnnnnnnnnnnnnnnnnnnnnnnnnnnnnnnnnnnnnnnnnnnnnnnnnnnnnnnnnnnnnnnnnnnnnnnnnnnnnnnnnntctttttttttttctttttctttttttttttattttggtctgtgtcatgacaatgtaatcctgagaaattgaaaggaatatgagtttcagagcctayctaggasagcagtgagaactttgacacagcattaagrtcccaggtagattttagaaggtcttgcatcttctttgccaaaatgttgctaacatttgacattgctagtgaaaaaacwatttgtgatattcttaaagccactgtagctagtttataaatattgtacgtgtacaagaaaggaaaagaaacactaaattaaaaacaaaagtgtgttaccattgatcactgagagaaataacaggacacagctgttttctcttttctgaaaacaggatagttgttaacctcttcatcagcaactcaggtgcttaacatatagtagatagcattaagaattgt

SEQ ID NO: 82631 - DNA, 599 bp, Chicken  19866894377640_4
  misc_feature (1)..(88): n is any nucleotide
nnnnnnnnnnnnnnnnnnnnnnnnnnnnnnnnnnnnnnnnnnnnnnnnnnnnnnnnnnnnnnnnnnnnnnnnnnnnnnnnnnnnnnnntctttttttttttctttttctttttttttttattttggtctgtgtcatgacaatgtaatcctgagaaattgaaaggaatatgagtttcagagcctayctaggasagcagtgagaactttgacacagcattaagrtcccaggtagattttagaaggtcttgcatcttctttgccaaaatgttgctaacatttgacattgctagtgaaaaaacwatttgtgatattcttaaagccactgtagctagtttataaatattgtacgtgtacaagaaaggaaaagaaacactaaattaaaaacaaaagtgtgttaccattgatcactgagagaaataacaggacacagctgttttctcttttctgaaaacaggatagttgttaacctcttcatcagcaactcaggtgcttaacatatagtagatagcattaagaattgttatagcagggattacataaataactccttaactttgtatatgggctgataaagtgtaatttagtaatttagataaagt

SEQ ID NO: 82632 - DNA, 600 bp, Chicken  19866894377641_1
ctgtttagtgtggggaagaggaggctgaggggagaccttgttgctctcttccaatatctgaaaggtgcttacagtgagagcggggttggcctcttctcactgctgacaggacgaagggaaatggcctcaagttgagccagggtaagtttaggttggatatcaggaaacacttctatacagaaagggtggttaagcactgggatggactgcccagggaggcggttgagtcaccatccctgactgtgtttaaatgatttagtggagtgctgttagagttagggtaggatggttaggttgtgkttggactcgatgatccttaaggtcttttccaacctgagcaattctatggttctaaataccagcataaatgcaggcataagagatggatgactccagaggaaccatcttctttacagcaggaatacttcaagtcttaggcctgactttttttttttttcctttcagtttaaatgatgggaccattgtatgagactaaatcctaatcaattctaagtaagctatgaaaatgatcagtgcatatatgcccctttataataaccttttatgcttccttcttatcatttgcattgcccctactct

SEQ ID NO: 82633 - DNA, 600 bp, Chicken  19866894377642_1
gtcagaactttgcagcgaggaagactacgagccttcacgaggaagactatgagccttcatcatcacgacctactctgcatgtgcaagggggggagggactgcatgctaatgggccctttggaatgtaatgaatatgtatccgaattcctgtcaactactgattacgtattagttcgacatatatctatagcacaatttctcctgacagtgtgcaagttaggtggaacaatcccccttgcaccagagtgtacgcgcatcaccaataaacacatgcctgctctatatccttaccggctatasggtctgatttccacatgtcactaccaagtaagtccaccactaaaccatgttgctaagcaacacatctgtatatcttttaaatacctcaagggatgaggatgccactacttcaccatgcagcctgttycaatgcctaattaccctttccattaagaagtgtatcctaatatctaatctaaacctcccctgatgtaacttcagaccatttcctggcactctacttgtcacccgagaaaagagatggatgcccttctcactgcaacctcctttcaggtagagaggaacaaggtctccactcag

SEQ ID NO: 82634 - DNA, 600 bp, Chicken  19866894377642_2
atgaatatgtatccgaattcctgtcaactactgattacgtattagttcgacatatatctatagcacaatttctcctgacagtgtgcaagttaggtggaacaatcccccttgcaccagagtgtacgcgcatcaccaataaacacatgcctgctctatatccttaccggctatasggtctgatttccacatgtcactaccaagtaagtccaccactaaaccatgttgctaagcaacacatctgtatatcttttaaatacctcaagggatgaggatgccactacttcaccatgcagcctgttycaatgcctaattaccctttccattaagaagtgtatcctaatatctaatctaaacctcccctgatgtaacttcagaccatttcctggcactctacttgtcacccgagaaaagagatggatgcccttctcactgcaacctcctttcaggtagagaggaacaaggtctccactcagcctcctgttctcagactaaataatgccagtttcctcagcttttcctcatatgtcttcttcatcttgtcttctctgaatgtatttcagtatttctctatttctaggtctgcagatttttagggattta

SEQ ID NO: 82635 - DNA, 600 bp, Chicken  19866894377645_1
gggtgattccaacctcaccgcaacctcccttcaggtagttgtagagagtgataaggtcacccctgagcctcctcttctccagacatccagtgcagaggctctcaactgtaagtggggaaagggatatgtgctcacaatggctatgctgggcgagccctctctcctccacagccagctttgagagagcttgaggtgtttcttccagcttggctgactcaacaagagcacaagttagcagggtgaagcttttgtatcataaaaatatctgaaaattcatagcatgatgggtaagacaactgyataatttcaatgaaatattatgtatgtgtgtgagagagagagatggactgtgtccatgaagaaactttctcaggtgagtacctcccttgtgttagtagtgctgggtacagtgcatttcagtttaaagccatataattacttgttggggaagaagagaaatacagtacrttctccagattttcagagggaagagtcagttttgttggatgccaacaggttaatgagccaatcttttcctttcgtttcattgctcttctcttggtttgcgttacagtctatgctttcccctttcactgcagc

SEQ ID NO: 82636 - DNA, 600 bp, Chicken  19866894377645_2
cagccagctttgagagagcttgaggtgtttcttccagcttggctgactcaacaagagcacaagttagcagggtgaagcttttgtatcataaaaatatctgaaaattcatagcatgatgggtaagacaactgyataatttcaatgaaatattatgtatgtgtgtgagagagagagatggactgtgtccatgaagaaactttctcaggtgagtacctcccttgtgttagtagtgctgggtacagtgcatttcagtttaaagccatataattacttgttggggaagaagagaaatacagtacrttctccagattttcagagggaagagtcagttttgttggatgccaacaggttaatgagccaatcttttcctttcgtttcattgctcttctcttggtttgcgttacagtctatgctttcccctttcactgcagcgcatatacctccaggtcatgtcctcgtttctgattatgtcctatcactgctgattaaatcggtggatatttaggacaatttggaaatcccttctctgccctctgcagtgttacaatgagtgcttccttgcccctgcccacacgcatttaattgcactcaacatccaca

SEQ ID NO: 82637 - DNA, 600 bp, Chicken  19866894377648_1
ctaaatgatcttgttattctcaaatctataaatgcgtactttccaagttctatctcattttctattaacatttctattacttagcattcgccacaattattactttttcacaggatgaacccctcttccagctcacaatttgcttagatgccttcttgtcataccacagaggggcctaaggaagctggattctcagtgttagctttccaaacaatgtaagaaaagtatttctccatcacaaaatctacttccatcagttatgactataatcacagcgagtgaggaatctcacatagagawcacacttaagaaagtacatgccttcttgtgggctctagcaccattactagagttcttgtaaagggaaaaaaaaaataaaacaaaagctttgctgtcattgcagaagatttcagcttccagagaaaagagactcaacatgtagactgttgagactcaacatacactgtcaaattacttcattatacattggaattatgcctttcttaggagcaatgccaatttaaatgactcttgccttcctccacatcccttctttccatttgttaactatttctttaccgagtttaacaggctggcaca

SEQ ID NO: 82638 - DNA, 600 bp, Chicken  19866894377648_2
actagagttcttgtaaagggaaaaaaaaaataaaacaaaagctttgctgtcattgcagaagatttcagcttccagagaaaagagactcaacatgtagactgttgagactcaacatacactgtcaaattacttcattatacattggaattatgcctttcttaggagcaatgccaatttaaatgactcttgccttcctccacatcccttctttccatttgttaactatttctttaccgagtttaacaggctggcacacttacagctgaactggcacaactggcaggcagaaactaagagtamgggcatgaactcaccaaaagggggaattctttcctaatgcttttcatcaataaataaatgtaaaagtgcagagaaaatttcagaaggcaagaaagaagttttgttattcccttatttgcctgcaacagatgacattatgaagaacactaccatgaaactgatgttatctcctaaaatcatttgaagtatactattcaatctaagtaaaacactagaagtaaatgctaggataattcagctggggaacattaaataatacatcttctgagaatactattatcatgagaaattatcttaaat

SEQ ID NO: 82639 - DNA, 599 bp, Chicken  19866894377650_1
  misc_feature (1)..(86): n is any nucleotide
nnnnnnnnnnnnnnnnnnnnnnnnnnnnnnnnnnnnnnnnnnnnnnnnnnnnnnnnnnnnnnnnnnnnnnnnnnnnnnnnnnnnnntttacagctgatgattatatatatatatatatatataggcataaataatttataaagacactgcagacttatacttttacatcgagagaaaggaaaagggggaggaggggcaggattgcatcttaaactctatttacaaattttacccttggcaggccctcttgctgccaataggaagccatgttgcatatttaatttgctcttttgttacgayggggcttaggttagttaatttcaattttcgatttcaaaagctatcaaatatggctcagatgagaaatcaatttttctcagctgcctctgtttttgtgatggggaggtttcccattggcacgaggacagccacgtgacacggcaagagattagttcactagaccccgtgtttcagccacctcaattactggctgcctcttgtaatttagccttataacacctaatttcaagatagaactcatatttaattcatgaaagcttccacaagagtaattgtgaaataaattgccatagaaaata

SEQ ID NO: 82640 - DNA, 599 bp, Chicken  19866894377651_1
  misc_feature (1)..(68): n is any nucleotide
nnnnnnnnnnnnnnnnnnnnnnnnnnnnnnnnnnnnnnnnnnnnnnnnnnnnnnnnnnnnnnnnnnnnagtggtacgagaaaaatgggcctggagctgctgtccccgggatctgggaacgactcccagtaaatattacccaataatcgaagatcttcgaaacaaggtagcaaagctatgtgcttaatgcagctctgtgtttgtaattcactgcaccgcatttggagaaaaataacaaattcctttcagaaaccaagagcaaatgtatgtgatggatgcttgcaatcgtcctggcactttkcaattgtgtgtagaatttttcatgtataattaattgcagttctgcagctctgtcacagaatgctgccaagtgacttggtttaatttgaataaggaagcaagcagtagagtccagccgtgcaaactcctgttcaaatgctcacattttagaaagtttcatatttttaaaatcacaaattcaattgttcattaaacaaagttcctgtcaaattcttcagggattatgagctgtacaaggcaaactagcattcttccactaagtgaaacaagaaaactcgcagaggctggaaatctgtccta

SEQ ID NO: 82641 - DNA, 600 bp, Chicken  19866894377660_1
tactggaggtgcactgagtcttggtgtccagcacattgtgagagctcaagagtctctgtgcctgagaatcatccctggaaagggctgaggtcttgtgccacggtctcacctgcttttggaaaatcatacagttggtctgtgtccttctcttttggccaatggagagagggcattccctgctgcaaagagaaatacactgaaaatgtcacaaaaactgcaatgggcacaacacagtggaaacatgaaaaacatgtgcatggggtataagtaaaactgggaggtgctgttactgtacccatrtgtctcagggcattcttgtgaggcatgatattatgaattaaaaaaaaaataggcaaaatataaagagcagtgtgatccatagctgtctttgggaaatagaagtcttktacacttgccaaggaggggacacctgcaatcctgcaattacaggtgggatattttagggagaggtagacccataagaatgctcagagtggagcagtcaacacttctggggtgaaactgacagtatcaatcacttggtggagaaattccctttgcaaatagaaatgctgtgtggtagtaatggagctgtgacaa

SEQ ID NO: 82642 - DNA, 600 bp, Chicken  19866894377660_2
acctgcttttggaaaatcatacagttggtctgtgtccttctcttttggccaatggagagagggcattccctgctgcaaagagaaatacactgaaaatgtcacaaaaactgcaatgggcacaacacagtggaaacatgaaaaacatgtgcatggggtataagtaaaactgggaggtgctgttactgtacccatrtgtctcagggcattcttgtgaggcatgatattatgaattaaaaaaaaaataggcaaaatataaagagcagtgtgatccatagctgtctttgggaaatagaagtcttktacacttgccaaggaggggacacctgcaatcctgcaattacaggtgggatattttagggagaggtagacccataagaatgctcagagtggagcagtcaacacttctggggtgaaactgacagtatcaatcacttggtggagaaattccctttgcaaatagaaatgctgtgtggtagtaatggagctgtgacaagagggggcaggaatgctctacactgctcatggctgcactgaggctcacttaatgctagcgaatggaagagccatctgccaaatagcaaactgaatcatctcaatgca

SEQ ID NO: 82643 - DNA, 600 bp, Chicken  19866894377665_1
gcatgctaactgttcaaaaagccagcttgtttttaagtctttacacagttttcttttaagtaacgtgcctattctctatgtagctatgaaatgctcttttgtgagcaatatttttttccccatttctctcctcccttgcaagagggaagtgtacagaaacgaggaggaggaggaggaaacctcgcttcagtttgttgttaattaaatagtgagggatttggctgagaaaacccaacctgaacctgtttgtgtatttttcataaagctgtaagggcggttctttaaagagccgtttctttygtgttttgtatatcctcagcctcagagtttcaaaaggaaaatgttacaacttgtacaagagccactcaatcataatagactttgcaagaacaacacaactcctgtcacattttgtcccagaaattgtaacacttcaggtaaagaggccgattacttcatcctccagggcctgtggcagagcctcctgacttctggaacggaaaaaaaagcaatgagcttatcattccacatgtcacgatcttaatgtggaaaggaagggaggtttaacccttctccagctggcctgctggaggaagcaac

SEQ ID NO: 82644 - DNA, 599 bp, Chicken  19866894377673_1
  misc_feature (1)..(79): n is any nucleotide
nnnnnnnnnnnnnnnnnnnnnnnnnnnnnnnnnnnnnnnnnnnnnnnnnnnnnnnnnnnnnnnnnnnnnnnnnnnnnnntggtgtggatcccatggacgtgggtcctccatgaagtgccagaggatcaggcatggcgaacatccagagagcagtgtggagaccaggtgtgccaaatggtcagagaatagtatggggcaaaggcatggccaatgttcagaaaatgacagaacgcacagatacagcacctttgagacaacagcgaggggcagaagcgtggctgtcattcagagtccagtgtkgggcactggcatggccatcgttcacagaaaggcagggaacaaagtggtttctgccatctagaaaacaagaaaatgagaagttatgcctgcaattaaaagagaataagggaaaaagagataagaggtagccttgaatgcctaattgagaagaagaatcacttctccactagggaagtgatagcaagggctagtagcaagatagcaagcagctaaggctgcgctcctgctgttgcaacccaggatgcagttggttttcactgctgcacagacacrcttggctcaaacccaaatttctgtca

SEQ ID NO: 82645 - DNA, 600 bp, Chicken  19866894377673_2
cgtggctgtcattcagagtccagtgtkgggcactggcatggccatcgttcacagaaaggcagggaacaaagtggtttctgccatctagaaaacaagaaaatgagaagttatgcctgcaattaaaagagaataagggaaaaagagataagaggtagccttgaatgcctaattgagaagaagaatcacttctccactagggaagtgatagcaagggctagtagcaagatagcaagcagctaaggctgcgctcctgctgttgcaacccaggatgcagttggttttcactgctgcacagacacrcttggctcaaacccaaatttctgtcagtcacgatattttctgtgaacttgttttccagcaagctggaaacatacttaaaagcttatcggtatgacaatccacagaaagaaaaatctgtcttttgtgagtgtccttttggcacactattcaatagaaattttgtttagtatttataattagcatgagaaccctgacaaaagagaaaaatactgtccatctgttttcctctgaaacactaagtttgctgataatgaacagggtttccagaatgttgtttccataactctgcgtagacaatct

SEQ ID NO: 82646 - DNA, 600 bp, Chicken  19866894377677_1
agcagtgttacatagattgttctgaaggtaatgcctcctgtttatttccatggaatgtgaacagctgcaaagagcgcaataacattgtttgatagagcaaactctcagctacaaaacactatttttcaacatagtaaacacccttaactatgcatttttgctggcaatgaataaaagtctgcttgctgctttcataaaaatctgcaccagtgaaggtgactcatttttgctgttgccactgcagaagtacaccacccaccaccttactgtgctcacatccactgcttggtccctgtaaaygttcagcaagcatcactgaatgtctgtgggtacaattttttctycatggaagaattcagttccacacctttgtttcatacgcacttccatgttagatgtgattttgtcagacrtccccctgctgccatgacagttgtacaacaacagcgtgtaacagaatattggtgggaaccttcaccactgctgccataccaccaacatccatatctgatattgtgggccaacataatgaaataggaggcattactttcagagtagcccttgtgttttacagaatttatcgtttttcttgctgttgtg

SEQ ID NO: 82647 - DNA, 600 bp, Chicken  19866894377677_2
tttccatggaatgtgaacagctgcaaagagcgcaataacattgtttgatagagcaaactctcagctacaaaacactatttttcaacatagtaaacacccttaactatgcatttttgctggcaatgaataaaagtctgcttgctgctttcataaaaatctgcaccagtgaaggtgactcatttttgctgttgccactgcagaagtacaccacccaccaccttactgtgctcacatccactgcttggtccctgtaaaygttcagcaagcatcactgaatgtctgtgggtacaattttttctycatggaagaattcagttccacacctttgtttcatacgcacttccatgttagatgtgattttgtcagacrtccccctgctgccatgacagttgtacaacaacagcgtgtaacagaatattggtgggaaccttcaccactgctgccataccaccaacatccatatctgatattgtgggccaacataatgaaataggaggcattactttcagagtagcccttgtgttttacagaatttatcgtttttcttgctgttgtgctctttgttttatgaaatggaattaatttcttctccctgctata

SEQ ID NO: 82648 - DNA, 600 bp, Chicken  19866894377677_3
aaacactatttttcaacatagtaaacacccttaactatgcatttttgctggcaatgaataaaagtctgcttgctgctttcataaaaatctgcaccagtgaaggtgactcatttttgctgttgccactgcagaagtacaccacccaccaccttactgtgctcacatccactgcttggtccctgtaaaygttcagcaagcatcactgaatgtctgtgggtacaattttttctycatggaagaattcagttccacacctttgtttcatacgcacttccatgttagatgtgattttgtcagacrtccccctgctgccatgacagttgtacaacaacagcgtgtaacagaatattggtgggaaccttcaccactgctgccataccaccaacatccatatctgatattgtgggccaacataatgaaataggaggcattactttcagagtagcccttgtgttttacagaatttatcgtttttcttgctgttgtgctctttgttttatgaaatggaattaatttcttctccctgctataatatgatctaagcaacgtcgaagtactgaacacaactcacaaaaagagcaaaaagtggctgactgacaa

SEQ ID NO: 82649 - DNA, 600 bp, Chicken  19866894377683_1
aggatgagaacagctgactaggtttactcagaattacttgaaaatattgttactgatgaaatactcctgattaggcccagtaacagaatactgaatacaaacctttaaactcttgtcttgagtagatcttacttttcccctaactgggaaacaaagtagagttcttattcacaacatgtaaaatatacttcaacactgggctgtagaatatgtcatatgcttcatggaaaccaccaacacaggccaataaacctacatgcactttattacttattttaatgcaaatttgtcatttttttwaaatcaagaagtacagtttaccaatgattgttgagcaacaataaaactgcagattcttacttctgtatagtgctaaatactgcagatgtacaaatgaatagaaattcatttatctgttctgttatcattatctattttttccagatagttataaataagtaataaattaattttttgcaaataatcacaagcacacagcacccatgcttgagttaacagaagcatttagaatcccctgcttgagagtaaacatttatcttaattcactctgaattaattaggctgaaacattagattatt

SEQ ID NO: 82650 - DNA, 600 bp, Chicken  19866894377687_1
aaaacaacaacaagaacaacaacaaaaaacccaaacgtatagaactgagataaacaaaaaaacatatactcttcaaaaaatctaaattaattatggaaagcactgacatggctactaccagtgagttgcacaatttttttcattgcagagagataaactgaacaacagggttcttcttgtcttttgttcattttgtctttcactggaatctggcgagggaaaataaataaataaataaaaggcagggagagcaaataagaagtaccactatacacattatacagagggcagagcatcctkcctgaaagcaataaatactttcttcaattatttgtcactgatgaatgatatctatatcattggaggaaactgcttggattctaccattaaatttactaataattgacaacagtagcatttttaagtatgtcagaagggaaaattgataatatcctgaaaacttccttcttatatcccaaactatttcacctttctgaaaatccagaattattgagaagctcgggagaggtaatgtcagcaaaagaaaatttccaaatacatgaaccagtcaaatatctgggcagtcatctgacaagtctg

SEQ ID NO: 82651 - DNA, 600 bp, Chicken  19866894377687_2
tcactgatgaatgatatctatatcattggaggaaactgcttggattctaccattaaatttactaataattgacaacagtagcatttttaagtatgtcagaagggaaaattgataatatcctgaaaacttccttcttatatcccaaactatttcacctttctgaaaatccagaattattgagaagctcgggagaggtaatgtcagcaaaagaaaatttccaaatacatgaaccagtcaaatatctgggcagtcatctgacaagtctgtctgatcagcattctgatactttctagctaaagmagcccttccrtacagttaagtaaataaaatccacttccattgtttggtgcagtttcaaattatattaaaaacaaccaatgacaagatgctactgaaaaggaccgttctgcctgcacttttcccatcctttgcaaaataaacaattcacttctatctggtctattcaacttatgattaaagaggaattcactctgcaacaaatttagtaccaaaaatgtaaaaaagcagtcccccaaatatttgattttcatcagatataaacactgtgtaggaatggaggagaaagaactgtccatttgg

SEQ ID NO: 82652 - DNA, 600 bp, Chicken  19866894377687_3
atgatatctatatcattggaggaaactgcttggattctaccattaaatttactaataattgacaacagtagcatttttaagtatgtcagaagggaaaattgataatatcctgaaaacttccttcttatatcccaaactatttcacctttctgaaaatccagaattattgagaagctcgggagaggtaatgtcagcaaaagaaaatttccaaatacatgaaccagtcaaatatctgggcagtcatctgacaagtctgtctgatcagcattctgatactttctagctaaagmagcccttccrtacagttaagtaaataaaatccacttccattgtttggtgcagtttcaaattatattaaaaacaaccaatgacaagatgctactgaaaaggaccgttctgcctgcacttttcccatcctttgcaaaataaacaattcacttctatctggtctattcaacttatgattaaagaggaattcactctgcaacaaatttagtaccaaaaatgtaaaaaagcagtcccccaaatatttgattttcatcagatataaacactgtgtaggaatggaggagaaagaactgtccatttgggggagaccct

SEQ ID NO: 82653 - DNA, 600 bp, Chicken  19866894377689_1
ttacaaagtgaaggtactgacacgagactctcagaatattaccaatttagaaaagattaaaaatttaagtgtccttctttcatttcagctgcttcaagtaatgtgtattacacacaatccaccaaactgagagcaggattttcaacgccgaggcatttttgagcactacatccggtatccatacctctgagaaaagacaaatcaatacatctccagtatttgttatgtgtgtttgtgacatattgcaaacacggctttatctgaatgtgaaatgcctgctatctggtacagaccatgtaytttatcacgttggatcagagcctgctccatcaagcagagcccccattttggaacagaacatttctgcttgcttcagataacaacagcggaatgaggaattctgggctatttctgtgctccaacaagtagctccattgcctcctaatgattctctatagagaaatcagccggcagagctaatgtctgggatttttcttacccaaggcaaaagaaaattggaaactttgaaaagatcagagaatcgggctgagaagaaaggcttctaaccagaggacattctatctaaagcagtggaagtcc

SEQ ID NO: 82654 - DNA, 600 bp, Chicken  19866894377689_2
aacaagtagctccattgcctcctaatgattctctatagagaaatcagccggcagagctaatgtctgggatttttcttacccaaggcaaaagaaaattggaaactttgaaaagatcagagaatcgggctgagaagaaaggcttctaaccagaggacattctatctaaagcagtggaagtcccaggtctcaggccagggctgaccccaacctttcaaggatcacgcagcactgcaatgtgctgggtaagaaattacttagctagagttgtttttctttcctcttttctcacatggtccatgrtggggaccatcactccagcagcagagcaggcagagctggggagatgtcctgtgaggtcccactgctctcaccaatgattttctgtgctatttcctattaaaggcgtgccctgcacttactgcagtgaaaactggagctgcagaaacgcccaagaggaacagacctcacctaaagaagaaatgattgcacagaaacaaagaagaataarcaatgcacatgctgttacttactcctcagtgacttaaaatttgcacaggatgaggaaaacatgaaaacagtgacacaggtgctcagcaaaga

SEQ ID NO: 82655 - DNA, 600 bp, Chicken  19866894377689_3
ctttcaaggatcacgcagcactgcaatgtgctgggtaagaaattacttagctagagttgtttttctttcctcttttctcacatggtccatgrtggggaccatcactccagcagcagagcaggcagagctggggagatgtcctgtgaggtcccactgctctcaccaatgattttctgtgctatttcctattaaaggcgtgccctgcacttactgcagtgaaaactggagctgcagaaacgcccaagaggaacagacctcacctaaagaagaaatgattgcacagaaacaaagaagaataarcaatgcacatgctgttacttactcctcagtgacttaaaatttgcacaggatgaggaaaacatgaaaacagtgacacaggtgctcagcaaagaacataaatacatcttactgccaagtaaatcactatcaatactgacactatgccagccgtccactttgattgtaaaaaaggcaaagttggaacactggacatctgaaaggaaaagatgcactgttttatgttttactccyggttcatattcagaagtaagtaagcttgctgagcatatcaccaaaagaaaagaactggggaatttatga

SEQ ID NO: 82656 - DNA, 600 bp, Chicken  19866894377689_4
cagaaacgcccaagaggaacagacctcacctaaagaagaaatgattgcacagaaacaaagaagaataarcaatgcacatgctgttacttactcctcagtgacttaaaatttgcacaggatgaggaaaacatgaaaacagtgacacaggtgctcagcaaagaacataaatacatcttactgccaagtaaatcactatcaatactgacactatgccagccgtccactttgattgtaaaaaaggcaaagttggaacactggacatctgaaaggaaaagatgcactgttttatgttttactccyggttcatattcagaagtaagtaagcttgctgagcatatcaccaaaagaaaagaactggggaatttatgaaaaccttctgacttcctgcaattactttatgatcctgccctgaaagtaaaaatcctttccatgattttactgaatcattacattttcctttgtacttgatgacaccaaatgtctttgctcctcttccaggacaatggttgttatattaacagggatgaccttccagctctcaaaatacctgctcaatgcaaatcaaccaactacacattcacagagttctaaaactaacac

SEQ ID NO: 82657 - DNA, 599 bp, Chicken  19866894377701_1
  misc_feature (1)..(50): n is any nucleotide
nnnnnnnnnnnnnnnnnnnnnnnnnnnnnnnnnnnnnnnnnnnnnnnnnnggcttaggttaaaagggacctaaaagatcatctagtaccaatccttctcatattgcactagatcaggctgcccagggccacatacaacatctcctgggatggggcatttacaacaacctgttgcagtgcctcaccactctttgagtaaaaaatttctttctaatatctagtctaaatctcccctcttttagtttacaaccgttccctcttgtcctgtcactatcagaccatgcggaaaagtctgtctccrtcctgcttataagttcccctcaagtacaggaaggcctcagtgaggcaaccccagagccttctccaagctgaacaagcctagctgcctcagcctttcttcatagggccccaggcctggatgcagaacttcagatgaagcctcatgagggcagagtaggggggataatcatctacttccctctccctgctagccacccctcttctgatgcagcccaggatacaggtggccttccagactgcaagtgcacagtgttggctcatgtcaaccttcttgtctaccagaatcccaastccttgttg

SEQ ID NO: 82658 - DNA, 457 bp, Chicken  19866894377701_2
tctgtctccrtcctgcttataagttcccctcaagtacaggaaggcctcagtgaggcaaccccagagccttctccaagctgaacaagcctagctgcctcagcctttcttcatagggccccaggcctggatgcagaacttcagatgaagcctcatgagggcagagtaggggggataatcatctacttccctctccctgctagccacccctcttctgatgcagcccaggatacaggtggccttccagactgcaagtgcacagtgttggctcatgtcaaccttcttgtctaccagaatcccaastccttgttggcagagttgctctctgtgagttctccctacctgtacacatatctgggactgccccaaccaaagtgcaacaccttattgaaccccaatttgttcacataggcccacttttcaagcctgcccaggtccctctggacggcatcccttcctt

SEQ ID NO: 82659 - DNA, 600 bp, Chicken  19866894377713_1
aacaacagaaacaacatccagaaatgctgcaccaacatactatatcagcaacaagctgcttccacatacagctacacaggaacaaagttctccacagagcaatgcagcagtaactcctacgagcctactattaagccaggctcttttcttcattggatgtgggtacaaggctgatctcatctgagagagccatccaatatacccaatcctcaaaggggagacatcaggagaattcttggaacaacttattctctggtcaaaactaatgaaaaaaagaatggctataaaagcacctacagrataaacaggaaatgaaatatccctattagaatttagagtgtttttctccttcagagctttattttctccctcaaatccccgacagaaaccatgatctgcagtcagctgactcctgtgctctagctcctggtttctagctgctaaattgccttaagcacgcctcagaactgccacagctgccaaatgcctctttgataagcaacacgggacatgtaagaaaagaatctcttcaacaagaaacgcgttgcttatacagctttatgagacatccattttccacccttaaaatatatttatgta

SEQ ID NO: 82660 - DNA, 573 bp, Chicken  19866894377715_1
tatcccaaatgtcagtttattccctatgttacaagtcaaatgtgacttaattatctaacagttcatgcagcatagcactgctttgaccatctgttgcactgcatgatgctgaggtaaaaaaggtcctgtccttttgtaacaaagggaggaccaatccagggatggattcatctcctacctccttcctttcttctaccaccacctcctttagttatctccgtttggcttaaatgtgaacctggccatatggtgacaagtgagtaatttagagaactcctggatgcactgtgcagtacatgytgttgtaagaaatattctcaggtaggaaaatatcctcttggagaaaatgacatgatacaataagaatactattgtaaggtatggctttgacacatggaaaarcatgtacagaaataccaagcagtgcagcagaactgctagttgccacagcagctctggaggagctgcacagggcatcagcagatgtgggaatagagaggaggaaagagacttgcaaggtacaataaggtaggcacgatgttccctgccacctaattaacgagcgcactagtg

SEQ ID NO: 82661 - DNA, 471 bp, Chicken  19866894377715_2
atgatgctgaggtaaaaaaggtcctgtccttttgtaacaaagggaggaccaatccagggatggattcatctcctacctccttcctttcttctaccaccacctcctttagttatctccgtttggcttaaatgtgaacctggccatatggtgacaagtgagtaatttagagaactcctggatgcactgtgcagtacatgytgttgtaagaaatattctcaggtaggaaaatatcctcttggagaaaatgacatgatacaataagaatactattgtaaggtatggctttgacacatggaaaarcatgtacagaaataccaagcagtgcagcagaactgctagttgccacagcagctctggaggagctgcacagggcatcagcagatgtgggaatagagaggaggaaagagacttgcaaggtacaataaggtaggcacgatgttccctgccacctaattaacgagcgcactagtg

SEQ ID NO: 82662 - DNA, 600 bp, Chicken  19866894377717_1
ttgtctcttttttaaaactgtccaattcttatatactgttatcttactggtttagaattaagcacactgctaaacacaactttatttgattctacagattaaatccttttacatgtcatagtctatcacagctgtatgtcctaagctaaaggattaggaaatacaaagatcattttaaaaaaatctgaaaaactgtaacatataaatcctgaaaaactttattcaccctttctctatgacatggcaggtgttatttcaaaaattaccttgtgtgtgactacttagtactgaccagaagcrtttcattaccagaatcaatcctgtatctttcttcgttagataagatctgttatcagtttcctggtaaaacatcaagttaaatatgatatatttaatggcttttcctttcttctggattcttatgcactcatcattactcaggggagtttatactgaggawcatatctatatcatcacagatagcattccctcatatgttaatttaggactgtctgcagtaggcrtaggagaggttacccaytggggtgaaggaatgtaagatggtgatgtatggatcttcttccctaagtactaagtact

SEQ ID NO: 82663 - DNA, 600 bp, Chicken  19866894377717_2
atacaaagatcattttaaaaaaatctgaaaaactgtaacatataaatcctgaaaaactttattcaccctttctctatgacatggcaggtgttatttcaaaaattaccttgtgtgtgactacttagtactgaccagaagcrtttcattaccagaatcaatcctgtatctttcttcgttagataagatctgttatcagtttcctggtaaaacatcaagttaaatatgatatatttaatggcttttcctttcttctggattcttatgcactcatcattactcaggggagtttatactgaggawcatatctatatcatcacagatagcattccctcatatgttaatttaggactgtctgcagtaggcrtaggagaggttacccaytggggtgaaggaatgtaagatggtgatgtatggatcttcttccctaagtactaagtactgccatagtctacagttagagcagttacgattgtctgccacttatgctttctgttcttatgagttcatcaaactttaagatttcctgttttgacatttcttgtgcatgttttaagaaatagtttacctaactgagcataataagttggagaaaaatattgt

SEQ ID NO: 82664 - DNA, 595 bp, Chicken  19866894377717_3
accctttctctatgacatggcaggtgttatttcaaaaattaccttgtgtgtgactacttagtactgaccagaagcrtttcattaccagaatcaatcctgtatctttcttcgttagataagatctgttatcagtttcctggtaaaacatcaagttaaatatgatatatttaatggcttttcctttcttctggattcttatgcactcatcattactcaggggagtttatactgaggawcatatctatatcatcacagatagcattccctcatatgttaatttaggactgtctgcagtaggcrtaggagaggttacccaytggggtgaaggaatgtaagatggtgatgtatggatcttcttccctaagtactaagtactgccatagtctacagttagagcagttacgattgtctgccacttatgctttctgttcttatgagttcatcaaactttaagatttcctgttttgacatttcttgtgcatgttttaagaaatagtttacctaactgagcataataagttggagaaaaatattgttgtgcaaaaaaaatattgttacagtagaaaaattcttgaaggaagatactaaatttttc

SEQ ID NO: 82665 - DNA, 578 bp, Chicken  19866894377717_4
tggcaggtgttatttcaaaaattaccttgtgtgtgactacttagtactgaccagaagcrtttcattaccagaatcaatcctgtatctttcttcgttagataagatctgttatcagtttcctggtaaaacatcaagttaaatatgatatatttaatggcttttcctttcttctggattcttatgcactcatcattactcaggggagtttatactgaggawcatatctatatcatcacagatagcattccctcatatgttaatttaggactgtctgcagtaggcrtaggagaggttacccaytggggtgaaggaatgtaagatggtgatgtatggatcttcttccctaagtactaagtactgccatagtctacagttagagcagttacgattgtctgccacttatgctttctgttcttatgagttcatcaaactttaagatttcctgttttgacatttcttgtgcatgttttaagaaatagtttacctaactgagcataataagttggagaaaaatattgttgtgcaaaaaaaatattgttacagtagaaaaattcttgaaggaagatactaaatttttc

SEQ ID NO: 82666 - DNA, 599 bp, Chicken  19866894377718_1
  misc_feature (1)..(63): n is any nucleotide
nnnnnnnnnnnnnnnnnnnnnnnnnnnnnnnnnnnnnnnnnnnnnnnnnnnnnnnnnnnnnnncagtaaatatcagtgatcgttttaaagtgaacctaagaatccagatgattttctttttgtctgctggccaccaccataatgccggtagacatgctgggttttatctgcacggataaaaaacatgtacgttctgagcagactttcttcttcacgatgtatttctgatggtgactgaatgatgttcagcatttgaaagcttttcttccctgtttttcttctccatttctaaaggcttcytttttttttttaatgctaaaagaccaatttaaaacaacaaaaacacaacagaggcattaataagcaaagaaccccaaaacaaaaacctcaaagtgtggtttccttggggaagttaagtctaaacaagtatacagtaataaataatagaagaagtatgaaatgatttattagacaagccttaagaaagcttctgaactcttacaacagtctgtgggattgttacgtgcttgacttcaattacatcccaagggctttcctgatttgcattttacgtgcagggaggacttgcaggttgcatc

SEQ ID NO: 82667 - DNA, 599 bp, Chicken  19866894377718_2
  misc_feature (1)..(62): n is any nucleotide
nnnnnnnnnnnnnnnnnnnnnnnnnnnnnnnnnnnnnnnnnnnnnnnnnnnnnnnnnnnnnncagtaaatatcagtgatcgttttaaagtgaacctaagaatccagatgattttctttttgtctgctggccaccaccataatgccggtagacatgctgggttttatctgcacggataaaaaacatgtacgttctgagcagactttcttcttcacgatgtatttctgatggtgactgaatgatgttcagcatttgaaagcttttcttccctgtttttcttctccatttctaaaggcttctyttttttttttaatgctaaaagaccaatttaaaacaacaaaaacacaacagaggcattaataagcaaagaaccccaaaacaaaaacctcaaagtgtggtttccttggggaagttaagtctaaacaagtatacagtaataaataatagaagaagtatgaaatgatttattagacaagccttaagaaagcttctgaactcttacaacagtctgtgggattgttacgtgcttgacttcaattacatcccaagggctttcctgatttgcattttacgtgcagggaggacttgcaggttgcatcc

SEQ ID NO: 82668 - DNA, 600 bp, Chicken  19866894377718_3
aagaaccccaaaacaaaaacctcaaagtgtggtttccttggggaagttaagtctaaacaagtatacagtaataaataatagaagaagtatgaaatgatttattagacaagccttaagaaagcttctgaactcttacaacagtctgtgggattgttacgtgcttgacttcaattacatcccaagggctttcctgatttgcattttacgtgcagggaggacttgcaggttgcatccttggggcacgccgggtgtcatagcagtctgtgtaaaactgaagcactcctaaagcatcagtgtgtsttaagaacgaagcactcgcttactgcttttgtactgcttgaaacttgaagctttttatttctggctcttttccaatgcggaaggagtttgtttgcagagaactgttgttgccaagggacgaatgttgactgtgttgtttaaaacagcaaaatcacggactggtgtgaattacattcttctagcagttcttctctggataactttaaaaggtcccttccagtttccagaatacttaggtcagctattagaacgtgaccagtgtctcatcctttacgtgaagaacgtattgaagaactggca

SEQ ID NO: 82669 - DNA, 600 bp, Chicken  19866894377721_1
ctagttggaggaggggggggggaaacgtttcttgcttcagcttctcgaaattcttccttaaaaacacaaatacagacacgtagacacagacatacagaaagaagagtaactgacaatcccaaaggtacaataactaaaacacctgccagtaggaattcagtctcacaagattatcagctatgactcctttggccacaggtacaaaggagtgcaagactgacaaataccctgggctacaaatacaagactacaaatacaaaccactccctgccatttgagtcctgctgcttgcagcagcaraatgaatttatgccacctattttgagtgccatccaaaatacagttttctaattacagggaagaacatgacatccagacaaataaaataaaaggtatccacaggaagaatgccagggagactgcacacagcagcacggctggaaagggagggtggaggaggacctcggaagggtgatgaatactgcaacacagctacaatttgtgataacatttaaccctttgcccccagtttaggtgctctaagacgttaaatgaatattagtatgtcagtaacctaggacaaacacaagcacagacaga

SEQ ID NO: 82670 - DNA, 600 bp, Chicken  19866894377730_1
aataattttccgtgaaaatctttaggattcaacagcaggagaaggggaaataaagaaagagaggcagagaaacggggagagaatctgactaaagtaacatctgctgaaaattgcatgttttacaactcttgtgtaggaggactctaaacatttaatgatgcaaacgtcagactcatatttcaagtgccccaaagcatgaaatgttcagattaagagatggagtttctgcccatctgtggcagaatcacactgctatttatagacttgcttttctcaagtaactaaaatggtttcttctcmccaacaggcaaacctataagtgaatgtaactgagtcatctgaatacactgcagcagtcctcaggttaagaggaagcctaaatcctaccttttcacctatcagatcacctaggtaggcagatagtgtgtgagtgctgccctgtgaaaaaccttgcaactcctgtaaaaaaggcaattttgtaattygtggagattttctgacagtttcctctgaaattttccacagctctgccaagcttctcctcctccacttgcagattctgcttgcttgacagggaggatcacgacaggatttgctggg

SEQ ID NO: 82671 - DNA, 600 bp, Chicken  19866894377730_2
gccccaaagcatgaaatgttcagattaagagatggagtttctgcccatctgtggcagaatcacactgctatttatagacttgcttttctcaagtaactaaaatggtttcttctcmccaacaggcaaacctataagtgaatgtaactgagtcatctgaatacactgcagcagtcctcaggttaagaggaagcctaaatcctaccttttcacctatcagatcacctaggtaggcagatagtgtgtgagtgctgccctgtgaaaaaccttgcaactcctgtaaaaaaggcaattttgtaattygtggagattttctgacagtttcctctgaaattttccacagctctgccaagcttctcctcctccacttgcagattctgcttgcttgacagggaggatcacgacaggatttgctggggagagccatagtcagagaagtctgtttttaacctacccacacagttaacccgaacgcgccccagaaaacacactagttaagtgcattatgtgcatttactttgtcagctgcttttcacaggtgtcacttgagcagtcactgtataagcactctccagttgatttaggtttgctgtgtgtaaaatc

SEQ ID NO: 82672 - DNA, 600 bp, Chicken  19866894377743_1
gtatatttgtcttacagtgcaacatgtcccttcccttccagagaaggcatagagtcatggaatagcttgggctgcaaagtacctcaaaggtcaactaggcctgagctcagtgctccagatggggcctcatgagggcaacattgtaagaggtttttatagctagggaacaatacttgcacatttagtgataagaccgtgcatggtggatctccagagcaccgtgagatctaaaggtagatccactgtatgttggcactgctatgtcaacaaacacgtctgtctcctctgttgtgctggtgrtggtgtcrctrtggctctggagtgtgcctggctttaaagaatgtttttgttgcatcaagctcaaccaggatttgttccccagttcagtttggtgtgatagatgcacagcatcttgcaaaagaaaatgaatgagctgctggggaaggtggggactgttttttttctttctcattgttgatatgcttccaccagttgaaagtgatgatgacactgctggtagagaaggctgagaagccrgtcagagaactgctgctctttctgcttccttctggagtttggcagactgtacaagctgcttat

SEQ ID NO: 82673 - DNA, 600 bp, Chicken  19866894377743_2
gtcttacagtgcaacatgtcccttcccttccagagaaggcatagagtcatggaatagcttgggctgcaaagtacctcaaaggtcaactaggcctgagctcagtgctccagatggggcctcatgagggcaacattgtaagaggtttttatagctagggaacaatacttgcacatttagtgataagaccgtgcatggtggatctccagagcaccgtgagatctaaaggtagatccactgtatgttggcactgctatgtcaacaaacacgtctgtctcctctgttgtgctggtgrtggtgtcrctrtggctctggagtgtgcctggctttaaagaatgtttttgttgcatcaagctcaaccaggatttgttccccagttcagtttggtgtgatagatgcacagcatcttgcaaaagaaaatgaatgagctgctggggaaggtggggactgttttttttctttctcattgttgatatgcttccaccagttgaaagtgatgatgacactgctggtagagaaggctgagaagccrgtcagagaactgctgctctttctgcttccttctggagtttggcagactgtacaagctgcttatgaaaatat

SEQ ID NO: 82674 - DNA, 600 bp, Chicken  19866894377743_3
ttacagtgcaacatgtcccttcccttccagagaaggcatagagtcatggaatagcttgggctgcaaagtacctcaaaggtcaactaggcctgagctcagtgctccagatggggcctcatgagggcaacattgtaagaggtttttatagctagggaacaatacttgcacatttagtgataagaccgtgcatggtggatctccagagcaccgtgagatctaaaggtagatccactgtatgttggcactgctatgtcaacaaacacgtctgtctcctctgttgtgctggtgrtggtgtcrctrtggctctggagtgtgcctggctttaaagaatgtttttgttgcatcaagctcaaccaggatttgttccccagttcagtttggtgtgatagatgcacagcatcttgcaaaagaaaatgaatgagctgctggggaaggtggggactgttttttttctttctcattgttgatatgcttccaccagttgaaagtgatgatgacactgctggtagagaaggctgagaagccrgtcagagaactgctgctctttctgcttccttctggagtttggcagactgtacaagctgcttatgaaaatataaa

SEQ ID NO: 82675 - DNA, 600 bp, Chicken  19866894377743_4
atccactgtatgttggcactgctatgtcaacaaacacgtctgtctcctctgttgtgctggtgrtggtgtcrctrtggctctggagtgtgcctggctttaaagaatgtttttgttgcatcaagctcaaccaggatttgttccccagttcagtttggtgtgatagatgcacagcatcttgcaaaagaaaatgaatgagctgctggggaaggtggggactgttttttttctttctcattgttgatatgcttccaccagttgaaagtgatgatgacactgctggtagagaaggctgagaagccrgtcagagaactgctgctctttctgcttccttctggagtttggcagactgtacaagctgcttatgaaaatataaatacatgttattttactcccacagccaccaacagcaaaaatgcatgcgattatagaaagaactgcaaattttgtctgcaagcagggagcacagtttgagattatgctgaaagccaagcaagcacgcaactcccagtttgacttcttgcgatttgatcactacctcaatccctactacaaattcattcagaaagctatgaaggagggacgatacgctgccccttctga

SEQ ID NO: 82676 - DNA, 599 bp, Chicken  19866894377744_1
  misc_feature (1)..(141): n is any nucleotide
nnnnnnnnnnnnnnnnnnnnnnnnnnnnnnnnnnnnnnnnnnnnnnnnnnnnnnnnnnnnnnnnnnnnnnnnnnnnnnnnnnnnnnnnnnnnnnnnnnnnnnnnnnnnnnnnnnnnnnnnnnnnnnnnnnnnnnnnnnnnnccaaggaagccatgggctgcccaggccatctgacattgcgcttccagactgacagatcttttgttgggtgccactgcccggtatgagaacacagaggacttgcacagcctgcttttccctgctgatagctttatacttaggggaatcaggaagagggcragagtcccttgccagtaggaatctgagcgctgagaaaagttggacaycattatgtttcttaatacactgcgtcagaacccatccagccaccacgtatcctagaggaagcattgaactgtcacttgctggaagcatttctatctaaatcctgagtttaagtctccttacgccccagaggctcagtcaacagctcgctgccagcaaggcaggaggtgagctgggaggtgagctcagacactgtcagtctgatggctgtgggtgggcatgcaygagccctgtagtgaaacaggcattgtgta

SEQ ID NO: 82677 - DNA, 599 bp, Chicken  19866894377744_2
  misc_feature (1)..(94): n is any nucleotide
nnnnnnnnnnnnnnnnnnnnnnnnnnnnnnnnnnnnnnnnnnnnnnnnnnnnnnnnnnnnnnnnnnnnnnnnnnnnnnnnnnnnnnnnnnnnnnccaaggaagccatgggctgcccaggccatctgacattgcgcttccagactgacagatcttttgttgggtgccactgcccggtatgagaacacagaggacttgcacagcctgcttttccctgctgatagctttatacttaggggaatcaggaagagggcragagtcccttgccagtaggaatctgagcgctgagaaaagttggacaycattatgtttcttaatacactgcgtcagaacccatccagccaccacgtatcctagaggaagcattgaactgtcacttgctggaagcatttctatctaaatcctgagtttaagtctccttacgccccagaggctcagtcaacagctcgctgccagcaaggcaggaggtgagctgggaggtgagctcagacactgtcagtctgatggctgtgggtgggcatgcaygagccctgtagtgaaacaggcattgtgtatgtgctygtccaacgagatgggaatagggcctggcttgtgagatggt

SEQ ID NO: 82678 - DNA, 600 bp, Chicken  19866894377744_3
tttatacttaggggaatcaggaagagggcragagtcccttgccagtaggaatctgagcgctgagaaaagttggacaycattatgtttcttaatacactgcgtcagaacccatccagccaccacgtatcctagaggaagcattgaactgtcacttgctggaagcatttctatctaaatcctgagtttaagtctccttacgccccagaggctcagtcaacagctcgctgccagcaaggcaggaggtgagctgggaggtgagctcagacactgtcagtctgatggctgtgggtgggcatgcaygagccctgtagtgaaacaggcattgtgtatgtgctygtccaacgagatgggaatagggcctggcttgtgagatggtaggagcacttctgatcccattggatcccattgggtttgcaggacttagaactgcttaggagaaggtaaagggagacaacacattgcctcatctggagggtgtctgttgctctccagcatgaagttcttacacaagccacgtacacgtttaaatagattcctgacaagtaggatattaagtaccagactattttcctctataaaagttacttgttctggcacacc

SEQ ID NO: 82679 - DNA, 600 bp, Chicken  19866894377744_4
ccttgccagtaggaatctgagcgctgagaaaagttggacaycattatgtttcttaatacactgcgtcagaacccatccagccaccacgtatcctagaggaagcattgaactgtcacttgctggaagcatttctatctaaatcctgagtttaagtctccttacgccccagaggctcagtcaacagctcgctgccagcaaggcaggaggtgagctgggaggtgagctcagacactgtcagtctgatggctgtgggtgggcatgcaygagccctgtagtgaaacaggcattgtgtatgtgctygtccaacgagatgggaatagggcctggcttgtgagatggtaggagcacttctgatcccattggatcccattgggtttgcaggacttagaactgcttaggagaaggtaaagggagacaacacattgcctcatctggagggtgtctgttgctctccagcatgaagttcttacacaagccacgtacacgtttaaatagattcctgacaagtaggatattaagtaccagactattttcctctataaaagttacttgttctggcacacctctcaaacatgggctctatttttagctgaatgttta

SEQ ID NO: 82680 - DNA, 600 bp, Chicken  19866894377744_5
ctggccagggcagactcaactaagaactggacagagaagatcttacgccagactgaggttctgctacagccaaaccctagtaagtccagcttctaacgcttgaaggacaaacatcacttgcacctcagtgttaggacataccctctggcagaaagccctgtttcaatgggtttgttagagctagaagaagtgtgtccttcatcccctgtgtagctcgaaggtggctggctgctgtcctgcacagcctggcagtgctcctgaggactgggaggtggctggaagggtgggaacaccttctcycagagctggygtttgctgtccaatgcatgattgaggactgtggggattggccaccatgagtgacagttccaggggtctccccatctcccatcctgtaaccactggtgacttactcatttcaggtgccagagtagaagaattcctctatgagaaacttgacaggaaggtaccttcccgggtcaccaatggggagctgctggcacagtacatgacagaagcagctaatgactttgggccagggacaccttatggtaagtcagcctgcctaagccctctaaatccatcacttccttagagggt

SEQ ID NO: 82681 - DNA, 600 bp, Chicken  19866894377744_6
cagactcaactaagaactggacagagaagatcttacgccagactgaggttctgctacagccaaaccctagtaagtccagcttctaacgcttgaaggacaaacatcacttgcacctcagtgttaggacataccctctggcagaaagccctgtttcaatgggtttgttagagctagaagaagtgtgtccttcatcccctgtgtagctcgaaggtggctggctgctgtcctgcacagcctggcagtgctcctgaggactgggaggtggctggaagggtgggaacaccttctcycagagctggygtttgctgtccaatgcatgattgaggactgtggggattggccaccatgagtgacagttccaggggtctccccatctcccatcctgtaaccactggtgacttactcatttcaggtgccagagtagaagaattcctctatgagaaacttgacaggaaggtaccttcccgggtcaccaatggggagctgctggcacagtacatgacagaagcagctaatgactttgggccagggacaccttatggtaagtcagcctgcctaagccctctaaatccatcacttccttagagggtagccccactg

SEQ ID NO: 82682 - DNA, 600 bp, Chicken  19866894377745_1
agcatttgagagtccatcgtcagaggcagccctatcagtgtcctatctgtgaacacattgctgacaatagtaaggatttagagagccacatgatcaaccactgcaaaacaagaatgtatcagtgcaagcagtgtgaagaatcttttcattataaggtaaagttatttcctgagtttgtctataatagctaaataacctgttttcctgcttttttataactgttgatcctgctttctatctacattcatcctgacatcctggcttcattttcattacaattggagattattgccagcagtrcttttcagatataccattcagctataattactttgccttacccactgaaataaactatcttcctcatgtaagttattttcatgagaaccagctaatggacatcttaatatcctgttgttctgctaacctgtaccagctaaagaagtggaagcttcagagaacttaatagctgaaactttaaaagaattctcaaacattcagactagttggaagtgtgagcaaaagtaatagtaactggtgataatgacagaaactgaaacagcttattttctttcttcctctgctgtttggggcttgatg

SEQ ID NO: 82683 - DNA, 600 bp, Chicken  19866894377745_2
gctataattactttgccttacccactgaaataaactatcttcctcatgtaagttattttcatgagaaccagctaatggacatcttaatatcctgttgttctgctaacctgtaccagctaaagaagtggaagcttcagagaacttaatagctgaaactttaaaagaattctcaaacattcagactagttggaagtgtgagcaaaagtaatagtaactggtgataatgacagaaactgaaacagcttattttctttcttcctctgctgtttggggcttgatgttctgtagaactaagatccraaatatgacatgccagagcagaatattgtattatgtcagtattaagcattagtgctggtgcatgtgctcctgtatactcagttcagtaattaggaacatagaataaatagcaacagaatacagtcttaaaactgaaacaattgtaggcagtggtagagcaaattttcccctatttcctgttgtctagtccaaatttgaaaaaaaatgtagagcttgggtaaaaaggctgcctctccttctcaccaggcaaatagaaactacagtaacatattcttaagtcaataggcaataagaaaattg

SEQ ID NO: 82684 - DNA, 600 bp, Chicken  19866894377759_1
aaaaaaagagtattgtactattaggtggtttgaattgcttctgagaagcaaaattctttagatgcaaaatatattatgaaatatggtgaaggctcatcattcccatgtgaaatgcttagctttatgtacatacccatgtcattttatttgtagtgtgttgagggacttatgtatccactggaatagttggtactcttcaaagtgttctcactgagataagcagagaaaggtctgcacagagattaaagagtgaatgagtgtattgatggttgaaaggatagcagaagttgaacttgaaaygtgtctggtacactgataggcagccaggatggattttagtatactggatacagttgcctctcctgtggaccaggagtagccatccttcccatttgtccattctgcattttgctgagctctaaagctgttaaaacccctatgcagatgttacagtaggcttgctctggctactgttcactccttatccaaatgatcttttgggagtgaaagcaattctatagcaactttaagtaaataaatatactttgaaacaacataacagcttagaaatgaaatgcctacttaacaagcaagagagct

SEQ ID NO: 82685 - DNA, 600 bp, Chicken  19866894377760_1
gaaactcctgtaagagcatcacagagctcaccagctttaatcctaagagaaagataaatttgtttgacctttcctctagcatgaatgtttaataacatgtgtacgtgcatgtgtatttataataattaaaaaaattaaaacaagacactccactgcacacacttgtctctccggggagagggtgagagaacaaacatgtgacagatgtttgtcatgttgcttaatgcactactggaaagcactcaagataccacagtgatgagtgcagtataagaaacagatctagaaagaaaataacgrgcttttacaagctcattcttgagcatctttcctctgcatcttcttttccaaatttagtgtcatcatgacaaagtttgtttctgtgtttcagcaactgatgccacagctggaactccaatctcaagatctacaagaatcttgtgagctgtatgtgaaaactcattccttagcaactttgtttaaatttaatttctacatattacacatctgctcacccaggtaggcaatgtaaattacattggtagcccacattgaaaatgagttcctcttatcatcactctttctttatttcttcatatt

SEQ ID NO: 82686 - DNA, 599 bp, Chicken  19866894377763_1
  misc_feature (1)..(157): n is any nucleotide
nnnnnnnnnnnnnnnnnnnnnnnnnnnnnnnnnnnnnnnnnnnnnnnnnnnnnnnnnnnnnnnnnnnnnnnnnnnnnnnnnnnnnnnnnnnnnnnnnnnnnnnnnnnnnnnnnnnnnnnnnnnnnnnnnnnnnnnnnnnnnnnnnnnnnnnnnnnnnctgccctggtttctctccattcattgcattctcctctcttcctctctccctgtctctgtccttttctctctctctctttcaggaagggtctcactccatgccttcctgctgcctcttctggttcttctcctctccttgccccygctgctgggcaccagctcttctcagcctcgtttacatccactttccctgctctgcctccccccctgccctcctctcgccctgcccgaaggcaggggcctggagctgccccctcggggggcagaggggagcatttgagttgcacacatggagttgatcagaagagacttgagttttccggctctgactcagcccttgacgtgatcctgatcaaaccaagatgtttggttaagcaataaaataagataaagaaggtaacgagcrttttctcagtcactccttctagcccctgggtgcaggg

SEQ ID NO: 82687 - DNA, 600 bp, Chicken  19866894377763_2
ctgctgcctcttctggttcttctcctctccttgccccygctgctgggcaccagctcttctcagcctcgtttacatccactttccctgctctgcctccccccctgccctcctctcgccctgcccgaaggcaggggcctggagctgccccctcggggggcagaggggagcatttgagttgcacacatggagttgatcagaagagacttgagttttccggctctgactcagcccttgacgtgatcctgatcaaaccaagatgtttggttaagcaataaaataagataaagaaggtaacgagcrttttctcagtcactccttctagcccctgggtgcagggtgaggtgctccacatgcagagctttcctggggagcagggttagaggagctgttaccctgactgccgtccccaggtggccactgtggagctgaggagcttgcctcatggtgtgcagggtggcccagacttcatcctctgagcagggtgactggcagagagcgtgggttccccagctgaggtaccctttccccatccctgtctgaccattcccttgcttgcaggtggacagtgataccatctggaatgagctgcactcctccaac

SEQ ID NO: 82688 - DNA, 600 bp, Chicken  19866894377764_1
ccaggcccagactcaaagtcaaagtaatttacagtatgactgactgcatcatcgtcaacagccttgatgcagataaaggataaaattctgcaagacttcccttgactacgaagtgtactcctcaaggatgcaaaggctgaagccctgccacacaaaattgtattgtagattcctgacagacagcattaagtgattcatagcagaacaatacccagaaaaaaatagtgaaaaaatatgggcagtatgaaatacataagctgaacaggtgtttttatgttttgttttgtttttacaaaattmttctttaaaaagggggaggcggcggtggaaaggattcaatctgagacttaactagcacattatctataaggagatggcaaaggcaaaagtttctaagagaacaatacaatgtgtctgaggtgctataagaagggttgggaggtaggtgaaggaatcaaacaaacaaaaaaatcaaaaccaaacaaaaccaggaaacttaccaccacatcagaaaaaaccttgatcacgtaccacaaacagccctcacagttatcatgagatttgtcaaagagtatataatgaacattctaagtttcttgc

SEQ ID NO: 82689 - DNA, 599 bp, Chicken  19866894377771_1
  misc_feature (1)..(84): n is any nucleotide
nnnnnnnnnnnnnnnnnnnnnnnnnnnnnnnnnnnnnnnnnnnnnnnnnnnnnnnnnnnnnnnnnnnnnnnnnnnnnnnnnnnnatatttcatgacattttatctgtgaaaataatgatttggaattttttaatgcttaaaatgggaaattcttttctgatgcattaagaggttttgttagaaggacagttgcagtattgggtaacgtttttaatgtctatgtctagtgataaatgtaggaacataagatgttttagtatgaaaacaaattgcaaatgcatttgcagctacacaacagcrgagacggagaatgattggtggtggagtgagtataccaatatggaatttaggcacctaaattgatatcttatttatattatatcccttcatataaaaaagatattgtatacctcyttaagaatcaaaaatgaatttcccactcaaccatcttaataaaaatcccctcctccccaggatgtacagcaagattggacttgcttgcaggtgtcttgataaaatggttactgtgttatgcattctgaataatacgattgtgaaaatgactgtgtagtatagaagggaatagtaaaatgccacta

SEQ ID NO: 82690 - DNA, 600 bp, Chicken  19866894377771_2
atgatttggaattttttaatgcttaaaatgggaaattcttttctgatgcattaagaggttttgttagaaggacagttgcagtattgggtaacgtttttaatgtctatgtctagtgataaatgtaggaacataagatgttttagtatgaaaacaaattgcaaatgcatttgcagctacacaacagcrgagacggagaatgattggtggtggagtgagtataccaatatggaatttaggcacctaaattgatatcttatttatattatatcccttcatataaaaaagatattgtatacctcyttaagaatcaaaaatgaatttcccactcaaccatcttaataaaaatcccctcctccccaggatgtacagcaagattggacttgcttgcaggtgtcttgataaaatggttactgtgttatgcattctgaataatacgattgtgaaaatgactgtgtagtatagaagggaatagtaaaatgccactaacttcttaccaaataaactctgttgcagacaattttagagcaggtaaatgttcamggatttgttttcagttgctrtttattacatcattgtcctgaacagcaatatgtagaatgg

SEQ ID NO: 82691 - DNA, 600 bp, Chicken  19866894377771_3
ctaaattgatatcttatttatattatatcccttcatataaaaaagatattgtatacctcyttaagaatcaaaaatgaatttcccactcaaccatcttaataaaaatcccctcctccccaggatgtacagcaagattggacttgcttgcaggtgtcttgataaaatggttactgtgttatgcattctgaataatacgattgtgaaaatgactgtgtagtatagaagggaatagtaaaatgccactaacttcttaccaaataaactctgttgcagacaattttagagcaggtaaatgttcamggatttgttttcagttgctrtttattacatcattgtcctgaacagcaatatgtagaatggccaakctgtaggatatcgctttctgaagtaatgagtgcaatttcaggaagcttgtacaatatgcttttggatctagattttcaacaaatgatgactctgctaatgataaagcaaarcaaggactttgccctcttacatttatgattaagctgcgctgttgtgcgatcaaaacatttttagtcaattttagactcttgtttcaaccaggcgaagatgtagtcctgaatttattcaaaccat

SEQ ID NO: 82692 - DNA, 600 bp, Chicken  19866894377771_4
tattatatcccttcatataaaaaagatattgtatacctcyttaagaatcaaaaatgaatttcccactcaaccatcttaataaaaatcccctcctccccaggatgtacagcaagattggacttgcttgcaggtgtcttgataaaatggttactgtgttatgcattctgaataatacgattgtgaaaatgactgtgtagtatagaagggaatagtaaaatgccactaacttcttaccaaataaactctgttgcagacaattttagagcaggtaaatgttcamggatttgttttcagttgctrtttattacatcattgtcctgaacagcaatatgtagaatggccaakctgtaggatatcgctttctgaagtaatgagtgcaatttcaggaagcttgtacaatatgcttttggatctagattttcaacaaatgatgactctgctaatgataaagcaaarcaaggactttgccctcttacatttatgattaagctgcgctgttgtgcgatcaaaacatttttagtcaattttagactcttgtttcaaccaggcgaagatgtagtcctgaatttattcaaaccattcttgcctaacaaaaatcaa

SEQ ID NO: 82693 - DNA, 596 bp, Chicken  19866894377771_5
aatcaaaaatgaatttcccactcaaccatcttaataaaaatcccctcctccccaggatgtacagcaagattggacttgcttgcaggtgtcttgataaaatggttactgtgttatgcattctgaataatacgattgtgaaaatgactgtgtagtatagaagggaatagtaaaatgccactaacttcttaccaaataaactctgttgcagacaattttagagcaggtaaatgttcamggatttgttttcagttgctrtttattacatcattgtcctgaacagcaatatgtagaatggccaakctgtaggatatcgctttctgaagtaatgagtgcaatttcaggaagcttgtacaatatgcttttggatctagattttcaacaaatgatgactctgctaatgataaagcaaarcaaggactttgccctcttacatttatgattaagctgcgctgttgtgcgatcaaaacatttttagtcaattttagactcttgtttcaaccaggcgaagatgtagtcctgaatttattcaaaccattcttgcctaacaaaaatcaacatgaaaactttaaaaataatgagtacaaaaagaattccag

SEQ ID NO: 82694 - DNA, 485 bp, Chicken  19866894377771_6
tatgcattctgaataatacgattgtgaaaatgactgtgtagtatagaagggaatagtaaaatgccactaacttcttaccaaataaactctgttgcagacaattttagagcaggtaaatgttcamggatttgttttcagttgctrtttattacatcattgtcctgaacagcaatatgtagaatggccaakctgtaggatatcgctttctgaagtaatgagtgcaatttcaggaagcttgtacaatatgcttttggatctagattttcaacaaatgatgactctgctaatgataaagcaaarcaaggactttgccctcttacatttatgattaagctgcgctgttgtgcgatcaaaacatttttagtcaattttagactcttgtttcaaccaggcgaagatgtagtcctgaatttattcaaaccattcttgcctaacaaaaatcaacatgaaaactttaaaaataatgagtacaaaaagaattccag

SEQ ID NO: 82695 - DNA, 599 bp, Chicken  19866894377775_1
  misc_feature (1)..(112): n is any nucleotide
nnnnnnnnnnnnnnnnnnnnnnnnnnnnnnnnnnnnnnnnnnnnnnnnnnnnnnnnnnnnnnnnnnnnnnnnnnnnnnnnnnnnnnnnnnnnnnnnnnnnnnnnnnnnnnnncaaaagggcagcatttttcctcttccctttccttgaggaaacaaggttgcttattaatcatatgctcacctggttattcaccatcagatacacatactaggtgagcagaggaattgcataactccaacagtccttgccagtggcagcttctgctgctattacagtccaaattaagcagagaaaaattktgtggtacctgggctacagccagaactgcatcagtcacagttcagaagtgtagttacagaagagactcctgtattcatgaagactgacattaagtaaagtgagcagcgtgactaacagctctgctgctgtataagcaaagtgagaaacactgttttcactaagcatcacaggtaaaaaattataaatgcagttttgctttgctttggctgttgctaacttaactcattgcgagacaaatcttattagcaggacggatctccaattcacacttccccttctagttcgagttgcacttagc

SEQ ID NO: 82696 - DNA, 600 bp, Chicken  19866894377779_1
tttatgaaaacatgctagaaatgcttcttaaaacctgggctgcttccacagtgtagattagattgaagtggctggttgtattaccctccaatatttgctatggataaacaattatttggaatgtaacctttcatccagacattgcttggcagcaactgggaaaaggttaacacacaggcacaatcccgaagccacagacctgggaaatataggtgcaaacaatttcagattgagagcagctgcagtcagctctgctgaaaactgcttatgcagtaactcccctaaccattttactttccrtggattagagtaacaaattgctactcctcatgctatttaaactacatctttctgatgtaattttttgggggacagaattcccaaaagcagctctgatagttgtgtcaagaaggctggtcatgcccagctagaccaggtaaccccttcccaagcagacaggtatctggagctgcaggcaaatcagctgagctgattgctcagggtgaaattgctggatgwgacgtgtaacagcacgagaagctaaaaaaagctgcagatagccctgggaggggtggcttggatttcactggtggttacgtg

SEQ ID NO: 82697 - DNA, 520 bp, Chicken  19866894377779_2
caatttcagattgagagcagctgcagtcagctctgctgaaaactgcttatgcagtaactcccctaaccattttactttccrtggattagagtaacaaattgctactcctcatgctatttaaactacatctttctgatgtaattttttgggggacagaattcccaaaagcagctctgatagttgtgtcaagaaggctggtcatgcccagctagaccaggtaaccccttcccaagcagacaggtatctggagctgcaggcaaatcagctgagctgattgctcagggtgaaattgctggatgwgacgtgtaacagcacgagaagctaaaaaaagctgcagatagccctgggaggggtggcttggatttcactggtggttacgtgggcgttgcatgaaaaacagctgaacgacagaaataaccaaagagtttggaagtccattttgggactgggaacttgcagggttaatggygcccaataaccatgtcactacctcagcaataccacacaaggtcaagataag

SEQ ID NO: 82698 - DNA, 351 bp, Chicken  19866894377779_3
agctctgatagttgtgtcaagaaggctggtcatgcccagctagaccaggtaaccccttcccaagcagacaggtatctggagctgcaggcaaatcagctgagctgattgctcagggtgaaattgctggatgwgacgtgtaacagcacgagaagctaaaaaaagctgcagatagccctgggaggggtggcttggatttcactggtggttacgtgggcgttgcatgaaaaacagctgaacgacagaaataaccaaagagtttggaagtccattttgggactgggaacttgcagggttaatggygcccaataaccatgtcactacctcagcaataccacacaaggtcaagataag

SEQ ID NO: 82699 - DNA, 599 bp, Chicken  19866894377790_1
  misc_feature (1)..(30): n is any nucleotide
nnnnnnnnnnnnnnnnnnnnnnnnnnnnnnaaacaaaaaaaaaaatgtagtttcagagccgctcacctttaaggtaaacaaagcacaatacatttttcttaatacagttttatttcttaataagaattgtggtaacgctgcctcagatgcaacagctgtttgttacagacatgctaagttgttcacatagtttttgctcttctctgtggtttggcagtgctggattggtaaaaagccatagatgcatttttaaataatacaggtgccatttattttacattcagcatcctaccgtatgcwgcttcacatttttgcaatgtgacaactgtctttgtgaaaaaacaactccataacagtggtctaaatcacacatttgctcttccttcaagcactggcggttgtcaaaacctgttgccctccagtaggggagccttttagaggtattccagtgctggctccatacagacaaaatgcattagaggccactcaaacaccacatctaaacaatggcacaaacatgcttctgcccacttcatccgtgggcagtcccgcaaaccacrcagagggcagctggtctcctcccagctgctgagygctac

SEQ ID NO: 82700 - DNA, 600 bp, Chicken  19866894377790_2
aggtgccatttattttacattcagcatcctaccgtatgcwgcttcacatttttgcaatgtgacaactgtctttgtgaaaaaacaactccataacagtggtctaaatcacacatttgctcttccttcaagcactggcggttgtcaaaacctgttgccctccagtaggggagccttttagaggtattccagtgctggctccatacagacaaaatgcattagaggccactcaaacaccacatctaaacaatggcacaaacatgcttctgcccacttcatccgtgggcagtcccgcaaaccacrcagagggcagctggtctcctcccagctgctgagygctactaagcatatcaaatatcaaggactgatagaaatttacttacaatatttcccaactgtctatttacgatatcagtgggaatgttataaaagacagcaagaaagcccaagtcaggagaaaacaaacagaatctgattttagcagaagcacaacgagctaaccgtgaagttatacttctctgtgtgcccaaacctctctgtgttgccatttctgtcaagctctcccgttcagcactagctgcttcaccttaaaacctacttttt

SEQ ID NO: 82701 - DNA, 600 bp, Chicken  19866894377790_3
tatgcwgcttcacatttttgcaatgtgacaactgtctttgtgaaaaaacaactccataacagtggtctaaatcacacatttgctcttccttcaagcactggcggttgtcaaaacctgttgccctccagtaggggagccttttagaggtattccagtgctggctccatacagacaaaatgcattagaggccactcaaacaccacatctaaacaatggcacaaacatgcttctgcccacttcatccgtgggcagtcccgcaaaccacrcagagggcagctggtctcctcccagctgctgagygctactaagcatatcaaatatcaaggactgatagaaatttacttacaatatttcccaactgtctatttacgatatcagtgggaatgttataaaagacagcaagaaagcccaagtcaggagaaaacaaacagaatctgattttagcagaagcacaacgagctaaccgtgaagttatacttctctgtgtgcccaaacctctctgtgttgccatttctgtcaagctctcccgttcagcactagctgcttcaccttaaaacctactttttattcaaacttctggggtttttttttttttggaat

SEQ ID NO: 82702 - DNA, 600 bp, Chicken  19866894377791_1
aaaaaactgattaaacgtgaaaagcaggcttttctaacagaagtgcttttgttgctgtattttttttcctttttagtacccataatgaaacagggtggacttccacgctactatccagcagcactacaacacagcattgatacacaaaaatactgcacaagacgccttggaaaaaagtgcagttatttacagtacaagtttaaaaatagcaagagagcatttgctcctttatgcaaagtctgctaatcagacagcagccacgcaccagcagcacaaccaccccaagcagcgctgcgctcygggawcccactctttagctgtattcttyccaagctgtaggtgaccaaggagcacccaagatggggaactgtgtaagtcattgcacagtgcaaacacgcagaaactccatttcaggaaactgctcgtttgttttgtaaactatgcactgaacgacggtcatgacaacacagtcagatttctttgccttgtcaaacactgtttttgtccacgcgctgaaaacattgttagcactggattaaagaccgagcctatgaagtagtttcatacggctgcttattgcagagaaaatcactttaaaat

SEQ ID NO: 82703 - DNA, 600 bp, Chicken  19866894377791_2
actgattaaacgtgaaaagcaggcttttctaacagaagtgcttttgttgctgtattttttttcctttttagtacccataatgaaacagggtggacttccacgctactatccagcagcactacaacacagcattgatacacaaaaatactgcacaagacgccttggaaaaaagtgcagttatttacagtacaagtttaaaaatagcaagagagcatttgctcctttatgcaaagtctgctaatcagacagcagccacgcaccagcagcacaaccaccccaagcagcgctgcgctcygggawcccactctttagctgtattcttyccaagctgtaggtgaccaaggagcacccaagatggggaactgtgtaagtcattgcacagtgcaaacacgcagaaactccatttcaggaaactgctcgtttgttttgtaaactatgcactgaacgacggtcatgacaacacagtcagatttctttgccttgtcaaacactgtttttgtccacgcgctgaaaacattgttagcactggattaaagaccgagcctatgaagtagtttcatacggctgcttattgcagagaaaatcactttaaaatccctt

SEQ ID NO: 82704 - DNA, 600 bp, Chicken  19866894377791_3
cttttctaacagaagtgcttttgttgctgtattttttttcctttttagtacccataatgaaacagggtggacttccacgctactatccagcagcactacaacacagcattgatacacaaaaatactgcacaagacgccttggaaaaaagtgcagttatttacagtacaagtttaaaaatagcaagagagcatttgctcctttatgcaaagtctgctaatcagacagcagccacgcaccagcagcacaaccaccccaagcagcgctgcgctcygggawcccactctttagctgtattcttyccaagctgtaggtgaccaaggagcacccaagatggggaactgtgtaagtcattgcacagtgcaaacacgcagaaactccatttcaggaaactgctcgtttgttttgtaaactatgcactgaacgacggtcatgacaacacagtcagatttctttgccttgtcaaacactgtttttgtccacgcgctgaaaacattgttagcactggattaaagaccgagcctatgaagtagtttcatacggctgcttattgcagagaaaatcactttaaaatcccttttttttttcttccttcatatgca

SEQ ID NO: 82705 - DNA, 600 bp, Chicken  19866894377792_1
atagtaccctaactctaacaaccctctgctaaatcatgtccctgagcaccacatccaaatggtttttaaacacatccagggatggtgactcaaccaccttcctggggagcctattccagtgcttaaccaccctttctgtaaaaaagttttttcctgatagccaacctaaacttaccctggcataacttgaggccatttcccctcatcctgtcaccagtgagaagagaccagccctgctctcactgtaatcacctttcagatattagaagagagcaataaggtctcccctcagcctccttytccccagacagaasagccccagttccttcagtctctcctcgtagggcatrttctccaagcccttcacaagcctgttgcccttctttggacctcctccagcacctcagtgtcctttctgtactgagatgcccaaaactgaacacagtactcgagggtgaggcctcaccagtgccgagtacaggggcaggatgacttccctagtcttgctcaccacactgttcctgatacaagccaggacactattggccttcttggccacttgggcacactgctggctcatattcagccgaccgccaatca

SEQ ID NO: 82706 - DNA, 600 bp, Chicken  19866894377792_2
ctaacaaccctctgctaaatcatgtccctgagcaccacatccaaatggtttttaaacacatccagggatggtgactcaaccaccttcctggggagcctattccagtgcttaaccaccctttctgtaaaaaagttttttcctgatagccaacctaaacttaccctggcataacttgaggccatttcccctcatcctgtcaccagtgagaagagaccagccctgctctcactgtaatcacctttcagatattagaagagagcaataaggtctcccctcagcctccttytccccagacagaasagccccagttccttcagtctctcctcgtagggcatrttctccaagcccttcacaagcctgttgcccttctttggacctcctccagcacctcagtgtcctttctgtactgagatgcccaaaactgaacacagtactcgagggtgaggcctcaccagtgccgagtacaggggcaggatgacttccctagtcttgctcaccacactgttcctgatacaagccaggacactattggccttcttggccacttgggcacactgctggctcatattcagccgaccgccaatcagtacgccaaggtgc

SEQ ID NO: 82707 - DNA, 600 bp, Chicken  19866894377792_3
acatccaaatggtttttaaacacatccagggatggtgactcaaccaccttcctggggagcctattccagtgcttaaccaccctttctgtaaaaaagttttttcctgatagccaacctaaacttaccctggcataacttgaggccatttcccctcatcctgtcaccagtgagaagagaccagccctgctctcactgtaatcacctttcagatattagaagagagcaataaggtctcccctcagcctccttytccccagacagaasagccccagttccttcagtctctcctcgtagggcatrttctccaagcccttcacaagcctgttgcccttctttggacctcctccagcacctcagtgtcctttctgtactgagatgcccaaaactgaacacagtactcgagggtgaggcctcaccagtgccgagtacaggggcaggatgacttccctagtcttgctcaccacactgttcctgatacaagccaggacactattggccttcttggccacttgggcacactgctggctcatattcagccgaccgccaatcagtacgccaaggtgcctttccatcaggcagcttccagccgctcctccccaa

SEQ ID NO: 82708 - DNA, 599 bp, Chicken  19866894377796_1
  misc_feature (1)..(87): n is any nucleotide
nnnnnnnnnnnnnnnnnnnnnnnnnnnnnnnnnnnnnnnnnnnnnnnnnnnnnnnnnnnnnnnnnnnnnnnnnnnnnnnnnnnnnnncccgtgtcccagagcttttatctacctttgctgtttaccttttcctagcaaagaactgtcttcctcagtgtctcctttacaaacgaccacttttataatgctgaccagttttaccagcagctcatctgcatttacccttgccttggttagagtcatagcaaaggctctcaggagcttgcttcattcctcatttgtatggtgaaggacaggcaygttggaaatatcctttcaaaggctgccagaaggtggaaatatgtagcagaaatatgctggctgtgggaaggatagtgaagagwggagcaaagagccgagctrttgtasgagagggccttctgaagtggcctctttgcttactgaagagccctgtcatggtgccctgcctgggagcagcacgggagtcaggctgaaactgtggttgtttatctctgaactcttctcagttgtgctgctttttgagcctctagcccagctgcaaagcaataattaacctgaaccttttaatttctcccagt

SEQ ID NO: 82709 - DNA, 599 bp, Chicken  19866894377796_2
  misc_feature (1)..(4): n is any nucleotide
nnnncccgtgtcccagagcttttatctacctttgctgtttaccttttcctagcaaagaactgtcttcctcagtgtctcctttacaaacgaccacttttataatgctgaccagttttaccagcagctcatctgcatttacccttgccttggttagagtcatagcaaaggctctcaggagcttgcttcattcctcatttgtatggtgaaggacaggcaygttggaaatatcctttcaaaggctgccagaaggtggaaatatgtagcagaaatatgctggctgtgggaaggatagtgaagagwggagcaaagagccgagctrttgtasgagagggccttctgaagtggcctctttgcttactgaagagccctgtcatggtgccctgcctgggagcagcacgggagtcaggctgaaactgtggttgtttatctctgaactcttctcagttgtgctgctttttgagcctctagcccagctgcaaagcaataattaacctgaaccttttaatttctcccagttggctgtaaattaactctgtcatcctgttgtgtggagttatccttcaatctgtggggtacgcggcaattttaatggtttatga

SEQ ID NO: 82710 - DNA, 600 bp, Chicken  19866894377796_3
ttttatctacctttgctgtttaccttttcctagcaaagaactgtcttcctcagtgtctcctttacaaacgaccacttttataatgctgaccagttttaccagcagctcatctgcatttacccttgccttggttagagtcatagcaaaggctctcaggagcttgcttcattcctcatttgtatggtgaaggacaggcaygttggaaatatcctttcaaaggctgccagaaggtggaaatatgtagcagaaatatgctggctgtgggaaggatagtgaagagwggagcaaagagccgagctrttgtasgagagggccttctgaagtggcctctttgcttactgaagagccctgtcatggtgccctgcctgggagcagcacgggagtcaggctgaaactgtggttgtttatctctgaactcttctcagttgtgctgctttttgagcctctagcccagctgcaaagcaataattaacctgaaccttttaatttctcccagttggctgtaaattaactctgtcatcctgttgtgtggagttatccttcaatctgtggggtacgcggcaattttaatggtttatgagcatataggtgctttctatt

SEQ ID NO: 82711 - DNA, 600 bp, Chicken  19866894377796_4
ctacctttgctgtttaccttttcctagcaaagaactgtcttcctcagtgtctcctttacaaacgaccacttttataatgctgaccagttttaccagcagctcatctgcatttacccttgccttggttagagtcatagcaaaggctctcaggagcttgcttcattcctcatttgtatggtgaaggacaggcaygttggaaatatcctttcaaaggctgccagaaggtggaaatatgtagcagaaatatgctggctgtgggaaggatagtgaagagwggagcaaagagccgagctrttgtasgagagggccttctgaagtggcctctttgcttactgaagagccctgtcatggtgccctgcctgggagcagcacgggagtcaggctgaaactgtggttgtttatctctgaactcttctcagttgtgctgctttttgagcctctagcccagctgcaaagcaataattaacctgaaccttttaatttctcccagttggctgtaaattaactctgtcatcctgttgtgtggagttatccttcaatctgtggggtacgcggcaattttaatggtttatgagcatataggtgctttctatttggtca

SEQ ID NO: 82712 - DNA, 599 bp, Chicken  19866894377803_1
  misc_feature (1)..(164): n is any nucleotide
nnnnnnnnnnnnnnnnnnnnnnnnnnnnnnnnnnnnnnnnnnnnnnnnnnnnnnnnnnnnnnnnnnnnnnnnnnnnnnnnnnnnnnnnnnnnnnnnnnnnnnnnnnnnnnnnnnnnnnnnnnnnnnnnnnnnnnnnnnnnnnnnnnnnnnnnnnnnnnnnnnnnacaaagttcaaactccaaacccaaacattttaaatcttagcatctgatgtagaatttgaatgctgaagagttggcatttccattgtaccttgaagttctgtgcaacaaaaaattgggaacatcagagttcacagaygtttttayatgtgtgtacacctttcactgtgtttaaataagcttatataaccaggaacccagttaataatatcttcatttatgaatttgcctatttggctgaaaataccctattaattttagttcactaaaacataacccagctgtaacttgacccattttgagtagctatacttaaaccagtgttatgtttttagtactaaagactgataacttgatagctccccagggttttttggttacgatttaagcacagagctgacattgcatgctatttttctgaaaatcccagcagtaata

SEQ ID NO: 82713 - DNA, 599 bp, Chicken  19866894377803_2
  misc_feature (1)..(156): n is any nucleotide
nnnnnnnnnnnnnnnnnnnnnnnnnnnnnnnnnnnnnnnnnnnnnnnnnnnnnnnnnnnnnnnnnnnnnnnnnnnnnnnnnnnnnnnnnnnnnnnnnnnnnnnnnnnnnnnnnnnnnnnnnnnnnnnnnnnnnnnnnnnnnnnnnnnnnnnnnnnnacaaagttcaaactccaaacccaaacattttaaatcttagcatctgatgtagaatttgaatgctgaagagttggcatttccattgtaccttgaagttctgtgcaacaaaaaattgggaacatcagagttcacagaygtttttayatgtgtgtacacctttcactgtgtttaaataagcttatataaccaggaacccagttaataatatcttcatttatgaatttgcctatttggctgaaaataccctattaattttagttcactaaaacataacccagctgtaacttgacccattttgagtagctatacttaaaccagtgttatgtttttagtactaaagactgataacttgatagctccccagggttttttggttacgatttaagcacagagctgacattgcatgctatttttctgaaaatcccagcagtaatattacagat

SEQ ID NO: 82714 - DNA, 599 bp, Chicken  19866894377808_1
  misc_feature (1)..(186): n is any nucleotide
nnnnnnnnnnnnnnnnnnnnnnnnnnnnnnnnnnnnnnnnnnnnnnnnnnnnnnnnnnnnnnnnnnnnnnnnnnnnnnnnnnnnnnnnnnnnnnnnnnnnnnnnnnnnnnnnnnnnnnnnnnnnnnnnnnnnnnnnnnnnnnnnnnnnnnnnnnnnnnnnnnnnnnnnnnnnnnnnnnnnnnnnnnaatcatcttatcccccatttataatgctcaatacatgctctgaagacttctctaataccgtaattagatggaacactcagagggatggattaaatcgggatggtattttatgcratggcgctgcgttttayaggggcctggtttgaaaaacagggaagaaacacaaattctctgtgggtgcaggtgactacaagtggggctttctgatgacacagtcctttgggtcattttcctatgctgggcaatgtgcagggccaggcacggcctcatccagtgtccgcatcagcccggatcctgtaaatcatctctgagccgtccccacaatttataggcaggacattaaacattatggccactgacggcatcaaattacacttgaaaaattgagttctgatggaaaatgaatttaaaac

SEQ ID NO: 82715 - DNA, 599 bp, Chicken  19866894377808_2
  misc_feature (1)..(169): n is any nucleotide
nnnnnnnnnnnnnnnnnnnnnnnnnnnnnnnnnnnnnnnnnnnnnnnnnnnnnnnnnnnnnnnnnnnnnnnnnnnnnnnnnnnnnnnnnnnnnnnnnnnnnnnnnnnnnnnnnnnnnnnnnnnnnnnnnnnnnnnnnnnnnnnnnnnnnnnnnnnnnnnnnnnnnnnnnaatcatcttatcccccatttataatgctcaatacatgctctgaagacttctctaataccgtaattagatggaacactcagagggatggattaaatcgggatggtattttatgcratggcgctgcgttttayaggggcctggtttgaaaaacagggaagaaacacaaattctctgtgggtgcaggtgactacaagtggggctttctgatgacacagtcctttgggtcattttcctatgctgggcaatgtgcagggccaggcacggcctcatccagtgtccgcatcagcccggatcctgtaaatcatctctgagccgtccccacaatttataggcaggacattaaacattatggccactgacggcatcaaattacacttgaaaaattgagttctgatggaaaatgaatttaaaacctaaattaaattaaaat

SEQ ID NO: 82716 - DNA, 600 bp, Chicken  19866894377808_3
acaagtggggctttctgatgacacagtcctttgggtcattttcctatgctgggcaatgtgcagggccaggcacggcctcatccagtgtccgcatcagcccggatcctgtaaatcatctctgagccgtccccacaatttataggcaggacattaaacattatggccactgacggcatcaaattacacttgaaaaattgagttctgatggaaaatgaatttaaaacctaaattaaattaaaatctaactaaattaaaattaggtttctaaactaaaatgactttttaatatttttcctaggyaaaaaaaaaagtaccccttctgtcaactaataaaatctgccagtgtcttttacagctgacaagtcctgtctggttgcagctctggtgctgctgcattacaactaaccagcacagaaaaggggctgacggtcatcagcactgctcctccaacggggctgagaaaggacagcaatgcctccaagcaattaaaaaataatcctaattaacaggatccaagcaagcagctggatgggaaaacccagcactgtgcaatggggacagcttgagatgctcagggtccagagccgtcttggagcatgg

SEQ ID NO: 82717 - DNA, 599 bp, Chicken  19866894377809_1
  misc_feature (1)..(23): n is any nucleotide
nnnnnnnnnnnnnnnnnnnnnnnttttgttctgcagtctatgaagaggatttctcaagtgtcatgcccctgttcacatttgtctacaatttcagaaagcaggtttaattgaagtagaataaattgtaggtggtccgtcagctgtagatagttggtgtatcattatgtgctcactatgcaaatactgtccacttatattcccaagagacccattctgcaaaatagagtttggaggctagatctgggtagaattttgtaactgtccatattaaatggattaaaggaatgatgctgtctactkggaagcaggtttctttttctaagattgatacattgagatttacctagcwaaagtattctagacatttaccattgtcatgtaaacatctgtccttgcaacttccttgcccaaggtttggtgatgtggaagggaatgctagaaacaaacaatagttagtctgctatataaamgttcctggctagagctctcctggcacatatgtcttgattacaggcatgctcttgactgttctgctgctattgcttcaggcaactgagactgaggacttggaatgcactgacaatgaaagcagttccaag

SEQ ID NO: 82718 - DNA, 600 bp, Chicken  19866894377809_2
tttctcaagtgtcatgcccctgttcacatttgtctacaatttcagaaagcaggtttaattgaagtagaataaattgtaggtggtccgtcagctgtagatagttggtgtatcattatgtgctcactatgcaaatactgtccacttatattcccaagagacccattctgcaaaatagagtttggaggctagatctgggtagaattttgtaactgtccatattaaatggattaaaggaatgatgctgtctactkggaagcaggtttctttttctaagattgatacattgagatttacctagcwaaagtattctagacatttaccattgtcatgtaaacatctgtccttgcaacttccttgcccaaggtttggtgatgtggaagggaatgctagaaacaaacaatagttagtctgctatataaamgttcctggctagagctctcctggcacatatgtcttgattacaggcatgctcttgactgttctgctgctattgcttcaggcaactgagactgaggacttggaatgcactgacaatgaaagcagttccaagcttaaagtagccaacctctttggaaaattacctcataaaaatggcatgta

SEQ ID NO: 82719 - DNA, 600 bp, Chicken  19866894377809_3
cactatgcaaatactgtccacttatattcccaagagacccattctgcaaaatagagtttggaggctagatctgggtagaattttgtaactgtccatattaaatggattaaaggaatgatgctgtctactkggaagcaggtttctttttctaagattgatacattgagatttacctagcwaaagtattctagacatttaccattgtcatgtaaacatctgtccttgcaacttccttgcccaaggtttggtgatgtggaagggaatgctagaaacaaacaatagttagtctgctatataaamgttcctggctagagctctcctggcacatatgtcttgattacaggcatgctcttgactgttctgctgctattgcttcaggcaactgagactgaggacttggaatgcactgacaatgaaagcagttccaagcttaaagtagccaacctctttggaaaattacctcataaaaatggcatgtaatcttgcaaaatgggcaagaaatcacctcccttttaagcacaggcaagcccattgttctctcttctgtggtcaaaggcaaaagagtattccagtgtaggatgtgctgcaaatatgcatcta

SEQ ID NO: 82720 - DNA, 600 bp, Chicken  19866894377814_1
atccctatccaaggtagcacataatcctttccaataaagcaacactgtttaggcaattcccaggccaccagctaaaggaaaaaataataatccttagcaaagaatacacaaacaactatctgcgatctaaaagaaaacccacttagatgcaaactaaacaggaaactgaagtgtcatgagtttaaatgaggggaagttgcagatgagttctgcctctccagagaataaaaacatttcggcttcatggccactggcagtgaagaacttttttattctgtctcctcaaaacctgaagtctgygatctttatccagtgagtatgagggaagattaatttcctcataattaacttcttggatcttttaccttgagcacaagttcaaaattccgcacagcatccttatacaaaaagcagcccctggctttcataaactaggataacctttctcagcatatgcagtttattacacagaggaatgccaaatgtgaagttgtgagtttatacagacacaccacactgtttgtataggagtgattaaaaaacagaacgtgcaaacaatgactctaataaaaagaatctaagaacagagcactgtttgtg

SEQ ID NO: 82721 - DNA, 600 bp, Chicken  19866894377815_1
taacaacattgatggaacctcgtaagcatattgcagaataactgagaaaagttcatattttttaaagttctctataaagaaaaagatgttcttattttctgttcctgctcctccaaaaacaaccctgtcaagagatcatttttggctcgttgcctctcatgaccataaggagagtgttgcagccaagttgggaatcttgataagatttcatgactgaattgcagctaaaacctccaaaattggctttccaaatattgagaagagctgcacaagaagaggtgttaaagcaggtcagaaaamacacacatgcctgtggtcactaaaatttaaaacataaatattctgataaaatgcttataaactgcaaaacagcctttcatgtgatcagttttataacattgtcaggaattgtactgaaggactgtgagcagtcacaaacttcaagcctyagtatgacatagggcactcacaaaaggatcagckgtaacaccccatccccagggacaaaacctatctgcttttaatgaaagcagtcttttgtcttttatttgtcaggatataggctgtgatgaaaacaaagaaagggattgcctactttat

SEQ ID NO: 82722 - DNA, 600 bp, Chicken  19866894377815_2
ttgcctctcatgaccataaggagagtgttgcagccaagttgggaatcttgataagatttcatgactgaattgcagctaaaacctccaaaattggctttccaaatattgagaagagctgcacaagaagaggtgttaaagcaggtcagaaaamacacacatgcctgtggtcactaaaatttaaaacataaatattctgataaaatgcttataaactgcaaaacagcctttcatgtgatcagttttataacattgtcaggaattgtactgaaggactgtgagcagtcacaaacttcaagcctyagtatgacatagggcactcacaaaaggatcagckgtaacaccccatccccagggacaaaacctatctgcttttaatgaaagcagtcttttgtcttttatttgtcaggatataggctgtgatgaaaacaaagaaagggattgcctactttatctccagaggataacatttttagaaaatgctctttgctatacagaggccaaagacctttttccaggcaaatagcaaagatgaggtaaaaatctccactccagagggaacaaatgttttttatatgcagatttacaaactccttgcaggct

SEQ ID NO: 82723 - DNA, 600 bp, Chicken  19866894377815_3
caagttgggaatcttgataagatttcatgactgaattgcagctaaaacctccaaaattggctttccaaatattgagaagagctgcacaagaagaggtgttaaagcaggtcagaaaamacacacatgcctgtggtcactaaaatttaaaacataaatattctgataaaatgcttataaactgcaaaacagcctttcatgtgatcagttttataacattgtcaggaattgtactgaaggactgtgagcagtcacaaacttcaagcctyagtatgacatagggcactcacaaaaggatcagckgtaacaccccatccccagggacaaaacctatctgcttttaatgaaagcagtcttttgtcttttatttgtcaggatataggctgtgatgaaaacaaagaaagggattgcctactttatctccagaggataacatttttagaaaatgctctttgctatacagaggccaaagacctttttccaggcaaatagcaaagatgaggtaaaaatctccactccagagggaacaaatgttttttatatgcagatttacaaactccttgcaggctgtactacagtcagctggaggactaagcaatgcta

SEQ ID NO: 82724 - DNA, 599 bp, Chicken  19866894377827_1
  misc_feature (1)..(166): n is any nucleotide
nnnnnnnnnnnnnnnnnnnnnnnnnnnnnnnnnnnnnnnnnnnnnnnnnnnnnnnnnnnnnnnnnnnnnnnnnnnnnnnnnnnnnnnnnnnnnnnnnnnnnnnnnnnnnnnnnnnnnnnnnnnnnnnnnnnnnnnnnnnnnnnnnnnnnnnnnnnnnnnnnnnnnnacgtaggctctctacacaagttacaacacagctgggatgtgcatttctgattatcgggattttatattttgacacatccaatacaccacacctcccagtcaaacagcagcctttttattaccaccatttcaaawttcttccctccttagcctcctatttgtcaaagctacaaatatttagctgctgcaggtaggattcattgtaattattcttgtctcatccctcatgtaaactacagccattgtgctcagatgtctccttctccatttctattgctctctgcagatttaagttagaraatcagtaatgttaacggactaatccttctgctccaaaaccaagtggcaaaccataatcagtacttgtaaattcagactgaatcctcatcagaggacaaaactgcacaccgaatgcaatatagaccttaaaaccc

SEQ ID NO: 82725 - DNA, 599 bp, Chicken  19866894377827_2
  misc_feature (1)..(2): n is any nucleotide
nnacgtaggctctctacacaagttacaacacagctgggatgtgcatttctgattatcgggattttatattttgacacatccaatacaccacacctcccagtcaaacagcagcctttttattaccaccatttcaaawttcttccctccttagcctcctatttgtcaaagctacaaatatttagctgctgcaggtaggattcattgtaattattcttgtctcatccctcatgtaaactacagccattgtgctcagatgtctccttctccatttctattgctctctgcagatttaagttagaraatcagtaatgttaacggactaatccttctgctccaaaaccaagtggcaaaccataatcagtacttgtaaattcagactgaatcctcatcagaggacaaaactgcacaccgaatgcaatatagaccttaaaaccctcacccttccaagacatagacaggtcagagaatgaaggctttttctcctaatccagtctcctgacaacagactcagctattcyagagaggactttctcatctgacgctttccctctgggatcttgacttcttaggaagtctgaagtcactgttcacaggagctc

SEQ ID NO: 82726 - DNA, 538 bp, Chicken  19866894377827_3
tcatccctcatgtaaactacagccattgtgctcagatgtctccttctccatttctattgctctctgcagatttaagttagaraatcagtaatgttaacggactaatccttctgctccaaaaccaagtggcaaaccataatcagtacttgtaaattcagactgaatcctcatcagaggacaaaactgcacaccgaatgcaatatagaccttaaaaccctcacccttccaagacatagacaggtcagagaatgaaggctttttctcctaatccagtctcctgacaacagactcagctattcyagagaggactttctcatctgacgctttccctctgggatcttgacttcttaggaagtctgaagtcactgttcacaggagctcaacccaactggctgaactgaggtgtccagtgccatctgggacatccaaaggcacccacgacctgcagaagagccgtgtgtgggaagagaaggaagagatcagacaagattgcagaggacatctcagatcacaccagccctcaaagtctactcatctg

SEQ ID NO: 82727 - DNA, 600 bp, Chicken  19866894377835_1
cctgcaagcagcaagggggggggcacggatcaggatggaggtgcgccggggtttggtcccataggtgacaccaagaagaggacaccaagatgtgatggatgccccatccctggagacatccaaggtcaggctcaaccatctccaggcactgagcatctgattgagctgtaggtgtccgggaagttggaccaggtcccttccaactcaaacaattcaaagatgataaggggacagagctcagcctgtggtctgaatgaacccccttcaccctccagaatttgtaaagagcccaagcaatcraggmaaatgctttaaattctgctgagctgagccttaccgtgccctccgtccaggaactcagtgaggtacatggcactgcayggkgaccagggctgactcttgttcaggtggacaaagagcggggccatcatatggtgcttgcccaggggcccgaagagccgctcacaggtcttggagtcgtcgtggggcatgctgagcacgtggcctgcagarcagagagcatctcgtattagttaacagccttttcccattgctgcaaatgctatttgcttccagaacagaagcaatcatggaatcata

SEQ ID NO: 82728 - DNA, 600 bp, Chicken  19866894377835_2
caagcagcaagggggggggcacggatcaggatggaggtgcgccggggtttggtcccataggtgacaccaagaagaggacaccaagatgtgatggatgccccatccctggagacatccaaggtcaggctcaaccatctccaggcactgagcatctgattgagctgtaggtgtccgggaagttggaccaggtcccttccaactcaaacaattcaaagatgataaggggacagagctcagcctgtggtctgaatgaacccccttcaccctccagaatttgtaaagagcccaagcaatcraggmaaatgctttaaattctgctgagctgagccttaccgtgccctccgtccaggaactcagtgaggtacatggcactgcayggkgaccagggctgactcttgttcaggtggacaaagagcggggccatcatatggtgcttgcccaggggcccgaagagccgctcacaggtcttggagtcgtcgtggggcatgctgagcacgtggcctgcagarcagagagcatctcgtattagttaacagccttttcccattgctgcaaatgctatttgcttccagaacagaagcaatcatggaatcatagagg

SEQ ID NO: 82729 - DNA, 600 bp, Chicken  19866894377835_3
acaccaagatgtgatggatgccccatccctggagacatccaaggtcaggctcaaccatctccaggcactgagcatctgattgagctgtaggtgtccgggaagttggaccaggtcccttccaactcaaacaattcaaagatgataaggggacagagctcagcctgtggtctgaatgaacccccttcaccctccagaatttgtaaagagcccaagcaatcraggmaaatgctttaaattctgctgagctgagccttaccgtgccctccgtccaggaactcagtgaggtacatggcactgcayggkgaccagggctgactcttgttcaggtggacaaagagcggggccatcatatggtgcttgcccaggggcccgaagagccgctcacaggtcttggagtcgtcgtggggcatgctgagcacgtggcctgcagarcagagagcatctcgtattagttaacagccttttcccattgctgcaaatgctatttgcttccagaacagaagcaatcatggaatcatagaggttggaatagaccactaagatcatcgagtccaaccgtcaacccatcaccaccatgcccactaaagcaaatcaagcaaa

SEQ ID NO: 82730 - DNA, 600 bp, Chicken  19866894377835_4
ccaagatgtgatggatgccccatccctggagacatccaaggtcaggctcaaccatctccaggcactgagcatctgattgagctgtaggtgtccgggaagttggaccaggtcccttccaactcaaacaattcaaagatgataaggggacagagctcagcctgtggtctgaatgaacccccttcaccctccagaatttgtaaagagcccaagcaatcraggmaaatgctttaaattctgctgagctgagccttaccgtgccctccgtccaggaactcagtgaggtacatggcactgcayggkgaccagggctgactcttgttcaggtggacaaagagcggggccatcatatggtgcttgcccaggggcccgaagagccgctcacaggtcttggagtcgtcgtggggcatgctgagcacgtggcctgcagarcagagagcatctcgtattagttaacagccttttcccattgctgcaaatgctatttgcttccagaacagaagcaatcatggaatcatagaggttggaatagaccactaagatcatcgagtccaaccgtcaacccatcaccaccatgcccactaaagcaaatcaagcaaatta

SEQ ID NO: 82731 - DNA, 600 bp, Chicken  19866894377835_5
tcaaagatgataaggggacagagctcagcctgtggtctgaatgaacccccttcaccctccagaatttgtaaagagcccaagcaatcraggmaaatgctttaaattctgctgagctgagccttaccgtgccctccgtccaggaactcagtgaggtacatggcactgcayggkgaccagggctgactcttgttcaggtggacaaagagcggggccatcatatggtgcttgcccaggggcccgaagagccgctcacaggtcttggagtcgtcgtggggcatgctgagcacgtggcctgcagarcagagagcatctcgtattagttaacagccttttcccattgctgcaaatgctatttgcttccagaacagaagcaatcatggaatcatagaggttggaatagaccactaagatcatcgagtccaaccgtcaacccatcaccaccatgcccactaaagcaaatcaagcaaattaattagcgagtcagcactgcagagggtgacacccagagcggagatgctggcaatgggctgaaaaaaagcagaaaagctccacaagggcacacattacccagctcgtgagccagcgtgtaggcagcctgca

SEQ ID NO: 82732 - DNA, 600 bp, Chicken  19866894377835_6
aaatcaagcaaattaattagcgagtcagcactgcagagggtgacacccagagcggagatgctggcaatgggctgaaaaaaagcagaaaagctccacaagggcacacattacccagctcgtgagccagcgtgtaggcagcctgcagtccctcatcctcgatcaccgagcagcttttgttgcggtcacacatggtgccaatatctgccacccccagcgtgtcgcagccttgatgcccgcagaaatcctgttgggaggcagcacccaaggaagctgaggcaaaccaaaagtccacaccctaamtgcactaaactcccaaattggcttgatttgtgccaactggaagctccatggcttgcaataggagctctcctctccctctgagctatctcaaaaccccatccatctcccccagcgtccacaccaagggaccccagacctgtcgggtgagcaggatggcagtgtcatagtgctcggggtgccggtcgctcggcgggttgaactgctgctgccagctgcagaagttgcgtagggtgaggccaccgttgtccgacacctccggccctgctgcctcctcatccaccaccagcaccttcaccacca

SEQ ID NO: 82733 - DNA, 600 bp, Chicken  19866894377839_1
taaagccaaaacccatgccctctgcacttcaaccagctgtacgggcttgtcctcaggtctcctgctgtgatctgacgtgtgcacgtaggtgtgtttatatttgcactcactcgtgtgcgtgtgtataaatatatatacatacccatgcttgctaagtctgtacaagcacaagctgtctgtgtttgcaacacattctgtttctgagggcaacatttaggctgtgaactccctgaagaaaagcctatctcttgctgagtgtttccagcatgcctaaccctcctgggctttcatttcccaacyggcttttaacgtagtgtaaagaacagaaataatatcttccattaaaactttattaggtagctcttccacttaagagagctgcttcacttattccctgccaaatgaatcccagggactgaaaggatttgggaggaggagggggcagcagggagacatcccaaagcacaggggaccttcctgggaggatgctcacagtgcagggtcctgggccagagctgggtgtggtgggactgccacatgggatgtgcgggagcacagctgccagcctgggcagcgcccttcatttcttggcccctgttt

SEQ ID NO: 82734 - DNA, 600 bp, Chicken  19866894377848_1
cagaagaaaggcagtacatctgatggaagatatgaaggaactgtagtgttttagcaaacaagattgaatttaatctttcttccaaaggaagttgatgagagttgcatctttcctctttggtgttggttgtggaagatgcttttactataaatgatattctggcactagaggaatatgtcccaaggtattccttgtcattggttggagagtttgagtgcacagaaatgacagctataccattagggcatgttcttgactaagagaagataaatagatcttcacgttaacattgcatcttcytgtaatttaactttggatgcactcaacagaatgtcttcatgttttcagaattgtgttactgctgctgaattacaaagaagcatttttaaaagcaggtgtccatgtaatgtgtgcacctgtaattatttactgtagatggttatgtggcatttatcacctcgtaaactgacctgctaaagtagtgaatgtcattatgcccatttcacagacaaggaatctggacttggatatatgatgatatatgacagtgcagcttcacagttaagtggctgatcggttatgaagttatgaaaccttcat

SEQ ID NO: 82735 - DNA, 600 bp, Chicken  19866894377852_1
tggagctggcaggacaagtaaatagccctgaagtgggtacatgaaggacttgggctgatatgaacagctaaatcaataaacgcacgttactggttcaaatgtggagtgagaacaccacccttcatctttccttgctgggtcaccagggaggagtttggcatatggagggctgtcaaggagctaacctttaggcttgttaattagtgataattgagtggtcctcaagagctctgaataagttccttggctgctacagggcctgcttggcacacccagtcttaactgccgatgtcgttcctktgagagagaggaaggttacacattaaaaggcagcagacactccaaattcatacgggatgacatgcaacccaaaggctggcagcacaactttgttgaattagtttttccttccctgtaattaggagggtttgagatctggctgttactgttgtgatgatagtctcggtcacaatcgcactccctgctttgtgaaggtgtctccagtgcccaccaccaccgaggaccacccctagtgccaggtgatgtgcaaatacaagacaaggcaatggacctgatcctaaagcttccaaggccaagcga

SEQ ID NO: 82736 - DNA, 599 bp, Chicken  19866894377853_1
  misc_feature (1)..(82): n is any nucleotide
nnnnnnnnnnnnnnnnnnnnnnnnnnnnnnnnnnnnnnnnnnnnnnnnnnnnnnnnnnnnnnnnnnnnnnnnnnnnnnnnnnttttgtgccgggcccgcggccgcttccccgcgcggttcgggcgctcctttcggggccgtggggcccattggcggtgcggtgcatccctgcccggccctgcgcggagcggaacggaacgcagcgggacacggccccgcgctcctcgggacgcaaccgctgccccggccgcgagcggagtcggccgcttttcccgagcgtcagagccgagcggggcgggragaaaagttttcccgtagccacggaactggccggtaagaaaagttcgcgtagtggtgaaaaccggagcctatttccccccgtgctgccctttaccgagcaccgcggcggtcggaacatcgagctccgctcctgcgggacccgggcgcaacccgcggccggagctcggaagcgttccgcagtgcgatcgaggcaccgagttccagggcacccgtgtggggctcggcggagatgtgggagtattatttaaaataaacgcatcaagaaataaatggaaaaaagaaaaaagaaaaaagaaaaa

SEQ ID NO: 82737 - DNA, 600 bp, Chicken  19866894377858_1
atgttcttatatataaaatgtttcacattcacttttacatcatgcagcagataaataagctatattgtaaagcttgaagcaggtggattgcaaaagagacaacagcttggaatcttggaaaactgaaaaaacaaaggttactgccacgtccttagaaaaataggcttctaatttccagcatcaagtgagatttgttaattgctcccagtttggatcatctggttgagcagagaatgctgctgccaatctgccatcatttgtgcattttatggaaggccttcaacccataaaaaagttggrgtgatgyttttccagcccatggaataaatgggaataatggaataaattgcagtatgtggaataaaatgttgggtatgactgtgagtgggtgtcagagcagagaagagatggcagtgaggtattgatatttgaaaaaatgttgattttttttaagattttttttaaaggggaggggaatacctcaaaccatggcatacaagctggtactgaaacccatcagaatttgctttgtcagctattaggtgttaatagtggaaatgccatgtgtattagcactgcattcttcttagcagtcttctc

SEQ ID NO: 82738 - DNA, 600 bp, Chicken  19866894377858_2
tatatataaaatgtttcacattcacttttacatcatgcagcagataaataagctatattgtaaagcttgaagcaggtggattgcaaaagagacaacagcttggaatcttggaaaactgaaaaaacaaaggttactgccacgtccttagaaaaataggcttctaatttccagcatcaagtgagatttgttaattgctcccagtttggatcatctggttgagcagagaatgctgctgccaatctgccatcatttgtgcattttatggaaggccttcaacccataaaaaagttggrgtgatgyttttccagcccatggaataaatgggaataatggaataaattgcagtatgtggaataaaatgttgggtatgactgtgagtgggtgtcagagcagagaagagatggcagtgaggtattgatatttgaaaaaatgttgattttttttaagattttttttaaaggggaggggaatacctcaaaccatggcatacaagctggtactgaaacccatcagaatttgctttgtcagctattaggtgttaatagtggaaatgccatgtgtattagcactgcattcttcttagcagtcttctctgtttgc

SEQ ID NO: 82739 - DNA, 554 bp, Chicken  19866894377859_1
  misc_feature (1)..(67): n is any nucleotide
nnnnnnnnnnnnnnnnnnnnnnnnnnnnnnnnnnnnnnnnnnnnnnnnnnnnnnnnnnnnnnnnnnnaaactaaattaaaattaaagctcccttattaaatttctaagtgttatgtgatgctgccccatcatttttaacccaccagcatattacttttatgagagacaagaggaggaaaaaatgagctgaatccaagtctttgtttggctttgttatgtgcaatttgtttttagcattctgagcatttaaccttgaaaaatagtgttgttttgccactgcgctttccgattgttactctsaaggcatctcagtggcatctttataaatctgctgtagctggtaaatatttcttgcagtccagtgttgaagactgaaaaacccagatcactttcagctgtcaggcaattaacgtaatccagaggaaattaaaggtgtgcacaactgggactgcttttaataacagagggttcctgactcacacttctcagtggaagatggggcagtggaatggtagaaaccactaaaataaatcactaaagtagaccttgagagt

SEQ ID NO: 82740 - DNA, 600 bp, Chicken  19866894377863_1
aaattgttttggttcctcagctaaaaagccagtttgtgccaaaaaactgtatgctcaactttcagtctgaagtgactgtttaggcttactttgaaaatgtaggaagctaaggaagctgtcaagctgttagctagacttccctgagcagatgagaagggttagtttgctagactgctatgctgataagaaagtgttgctatttgtttgtaaaatctccttctgcagtgtaataacgaaaccttccctcctgatctctgaggtgagggctcagctgccgagcacccgcagcacaccaagcayggcgctcggcttgggtgcacctcctggaggccgtttcttacggacttgcaatagaagaaaaatgctgagaatttcatgcacggctcaaaaaaaataatttgagttcctattttctcaagccaggtttcattttagagtccaaaacaatgacctcagtaatcaagattactgaaaacaaagtcacttgcttccttcgtgctcctcttccacgtgtgtcatttctactgcgtttgggaatcagtgctggcctggaaccgggacaactggttatgaaactcacaactgaaatgacaagcctag

SEQ ID NO: 82741 - DNA, 599 bp, Chicken  19866894377864_1
  misc_feature (1)..(49): n is any nucleotide
nnnnnnnnnnnnnnnnnnnnnnnnnnnnnnnnnnnnnnnnnnnnnnnnncccatttactgaagttttcaggagagagacatatttcctgccgtgcatgggcttctatctgttgggataagatgatggtaaagacaaacttcagtttaggaccttagtaatgcctggggaaaataaaggacatgtcaattcctgaagctggtttaacacaagagaagggagctagtctctttgattaaaagatcctcttaatgagcgggcacaggcttggctgtctaactaggcaggggtgtatgtatgtsgtttgtgtttaggtggaagtccggtgtatacaggtctttgggacttgaaaccagacagcactgatgctgcagctggtaattcaggcacgtaataacctaccttactctgcagacaggttactggagggcaagtatgaatatcatttcagcggtgcctttgcctactgtatgtagaacagtgggatggctcttgctgaggtgctttttggtctgtatagagtagttyttcccactctgtagtgcttggagccattggagcagtgactttctggctgctgaggaagccagggggtgtgtag

SEQ ID NO: 82742 - DNA, 600 bp, Chicken  19866894377864_2
tctttgattaaaagatcctcttaatgagcgggcacaggcttggctgtctaactaggcaggggtgtatgtatgtsgtttgtgtttaggtggaagtccggtgtatacaggtctttgggacttgaaaccagacagcactgatgctgcagctggtaattcaggcacgtaataacctaccttactctgcagacaggttactggagggcaagtatgaatatcatttcagcggtgcctttgcctactgtatgtagaacagtgggatggctcttgctgaggtgctttttggtctgtatagagtagttyttcccactctgtagtgcttggagccattggagcagtgactttctggctgctgaggaagccagggggtgtgtaggtggctgacagggcattacaggtgcacccaacctgcagcttrctgaaagaggagccatgtgcagcaccgtcgttagcccatgtgcaggattgcttttgggcaccccacctctgcagagtgctgatgctggagcactcacactacgtgccccaggacatctcctggagataccagcaacagccctttgctctggtaggcagctttgcagctactctggctggttctaa

SEQ ID NO: 82743 - DNA, 600 bp, Chicken  19866894377864_3
gacttgaaaccagacagcactgatgctgcagctggtaattcaggcacgtaataacctaccttactctgcagacaggttactggagggcaagtatgaatatcatttcagcggtgcctttgcctactgtatgtagaacagtgggatggctcttgctgaggtgctttttggtctgtatagagtagttyttcccactctgtagtgcttggagccattggagcagtgactttctggctgctgaggaagccagggggtgtgtaggtggctgacagggcattacaggtgcacccaacctgcagcttrctgaaagaggagccatgtgcagcaccgtcgttagcccatgtgcaggattgcttttgggcaccccacctctgcagagtgctgatgctggagcactcacactacgtgccccaggacatctcctggagataccagcaacagccctttgctctggtaggcagctttgcagctactctggctggttctaagaccgtttcttgttactagcccagggtcagaaggcacatctgctgcatgggctgggctgtgaacactgcagtgtaatcagtccacgagctactagggaatgggcactcggaaaag

SEQ ID NO: 82744 - DNA, 600 bp, Chicken  19866894377864_4
gagtgctgatgctggagcactcacactacgtgccccaggacatctcctggagataccagcaacagccctttgctctggtaggcagctttgcagctactctggctggttctaagaccgtttcttgttactagcccagggtcagaaggcacatctgctgcatgggctgggctgtgaacactgcagtgtaatcagtccacgagctactagggaatgggcactcggaaaaggcattacagggtagtgggcaaatgcataccagctacttcttggtaagtgcccaacatgtgctcctacacatgrtggatggaaagtacctgaagggagtttacttttcaatgaaagagttggctgtgaactgctatttagcgtgggatgaaacacatacgtggctaccacagagcagcagctaatgtaggagtcacacccttgcttgccctctgttcaattgttgggtccctgagaaamactctgcatcacacgggaatctgcttcgtggcaaatgctgaatcagaactcgtgttcagattagatgtggtcaaaggtgctggctcaggctaagttacacagcagctcagcaattaaatggcagaactgaaacct

SEQ ID NO: 82745 - DNA, 599 bp, Chicken  19866894377864_5
gggctgtgaacactgcagtgtaatcagtccacgagctactagggaatgggcactcggaaaaggcattacagggtagtgggcaaatgcataccagctacttcttggtaagtgcccaacatgtgctcctacacatgrtggatggaaagtacctgaagggagtttacttttcaatgaaagagttggctgtgaactgctatttagcgtgggatgaaacacatacgtggctaccacagagcagcagctaatgtaggagtcacacccttgcttgccctctgttcaattgttgggtccctgagaaamactctgcatcacacgggaatctgcttcgtggcaaatgctgaatcagaactcgtgttcagattagatgtggtcaaaggtgctggctcaggctaagttacacagcagctcagcaattaaatggcagaactgaaacctgctgggcagcacatcacgtctccaggctcaggtccctggcccttctgttgtcctctgctgcaaactgccagctctggaggcttccctccagctcacagcaaggggcaaccaggggaggtgaaggaaaagtgtggagatgctccgtgctgtcttttaagcacaat

SEQ ID NO: 82746 - DNA, 600 bp, Chicken  19866894377867_1
agctggagaaaagctatcagaaaggtccagtggccttccaagtctggctggaaatcggaacagattgcttgtgacacctgtctgcacagcctccaaaaacagaggagagattatctacatcacaaaacaagatgtactccagtcttacgctccacaagaaaagctaatcttcattaattagttgccatagaaactctcagccctggggaaactatgaatggtacatcaagatcaaatacaaattacttggagcaaatgccctcatcatgatttggacaaacaaacagaaaggcagaagtwttcctatttcacgaagttttacagaagaacaaatgtcacagtggttcaaaatggaaaaaaaaataaacgaatgaatgagacaaaaatacattgcaaatcacagctattacagctccttccagcttcctggcaaagacctgtgagatggacgcctgaacgataaacaacctaaacagcacactagcagtagcaagaatgaaacagcagcccagaaagcaggtgtgaaggcccgtgctcttaccgcctgctgcatgtgagaggccaggtgtgacggcagaacaccggggatcttagcacact

SEQ ID NO: 82747 - DNA, 600 bp, Chicken  19866894377873_1
aacaaacatacaacagggaaatccttctgaaaatgttattgttatacaggcctgattctgatctcagctcttcaagtatctattcagaataactccgcagcagtaagtggatttcttttgggtcatggttggactggatgatcttggaggtcttttccaacctctatgatttacataggcgctgctgagaaaggatttgctctatagtggccttttaaagcatactcttacccaaaagatagtaaagaattgtgaagaggtgtagaggttctatctgatgtagttgatgctcaggtatayatttttttaaagaagctggaaaactgcagttctgatggtcttagaaaaaaatatatattcattagctcaaagcaattaacatctgcttacactttcatttgaaatctaagcaaaagaaaatcaattgaaaygaatgtctgaaatcttttgtggagctctgttcacaaaatgaaaggtttctgagcagtccgttatatacacattcaaaatattttcctagagattaaaaatgatgcttgtaagtgattaaactgtgtagataactaatgagacgtgtgggggtttatttcttgtagacga

SEQ ID NO: 82748 - DNA, 600 bp, Chicken  19866894377873_2
gactggatgatcttggaggtcttttccaacctctatgatttacataggcgctgctgagaaaggatttgctctatagtggccttttaaagcatactcttacccaaaagatagtaaagaattgtgaagaggtgtagaggttctatctgatgtagttgatgctcaggtatayatttttttaaagaagctggaaaactgcagttctgatggtcttagaaaaaaatatatattcattagctcaaagcaattaacatctgcttacactttcatttgaaatctaagcaaaagaaaatcaattgaaaygaatgtctgaaatcttttgtggagctctgttcacaaaatgaaaggtttctgagcagtccgttatatacacattcaaaatattttcctagagattaaaaatgatgcttgtaagtgattaaactgtgtagataactaatgagacgtgtgggggtttatttcttgtagacgaaaacatgcagctgtttaaaaaaaaaaaatcaatacaagaaatgttttaccataattcctgcaggtaaatgggtattaataaagtggaaacttcagtttgcttgagattaaaaaaaaacaacaaaaaaccaa

SEQ ID NO: 82749 - DNA, 600 bp, Chicken  19866894377881_1
tctcctgccactctgattttcaattgctgctgctgcagtgctgcccattgccaccgatgagttctccagctcatccttgagcttccctggatgaaggtctgaaaaaaaaagcccttgtgaggttgtttgcctcactttagtattctcctcaacggtctttctggctttgcttctgaagtgattgggaattcagaaacgctttcagctgtccacacccccatgaggagcccagcacttgccatggtcaccgactttctatctggcatggaaagtgacactgcaaagaaaagcaagagcagmaagagctgtggaaaccctgaggagcaccgtgttgctcaggagggattatggcatgtgcatcacctggcctgaggtcgtagaatcatagaatccttagagacagaagggatctttaaaggccatctagtccaactcctctgcaacgaacagagagacaccacatctagatcacattgcccagggcctcgccttgaaagtctccagggatggggcatcaaccacatctctgggcaacctgttccagtgcctcaccaccctcacctgtaaaagattctttccttatatccaacctaaatctac

SEQ ID NO: 82750 - DNA, 600 bp, Chicken  19866894377883_1
tccagttaatcttggacacaaagccctcagtggaatcatcacctagtaagtggctatttcgctaagtgagaggtaagacagagaagccaacaaagcatatttaagaaagggctgtaaaaatacagcaagtacaccaagtacctctagaactgactactggcactgtatttgattgcttacacatatgtgtgcaacaaaaggggagcttgttctgggtgtcagtgctctgggactcggatgcaccccatcagaatgagctgcgggtgacaaggtgtggatgtcctcggaattttctgagasgacaaagagaagagtagcaacacctcttctgtcaccagcatcaaagtggcacaggaaagatgagcactccacagcagcaggtggaatttgtttaaaaatataaataatttgctctttctatctaaataactgtactctttcatgctgttttaaaagatcagcatactgatgtgttgtgcactgtaggatgcttatccacttgaattacaattctggttcccatgttcttgccctcttgaccaggtttttgtaattacctatcccatttgagcagctttagctgccaactcgcagctgctg

SEQ ID NO: 82751 - DNA, 600 bp, Chicken  19866894377893_1
attctgcagataatactgtgtcagtgtgctcttaagtgctgtctgtagcattctgtgttggatttattagaaagttactgtcctttaaaaagttggttgttttttttttctttcttcctttcttcctttcttcctttcttcctttcttcctttcttcctttcttcctttcttcctttcttcctttcttcctttcttcctttcgttctcttagcttgaataggcaataacatatcttagaatacagatactacaaacctttctgttctgcaccagacaaatgacatgttttttcagtaccwattgccttcaagaaggtataaactggaattaaaataatatgaagtaacctctccatcagataaagtcccatacacatattgtttggtctttggtaagatgttaacacttctgatcacaactgagccaatacataaaaagggcttggtttttaacacgtgcatttccactgactgcttgcaggtctgttatgctacgatcagcatcccagaggggtagtgggtgtctgttcttggagacattcaaagtcaggctagatgggggctgtaaacaccctgactgagcattggatgtccctgttt

SEQ ID NO: 82752 - DNA, 599 bp, Chicken  19866894377897_1
  misc_feature (1)..(96): n is any nucleotide
nnnnnnnnnnnnnnnnnnnnnnnnnnnnnnnnnnnnnnnnnnnnnnnnnnnnnnnnnnnnnnnnnnnnnnnnnnnnnnnnnnnnnnnnnnnnnnnntccgaactgcagtactgcaggatggctattgttacaaggcatatatgcaaaaaaaaagtgttatggatcaagtcatgataaagatttttgtagacagaaagtgcttaaatgttactagaaaaaagtatcgctcactttaaaaaacaatgactttttctaatgtgcttgaaattaagaaatacttgcttatttaaaatatggtgkatggtctgggctagagattttggtgttaaaactgaattaacgatttgggtagcctttcagcttcaagaatcttaaaacgttaagtggaatttatgtgcagctgctcaaagtttccttgtgttgttttctttttttctttctaatgcttawtcaaggtggggaatggaaatcaccttgaaataagtttctgtgaaagttctcaggaaggtttttgaaccaagtacaaaagcaaagtaayagctgagcactgacttagcaaagattgatcatgaacaactatagtggttgttttgtccatt

SEQ ID NO: 82753 - DNA, 600 bp, Chicken  19866894377897_2
aaagtgttatggatcaagtcatgataaagatttttgtagacagaaagtgcttaaatgttactagaaaaaagtatcgctcactttaaaaaacaatgactttttctaatgtgcttgaaattaagaaatacttgcttatttaaaatatggtgkatggtctgggctagagattttggtgttaaaactgaattaacgatttgggtagcctttcagcttcaagaatcttaaaacgttaagtggaatttatgtgcagctgctcaaagtttccttgtgttgttttctttttttctttctaatgcttawtcaaggtggggaatggaaatcaccttgaaataagtttctgtgaaagttctcaggaaggtttttgaaccaagtacaaaagcaaagtaayagctgagcactgacttagcaaagattgatcatgaacaactatagtggttgttttgtccattgttttctcaaactttaaaacgtctgctttataactagtgctacaaaaaccacatacatatgctgtcgtctaaattcaactttatatctgttatcaagtggmtccgtctaccctgctatgttcctggtgctgacactaatcttgaaggtggc

SEQ ID NO: 82754 - DNA, 600 bp, Chicken  19866894377897_3
aacaatgactttttctaatgtgcttgaaattaagaaatacttgcttatttaaaatatggtgkatggtctgggctagagattttggtgttaaaactgaattaacgatttgggtagcctttcagcttcaagaatcttaaaacgttaagtggaatttatgtgcagctgctcaaagtttccttgtgttgttttctttttttctttctaatgcttawtcaaggtggggaatggaaatcaccttgaaataagtttctgtgaaagttctcaggaaggtttttgaaccaagtacaaaagcaaagtaayagctgagcactgacttagcaaagattgatcatgaacaactatagtggttgttttgtccattgttttctcaaactttaaaacgtctgctttataactagtgctacaaaaaccacatacatatgctgtcgtctaaattcaactttatatctgttatcaagtggmtccgtctaccctgctatgttcctggtgctgacactaatcttgaaggtggctgcatttattacactacaggcagttgtgctgatgtgtctttcttagtgtctgatgaaaatggggccacacttgccaagtcaaaaagaa

SEQ ID NO: 82755 - DNA, 600 bp, Chicken  19866894377897_4
ctgctcaaagtttccttgtgttgttttctttttttctttctaatgcttawtcaaggtggggaatggaaatcaccttgaaataagtttctgtgaaagttctcaggaaggtttttgaaccaagtacaaaagcaaagtaayagctgagcactgacttagcaaagattgatcatgaacaactatagtggttgttttgtccattgttttctcaaactttaaaacgtctgctttataactagtgctacaaaaaccacatacatatgctgtcgtctaaattcaactttatatctgttatcaagtggmtccgtctaccctgctatgttcctggtgctgacactaatcttgaaggtggctgcatttattacactacaggcagttgtgctgatgtgtctttcttagtgtctgatgaaaatggggccacacttgccaagtcaaaaagaattagttgaatgcattttctttttaggacaaagcagatactaattagtcttatctgtgattttattttattttttccaaagataaaggctgtagccatataaaatgttatcagtagcaaaaaatctttatttttcagaatgcaaatctctaaaaaagaaaatg

SEQ ID NO: 82756 - DNA, 600 bp, Chicken  19866894377898_1
ggatgagtgtgattaatatctcagcttgggatgtaggagatgacaactgctatgatgggcagaattcctgtgtgactgtagagggcttccttactctctctgcgcctcatttctctagctacagctgtattaagggagaaatgctgtgatgaacattgaagcattattccatgtacacactgatgtatcatcaggggtggaaatgaagaacttgtggacaaatgactgagttgcaagacaaatgggacaccaataatggcacttctatcaacatcagtttttagaatgtgagcatttttwaaaaattaaattattcttattgtttttaagactatatcaggttcctattctttactatttctttattatgtgaacaggagacctgaaaagttttctagctgttatttaaaaacagttatatctagtttttttggactcaaaaagtatctggaaacttcagtctatagcatttttctttttcctacagtcttcaaaataagagaatcttaagggatttttatcatgttttccattcacgtgtttttattggaagggcagagatactgaatcctaacaatgatggactgtctccatgtggtt

SEQ ID NO: 82757 - DNA, 600 bp, Chicken  19866894377902_1
aaagttcacagttcacaatttaattattgctctcacctcaagtagctctaaaatcatcagcgctttgagaaccgtacctacacattaaaaatgtgatgagaaagataagaaatttacatttcaaatgagaaataacctgtcctacaattgcttttgcaatcaccttttttcttcctgtcaaaagcctaaaaaaatctttgtgtatgcaatagtttttttttctgtaattaaatagtttaaatataatattctgattaatcacagacattttaagaaagcaacactgagtttgttaagaawgatgtacaatttgatatgtgtttgtgcaagtaatggtaatcgtatttccaatgatgccaaagaagaaacaatagtaatttaagaagaacaaaaaaatcatatattgtatgactgtttttttttttcttttgccttcaatttagctgcatgaaacaaaaatcagaactaaatcctttaaacaaacaagcaaacaaacaaacaaacaaacaaaaatcacataaccagaatttgaaagtatattgatttcaaactatatttcttcttcagaatcatctttacaattcatctcagtaggagaga

SEQ ID NO: 82758 - DNA, 600 bp, Chicken  19866894377903_1
tccgtgagcaggcagaagcaagctctgggagcagcagatacgtcacatccagggttacatggggacaatgaacacattagaaacatccctgctacccacaaaagacacctccatagcatgagttatggttataaagccaactggacctctgcaccacaagcaacatctgcaggctaggtgctcactgtccgcagctgtgctctcatagttcacctgtaggcttcttccccactcacaccccaaagctcatggtagatttactgttgggatgatgtagctcacatgtatgcatacctcacmttgattaataacctattcactcacctgttgatggttctcgtcaccctcagctctgtccctcacctctttaacctcaggacctgatgcaaagcactgggaagacaatacgactgtgttctccctctcagcatggactgggagctttgggaaactcttctgatctctactaaaaaytcacttyatcatcctcccagttaccactgcctccktgctcacctggtgtatgcttactgatgccagcccaatgaaacaaacatctccacgtgcccagatcttggatccccaggacaaagatgtggc

SEQ ID NO: 82759 - DNA, 600 bp, Chicken  19866894377903_2
taggtgctcactgtccgcagctgtgctctcatagttcacctgtaggcttcttccccactcacaccccaaagctcatggtagatttactgttgggatgatgtagctcacatgtatgcatacctcacmttgattaataacctattcactcacctgttgatggttctcgtcaccctcagctctgtccctcacctctttaacctcaggacctgatgcaaagcactgggaagacaatacgactgtgttctccctctcagcatggactgggagctttgggaaactcttctgatctctactaaaaaytcacttyatcatcctcccagttaccactgcctccktgctcacctggtgtatgcttactgatgccagcccaatgaaacaaacatctccacgtgcccagatcttggatccccaggacaaagatgtggctctacaaacatagcttcagctaccacctctccaaaacaagaaaatgctttgtttggtctgcagcacaggaagtaaatggacagagatctcactgatgttattaacacgggaacaacacaccaggtaggatgttaaaccccaggctttctggacttggtaggggaaaaaggagtg

SEQ ID NO: 82760 - DNA, 600 bp, Chicken  19866894377903_3
tcactgtccgcagctgtgctctcatagttcacctgtaggcttcttccccactcacaccccaaagctcatggtagatttactgttgggatgatgtagctcacatgtatgcatacctcacmttgattaataacctattcactcacctgttgatggttctcgtcaccctcagctctgtccctcacctctttaacctcaggacctgatgcaaagcactgggaagacaatacgactgtgttctccctctcagcatggactgggagctttgggaaactcttctgatctctactaaaaaytcacttyatcatcctcccagttaccactgcctccktgctcacctggtgtatgcttactgatgccagcccaatgaaacaaacatctccacgtgcccagatcttggatccccaggacaaagatgtggctctacaaacatagcttcagctaccacctctccaaaacaagaaaatgctttgtttggtctgcagcacaggaagtaaatggacagagatctcactgatgttattaacacgggaacaacacaccaggtaggatgttaaaccccaggctttctggacttggtaggggaaaaaggagtgcaaatgc

SEQ ID NO: 82761 - DNA, 600 bp, Chicken  19866894377903_4
tcacctgtaggcttcttccccactcacaccccaaagctcatggtagatttactgttgggatgatgtagctcacatgtatgcatacctcacmttgattaataacctattcactcacctgttgatggttctcgtcaccctcagctctgtccctcacctctttaacctcaggacctgatgcaaagcactgggaagacaatacgactgtgttctccctctcagcatggactgggagctttgggaaactcttctgatctctactaaaaaytcacttyatcatcctcccagttaccactgcctccktgctcacctggtgtatgcttactgatgccagcccaatgaaacaaacatctccacgtgcccagatcttggatccccaggacaaagatgtggctctacaaacatagcttcagctaccacctctccaaaacaagaaaatgctttgtttggtctgcagcacaggaagtaaatggacagagatctcactgatgttattaacacgggaacaacacaccaggtaggatgttaaaccccaggctttctggacttggtaggggaaaaaggagtgcaaatgccagcccacagcctctgtggcaccctcct

SEQ ID NO: 82762 - DNA, 600 bp, Chicken  19866894377926_1
tgaacagttaaatcttcctttgggaaaaatattgccacctgggaaatctttgaggaaatgaagccaatttagattaaattgcttggaaggattatctgaaaataaggcatcataacaagagaatggaatatatacaacttcaacaatttctgagaaaacacagacattacttgtactgtctaattctatttttttttttttttaatttagtctcatgcttttaaagcagattagaaattctgacttctgctctaactggaataaactcagattgagagacttgggcaaaagataggaaarggtaaggcctgccgttgtccagtttactctgttagtaccttcccacagcatctatgagctgcctttggtgctttgtgtaatgaactttccactaagctgtgatatatattatgttttttatattttattgacatactgtattatttgaagtagtttcaatttctgtggtatcctaaaatcatggaaatagaaagtatttcataacagccacattcgtcacttacattaattatttagacttcttatctgtcatcagttcaatgatgaaaaaaaaaatcaagcaaaggatttctgtggtga

SEQ ID NO: 82763 - DNA, 600 bp, Chicken  19866894377928_1
ttctctagttaagagttctgccaacatcatccacaactcatacctgtgttctctgtggacttgtctatatcactcaaagttttactggaataagaggatgcaaccataggtagatcttgttctttacaaaggttcagatgctcttccatcttgaaaatgccccttcctttccttgttagatgttttacatatatcacattaactgattaaagagtagtagacgcgacacggtgcataagacagattggtgtacaggaggcactgagaaagaattccaaccaactccccgccacgcaagcragccttcagaaaggacagaaaagttgcaccatacctagttcagcacattcattttcaacctctttcccagcgccttccaaaattgctttagagacaccttaagtgagaagaagaatacgattccacacttagaactgttaattccattaaagaagtcctccctaaggcagaatcagatgctccatactctctcatttttggtaaaagcacaggttataattggatagtgttgtttaataggcttatgcttttcaagtcaaaaaagacatcttgagaaacctaaacagtttcacggaggta

SEQ ID NO: 82764 - DNA, 600 bp, Chicken  19866894377928_2
gaaacctaaacagtttcacggaggtaaaaaccaccataaggttcgtctcctttaatctaagagatgttctgtgaaaatactctattgaaaagttattaatttcacttttctgcaagtcttaaacgcattatccagtagcacagaataacaagaaagcttcccactcaccttacctagtgctcccaaccacatacactctttccccacgtaataccagctgaagtacctgttttgaggttgaaagcttggtttgatatgtttacaatgacatctccagtttccttggtaatatcaccagcrgccacctggaacgtgatggagccaattctcatctcatatacatcccgtgctgggtttgaaatgggaccaaagaaagctgcaggacagaaatgcagacactgagcagagaagcattcrtgggtataatgcctgcagagaccacagttcgtctctggactctacctgtgagaacactgcccacatcgttaaatgaaaatcattccttctcatgggagcctcagaccaatcttcacttactcccatcattgctatttatgctgaaatggtargaaaaaacaatcacattttaccacactcctg

SEQ ID NO: 82765 - DNA, 572 bp, Chicken  19866894377928_3
cttaaacgcattatccagtagcacagaataacaagaaagcttcccactcaccttacctagtgctcccaaccacatacactctttccccacgtaataccagctgaagtacctgttttgaggttgaaagcttggtttgatatgtttacaatgacatctccagtttccttggtaatatcaccagcrgccacctggaacgtgatggagccaattctcatctcatatacatcccgtgctgggtttgaaatgggaccaaagaaagctgcaggacagaaatgcagacactgagcagagaagcattcrtgggtataatgcctgcagagaccacagttcgtctctggactctacctgtgagaacactgcccacatcgttaaatgaaaatcattccttctcatgggagcctcagaccaatcttcacttactcccatcattgctatttatgctgaaatggtargaaaaaacaatcacattttaccacactcctgctacagagatgtttctttgcacaatctatctgtatcagcctttatgaagcatggagctatgacagcagcaaactttgcaagtcttgctc

SEQ ID NO: 82766 - DNA, 420 bp, Chicken  19866894377928_4
atctccagtttccttggtaatatcaccagcrgccacctggaacgtgatggagccaattctcatctcatatacatcccgtgctgggtttgaaatgggaccaaagaaagctgcaggacagaaatgcagacactgagcagagaagcattcrtgggtataatgcctgcagagaccacagttcgtctctggactctacctgtgagaacactgcccacatcgttaaatgaaaatcattccttctcatgggagcctcagaccaatcttcacttactcccatcattgctatttatgctgaaatggtargaaaaaacaatcacattttaccacactcctgctacagagatgtttctttgcacaatctatctgtatcagcctttatgaagcatggagctatgacagcagcaaactttgcaagtcttgctc

SEQ ID NO: 82767 - DNA, 599 bp, Chicken  19866894377933_1
  misc_feature (1)..(75): n is any nucleotide
nnnnnnnnnnnnnnnnnnnnnnnnnnnnnnnnnnnnnnnnnnnnnnnnnnnnnnnnnnnnnnnnnnnnnnnnnnnaccggctggcccaatttctgcaagctaatagcacacagagcgttctttcagcttgtgccatcgtggcatcagagcactttgccatgttaatggcaggatgttaatttggtggacaggacagagagccacaggggctgtgctgaggatggaatgcagggcacaagctgaatccagcagccaaaggcacaaagtaaaggaggggtggaggatgctgctctcatctayttcgtgtttctgtaacaagctctatagtggcttccaggatgcakctgggcacccctggtgtgtctgaaaccacactgcagctgattgctgagcaaacccttccttcttctcccacaaaaccactctcagcagcaagaaggctgatccccctccccttgctgtgcctagcaaacagtccagagaagggctgcaaagatgttcagtccatggcaggggttgggaccaggaggcctttaaggtcccttccaacccaaccattctatgactgtgatttgccgaggaggtagcagagtgctact

SEQ ID NO: 82768 - DNA, 599 bp, Chicken  19866894377933_2
  misc_feature (1)..(31): n is any nucleotide
nnnnnnnnnnnnnnnnnnnnnnnnnnnnnnnaccggctggcccaatttctgcaagctaatagcacacagagcgttctttcagcttgtgccatcgtggcatcagagcactttgccatgttaatggcaggatgttaatttggtggacaggacagagagccacaggggctgtgctgaggatggaatgcagggcacaagctgaatccagcagccaaaggcacaaagtaaaggaggggtggaggatgctgctctcatctayttcgtgtttctgtaacaagctctatagtggcttccaggatgcakctgggcacccctggtgtgtctgaaaccacactgcagctgattgctgagcaaacccttccttcttctcccacaaaaccactctcagcagcaagaaggctgatccccctccccttgctgtgcctagcaaacagtccagagaagggctgcaaagatgttcagtccatggcaggggttgggaccaggaggcctttaaggtcccttccaacccaaccattctatgactgtgatttgccgaggaggtagcagagtgctacttccagcaccagttctgtgtcctctgccagacatgaaggaggggt

SEQ ID NO: 82769 - DNA, 600 bp, Chicken  19866894377935_1
ccgatgcacctcattcagcgggcagaatgcagcccagtctcacttggtgcacttgggatgttgtctctcgcgcctcagtcacactgcagcaggcagtcttaccaggcaggaggaaaaggattagagagcttttgaaaataaggcagataatggaagaaaatctccccgtataataacaaaatctttcgactgaggaacagccaggcaagcggcgagcactgagcgcagagcgataagcagacactgctggggagcacaaaacacagggattctgtgcctggctaagcacaaagggagccrggatggatgcgcccgggctcgcgtttccctggggagagagaaggagcatcgtccccgtgctgtgccagagcaaggaatcaattaatgagggcgtctgaaggcagtattccagagccagataggagccatcccatgtttcgctaagagatgaaaggacccgagcggaatgatgtgaaatcattttaagtacaaaaggcccagaagacaaattatttcctagattaaaaaacaaataaataaaattaaaagaactctggtgggaatgggctgcagagacacgagaagtgacttcacttttaa

SEQ ID NO: 82770 - DNA, 600 bp, Chicken  19866894377937_1
gctgtatcctcttctacatagcactatatttatcttaaccacatccacctcttgggcattactactttttgctgataccaatcacacatgagtgtgttcagagacaatactagcagcctaggataagtgtacagtgttaaacaaaactaagatgatcagaaaaaaaacaactaaaaaaaccagcagttaaagatccaaacggagggacattcagagaactctcccatcagaaagtagaatgtgtgctcaaatgagaacagaaagaaaacctggtcacttctgagaattgaaactgtagcrtagcaagaaaagaagaacaactatctaatagaatataagcgtttcacctctctcaaacacatctamagcagctcactgcctgcaatgagttggtaggtaatcatagaatggcttgggttggaaggatcaatctgacatctctttagtgtttgctaacagtcagaagacaaatacttttacacattatttcaaaagggagagtgaasgggactgtatggttcacccacatctgtgttactgtgagcagttctggtcctcctagtcttgaaattatgtagaagtgcaaaggagacaagaatt

SEQ ID NO: 82771 - DNA, 600 bp, Chicken  19866894377937_2
ttttgctgataccaatcacacatgagtgtgttcagagacaatactagcagcctaggataagtgtacagtgttaaacaaaactaagatgatcagaaaaaaaacaactaaaaaaaccagcagttaaagatccaaacggagggacattcagagaactctcccatcagaaagtagaatgtgtgctcaaatgagaacagaaagaaaacctggtcacttctgagaattgaaactgtagcrtagcaagaaaagaagaacaactatctaatagaatataagcgtttcacctctctcaaacacatctamagcagctcactgcctgcaatgagttggtaggtaatcatagaatggcttgggttggaaggatcaatctgacatctctttagtgtttgctaacagtcagaagacaaatacttttacacattatttcaaaagggagagtgaasgggactgtatggttcacccacatctgtgttactgtgagcagttctggtcctcctagtcttgaaattatgtagaagtgcaaaggagacaagaattatccaaactatactaagcttctcacacaaagttatattaagcagagtcagttgggaaaaaaagaaa

SEQ ID NO: 82772 - DNA, 600 bp, Chicken  19866894377937_3
acattcagagaactctcccatcagaaagtagaatgtgtgctcaaatgagaacagaaagaaaacctggtcacttctgagaattgaaactgtagcrtagcaagaaaagaagaacaactatctaatagaatataagcgtttcacctctctcaaacacatctamagcagctcactgcctgcaatgagttggtaggtaatcatagaatggcttgggttggaaggatcaatctgacatctctttagtgtttgctaacagtcagaagacaaatacttttacacattatttcaaaagggagagtgaasgggactgtatggttcacccacatctgtgttactgtgagcagttctggtcctcctagtcttgaaattatgtagaagtgcaaaggagacaagaattatccaaactatactaagcttctcacacaaagttatattaagcagagtcagttgggaaaaaaagaaaaaawggactgagggaagaggacataacagacttccaacaagtgaaaaccagtatggagaaggtaactgacaaatggttattcagtcattgagtatttctcacaacacagaaaaaaaggaaacatccaatgaaattatcag

SEQ ID NO: 82773 - DNA, 600 bp, Chicken  19866894377937_4
gctcactgcctgcaatgagttggtaggtaatcatagaatggcttgggttggaaggatcaatctgacatctctttagtgtttgctaacagtcagaagacaaatacttttacacattatttcaaaagggagagtgaasgggactgtatggttcacccacatctgtgttactgtgagcagttctggtcctcctagtcttgaaattatgtagaagtgcaaaggagacaagaattatccaaactatactaagcttctcacacaaagttatattaagcagagtcagttgggaaaaaaagaaaaaawggactgagggaagaggacataacagacttccaacaagtgaaaaccagtatggagaaggtaactgacaaatggttattcagtcattgagtatttctcacaacacagaaaaaaaggaaacatccaatgaaattatcaggtaaacaatatttaaaaagaaaggaaatcatcttaagcaaaacattcagcaatgctgtgggacatattgtcacaagcctcataggattcaatattgtagttcagaaaggaactgcaaaatttatggcttttatgctcactggtctcaaaccaagctctggctta

SEQ ID NO: 82774 - DNA, 600 bp, Chicken  19866894377958_1
tagtaaacttgtgaagattagatatatgtgaacagagatgtaagggttgccgaatgcaaaagattgacacatctttaaaatatacttgaattttgtggagtatggaatgcaaatttgtattaaagtttctatgaaaactgggcatgtcccatcattaacaaaatttaagttgagctgtttattgatgaaaagtgcagaccactcattttattctcatgaaaggaagtgttattgccaatacccttgtggaaatatatgttaagaccataagattttcatatgcatttattccaagtgaartttatttccttgaaaggaaatctgtattcttattcttattcttatttaccctgtgtgggccttaatactgccatattctaaatgtcactgctgcagctacagaggttatggatgtgaacgtgactgagggcatggatgaaaattaaacagtgaaattatccagcaaagcatcataggaaagacagctttgtttcatttgcagaaagaggaatggaaggacagaaagtgccagagttatgaactgatcaatgagggtaaatgttgccagagtacttcatgctgttgcatattcaaaacaag

SEQ ID NO: 82775 - DNA, 600 bp, Chicken  19866894377962_1
actgagattcttttctcgtgaatgtaactttcatgccatgttacatatcctgattttccatcctgtgactttttcctgcaaaacactcacatgctgtaggcagctatactcagccagtccaccagtcttaccaagacttaaggtacgatgcttgcagaacaccacacctggttccaggtgcagaaggctttcattcctcatggtgaaaaaaacacaaacaaacctaaaagtttactacagaaagtggaccttctgcataacaataggacactattaggttagaaatctttgggaggtgaytttcctgctcyccacctcccagagacacctgattacaaggcaaatagttggtgagttgraggtgcctgacaatggctctttttaattagccctgagctcaaacatccatgttccaaagtaagcatctgaacagcccaggtaggccagcttcaatgtttgttctaatcgaaactcatcatgcttgaattcccacaaaagcttttgagaaattatctcatgtgtccgaaataatttagctgggaaaactcacttttccattctctaattttgagtatgtacttacagtaatttattctggga

SEQ ID NO: 82776 - DNA, 600 bp, Chicken  19866894377962_2
tttctcgtgaatgtaactttcatgccatgttacatatcctgattttccatcctgtgactttttcctgcaaaacactcacatgctgtaggcagctatactcagccagtccaccagtcttaccaagacttaaggtacgatgcttgcagaacaccacacctggttccaggtgcagaaggctttcattcctcatggtgaaaaaaacacaaacaaacctaaaagtttactacagaaagtggaccttctgcataacaataggacactattaggttagaaatctttgggaggtgaytttcctgctcyccacctcccagagacacctgattacaaggcaaatagttggtgagttgraggtgcctgacaatggctctttttaattagccctgagctcaaacatccatgttccaaagtaagcatctgaacagcccaggtaggccagcttcaatgtttgttctaatcgaaactcatcatgcttgaattcccacaaaagcttttgagaaattatctcatgtgtccgaaataatttagctgggaaaactcacttttccattctctaattttgagtatgtacttacagtaatttattctgggagttggagagac

SEQ ID NO: 82777 - DNA, 600 bp, Chicken  19866894377962_3
atcctgtgactttttcctgcaaaacactcacatgctgtaggcagctatactcagccagtccaccagtcttaccaagacttaaggtacgatgcttgcagaacaccacacctggttccaggtgcagaaggctttcattcctcatggtgaaaaaaacacaaacaaacctaaaagtttactacagaaagtggaccttctgcataacaataggacactattaggttagaaatctttgggaggtgaytttcctgctcyccacctcccagagacacctgattacaaggcaaatagttggtgagttgraggtgcctgacaatggctctttttaattagccctgagctcaaacatccatgttccaaagtaagcatctgaacagcccaggtaggccagcttcaatgtttgttctaatcgaaactcatcatgcttgaattcccacaaaagcttttgagaaattatctcatgtgtccgaaataatttagctgggaaaactcacttttccattctctaattttgagtatgtacttacagtaatttattctgggagttggagagacatcatactcactttgcttggtggaaataagaaaaaacttacagcttct

SEQ ID NO: 82778 - DNA, 500 bp, Chicken  19866894377989_1
gtgaaaaactttctcctaatatccaacctaaacttcccctgtctgagtttaaaaccatttcccccttgtcctatcactatctatcctcatagacagttgttccccttattgtttatacactccttttaagtactggaagaccaccatgaggtctccctggagccttctcttctccaagctgaacaagcccagtttcctcaacctttcttcataggagaggtgctccagccctctaatcatctttttggccctcctttggactcgttccaagagctccacgcccttcttgtgctggaagcyccaggcctggacgcagtactccatatggggcttcacaagagctgagtagaggggcacagtctcttaggggggggacaatacttactggactctcgtgctactgctgaaatgctgtgttggaaaagaggcagattcagttaagttctttaatatctgtagactggcttaaaaacgataaaacaaaaattggaaaaaacatg

SEQ ID NO: 82779 - DNA, 599 bp, Chicken  19866894377993_1
  misc_feature (1)..(61): n is any nucleotide
nnnnnnnnnnnnnnnnnnnnnnnnnnnnnnnnnnnnnnnnnnnnnnnnnnnnnnnnnnnnncagtgctgcatattctaataatagcatgcattttgaaacataagatggtaaattcatagatgagacagagagtttggcttgttattgtcaggtcaaattccagccattctgctgagaagttaataataaatacaaccaagagacatgcatcgcatcatggttttgatcctactgttgctccctggagatttttccctgtctgaggactgcaggatcagggtctcactttgaatggaatrtaaagtattcagaacatcagtgggctgagaagatggggaggattgagtacacgtgtgcttggtttcatgtgtggatccacagctacctaaggaaaaacacctgccaaaagggtcaaggttgggattcaagcaaacagragcctgtatatgttcctacagaaatgtgttgccataaaatggtgactcccaaaggacttaacgaactccttagacactctgtgcctgataggaagctattcttccccttaaggtttgatgttaggaaaaattctttcttgggaagagtggtgatgcattgg

SEQ ID NO: 82780 - DNA, 600 bp, Chicken  19866894377993_2
cttgttattgtcaggtcaaattccagccattctgctgagaagttaataataaatacaaccaagagacatgcatcgcatcatggttttgatcctactgttgctccctggagatttttccctgtctgaggactgcaggatcagggtctcactttgaatggaatrtaaagtattcagaacatcagtgggctgagaagatggggaggattgagtacacgtgtgcttggtttcatgtgtggatccacagctacctaaggaaaaacacctgccaaaagggtcaaggttgggattcaagcaaacagragcctgtatatgttcctacagaaatgtgttgccataaaatggtgactcccaaaggacttaacgaactccttagacactctgtgcctgataggaagctattcttccccttaaggtttgatgttaggaaaaattctttcttgggaagagtggtgatgcattggcacaggctgcctagggaggtggtggagtcgcagtgcctgcaggtgcttgagaaatgtggctgtgtggcacttgagtacatggtcagtgggcatggtgggttgagttggggtttggtgatctttcgaggtcttttccaac

SEQ ID NO: 82781 - DNA, 600 bp, Chicken  19866894377994_1
gagaggtgagaaacctggctagtagcaaggggtgctacaaagcgtgtgtttgcggtataagtggattatagggggaaagggagaaggcagaagggctgcaggaggaaaaccacggggatgctgagcaaatggcccacactgcagcaccactgctgtttcttatagggtctctttgagctgcaaagagggaaaaggagggatggaggaggctgagcatttggagatagctcaatgagcagccccaggttcaaacagcggagtgagaggagcagctgtgggatggaaaacccaagcaagggrtccccggggctgctgcacacaaacctgcaagtgacaaaggcgtgagcaggctcagtgctcagagagtggggaattgctgtctgtctgcgtctctccctgatttcattgtgttttgtttaattgaattgcacacacacatgcacacaaagccccagtgcgtggtgtgaactctgcaaggaaatgagcagcaagttgaggaggagggaggaaaggggcagaaggagagacctgcagggagggcagtgggctggggtggggggcacagctcagaccttgaggccgtctatcagctctctctac

SEQ ID NO: 82782 - DNA, 600 bp, Chicken  19866894377997_1
cataaagataaagaccagagaacagcttgaaaacatttggcagggaggtgattagatgtctgaagtgcaagctgaaaccagttcgggggatgccccccctttggggtcagaagtttgcagcgaggaagactatgacccttcgtgaggaagactacgagccttcatcatcacgacctactacacacaccgcaagggggagagggactgtatgataatgggctcttgggaatgtagtgaatatgtatctgaattcctgtcaactattcattatgtattagtttgacctatatctataacacratttcttcgaacggtgtgcaagttaggtggaacgatcccccttgcaccagggtgtacgcgcgtcaccaataaacacatacctgctctatatccttactggctatagggtctgatttccacatgtcaaaggggaaatggtttcaaactaaaagacgggagggtagactggatatatggaaaaagggttgttttttttttamaacggggcagtgaatcactggagtgagttgcccagagagaacttaagaacatccagaaaaataagcaggtggtatataaacagtttcttcattcaggata

SEQ ID NO: 82783 - DNA, 600 bp, Chicken  19866894377997_2
gggactgtatgataatgggctcttgggaatgtagtgaatatgtatctgaattcctgtcaactattcattatgtattagtttgacctatatctataacacratttcttcgaacggtgtgcaagttaggtggaacgatcccccttgcaccagggtgtacgcgcgtcaccaataaacacatacctgctctatatccttactggctatagggtctgatttccacatgtcaaaggggaaatggtttcaaactaaaagacgggagggtagactggatatatggaaaaagggttgttttttttttamaacggggcagtgaatcactggagtgagttgcccagagagaacttaagaacatccagaaaaataagcaggtggtatataaacagtttcttcattcaggatactcacttggcacagtattgttgctgctaaaaacttacatgagttcaagcatgaagcagatgaatgtataaaaaaagaaaaacaaaatgaaaaagcagctaaacaaaackaaaaacaaaaacctatgttgtggagcatttcaaaaagatttccatcttgttcggaataagcttattcatctcctgttactgagcactagac

SEQ ID NO: 82784 - DNA, 600 bp, Chicken  19866894377997_3
ctgatttccacatgtcaaaggggaaatggtttcaaactaaaagacgggagggtagactggatatatggaaaaagggttgttttttttttamaacggggcagtgaatcactggagtgagttgcccagagagaacttaagaacatccagaaaaataagcaggtggtatataaacagtttcttcattcaggatactcacttggcacagtattgttgctgctaaaaacttacatgagttcaagcatgaagcagatgaatgtataaaaaaagaaaaacaaaatgaaaaagcagctaaacaaaackaaaaacaaaaacctatgttgtggagcatttcaaaaagatttccatcttgttcggaataagcttattcatctcctgttactgagcactagacagcataagaaactgcaggaggcagcggtataacctcrttgtgttttcttgttcttttcagtatctcacataatgcctgccaatagtcatgctgtggatttggtgtttttccactttttgatgtgagaaactgaggccaagaaagaggaaggtgaaacagtcagtggacattagagacagggacaataaatgttgtctcatgattatctg

SEQ ID NO: 82785 - DNA, 600 bp, Chicken  19866894377997_4
agaacttaagaacatccagaaaaataagcaggtggtatataaacagtttcttcattcaggatactcacttggcacagtattgttgctgctaaaaacttacatgagttcaagcatgaagcagatgaatgtataaaaaaagaaaaacaaaatgaaaaagcagctaaacaaaackaaaaacaaaaacctatgttgtggagcatttcaaaaagatttccatcttgttcggaataagcttattcatctcctgttactgagcactagacagcataagaaactgcaggaggcagcggtataacctcrttgtgttttcttgttcttttcagtatctcacataatgcctgccaatagtcatgctgtggatttggtgtttttccactttttgatgtgagaaactgaggccaagaaagaggaaggtgaaacagtcagtggacattagagacagggacaataaatgttgtctcatgattatctggctgtcatacatgcgcttcatccctgttacagaaagcaagactcacctgttcagcaggtctctgaaggatgattagatacattcagttaaaaaaaataaaaaataaaaaaataataaaaaaacctaaa

SEQ ID NO: 82786 - DNA, 600 bp, Chicken  19866894377998_1
tttgaacgtatttctttaaataaaaatgtagggactctttgtgaatttgtgtgttacatttattttgacttccttagttgttagcagtagcaaacctaagtgtattttgttaagctgcttgttgctttaataacttctgcattggttcacttcatgtgtccctgttccaaatctgagagggggcaggtaaacacttcatcaatatcagattagattgtgtaactgctgaaaaagttttctttcagcctaagggatctgctctgttagttgtcacatgtgtttgtgtgctggagggcaatygggaagacaaaatgtgaaagctgagctcactttttattaattatgtgaactagaccatttgtctaaaataagtgccagatagtccaaagagttcttcagtagtttgctctgcagagtgatagctgttggagttctaatgatcttcagtgaccattcacaggaatcatgcagaaatgcagaaaacattaccatgtgcctattattggtattttatgtctgtttggtttttttattaatgtgtgtggggaggaaaaggaaagcaagctaattagtcttctgtatatgcacagtttatgatta

SEQ ID NO: 82787 - DNA, 599 bp, Chicken  19866894378002_1
  misc_feature (1)..(135): n is any nucleotide
nnnnnnnnnnnnnnnnnnnnnnnnnnnnnnnnnnnnnnnnnnnnnnnnnnnnnnnnnnnnnnnnnnnnnnnnnnnnnnnnnnnnnnnnnnnnnnnnnnnnnnnnnnnnnnnnnnnnnnnnnnnnnnnnnnnnnnncttctggagagctgcaagctctgtgttgtgcagcatctctgttaaggtaccgcccagactatctccacactggttctcatccagaaagatggcagtgctgatgggggacaagctgcctttgtgtccttctccttgaacaaatttactctctctatcacacctcaraagatgatgaaacctctgctcattcataatacagtagccccagccatctatacygtgtgcatttctgtacaccacaaaggccagcacttttcttactgtatggattyggtggtattcttgcacctgggtggtggcaacccccactgtcagtacaagctgggggacaaaaggatagaccacagccctgccaaaaaggacttgggartagtggtgaatgggaagctggatatgtgctagcagtgtgcccttgcagcccagaaagctaactgtaaactgggctgcatggtcagcaggtcagg

SEQ ID NO: 82788 - DNA, 599 bp, Chicken  19866894378002_2
  misc_feature (1)..(81): n is any nucleotide
nnnnnnnnnnnnnnnnnnnnnnnnnnnnnnnnnnnnnnnnnnnnnnnnnnnnnnnnnnnnnnnnnnnnnnnnnnnnnnnnncttctggagagctgcaagctctgtgttgtgcagcatctctgttaaggtaccgcccagactatctccacactggttctcatccagaaagatggcagtgctgatgggggacaagctgcctttgtgtccttctccttgaacaaatttactctctctatcacacctcaraagatgatgaaacctctgctcattcataatacagtagccccagccatctatacygtgtgcatttctgtacaccacaaaggccagcacttttcttactgtatggattyggtggtattcttgcacctgggtggtggcaacccccactgtcagtacaagctgggggacaaaaggatagaccacagccctgccaaaaaggacttgggartagtggtgaatgggaagctggatatgtgctagcagtgtgcccttgcagcccagaaagctaactgtaaactgggctgcatggtcagcaggtcaggggaggtgatcctgcccctctgctctgtgctggtgagacctcacctgaagtattg

SEQ ID NO: 82789 - DNA, 599 bp, Chicken  19866894378002_3
  misc_feature (1)..(28): n is any nucleotide
nnnnnnnnnnnnnnnnnnnnnnnnnnnncttctggagagctgcaagctctgtgttgtgcagcatctctgttaaggtaccgcccagactatctccacactggttctcatccagaaagatggcagtgctgatgggggacaagctgcctttgtgtccttctccttgaacaaatttactctctctatcacacctcaraagatgatgaaacctctgctcattcataatacagtagccccagccatctatacygtgtgcatttctgtacaccacaaaggccagcacttttcttactgtatggattyggtggtattcttgcacctgggtggtggcaacccccactgtcagtacaagctgggggacaaaaggatagaccacagccctgccaaaaaggacttgggartagtggtgaatgggaagctggatatgtgctagcagtgtgcccttgcagcccagaaagctaactgtaaactgggctgcatggtcagcaggtcaggggaggtgatcctgcccctctgctctgtgctggtgagacctcacctgaagtattgtatccagatgtggacatggtacaggatagacatggacatgccggagtgcatca

SEQ ID NO: 82790 - DNA, 600 bp, Chicken  19866894378002_4
tggttctcatccagaaagatggcagtgctgatgggggacaagctgcctttgtgtccttctccttgaacaaatttactctctctatcacacctcaraagatgatgaaacctctgctcattcataatacagtagccccagccatctatacygtgtgcatttctgtacaccacaaaggccagcacttttcttactgtatggattyggtggtattcttgcacctgggtggtggcaacccccactgtcagtacaagctgggggacaaaaggatagaccacagccctgccaaaaaggacttgggartagtggtgaatgggaagctggatatgtgctagcagtgtgcccttgcagcccagaaagctaactgtaaactgggctgcatggtcagcaggtcaggggaggtgatcctgcccctctgctctgtgctggtgagacctcacctgaagtattgtatccagatgtggacatggtacaggatagacatggacatgccggagtgcatcaagaggatggccacagtaatgatcctaggtttagaatacctccactacaaggatggactgagagagctggggctgctcagcctggagaagagaaggctgc

SEQ ID NO: 82791 - DNA, 600 bp, Chicken  19866894378007_1
caatgagcctaattctgtcaggacttgggggaacctattttacagcatttatctaggtaacctctcttcctcttgcacatgcagaggacagcaaggagatgtggctcccagccatgtactgggataggcttttctagctcacctacgtaaggcactgatggtagcacagccctcatggcagcacagatccatgagaacattgcagctacgtctttccatctgcactgcatgggagggagagcacccacagagagcactgtcagcccagcccgttcctcagcctacacggccgtgggcccragcctcagctcatggcacataccagccacacagcaaggatgtgaagggagtgtttcagtgcacaccgtgccaagagcctgtcagagctgcagctcttggcctttgcgatgtgcccgtggccaacaccgtctgagctcccatgagactttccttcactgatcatttaagcaagtatctggctgaagtcagacagagctgtggccccgtgctttctcctttcagtgccccaccacacaggcagaaattcaggatggtccaccattttagtgataaccttggctcaccatggcagccacggaa

SEQ ID NO: 82792 - DNA, 600 bp, Chicken  19866894378009_1
agctgggaaggtttttcttcctactctttaagagaagcaaagtcagcccccagaatgcttctagctggtgatatggagcagagccaggttgtcttccaggttaggtttgctcccagcagaaagcaaagctctttcagctttcgcctctctgtggcaataagaacacgggtagcaattctaaaagaaggcaaaaggagcacccttcttccctttggaaacaacatctggtgctctcctatggatctatgtgggcccagaaagagtgcactgaagtattcaaagacatgctccattcagaayccaatgcagtctccaatgcaactgattgccattcccaaatgctcttcttgggccaattaccagctggcctgaaagccccaacttcagcatggctacttcaggcttcacgatggaggcaattagcaaaaaattggatgctggctctgttccttgcacttcctcaactgagtcatgctgagagctaccctgrgcagragggcctcagtttctgacctgcacaggggctacaccccaatgcttgtctaattgcctgcttggcaattgcaagctgtgctttgggaggctgtctggccctgtgca

SEQ ID NO: 82793 - DNA, 600 bp, Chicken  19866894378009_2
aaaggagcacccttcttccctttggaaacaacatctggtgctctcctatggatctatgtgggcccagaaagagtgcactgaagtattcaaagacatgctccattcagaayccaatgcagtctccaatgcaactgattgccattcccaaatgctcttcttgggccaattaccagctggcctgaaagccccaacttcagcatggctacttcaggcttcacgatggaggcaattagcaaaaaattggatgctggctctgttccttgcacttcctcaactgagtcatgctgagagctaccctgrgcagragggcctcagtttctgacctgcacaggggctacaccccaatgcttgtctaattgcctgcttggcaattgcaagctgtgctttgggaggctgtctggccctgtgcatgatgcaaagagcaatctcagctgtagccttttgataacagcagtacagacaaatagaactaaaccctatcggggggtatttaccccttcagtctaacagtgttgctctgtacaggcatgatgtgcttaaatacagacggtgagccactattgtacttctgtgcttcagtgaggaagggaaaagcagtac

SEQ ID NO: 82794 - DNA, 600 bp, Chicken  19866894378009_3
agcacccttcttccctttggaaacaacatctggtgctctcctatggatctatgtgggcccagaaagagtgcactgaagtattcaaagacatgctccattcagaayccaatgcagtctccaatgcaactgattgccattcccaaatgctcttcttgggccaattaccagctggcctgaaagccccaacttcagcatggctacttcaggcttcacgatggaggcaattagcaaaaaattggatgctggctctgttccttgcacttcctcaactgagtcatgctgagagctaccctgrgcagragggcctcagtttctgacctgcacaggggctacaccccaatgcttgtctaattgcctgcttggcaattgcaagctgtgctttgggaggctgtctggccctgtgcatgatgcaaagagcaatctcagctgtagccttttgataacagcagtacagacaaatagaactaaaccctatcggggggtatttaccccttcagtctaacagtgttgctctgtacaggcatgatgtgcttaaatacagacggtgagccactattgtacttctgtgcttcagtgaggaagggaaaagcagtacaagca

SEQ ID NO: 82795 - DNA, 600 bp, Chicken  19866894378010_1
tatgatgtttgagcaaaactactgcagctgtattaggctgttctgctaatttcaaatttaaaggtcaaaacagaaagacacctaaaagaatctctcttaccttctccaaggaagcagaaagacagctgaaataaattacactagaattctcctagtcagcgcaatgattttttgaaatccacagcttataaagtaacacaatccatacgtcttcagtacaaagactgaatttgctttccctttgttaagatgactttcaagataacgatagaggtttttgaataatacagttttgcataygtcratttcatgctgaagctttaacttttgattgttaactgaatgagatctgcagcaatgtttgctgtgaaagaaaggatttaaaatagaatctttcctaactacttttaaatgatttagataggatggaaaacttcaccgctcgctttaatttaaaaacatcgctactcatctaccatactaacagcatctctcttcagtaccagaggtggcagtaacaaatcatactgaccaactcattctctgaatacaaacggagggcagtactggggtaagtgagcagtcttacctgaatatgtt

SEQ ID NO: 82796 - DNA, 600 bp, Chicken  19866894378010_2
atgtttgagcaaaactactgcagctgtattaggctgttctgctaatttcaaatttaaaggtcaaaacagaaagacacctaaaagaatctctcttaccttctccaaggaagcagaaagacagctgaaataaattacactagaattctcctagtcagcgcaatgattttttgaaatccacagcttataaagtaacacaatccatacgtcttcagtacaaagactgaatttgctttccctttgttaagatgactttcaagataacgatagaggtttttgaataatacagttttgcataygtcratttcatgctgaagctttaacttttgattgttaactgaatgagatctgcagcaatgtttgctgtgaaagaaaggatttaaaatagaatctttcctaactacttttaaatgatttagataggatggaaaacttcaccgctcgctttaatttaaaaacatcgctactcatctaccatactaacagcatctctcttcagtaccagaggtggcagtaacaaatcatactgaccaactcattctctgaatacaaacggagggcagtactggggtaagtgagcagtcttacctgaatatgttcgtc

SEQ ID NO: 82797 - DNA, 600 bp, Chicken  19866894378011_1
ggttcaattaaaagaaacgctgctctacgaagatatgattcagcatttctttcactgaagtgcagaatattctttaaaataggggataaatggtcgaaaataagctacccaccaggctggattcagtgagtaggcatatccacaaacacacaagcctttgtgtgtatatgagctagccacatccggcctctctcactgataagttgcttgtttaaaaaatgaaatgacataaaaattaaggcccttagctacttctgcctgcagcacatggcttttactgaaggatgtgtttgcacaagmgaggagctttgcctcccacccgtatttcaacaacgcttacaattcagtcacaattcaggacagtctatctgttctctktgcctattccctccggttaaatctccttttatatcccaatgaggaaactgatctgatttctaggagcctcttttaatgaaaactcctaaccgtggtcctagcactagaggtagagtctgaagtttaaaaagaaaaccaaaacagaacaaaaccaacaataaccaaaagaacaacgccatgaggaaaatgtaataaaacatgtaataaaagggagaaaaacaa

SEQ ID NO: 82798 - DNA, 537 bp, Chicken  19866894378011_2
ataggggataaatggtcgaaaataagctacccaccaggctggattcagtgagtaggcatatccacaaacacacaagcctttgtgtgtatatgagctagccacatccggcctctctcactgataagttgcttgtttaaaaaatgaaatgacataaaaattaaggcccttagctacttctgcctgcagcacatggcttttactgaaggatgtgtttgcacaagmgaggagctttgcctcccacccgtatttcaacaacgcttacaattcagtcacaattcaggacagtctatctgttctctktgcctattccctccggttaaatctccttttatatcccaatgaggaaactgatctgatttctaggagcctcttttaatgaaaactcctaaccgtggtcctagcactagaggtagagtctgaagtttaaaaagaaaaccaaaacagaacaaaaccaacaataaccaaaagaacaacgccatgaggaaaatgtaataaaacatgtaataaaagggagaaaaacaagtgaaatcggtgccc

SEQ ID NO: 82799 - DNA, 600 bp, Chicken  19866894378012_1
gacaaaacaacctgctcttttcatttctcatgatttttttcttttattatgatcaacagataccattctggtgctcgcgctggtgaggacagctttttacgctacctgagagtgatcaaactctgcagtggagcaagatgctacacaagatcatgcatgtgtcacccatgtcaaaatactgtcatggtaaggaaaatgcatgtgcctgtgcatataagcacagaataactcaaagcacatctttatttaccctctatacaactgaataaaagcatgctgcttttcaccagtctcatcaaragcataaaatatttcaaactccaggactcctaagaagcttactgatttattcagcagtcatcaggctccagatttacaagcccagtcgagatggctacgattgggatgtacctgctcaaatcccttccccagatgggagaacgaatgcttcccgtgccaagtttcagtctggattgaatttttacagctgggtcgtaaatttgtggattaaaggggttctaatggaaacacagatacagccctaactacagcaacatgaacagcagtgctgcaacactgcgcagacagcccacgctccaa

SEQ ID NO: 82800 - DNA, 600 bp, Chicken  19866894378017_1
gtgaaggccccgtaatccgatcctggtggcagggacacatgaacagaaatggagcagggaagccgcccgataatgcgaagcacggccacccgatacgcctgcgaggccatccctcgagcacggtctggtgcctggccaataaacatctactgaggaggaaacgagagcctggtttcttggggacaggttggtgttcgcagctgtgatgtgctcgtgccctgcctgctgccatccccccggccgtggtcccagtgcactccagctggaggctggtgggctccctctccaccacatggcacrtcctcrgcatccttcaggggatttgggcacctaaaccttcacagaagaaccgcgactgagtccrgagcaactattcctcttctgttgcatctttacctgttttatccaagaaattgagtgggacacggcactccycatgctattgtgaattctgytccctgcactctgcacttttctcccatccttcccatgaggatgagaggctcagrgaaggcttgttcccaagcactgcagttactgcacccttttycccatccctgagagcttgagcatcaccgaagggtgtatccagctgggaaa

SEQ ID NO: 82801 - DNA, 600 bp, Chicken  19866894378017_2
gccccgtaatccgatcctggtggcagggacacatgaacagaaatggagcagggaagccgcccgataatgcgaagcacggccacccgatacgcctgcgaggccatccctcgagcacggtctggtgcctggccaataaacatctactgaggaggaaacgagagcctggtttcttggggacaggttggtgttcgcagctgtgatgtgctcgtgccctgcctgctgccatccccccggccgtggtcccagtgcactccagctggaggctggtgggctccctctccaccacatggcacrtcctcrgcatccttcaggggatttgggcacctaaaccttcacagaagaaccgcgactgagtccrgagcaactattcctcttctgttgcatctttacctgttttatccaagaaattgagtgggacacggcactccycatgctattgtgaattctgytccctgcactctgcacttttctcccatccttcccatgaggatgagaggctcagrgaaggcttgttcccaagcactgcagttactgcacccttttycccatccctgagagcttgagcatcaccgaagggtgtatccagctgggaaaagctta

SEQ ID NO: 82802 - DNA, 600 bp, Chicken  19866894378017_3
gcccgataatgcgaagcacggccacccgatacgcctgcgaggccatccctcgagcacggtctggtgcctggccaataaacatctactgaggaggaaacgagagcctggtttcttggggacaggttggtgttcgcagctgtgatgtgctcgtgccctgcctgctgccatccccccggccgtggtcccagtgcactccagctggaggctggtgggctccctctccaccacatggcacrtcctcrgcatccttcaggggatttgggcacctaaaccttcacagaagaaccgcgactgagtccrgagcaactattcctcttctgttgcatctttacctgttttatccaagaaattgagtgggacacggcactccycatgctattgtgaattctgytccctgcactctgcacttttctcccatccttcccatgaggatgagaggctcagrgaaggcttgttcccaagcactgcagttactgcacccttttycccatccctgagagcttgagcatcaccgaagggtgtatccagctgggaaaagcttaagaccaccagatcctcagtgagctgagacttcagactgactgatggtgaaacaaccta

SEQ ID NO: 82803 - DNA, 600 bp, Chicken  19866894378017_4
ccaataaacatctactgaggaggaaacgagagcctggtttcttggggacaggttggtgttcgcagctgtgatgtgctcgtgccctgcctgctgccatccccccggccgtggtcccagtgcactccagctggaggctggtgggctccctctccaccacatggcacrtcctcrgcatccttcaggggatttgggcacctaaaccttcacagaagaaccgcgactgagtccrgagcaactattcctcttctgttgcatctttacctgttttatccaagaaattgagtgggacacggcactccycatgctattgtgaattctgytccctgcactctgcacttttctcccatccttcccatgaggatgagaggctcagrgaaggcttgttcccaagcactgcagttactgcacccttttycccatccctgagagcttgagcatcaccgaagggtgtatccagctgggaaaagcttaagaccaccagatcctcagtgagctgagacttcagactgactgatggtgaaacaacctatctgagcatccagggggtgaggatggatgtcccagacctactcatgcctgctgcctatgtagtcctcatgg

SEQ ID NO: 82804 - DNA, 600 bp, Chicken  19866894378017_5
aggaaacgagagcctggtttcttggggacaggttggtgttcgcagctgtgatgtgctcgtgccctgcctgctgccatccccccggccgtggtcccagtgcactccagctggaggctggtgggctccctctccaccacatggcacrtcctcrgcatccttcaggggatttgggcacctaaaccttcacagaagaaccgcgactgagtccrgagcaactattcctcttctgttgcatctttacctgttttatccaagaaattgagtgggacacggcactccycatgctattgtgaattctgytccctgcactctgcacttttctcccatccttcccatgaggatgagaggctcagrgaaggcttgttcccaagcactgcagttactgcacccttttycccatccctgagagcttgagcatcaccgaagggtgtatccagctgggaaaagcttaagaccaccagatcctcagtgagctgagacttcagactgactgatggtgaaacaacctatctgagcatccagggggtgaggatggatgtcccagacctactcatgcctgctgcctatgtagtcctcatggcatggggctgaccatccctc

SEQ ID NO: 82805 - DNA, 600 bp, Chicken  19866894378017_6
gctcgtgccctgcctgctgccatccccccggccgtggtcccagtgcactccagctggaggctggtgggctccctctccaccacatggcacrtcctcrgcatccttcaggggatttgggcacctaaaccttcacagaagaaccgcgactgagtccrgagcaactattcctcttctgttgcatctttacctgttttatccaagaaattgagtgggacacggcactccycatgctattgtgaattctgytccctgcactctgcacttttctcccatccttcccatgaggatgagaggctcagrgaaggcttgttcccaagcactgcagttactgcacccttttycccatccctgagagcttgagcatcaccgaagggtgtatccagctgggaaaagcttaagaccaccagatcctcagtgagctgagacttcagactgactgatggtgaaacaacctatctgagcatccagggggtgaggatggatgtcccagacctactcatgcctgctgcctatgtagtcctcatggcatggggctgaccatccctctcccatgccgctatcactggctgtgtaatgggagctactcttgggagctgccct

SEQ ID NO: 82806 - DNA, 600 bp, Chicken  19866894378017_7
agtgcactccagctggaggctggtgggctccctctccaccacatggcacrtcctcrgcatccttcaggggatttgggcacctaaaccttcacagaagaaccgcgactgagtccrgagcaactattcctcttctgttgcatctttacctgttttatccaagaaattgagtgggacacggcactccycatgctattgtgaattctgytccctgcactctgcacttttctcccatccttcccatgaggatgagaggctcagrgaaggcttgttcccaagcactgcagttactgcacccttttycccatccctgagagcttgagcatcaccgaagggtgtatccagctgggaaaagcttaagaccaccagatcctcagtgagctgagacttcagactgactgatggtgaaacaacctatctgagcatccagggggtgaggatggatgtcccagacctactcatgcctgctgcctatgtagtcctcatggcatggggctgaccatccctctcccatgccgctatcactggctgtgtaatgggagctactcttgggagctgccctgtataacccacacagagctctgccaagctgcaaatctcaga

SEQ ID NO: 82807 - DNA, 393 bp, Chicken  19866894378018_1
ggcagagatccctatgtcagctctctgaggaaagaggaagagagaataacatgcgtgaacaggaggtacagaaaagatccttgctcctccttgatctgcagaggttaaatttagtatggaatagcagatgccaaggccaatgttttaggcacaatatatacaaactcagaaatgtgagtaagaaatgtgagcagctgtaccacctctcttagcttctgtgagcaaagtttgcttggtggactcagacaccttagcttttcaagttattattttccaagaaatcaaaatacttccagtgcrggtaatagctcaaggaaatctatttctggtcattttttcttggactagtgatgccatcattgtcactgtgactttgtgcacagcatttctgat

SEQ ID NO: 82808 - DNA, 600 bp, Chicken  19866894378019_1
atttgagttttggtagtaatactgagaagatgcctggttaaagtaaaatggcatactgtctttaatcaagcagttggcattatttctcaattgtcacagtaaatttataaaaatatttgcctcacttagtttacattgacgtttcgaggtatgaaattcattcactgtggcacacaggagggtcccttcagttgtctttctcagtggcaaacaatgaacagggcagaatgaaagctttcagcattagctcattcgttgccattagttgtacttctccctttcttttccttgccatgctartmtactttgaaaggagaggcttgtagggtcgcactatcactgtgcaattatggtactaacacttgtgaagctgttcttcaagcaaattcacaccatcccgcatcactagtcattcgaacgcaagacagtaatgctccctttaaggtaataagtacaaatttgtgagaatatagaagcaagaaagcagtaacttaaagcttctactccattaaacctatatacattactggaaaaaaacaccaccaacaacaaaacacaatctaggctttatatccagttttaccagcttttcacactgtg

SEQ ID NO: 82809 - DNA, 600 bp, Chicken  19866894378019_2
ttgagttttggtagtaatactgagaagatgcctggttaaagtaaaatggcatactgtctttaatcaagcagttggcattatttctcaattgtcacagtaaatttataaaaatatttgcctcacttagtttacattgacgtttcgaggtatgaaattcattcactgtggcacacaggagggtcccttcagttgtctttctcagtggcaaacaatgaacagggcagaatgaaagctttcagcattagctcattcgttgccattagttgtacttctccctttcttttccttgccatgctartmtactttgaaaggagaggcttgtagggtcgcactatcactgtgcaattatggtactaacacttgtgaagctgttcttcaagcaaattcacaccatcccgcatcactagtcattcgaacgcaagacagtaatgctccctttaaggtaataagtacaaatttgtgagaatatagaagcaagaaagcagtaacttaaagcttctactccattaaacctatatacattactggaaaaaaacaccaccaacaacaaaacacaatctaggctttatatccagttttaccagcttttcacactgtgcc

SEQ ID NO: 82810 - DNA, 600 bp, Chicken  19866894378038_1
tcaatttcagctaaatcttacctttcaccagctgtgtcttgtaactattgctatctttaacaaatgcctctgaccccctcatagcaactgtgaaactttctcagcgctcatagaaatcacccacagcttctaatatattgaaacaagcaacacgttccctatactgtctagtccttgagacctaaatgtatcaagtcctgtaacatttttaagcatttcttcttcatctttaatccagaggttgataacttctgcagctatgcatgcagcactaggagcatctgtaagaaagctatcacrggagacctttaatttaggtcattttggtattcataaaacaggtctgatggagctactgggaaaaaaaaaaatcaccacattttgaataatgtgcagattctgtgccaggagataacagtacatatagcagctggaaaagaaaaagtctaaagaacaaggatatgtataaaaactccagagtttctaatgaaaatgataactagtcctaaattactaaattgagagactcatcaaaattccttttgaaggaaaccaaaaggtctcccctgctttcagcgtatgatcacctcatgggtgcac

SEQ ID NO: 82811 - DNA, 599 bp, Chicken  19866894378041_1
  misc_feature (1)..(10): n is any nucleotide
nnnnnnnnnntggaatgtaggatttttgtggatcatcatggatgatttttatttcactgcttcatttattgcagaacttgaaggtactcagtaaatcagacataaaagtacgaagaggaaggagtgtcttgcattttacgcaggtcaaatattattctgaatgactgaacgagagtaatgtctgtgccactgaaatcctgtattgtgttaaccaactagtttaaatctgtcttctcatggaaaggacatctgggatcagttaggggtatactgagcactcagagttggcagagtccttcmaggttttgggcatacaaagcccaaacaatgcaaagagatctcagcaaggagaactatttgatatttttaacggggctctaaagtatgtgaatacgtgctattttaaactcttatctgcctcatctggaaagtgaggataacatgatttccttcctataagttgtgttgtgaagataaactagtatttatgatgttgttagaagctttatcaaggaacattagaaacattccctggaaaaagtaatcactctgtctgcagtgcatgtttgaatggagttcactaaaccaaagcatatggt

SEQ ID NO: 82812 - DNA, 599 bp, Chicken  19866894378049_1
  misc_feature (1)..(53): n is any nucleotide
nnnnnnnnnnnnnnnnnnnnnnnnnnnnnnnnnnnnnnnnnnnnnnnnnnnnntactgagatggggatatccaattccagtcacttgaatggaatgcattaacctttccacacttcatcccagctttcatatgtttatttctatttcctcatccctggggacatatctgccttctgatctcaccctatcaatatttcctttgcctgatatcgctctctttccttattcctgtgttagttcttccccatttcaattgaaggattctcttatccttcacacaaatttaaccacggtgactamggaatacagctgaaatktattagttaagaaaaatgcccttctaagaatgtcctttgatagcaaaaaacattcaaaagctttccttgtagtagcagtccattatctatyagccttcactctcttggcctgccttcacctcattttgtcaaagtaactttcctcagagaaccaccaccctgtacacgtctttcaacttctcttggagatgtatattataaatctgcttactttggctgtaaccaatacagaacctccaaccacatgagtggattctggtatgaatcttgggcacagataat

SEQ ID NO: 82813 - DNA, 599 bp, Chicken  19866894378049_2
  misc_feature (1)..(36): n is any nucleotide
nnnnnnnnnnnnnnnnnnnnnnnnnnnnnnnnnnnntactgagatggggatatccaattccagtcacttgaatggaatgcattaacctttccacacttcatcccagctttcatatgtttatttctatttcctcatccctggggacatatctgccttctgatctcaccctatcaatatttcctttgcctgatatcgctctctttccttattcctgtgttagttcttccccatttcaattgaaggattctcttatccttcacacaaatttaaccacggtgactamggaatacagctgaaatktattagttaagaaaaatgcccttctaagaatgtcctttgatagcaaaaaacattcaaaagctttccttgtagtagcagtccattatctatyagccttcactctcttggcctgccttcacctcattttgtcaaagtaactttcctcagagaaccaccaccctgtacacgtctttcaacttctcttggagatgtatattataaatctgcttactttggctgtaaccaatacagaacctccaaccacatgagtggattctggtatgaatcttgggcacagataatcgttttctgcagctaat

SEQ ID NO: 82814 - DNA, 594 bp, Chicken  19866894378049_3
cacacttcatcccagctttcatatgtttatttctatttcctcatccctggggacatatctgccttctgatctcaccctatcaatatttcctttgcctgatatcgctctctttccttattcctgtgttagttcttccccatttcaattgaaggattctcttatccttcacacaaatttaaccacggtgactamggaatacagctgaaatktattagttaagaaaaatgcccttctaagaatgtcctttgatagcaaaaaacattcaaaagctttccttgtagtagcagtccattatctatyagccttcactctcttggcctgccttcacctcattttgtcaaagtaactttcctcagagaaccaccaccctgtacacgtctttcaacttctcttggagatgtatattataaatctgcttactttggctgtaaccaatacagaacctccaaccacatgagtggattctggtatgaatcttgggcacagataatcgttttctgcagctaattctgctttatttctcctctgttccccagctttctcatctttttctcttgtgattcttggccccaagttctggcagaatctccagtt

SEQ ID NO: 82815 - DNA, 600 bp, Chicken  19866894378050_1
aaattacattgagccattagccaaaaaccattaggcaaaaattccagagtgagcagtggttcacacagtgccatggttttgtgagtcttgacaatgggagaagtgagattcagctctccacctttaagctaccagccctggtagatggcagagctcctggtcaacctgtcatcactgctagtgttaccttcagacaacatgctaatagcctcatcagtctgctggctatcagtggtcgatatcttctttgaatcgtggacgttgctttggtagttcactggtgagggatagtcattgtcrcccactgttgatgaggacatcgattcccagggtatttctctcttctgccatttcaggtccactctccatcctgtccagccatagaaagctaatgtgaagaggaagccttgcatcggattaagaactccctaggaaagagcagtgcaacacaagttacatcagcaaggcttcattctgaattccaacaaaacgttctgcatgcattaacaacttcccttacactgaacaactgctgtctttagaaaaygatatttgcatgcaaataatagtgtacattgttcccactacaaacacaaacaa

SEQ ID NO: 82816 - DNA, 598 bp, Chicken  19866894378050_2
ttgaatcgtggacgttgctttggtagttcactggtgagggatagtcattgtcrcccactgttgatgaggacatcgattcccagggtatttctctcttctgccatttcaggtccactctccatcctgtccagccatagaaagctaatgtgaagaggaagccttgcatcggattaagaactccctaggaaagagcagtgcaacacaagttacatcagcaaggcttcattctgaattccaacaaaacgttctgcatgcattaacaacttcccttacactgaacaactgctgtctttagaaaaygatatttgcatgcaaataatagtgtacattgttcccactacaaacacaaacaaagcagagtgagaaactacaacctgttgtttctgaatgctaaagtcttccttgtgaacagcaggcaccaaatggttttctagcatgaattttagctggtcaacccccaatgcgtttttaacattccttacaagctccacattttttaattcagaaaagcaaatattgcactcttcactagaagccaagtcaaatctgtgagaatagacattagcacatccaggcaaattttttaaaacagcagcaa

SEQ ID NO: 82817 - DNA, 600 bp, Chicken  19866894378057_1
cttttgtcatcctgttattcaccaaacaccaatattaaagctggaaaaggattaatattgaattaaatctttaaggtggtttgttagcccacctgagttgaagtcacatcaaagtttcactgtatcttttgaactatgactgtataggggaaaatgtacctttgggaccatgctgaattcttttacctggtcggttttttcctcagggctgtaacaagtccccagcaaacgtgaaacaatgagagaaaatgacaatttgaattttaaaaattgtctttagtaggaatctttcatagttcrggaaatgttggcaggtatacggttgtctttaagactaaaaggccctgagcactgcatatttgcatttgcaagattttttttttcctgtgaacgctaagcctgttttgtttcattttcaaaataccatggactgtatgctgttaagagaccccttaagacagcactgaacagggtgagtatagttaaactatggtgttttgaggcaaacatgaacgagaatctataggatgtgctatttactcaaaactctaagtgaacttgcaacagtggtcttgatttgtgatggagttcattttgtag

SEQ ID NO: 82818 - DNA, 599 bp, Chicken  19866894378059_1
  misc_feature (1)..(193): n is any nucleotide
nnnnnnnnnnnnnnnnnnnnnnnnnnnnnnnnnnnnnnnnnnnnnnnnnnnnnnnnnnnnnnnnnnnnnnnnnnnnnnnnnnnnnnnnnnnnnnnnnnnnnnnnnnnnnnnnnnnnnnnnnnnnnnnnnnnnnnnnnnnnnnnnnnnnnnnnnnnnnnnnnnnnnnnnnnnnnnnnnnnnnnnnnnnnnnnnntgcatgaaagagtttcaaattggctgccctcacttcatccttaaatatttcaagaggaagccagtgaaactgaagagcttgaaacagccattcaaggaagtacatgsaagctcttagggagaggaaaaggaaaatcagagtacctgtctttaagaagtgagagaaagaggaattaaggaattattgatgagtcaatttttataaaatttcagggaaaaagctggaataagtagttgtaccatttgtaaaaccaaaaagcacaaactgggtgccgggtgaggtagaaaacagaattatggagaaggatgaggggggttgtggtggaaaagtatatgaaggtgagtcagcagtgctcttgcagcaaagtaggctggccctatattgtgctgtacctggaagactacag

SEQ ID NO: 82819 - DNA, 600 bp, Chicken  19866894378059_2
gtacctgtctttaagaagtgagagaaagaggaattaaggaattattgatgagtcaatttttataaaatttcagggaaaaagctggaataagtagttgtaccatttgtaaaaccaaaaagcacaaactgggtgccgggtgaggtagaaaacagaattatggagaaggatgaggggggttgtggtggaaaagtatatgaaggtgagtcagcagtgctcttgcagcaaagtaggctggccctatattgtgctgtacctggaagactacagccagcagctgtagggaagtggtctttcctctcwttggcactcatgagaccacatctggagcastgcccaggctggggatctctggtgctagaaaacaaagacatactagaaggagcccagtgaagagtgagcccaaggtggttgtggggatggtgtgtaggatgtctgaggagaagctgaaagagctaggtgtgctcactctggagaagagaaagcatagggtagagcttcttgtgtcttaatagttactaggtgggaaggtgtagagacaacagagccaggctctagtggagtatgtagtagatggacaagaagcaatggactcaagttgca

SEQ ID NO: 82820 - DNA, 600 bp, Chicken  19866894378059_3
gaattaaggaattattgatgagtcaatttttataaaatttcagggaaaaagctggaataagtagttgtaccatttgtaaaaccaaaaagcacaaactgggtgccgggtgaggtagaaaacagaattatggagaaggatgaggggggttgtggtggaaaagtatatgaaggtgagtcagcagtgctcttgcagcaaagtaggctggccctatattgtgctgtacctggaagactacagccagcagctgtagggaagtggtctttcctctcwttggcactcatgagaccacatctggagcastgcccaggctggggatctctggtgctagaaaacaaagacatactagaaggagcccagtgaagagtgagcccaaggtggttgtggggatggtgtgtaggatgtctgaggagaagctgaaagagctaggtgtgctcactctggagaagagaaagcatagggtagagcttcttgtgtcttaatagttactaggtgggaaggtgtagagacaacagagccaggctctagtggagtatgtagtagatggacaagaagcaatggactcaagttgcagcagggaarattatgattagatacaaggaa

SEQ ID NO: 82821 - DNA, 587 bp, Chicken  19866894378059_4
atgagaccacatctggagcastgcccaggctggggatctctggtgctagaaaacaaagacatactagaaggagcccagtgaagagtgagcccaaggtggttgtggggatggtgtgtaggatgtctgaggagaagctgaaagagctaggtgtgctcactctggagaagagaaagcatagggtagagcttcttgtgtcttaatagttactaggtgggaaggtgtagagacaacagagccaggctctagtggagtatgtagtagatggacaagaagcaatggactcaagttgcagcagggaarattatgattagatacaaggaagayagtttacatcaccgtagtggtcaaacactggaacaggcacccaagtagtcttctgggatctccttccttggaaagattcaacactctggtcaaagacaaataaggcagctgaccacgaggctctggacttccatgctgaaaggggtagtttgattcctcttgtttctgtttgtatgtgtcttagtttattttatcactgagctgagcacagttgggtaccagttttcctacaaataattcagtcttcattttgacctcctttt

SEQ ID NO: 82822 - DNA, 563 bp, Chicken  19866894378059_5
ccaggctggggatctctggtgctagaaaacaaagacatactagaaggagcccagtgaagagtgagcccaaggtggttgtggggatggtgtgtaggatgtctgaggagaagctgaaagagctaggtgtgctcactctggagaagagaaagcatagggtagagcttcttgtgtcttaatagttactaggtgggaaggtgtagagacaacagagccaggctctagtggagtatgtagtagatggacaagaagcaatggactcaagttgcagcagggaarattatgattagatacaaggaagayagtttacatcaccgtagtggtcaaacactggaacaggcacccaagtagtcttctgggatctccttccttggaaagattcaacactctggtcaaagacaaataaggcagctgaccacgaggctctggacttccatgctgaaaggggtagtttgattcctcttgtttctgtttgtatgtgtcttagtttattttatcactgagctgagcacagttgggtaccagttttcctacaaataattcagtcttcattttgacctcctttt

SEQ ID NO: 82823 - DNA, 600 bp, Chicken  19866894378060_1
aaccaccagcagcaaaggtgagagggcagcaagagggccctgggactcatgctggggaggcagctgctggagctgagcacctgcagggatgctgctgccatgcctgctcctcacaaacctcctgagcatcagaaaagaagaaaactctgcaggttttaagaaaagctattggcaagtggcactagaaaaatgaaaaggttccgtataaatagcttattttacaaaattcaacttggtggccttgcagacaggtgggcactaaggacgtcctaacatgcagtgggagctttgctttttttyttttttttaattgyaccttaatgaatccttgcaagacactacagcagcaaaagctggctgaaggaacgtgctgctggcccttgccaagtgcaccgcacacctaccatgtaacagaaaaaaggcagcttcatggcaattacccccggatgatcatttgtaacctcagctattctcataaggcaggctgcttcagctgagcagcacaaaagaggctttgaacgtttgttgttcatttcaacattcttttctccttaaggccatggtcaattgttatctttacggcacgtttctatagtgacc

SEQ ID NO: 82824 - DNA, 600 bp, Chicken  19866894378060_2
aaggtgagagggcagcaagagggccctgggactcatgctggggaggcagctgctggagctgagcacctgcagggatgctgctgccatgcctgctcctcacaaacctcctgagcatcagaaaagaagaaaactctgcaggttttaagaaaagctattggcaagtggcactagaaaaatgaaaaggttccgtataaatagcttattttacaaaattcaacttggtggccttgcagacaggtgggcactaaggacgtcctaacatgcagtgggagctttgctttttttyttttttttaattgyaccttaatgaatccttgcaagacactacagcagcaaaagctggctgaaggaacgtgctgctggcccttgccaagtgcaccgcacacctaccatgtaacagaaaaaaggcagcttcatggcaattacccccggatgatcatttgtaacctcagctattctcataaggcaggctgcttcagctgagcagcacaaaagaggctttgaacgtttgttgttcatttcaacattcttttctccttaaggccatggtcaattgttatctttacggcacgtttctatagtgaccgactgctacagcaa

SEQ ID NO: 82825 - DNA, 600 bp, Chicken  19866894378063_1
accagaataagagaaatgtgttgtggataatcagtccctggtagggacaaagctattgcgctctatggcagtaaaagagtgctgttaagggatgtgaaatagctgagcctaatgccaagacagagcaatgagagcttccttttactgtgtgttctttgttacacttctggtagcactgtgtgcatgaaagagagagtagggtgagaggagccaaacatggctgggagaagaagcaaccgcagaagttctatgcatttaacaatgagggaacagatttgaatctttacgctgacctgacaygtgggttgaaataatttgggaaagtagcctagaagactctgcttagtcctgcagcatatcatgctgaaaattgattacaaatagggcgatcagtggcttttcactttctttaggctgattgcagacagatgtgaagagtatgaacaaaccaaatctcagtcatctgaagtcaaagttatggtgagcactgctcacttacgaatgtagttctacaggtggtcgtggtggtggcagcagtgtgattttgatctctggtacttgtgtagcttgctaaaaatacttttacttgatctttatgct

SEQ ID NO: 82826 - DNA, 599 bp, Chicken  19866894378065_1
  misc_feature (1)..(70): n is any nucleotide
nnnnnnnnnnnnnnnnnnnnnnnnnnnnnnnnnnnnnnnnnnnnnnnnnnnnnnnnnnnnnnnnnnnnnnaaaagcacagaaggagagttcagacagccccagagttgctgatggctattgaaaaatatatcttctttttatgcaacttatagcatggttctcaaagtttactgtttcagatggaacgttttattcaaagtaccataagcaatcttcttttttcggtcagcatatttatttcaagacgcactttcagcatccttgggcttctacagtaaaacagatgtctgagagcatckaaagcattttactgtgcctagtacgaactgaaagaaaagaattccattctgcaaatatattctgaggctgtgaaatctggattttgctctgatagggaataacatgagaacaggctgcgacttgaaagcttcagagttcaaatgcacaaggatccctagttatagtttcatctttcagaagaaatggagctatgtcttgtttttcatgtgaagctggggatatttggacatatgcagagcctggcttacagaggctggctgtggcagtggtctgaggctagattaagtgcaggttagag

SEQ ID NO: 82827 - DNA, 600 bp, Chicken  19866894378067_1
gcttagcatactgaaagcagagtataattaccagtgttctatcaattgaagtttcagcaattattttttttacagcaaggagttcaaagcaaattaatggtgtagagttgaaaagacaattacatttcaaatctggaaataacagttctgtccattaaatattgactgtctttaggctgctttcttgctggagctatgagtttatcctctgagtaaacacatgatgaagacatcgaggacctggagtgcgtccagagaaaaataatgaaggtgatgaggggtctggagtgcaagtcttasgacttcctcagcactggagtggctgatagaactgggattgtttagtctggagaaaaggagcctcaggaaagaccttattgctctctacaactatctgaaaggaggctgtggtgaggctggggtcagctttttctcctgcataactwgtgataggactagagggaaaagcctcaagttgcaccaggggagattcaggtgtgatattaggaaaaatttcttctctgaaagagtggtcaggaactggaacaggctgccaagggaggtggttgaatcaccatccctggaggtgttcaagaaatg

SEQ ID NO: 82828 - DNA, 600 bp, Chicken  19866894378067_2
tctgtccattaaatattgactgtctttaggctgctttcttgctggagctatgagtttatcctctgagtaaacacatgatgaagacatcgaggacctggagtgcgtccagagaaaaataatgaaggtgatgaggggtctggagtgcaagtcttasgacttcctcagcactggagtggctgatagaactgggattgtttagtctggagaaaaggagcctcaggaaagaccttattgctctctacaactatctgaaaggaggctgtggtgaggctggggtcagctttttctcctgcataactwgtgataggactagagggaaaagcctcaagttgcaccaggggagattcaggtgtgatattaggaaaaatttcttctctgaaagagtggtcaggaactggaacaggctgccaagggaggtggttgaatcaccatccctggaggtgttcaagaaatgtttagattgtatactaagggacatggtttagcagggaaatattggcggtaggtggatggttggactggatgatcttggaggtcttttccaaccttggtgattctgtgattttatgaagatgaagccctccttctactgccagaaat

SEQ ID NO: 82829 - DNA, 600 bp, Chicken  19866894378068_1
ctaaaacacacattggtactgaaggctgcagttagattattttgcaaacctgggttacattattgtttattcaggcaatcatatgactctaataaaattctgaaatgtaagtatcttttagtaggcaatagcagtgagagcagtacagctgagctctctggagtctcagtacgtacaaattctgctgtcccagtccttaattgggcagaccttactgccgtaaatgaggaaatagacaaaaaatggctcttactggggtcttcctgattcccaatgtctgctacacctaaatgcaaactyggcaggcccagaaacaggccagaaygagtygtagctcctacccctactccgagctagtctgtggcagccattarcaaacaaatgttttatatgacagccttgatacaaatagcttgtgtctaccagcttatacaatgaggttgtttgtgtcacagccctccagctcctcctgtcttggggcagggcaacacgagccaaaggcacgaaagacacttgcttccctgaaaatgtgccagatgacagaggtcttaagtggacagtgctggaggagatgcagagacaggctgcaggtcagtagct

SEQ ID NO: 82830 - DNA, 600 bp, Chicken  19866894378068_2
ctgcagttagattattttgcaaacctgggttacattattgtttattcaggcaatcatatgactctaataaaattctgaaatgtaagtatcttttagtaggcaatagcagtgagagcagtacagctgagctctctggagtctcagtacgtacaaattctgctgtcccagtccttaattgggcagaccttactgccgtaaatgaggaaatagacaaaaaatggctcttactggggtcttcctgattcccaatgtctgctacacctaaatgcaaactyggcaggcccagaaacaggccagaaygagtygtagctcctacccctactccgagctagtctgtggcagccattarcaaacaaatgttttatatgacagccttgatacaaatagcttgtgtctaccagcttatacaatgaggttgtttgtgtcacagccctccagctcctcctgtcttggggcagggcaacacgagccaaaggcacgaaagacacttgcttccctgaaaatgtgccagatgacagaggtcttaagtggacagtgctggaggagatgcagagacaggctgcaggtcagtagctcagcttcaccttcccttagtcctgc

SEQ ID NO: 82831 - DNA, 600 bp, Chicken  19866894378068_3
gttagattattttgcaaacctgggttacattattgtttattcaggcaatcatatgactctaataaaattctgaaatgtaagtatcttttagtaggcaatagcagtgagagcagtacagctgagctctctggagtctcagtacgtacaaattctgctgtcccagtccttaattgggcagaccttactgccgtaaatgaggaaatagacaaaaaatggctcttactggggtcttcctgattcccaatgtctgctacacctaaatgcaaactyggcaggcccagaaacaggccagaaygagtygtagctcctacccctactccgagctagtctgtggcagccattarcaaacaaatgttttatatgacagccttgatacaaatagcttgtgtctaccagcttatacaatgaggttgtttgtgtcacagccctccagctcctcctgtcttggggcagggcaacacgagccaaaggcacgaaagacacttgcttccctgaaaatgtgccagatgacagaggtcttaagtggacagtgctggaggagatgcagagacaggctgcaggtcagtagctcagcttcaccttcccttagtcctgctgaaa

SEQ ID NO: 82832 - DNA, 600 bp, Chicken  19866894378068_4
gcaatcatatgactctaataaaattctgaaatgtaagtatcttttagtaggcaatagcagtgagagcagtacagctgagctctctggagtctcagtacgtacaaattctgctgtcccagtccttaattgggcagaccttactgccgtaaatgaggaaatagacaaaaaatggctcttactggggtcttcctgattcccaatgtctgctacacctaaatgcaaactyggcaggcccagaaacaggccagaaygagtygtagctcctacccctactccgagctagtctgtggcagccattarcaaacaaatgttttatatgacagccttgatacaaatagcttgtgtctaccagcttatacaatgaggttgtttgtgtcacagccctccagctcctcctgtcttggggcagggcaacacgagccaaaggcacgaaagacacttgcttccctgaaaatgtgccagatgacagaggtcttaagtggacagtgctggaggagatgcagagacaggctgcaggtcagtagctcagcttcaccttcccttagtcctgctgaaagccttggcaccatggtggcttgagcacacacacttactggattt

SEQ ID NO: 82833 - DNA, 600 bp, Chicken  19866894378079_1
ttagcactcccttcccaaaagctgttggtagctgaaatcacatatctcattaggggaaacatgcttatgctgacagcagtgtgtgcagtttgtcttctaacaaagaaggccatttgcaaagggattttaagatggctgtttgtgactgctgttgtctcgaaccatgggtaaactacagtacttcttctatttgatttctcgctgttgtacagctagcaagtctagtcgccatcatctgctaggttattcttgagacagcagtaaaattgtactgtaaaatgtaagtttttctcaaatcawtttttttttttaaacttcgtgtatgtttgtttaggcacagcaacgtgtagcagaaatcctaagtcagtgcctgaagcagtgattgagcacctggtgggaaggcagggccaacccaagggatctcaggtgcacrcaatacacmcgagtgaccggaagggctggagccaggatccaccccttcccagacctcatttaaggattggcagtggaggtgagagtttctcactggaaattcctgtctatgtaaggtcttttgagggtaagcagcttcttttctttatttttgtgtctctagttatt

SEQ ID NO: 82834 - DNA, 600 bp, Chicken  19866894378079_2
ggctgtttgtgactgctgttgtctcgaaccatgggtaaactacagtacttcttctatttgatttctcgctgttgtacagctagcaagtctagtcgccatcatctgctaggttattcttgagacagcagtaaaattgtactgtaaaatgtaagtttttctcaaatcawtttttttttttaaacttcgtgtatgtttgtttaggcacagcaacgtgtagcagaaatcctaagtcagtgcctgaagcagtgattgagcacctggtgggaaggcagggccaacccaagggatctcaggtgcacrcaatacacmcgagtgaccggaagggctggagccaggatccaccccttcccagacctcatttaaggattggcagtggaggtgagagtttctcactggaaattcctgtctatgtaaggtcttttgagggtaagcagcttcttttctttatttttgtgtctctagttattgcatttgattgagtgcttagttgctgtagccacatgatgttgcttctgtacctacacattcatgtaggtagtgggtattttcaagtaaaactgtatgctgaggaggtcttcaagtaggatagcatttcatgga

SEQ ID NO: 82835 - DNA, 600 bp, Chicken  19866894378079_3
tgactgctgttgtctcgaaccatgggtaaactacagtacttcttctatttgatttctcgctgttgtacagctagcaagtctagtcgccatcatctgctaggttattcttgagacagcagtaaaattgtactgtaaaatgtaagtttttctcaaatcawtttttttttttaaacttcgtgtatgtttgtttaggcacagcaacgtgtagcagaaatcctaagtcagtgcctgaagcagtgattgagcacctggtgggaaggcagggccaacccaagggatctcaggtgcacrcaatacacmcgagtgaccggaagggctggagccaggatccaccccttcccagacctcatttaaggattggcagtggaggtgagagtttctcactggaaattcctgtctatgtaaggtcttttgagggtaagcagcttcttttctttatttttgtgtctctagttattgcatttgattgagtgcttagttgctgtagccacatgatgttgcttctgtacctacacattcatgtaggtagtgggtattttcaagtaaaactgtatgctgaggaggtcttcaagtaggatagcatttcatggaatcatggag

SEQ ID NO: 82836 - DNA, 599 bp, Chicken  19866894378089_1
  misc_feature (1)..(143): n is any nucleotide
nnnnnnnnnnnnnnnnnnnnnnnnnnnnnnnnnnnnnnnnnnnnnnnnnnnnnnnnnnnnnnnnnnnnnnnnnnnnnnnnnnnnnnnnnnnnnnnnnnnnnnnnnnnnnnnnnnnnnnnnnnnnnnnnnnnnnnnnnnnnnnnacaagccagtccgctgcttctgcctgggcagatccaatctgatatcctgtgtgggcacaagagcaaacacgatactatatatgacaagtgctgaaagggaaacctgatactgaacaaagaactctgttttcatttacttggactgagatctcttaargattctcacaaatcctacacttkgtcccagygtactgtaaaagaataaatcagcctctcgttggcattaaatgtttttttgttctggtttctaagaagcatgggagaaatttttctccccccagacctccactaatgaaacctaaaattcagtacattaattccacagcccactagtggtgtatttcaaacatgtggactgagcagcttgtctggttctggatggatcacttcttatttattcagtaagccagttggctttcagggagccgtaagagcagtaaaaacatattaatgata

SEQ ID NO: 82837 - DNA, 599 bp, Chicken  19866894378089_2
  misc_feature (1)..(120): n is any nucleotide
nnnnnnnnnnnnnnnnnnnnnnnnnnnnnnnnnnnnnnnnnnnnnnnnnnnnnnnnnnnnnnnnnnnnnnnnnnnnnnnnnnnnnnnnnnnnnnnnnnnnnnnnnnnnnnnnnnnnnnnnacaagccagtccgctgcttctgcctgggcagatccaatctgatatcctgtgtgggcacaagagcaaacacgatactatatatgacaagtgctgaaagggaaacctgatactgaacaaagaactctgttttcatttacttggactgagatctcttaargattctcacaaatcctacacttkgtcccagygtactgtaaaagaataaatcagcctctcgttggcattaaatgtttttttgttctggtttctaagaagcatgggagaaatttttctccccccagacctccactaatgaaacctaaaattcagtacattaattccacagcccactagtggtgtatttcaaacatgtggactgagcagcttgtctggttctggatggatcacttcttatttattcagtaagccagttggctttcagggagccgtaagagcagtaaaaacatattaatgataagaaccaataattcctcaaattg

SEQ ID NO: 82838 - DNA, 599 bp, Chicken  19866894378089_3
  misc_feature (1)..(112): n is any nucleotide
nnnnnnnnnnnnnnnnnnnnnnnnnnnnnnnnnnnnnnnnnnnnnnnnnnnnnnnnnnnnnnnnnnnnnnnnnnnnnnnnnnnnnnnnnnnnnnnnnnnnnnnnnnnnnnnnacaagccagtccgctgcttctgcctgggcagatccaatctgatatcctgtgtgggcacaagagcaaacacgatactatatatgacaagtgctgaaagggaaacctgatactgaacaaagaactctgttttcatttacttggactgagatctcttaargattctcacaaatcctacacttkgtcccagygtactgtaaaagaataaatcagcctctcgttggcattaaatgtttttttgttctggtttctaagaagcatgggagaaatttttctccccccagacctccactaatgaaacctaaaattcagtacattaattccacagcccactagtggtgtatttcaaacatgtggactgagcagcttgtctggttctggatggatcacttcttatttattcagtaagccagttggctttcagggagccgtaagagcagtaaaaacatattaatgataagaaccaataattcctcaaattgctttatag

SEQ ID NO: 82839 - DNA, 600 bp, Chicken  19866894378089_4
tgcaggtcacagggagattttatgtagacaattgggttgaaacgctgggggactccagaattcaccagaaattctctcttcttcctttcctcagtcagggaaaaaacatgagaattcagttatcctaccttgtccacgggttatgtaaggaagctttctgtataaattcagaaatgtggggatggagaagtaatttcacttttctggggatatcagccaaagagtacctgattagccctgattcactggcatcaggttgctgtgcaacacatgaaattccatgctgtgaactgctcctgyggaagtacagtcatgcataacagagaraacacgtttggaggaaaagggcacctgaatctccagcttgcactggtgattgcaatctgccaaaataattgggatcaaatccctcattaatgaaggcactcacatgtacagcacagagcgatcactagctctggcatgttttggttgtatccttaarcctatttaccattaaagagcattttcacatcagtgttagggggagaagtcatttgtcatgaaaaaaaattacaarggtgtttattccatttctaaggctctcagacactttccagt

SEQ ID NO: 82840 - DNA, 600 bp, Chicken  19866894378089_5
acaattgggttgaaacgctgggggactccagaattcaccagaaattctctcttcttcctttcctcagtcagggaaaaaacatgagaattcagttatcctaccttgtccacgggttatgtaaggaagctttctgtataaattcagaaatgtggggatggagaagtaatttcacttttctggggatatcagccaaagagtacctgattagccctgattcactggcatcaggttgctgtgcaacacatgaaattccatgctgtgaactgctcctgyggaagtacagtcatgcataacagagaraacacgtttggaggaaaagggcacctgaatctccagcttgcactggtgattgcaatctgccaaaataattgggatcaaatccctcattaatgaaggcactcacatgtacagcacagagcgatcactagctctggcatgttttggttgtatccttaarcctatttaccattaaagagcattttcacatcagtgttagggggagaagtcatttgtcatgaaaaaaaattacaarggtgtttattccatttctaaggctctcagacactttccagtgtaacactactgtatgagagatggata

SEQ ID NO: 82841 - DNA, 600 bp, Chicken  19866894378089_6
gagaagtaatttcacttttctggggatatcagccaaagagtacctgattagccctgattcactggcatcaggttgctgtgcaacacatgaaattccatgctgtgaactgctcctgyggaagtacagtcatgcataacagagaraacacgtttggaggaaaagggcacctgaatctccagcttgcactggtgattgcaatctgccaaaataattgggatcaaatccctcattaatgaaggcactcacatgtacagcacagagcgatcactagctctggcatgttttggttgtatccttaarcctatttaccattaaagagcattttcacatcagtgttagggggagaagtcatttgtcatgaaaaaaaattacaarggtgtttattccatttctaaggctctcagacactttccagtgtaacactactgtatgagagatggatactactacaactccaatacaaacagtaacagaagcacttagctggtgacttacatacaatgaaaacaaagccctgcgtccatccacaggcctttaaaggcactactaacagaaagagatcaatsctgcagctacacactgtgaatttggtggacacat

SEQ ID NO: 82842 - DNA, 600 bp, Chicken  19866894378089_7
ctgtgcaacacatgaaattccatgctgtgaactgctcctgyggaagtacagtcatgcataacagagaraacacgtttggaggaaaagggcacctgaatctccagcttgcactggtgattgcaatctgccaaaataattgggatcaaatccctcattaatgaaggcactcacatgtacagcacagagcgatcactagctctggcatgttttggttgtatccttaarcctatttaccattaaagagcattttcacatcagtgttagggggagaagtcatttgtcatgaaaaaaaattacaarggtgtttattccatttctaaggctctcagacactttccagtgtaacactactgtatgagagatggatactactacaactccaatacaaacagtaacagaagcacttagctggtgacttacatacaatgaaaacaaagccctgcgtccatccacaggcctttaaaggcactactaacagaaagagatcaatsctgcagctacacactgtgaatttggtggacacattgctttggacatcacggaaagtaaaaacaaattaaaagtmttttcagtatgatagtacagatgcattcagcctca

SEQ ID NO: 82843 - DNA, 580 bp, Chicken  19866894378089_8
actagctctggcatgttttggttgtatccttaarcctatttaccattaaagagcattttcacatcagtgttagggggagaagtcatttgtcatgaaaaaaaattacaarggtgtttattccatttctaaggctctcagacactttccagtgtaacactactgtatgagagatggatactactacaactccaatacaaacagtaacagaagcacttagctggtgacttacatacaatgaaaacaaagccctgcgtccatccacaggcctttaaaggcactactaacagaaagagatcaatsctgcagctacacactgtgaatttggtggacacattgctttggacatcacggaaagtaaaaacaaattaaaagtmttttcagtatgatagtacagatgcattcagcctcagaaaatccctaaactactaggagctagtaattattagtttaggaacaaagggtaaatctgcattcatccttaagcttatattaccacacacagtcatggactgcatgttgggccacatggtctgattattctcataataaattatgcaaacaaaaaaatattttaaaaaaa

SEQ ID NO: 82844 - DNA, 506 bp, Chicken  19866894378089_9
gggagaagtcatttgtcatgaaaaaaaattacaarggtgtttattccatttctaaggctctcagacactttccagtgtaacactactgtatgagagatggatactactacaactccaatacaaacagtaacagaagcacttagctggtgacttacatacaatgaaaacaaagccctgcgtccatccacaggcctttaaaggcactactaacagaaagagatcaatsctgcagctacacactgtgaatttggtggacacattgctttggacatcacggaaagtaaaaacaaattaaaagtmttttcagtatgatagtacagatgcattcagcctcagaaaatccctaaactactaggagctagtaattattagtttaggaacaaagggtaaatctgcattcatccttaagcttatattaccacacacagtcatggactgcatgttgggccacatggtctgattattctcataataaattatgcaaacaaaaaaatattttaaaaaaa

SEQ ID NO: 82845 - DNA, 600 bp, Chicken  19866894378096_1
acaaccgcaaatagcgaacagttgcgttttcactccgtcccactccgaagcccaaactgccaggtttacagtgccctctagtatcgctctggagcatttgcttccccgtgccacctcctgagctgccacaccgtgcaatccttgctcaccacggcgcattttccgtcggcgctttgctccttcggcacccggctgcaccgccgcctctcaggcggggggagggacgccttggctttcatccctctgcagcagtcccgctgttttatgctcaaagtgctctgcttagagggctgcgtgcgsttagtgacagtttgtcaaagaggtattaatgataactggccttcaaatgggcacggtacccacagctgtgctgcatcaccacgaaccggcaaaacgcgcacttagagaaggagagggaaggacaaagtagaaaaacctgagtcataggaaagccgtccaacgttacccgggaccacatcccagccggctgaggtctcttcttgcaaggacttctccgagctgcgaccttcagccctgcttggatggctcagcggagcagatgcgggacaattccccagtgggtcgcaacgcagcacctgc

SEQ ID NO: 82846 - DNA, 600 bp, Chicken  19866894378097_1
ttaataattgtgatgcacagccagaaataattagactgcaagactggcaatcataaattacttttcttttaataacataacgaaggcagagtcacagaggcaatagaaaagtgcagcttaagcagagaagttcaaatgaataaatcaaggccaaatccacttctttaatttctttcttgcacaaagaacaatataatattcatggtttccgatggactaactttaactgtaggtgattttgtccacggctaacttgtctaacggagagaaagaaatcaaatcttaaaggagagctccacragctatttagagctatgaaatataacgctgggaaagctcccttcccatctgcagaggatgccctgaccaggtaatggtggctgcagacaggagtggctctgctgtaacaagctgtttgcagcttgaaattccaggagaaattctggatatcagccaggcatgctaatgggagctccaaaaacaccgtgctcccgtgggatattcttgggacacatcaaagtgatagctcttcctttgctggagacgtgttgctggactcctgcccagtttgcatccagagctggtgcagaggaaattaat

SEQ ID NO: 82847 - DNA, 600 bp, Chicken  19866894378105_1
ctgaataaaaactaggaggcataggtgcaaaagggaacaagttatggctgtgctaagcttgcgtgtaagctgtaaatccctgagacaagcggggagaagatagagtttaatcactcttgcaacatttatgtatttttactcagtgggaaacgttgtgggcttgacctcatttttatttaccagctctgaggatcctgatgccctgtgacagcaaacactgattgacaggctgcagagccggcgagctgcagggcacacaacatcccagcaggtggcttgggcactgaaagcgggctgggrcttttgggaaaamggactcaaaatagctacaaaaagtatcagagagctcattcagggcctattgatgcaacagatctcggccacattgcaagggctgaggcgtaaggcgaaagatcttccaaaccctgagcamtgcatcaatatttcacaactcttcagtctaaaatattacgtttctttttttccccgcatcttttatgatttccagtcagcagagcgatgccaggttacatagctgcacatccagcctgcagaacgtaggaggtgaatttggcctctgcctgggtgttggtgagaggc

SEQ ID NO: 82848 - DNA, 600 bp, Chicken  19866894378105_2
aggaggcataggtgcaaaagggaacaagttatggctgtgctaagcttgcgtgtaagctgtaaatccctgagacaagcggggagaagatagagtttaatcactcttgcaacatttatgtatttttactcagtgggaaacgttgtgggcttgacctcatttttatttaccagctctgaggatcctgatgccctgtgacagcaaacactgattgacaggctgcagagccggcgagctgcagggcacacaacatcccagcaggtggcttgggcactgaaagcgggctgggrcttttgggaaaamggactcaaaatagctacaaaaagtatcagagagctcattcagggcctattgatgcaacagatctcggccacattgcaagggctgaggcgtaaggcgaaagatcttccaaaccctgagcamtgcatcaatatttcacaactcttcagtctaaaatattacgtttctttttttccccgcatcttttatgatttccagtcagcagagcgatgccaggttacatagctgcacatccagcctgcagaacgtaggaggtgaatttggcctctgcctgggtgttggtgagaggcagcggatcctgca

SEQ ID NO: 82849 - DNA, 600 bp, Chicken  19866894378105_3
ttttactcagtgggaaacgttgtgggcttgacctcatttttatttaccagctctgaggatcctgatgccctgtgacagcaaacactgattgacaggctgcagagccggcgagctgcagggcacacaacatcccagcaggtggcttgggcactgaaagcgggctgggrcttttgggaaaamggactcaaaatagctacaaaaagtatcagagagctcattcagggcctattgatgcaacagatctcggccacattgcaagggctgaggcgtaaggcgaaagatcttccaaaccctgagcamtgcatcaatatttcacaactcttcagtctaaaatattacgtttctttttttccccgcatcttttatgatttccagtcagcagagcgatgccaggttacatagctgcacatccagcctgcagaacgtaggaggtgaatttggcctctgcctgggtgttggtgagaggcagcggatcctgcagggaccacagacagaggagagtggaactgtggctcggtgcaatgaaaggcagcagcttgctcccgctgcggtggatggcatgggctgacacccaggcagcagctagagctgtgcgttctt

SEQ ID NO: 82850 - DNA, 599 bp, Chicken  19866894378109_1
  misc_feature (1)..(23): n is any nucleotide
nnnnnnnnnnnnnnnnnnnnnnncaaagctacagggatttcgagaaggaagcggagatggtaattaatgcctggttcaagaacaattatgtcaattatggttttaatttaatctctgcaaaatctggggctctaagataatgtaaacaaactgctctataaacttcaggcatccctcctatggggcatcctccccagctcttttctaacagaggcagagcctgcgcactgctcctgggcaggatgtgtgcagagatgactgaattccctctgttctgcccatgaatagagggctgtccaygggsattccccctggagaaggagtgctgtcccattgcagcagccctcagtgtgccracagcgactgctgagcactgccacacagaattgctgctcgtggggttgcgaggagcrccactgggtgcagtcccatgggcacgagcagagtcccctgcaccacggctctgtcccagctgcctkcaggctcagtgctgcacctctgctcggaggcacgggatcacagctgctcccacatctgtcacgtcccatctctgcagcggtgtgggacggaggggctcacagccacgctgcttactgccc

SEQ ID NO: 82851 - DNA, 599 bp, Chicken  19866894378109_2
  misc_feature (1)..(19): n is any nucleotide
nnnnnnnnnnnnnnnnnnncaaagctacagggatttcgagaaggaagcggagatggtaattaatgcctggttcaagaacaattatgtcaattatggttttaatttaatctctgcaaaatctggggctctaagataatgtaaacaaactgctctataaacttcaggcatccctcctatggggcatcctccccagctcttttctaacagaggcagagcctgcgcactgctcctgggcaggatgtgtgcagagatgactgaattccctctgttctgcccatgaatagagggctgtccaygggsattccccctggagaaggagtgctgtcccattgcagcagccctcagtgtgccracagcgactgctgagcactgccacacagaattgctgctcgtggggttgcgaggagcrccactgggtgcagtcccatgggcacgagcagagtcccctgcaccacggctctgtcccagctgcctkcaggctcagtgctgcacctctgctcggaggcacgggatcacagctgctcccacatctgtcacgtcccatctctgcagcggtgtgggacggaggggctcacagccacgctgcttactgcccaaaa

SEQ ID NO: 82852 - DNA, 600 bp, Chicken  19866894378109_3
atggtaattaatgcctggttcaagaacaattatgtcaattatggttttaatttaatctctgcaaaatctggggctctaagataatgtaaacaaactgctctataaacttcaggcatccctcctatggggcatcctccccagctcttttctaacagaggcagagcctgcgcactgctcctgggcaggatgtgtgcagagatgactgaattccctctgttctgcccatgaatagagggctgtccaygggsattccccctggagaaggagtgctgtcccattgcagcagccctcagtgtgccracagcgactgctgagcactgccacacagaattgctgctcgtggggttgcgaggagcrccactgggtgcagtcccatgggcacgagcagagtcccctgcaccacggctctgtcccagctgcctkcaggctcagtgctgcacctctgctcggaggcacgggatcacagctgctcccacatctgtcacgtcccatctctgcagcggtgtgggacggaggggctcacagccacgctgcttactgcccaaaacctggcactcaatttgcctttttcttcaaggagctgcacagggacgtggagca

SEQ ID NO: 82853 - DNA, 600 bp, Chicken  19866894378109_4
tctgcaaaatctggggctctaagataatgtaaacaaactgctctataaacttcaggcatccctcctatggggcatcctccccagctcttttctaacagaggcagagcctgcgcactgctcctgggcaggatgtgtgcagagatgactgaattccctctgttctgcccatgaatagagggctgtccaygggsattccccctggagaaggagtgctgtcccattgcagcagccctcagtgtgccracagcgactgctgagcactgccacacagaattgctgctcgtggggttgcgaggagcrccactgggtgcagtcccatgggcacgagcagagtcccctgcaccacggctctgtcccagctgcctkcaggctcagtgctgcacctctgctcggaggcacgggatcacagctgctcccacatctgtcacgtcccatctctgcagcggtgtgggacggaggggctcacagccacgctgcttactgcccaaaacctggcactcaatttgcctttttcttcaaggagctgcacagggacgtggagcagcagccctgcacagcaccgggtgtgcacggcccgtgttccgtgccacttcccaacta

SEQ ID NO: 82854 - DNA, 546 bp, Chicken  19866894378109_5
atggggcatcctccccagctcttttctaacagaggcagagcctgcgcactgctcctgggcaggatgtgtgcagagatgactgaattccctctgttctgcccatgaatagagggctgtccaygggsattccccctggagaaggagtgctgtcccattgcagcagccctcagtgtgccracagcgactgctgagcactgccacacagaattgctgctcgtggggttgcgaggagcrccactgggtgcagtcccatgggcacgagcagagtcccctgcaccacggctctgtcccagctgcctkcaggctcagtgctgcacctctgctcggaggcacgggatcacagctgctcccacatctgtcacgtcccatctctgcagcggtgtgggacggaggggctcacagccacgctgcttactgcccaaaacctggcactcaatttgcctttttcttcaaggagctgcacagggacgtggagcagcagccctgcacagcaccgggtgtgcacggcccgtgttccgtgccacttcccaactaatagctcctgct

SEQ ID NO: 82855 - DNA, 600 bp, Chicken  19866894378111_1
gttctcatcatttctggttctaaattgtgcaggtttactgaacatgattcataactgtattctttaaagtaagtaaaatatacaagtcatactcgtggatatgggcggtgtactgcttagcaccattggtgatactctggcacaagggtgtctgctaattgttggcagtcctggtctcatggtttgtttctcctgtctgcaaaattctgagctttcatacaaatgtattggttttgataccagcgtggttgataatggaactggggaaatctgttaatcaatgtcactgggtgttcatcrgtcatgacagcctactcccgatgagtaatgggaccagaccaagtgctcttaaacaaaccaggatggtaaataacatctgtggacagttaacatggtagaactgccacagaggtccttacatcactcaaatgctggtagggaggataataaagccccacagttacgggaatgtaaaatggaggtgttgttttgtctcgtagcgcaagaggcaccagctctgctgcggcagctcatggatcagacggtgaacaccagtaactctgccatgctggagtgccaggttcatggcatccccgagcc

SEQ ID NO: 82856 - DNA, 600 bp, Chicken  19866894378111_2
tttggttggtggaaacttgaaacctgtggagtcttaaataactttttagaaagtttgtgtctgaggttctggcctacactactggaaattactatgtcatgagcaaaggcagtgggaagaactctgagtatttgtcaaagtgagctataagtatgtgcaaacttccaacacagtcactaaaattagcgaccacatggttgtaacatgaattttttcacattatcttctggagtggatgttgtgtgtttaacttgagcttagtgcaacacataaggttaggaaccaggaagagatctctayggggtcagtcagagcactttaattagcygcctggagtcactgatgggaatgcatttcaatgggactttggtcctgatggagccaaatacacaagtgtgtacttgactgcacatttcctggctatatcatgtctgtaagtcaggcctgatgccaaatctgctgcctgcctcttcctcactcactggaatattgtcagggtttggactccgggttgagcatgctggaataagacaggtgctgaaaacttcaggtaattcctgtgttgtagggtgcacctcatgggacctttccttgcactag

SEQ ID NO: 82857 - DNA, 600 bp, Chicken  19866894378111_3
gagtcttaaataactttttagaaagtttgtgtctgaggttctggcctacactactggaaattactatgtcatgagcaaaggcagtgggaagaactctgagtatttgtcaaagtgagctataagtatgtgcaaacttccaacacagtcactaaaattagcgaccacatggttgtaacatgaattttttcacattatcttctggagtggatgttgtgtgtttaacttgagcttagtgcaacacataaggttaggaaccaggaagagatctctayggggtcagtcagagcactttaattagcygcctggagtcactgatgggaatgcatttcaatgggactttggtcctgatggagccaaatacacaagtgtgtacttgactgcacatttcctggctatatcatgtctgtaagtcaggcctgatgccaaatctgctgcctgcctcttcctcactcactggaatattgtcagggtttggactccgggttgagcatgctggaataagacaggtgctgaaaacttcaggtaattcctgtgttgtagggtgcacctcatgggacctttccttgcactagctgagctcattctgagaaggggcccagt

SEQ ID NO: 82858 - DNA, 568 bp, Chicken  19866894378111_4
ggtcctgatggagccaaatacacaagtgtgtacttgactgcacatttcctggctatatcatgtctgtaagtcaggcctgatgccaaatctgctgcctgcctcttcctcactcactggaatattgtcagggtttggactccgggttgagcatgctggaataagacaggtgctgaaaacttcaggtaattcctgtgttgtagggtgcacctcatgggacctttccttgcactagctgagctcattctgagaaggggcccagtgtcatgtgagtgagtagggtttggggggaatgcgctgccsataaggttgatgaggacacatggagctggtctgggaagcgtgacagtcctgctcccgtgagtgcagcaggaagcaaggagaccacccagttcccacagcttagtgacatgctgaggaacttgcttgggtgggagtcgggtcacagtgccaatcagcagacgtgataccagctgctcccagcgtcgctcccttgggctgagcttttcactcacacaagtgttctgtaaagagatttccaaaagattcccaaaacttccaagtatatttg

SEQ ID NO: 82859 - DNA, 547 bp, Chicken  19866894378114_1
tgtttaaaggcagtcagaacagcaatctattaaacgctggccataatttctcctcagctgacacccttagttcatcaaatgtctggaagttttcccaagcaactcaaagattagaagcaatttaccgaggaaagcttcagcttctggacaacatttctgaatggctataagctccaagttttcagcatacagtacaaattaacaacacgcactgcatgtcttttactcatgccagcatcagaagtgaattgtgtgtttccagtattggttattattgtctccattgaaatttttgaattmatttaaatttccttgaaaaaccatcagattgaagcatgatgttatacatggcaagtgtcacatggtaagcttttttttcatttccaaaaaaggtttttaaaatcaaagtaaagtgtaatatcacaagttcttctgagttgttttgatatgttctaaccaaaagagatggtgtgaagaaaaaacagtggatgttctttactggttctgcccagactctggggatacagttattacctgtaaaacttta

SEQ ID NO: 82860 - DNA, 581 bp, Chicken  19866894378115_1
  misc_feature (1)..(51): n is any nucleotide
nnnnnnnnnnnnnnnnnnnnnnnnnnnnnnnnnnnnnnnnnnnnnnnnnnntgcctattttcctgcatggaaataacatacgggcaagctttcatttctttggcttacatatgtttagtcctttgattaacaaatgctttaatacctgttcttggagcttccctttccttggagtacggctaggttgtggtgcttccccgaaaagaaagaaggaaccacggcatgcgagtgcagtgaaaccctcatcaccctttgctgcactgcatttgagtgatttccctctgaatttcagggcatccygctggtgtgggttcatccagtacttatttcagagcttatcactcttcctacaatggaagtgttgtttttaaggcagaactgtcttgttgtaagcctgtagcaggaaatacccatgcaacctctgtaactcgctggaaatctgatgtttgtgctgcagttgctttcacagcagtctcctctttcagaatctgtggcaacacttgctttttttttttaatttgaatacaagtgttttagctgagggactcacaaaggagccagtgaatgagataaaacagatg

SEQ ID NO: 82861 - DNA, 600 bp, Chicken  19866894378124_1
aattcttctccctgtcctatcttctaccactgtacctgtttttgaaatgggatgtaagagtttcttccaaccacctggtactacttttaaaagaatgtggccttacatctaccttctcccgcttcctcctctgtagctaacgctttgattatttcatatatgacttctttccagggagaggaggggggaaaaagccagtggcatagccaggagcagaactatggcatattatgattgtgtgtggcttggacatcaacatgcactgaaaaacacactttacgtgtgctcaacttatttccrgggaaaggaaggaggaataaaaatacctatctgtaaaattaaacctattggtgtttamaagctttgttaaacaatyctttgacttctggagagagagtttctttatctgaaatgcaggggtattttaagatctaygattactgcaggctagaaggactttcttgtatctggtactatataaacatttacaaagraaraatcagttatacctaaataaatgtagaggtttagaaataactgcctgttctcttcattgttaatggatagctgaagcagaaagagtaaataacttgcccaaaa

SEQ ID NO: 82862 - DNA, 600 bp, Chicken  19866894378124_2
agtttcttccaaccacctggtactacttttaaaagaatgtggccttacatctaccttctcccgcttcctcctctgtagctaacgctttgattatttcatatatgacttctttccagggagaggaggggggaaaaagccagtggcatagccaggagcagaactatggcatattatgattgtgtgtggcttggacatcaacatgcactgaaaaacacactttacgtgtgctcaacttatttccrgggaaaggaaggaggaataaaaatacctatctgtaaaattaaacctattggtgtttamaagctttgttaaacaatyctttgacttctggagagagagtttctttatctgaaatgcaggggtattttaagatctaygattactgcaggctagaaggactttcttgtatctggtactatataaacatttacaaagraaraatcagttatacctaaataaatgtagaggtttagaaataactgcctgttctcttcattgttaatggatagctgaagcagaaagagtaaataacttgcccaaaactacactggcagcctgagggaaaagaaattgtttgcataacttaatccctaactgata

SEQ ID NO: 82863 - DNA, 600 bp, Chicken  19866894378124_3
ggtactacttttaaaagaatgtggccttacatctaccttctcccgcttcctcctctgtagctaacgctttgattatttcatatatgacttctttccagggagaggaggggggaaaaagccagtggcatagccaggagcagaactatggcatattatgattgtgtgtggcttggacatcaacatgcactgaaaaacacactttacgtgtgctcaacttatttccrgggaaaggaaggaggaataaaaatacctatctgtaaaattaaacctattggtgtttamaagctttgttaaacaatyctttgacttctggagagagagtttctttatctgaaatgcaggggtattttaagatctaygattactgcaggctagaaggactttcttgtatctggtactatataaacatttacaaagraaraatcagttatacctaaataaatgtagaggtttagaaataactgcctgttctcttcattgttaatggatagctgaagcagaaagagtaaataacttgcccaaaactacactggcagcctgagggaaaagaaattgtttgcataacttaatccctaactgatattcctgttaagtatcata

SEQ ID NO: 82864 - DNA, 600 bp, Chicken  19866894378124_4
gctaacgctttgattatttcatatatgacttctttccagggagaggaggggggaaaaagccagtggcatagccaggagcagaactatggcatattatgattgtgtgtggcttggacatcaacatgcactgaaaaacacactttacgtgtgctcaacttatttccrgggaaaggaaggaggaataaaaatacctatctgtaaaattaaacctattggtgtttamaagctttgttaaacaatyctttgacttctggagagagagtttctttatctgaaatgcaggggtattttaagatctaygattactgcaggctagaaggactttcttgtatctggtactatataaacatttacaaagraaraatcagttatacctaaataaatgtagaggtttagaaataactgcctgttctcttcattgttaatggatagctgaagcagaaagagtaaataacttgcccaaaactacactggcagcctgagggaaaagaaattgtttgcataacttaatccctaactgatattcctgttaagtatcatatctcattgtgcaaattgttatttgtattttaattatgtctactttccatctcttgcagc

SEQ ID NO: 82865 - DNA, 600 bp, Chicken  19866894378124_5
ccagtggcatagccaggagcagaactatggcatattatgattgtgtgtggcttggacatcaacatgcactgaaaaacacactttacgtgtgctcaacttatttccrgggaaaggaaggaggaataaaaatacctatctgtaaaattaaacctattggtgtttamaagctttgttaaacaatyctttgacttctggagagagagtttctttatctgaaatgcaggggtattttaagatctaygattactgcaggctagaaggactttcttgtatctggtactatataaacatttacaaagraaraatcagttatacctaaataaatgtagaggtttagaaataactgcctgttctcttcattgttaatggatagctgaagcagaaagagtaaataacttgcccaaaactacactggcagcctgagggaaaagaaattgtttgcataacttaatccctaactgatattcctgttaagtatcatatctcattgtgcaaattgttatttgtattttaattatgtctactttccatctcttgcagcaactggtgtgcttatatccatacgagactcttaccaacagttgtagtcgacaacctgga

SEQ ID NO: 82866 - DNA, 600 bp, Chicken  19866894378124_6
gtggcatagccaggagcagaactatggcatattatgattgtgtgtggcttggacatcaacatgcactgaaaaacacactttacgtgtgctcaacttatttccrgggaaaggaaggaggaataaaaatacctatctgtaaaattaaacctattggtgtttamaagctttgttaaacaatyctttgacttctggagagagagtttctttatctgaaatgcaggggtattttaagatctaygattactgcaggctagaaggactttcttgtatctggtactatataaacatttacaaagraaraatcagttatacctaaataaatgtagaggtttagaaataactgcctgttctcttcattgttaatggatagctgaagcagaaagagtaaataacttgcccaaaactacactggcagcctgagggaaaagaaattgtttgcataacttaatccctaactgatattcctgttaagtatcatatctcattgtgcaaattgttatttgtattttaattatgtctactttccatctcttgcagcaactggtgtgcttatatccatacgagactcttaccaacagttgtagtcgacaacctggaaac

SEQ ID NO: 82867 - DNA, 600 bp, Chicken  19866894378131_1
cgcaggcatcaccacttaatgcagcttctaccaacccgttcctgacaattcatggagataatgcagctcagaaggtgacagtaagtatatttctcacctcgtttgcagtgaagtatctccataacataactaagtgatgggaggcagattctgtgtacttttcacatctcaaggatgtggattttttaattattttttttatttttacatttaatttttccaaagctttgagctgcagttaatgagcttcagaactcatcctgcaggtgactaacatcctgtagtcacatctagatgctytgttgcatgctcctgcttccctggattaggactccagtccagtgactcctgctttcctcttgtaacaccgtagtccagtcctcaaccctcctccttccccagctttgcatgtcattgcattggtccttcctcttaccacttgaagaactttccctcaccgggctgcaggggttggttgacaacttgagagatgaggagtgcattgctgggacagtgaaatatgtatttggagaatggttatgtgtgtcttgggtctcgcatgggaaagtgagtctgtatgctgggagactgaacaagtcc

SEQ ID NO: 82868 - DNA, 599 bp, Chicken  19866894378142_1
  misc_feature (1)..(60): n is any nucleotide
nnnnnnnnnnnnnnnnnnnnnnnnnnnnnnnnnnnnnnnnnnnnnnnnnnnnnnnnnnnntcccaaaagatgagtttttgattacttattttactgtgcatggatcagaaggtccctcctcagctgaaagttggttgtgttctcctctgtgaattcaaaccatttgttggggtagacaatttgaagtggaaactcaatgcaaggatgggcaactagattacagaccacacacaggcttgaaaacatttaaaagtctggttgtgtaatggaacacaatacaatgtaaaagacttggggtcstttgcaactggcatagaccagcccagaaccgtrggtttgagggcagcaacaccagtttctgctagctgaaatcccggcctttaatctgccgtcaatctaataaaattgagctgctctaattaccacagtgtctgtcgtttgcctgagatgataaagctgagttggatcccacacaagtcagcaaacactctgcaaatctgagttaaaccatttgtttgcccacttaaggaaaggttgtccacggtcatggtatgtgtggaaagacagcgggggagtgagaggaacaaccgaaacatatg

SEQ ID NO: 82869 - DNA, 599 bp, Chicken  19866894378142_2
  misc_feature (1)..(27): n is any nucleotide
nnnnnnnnnnnnnnnnnnnnnnnnnnntcccaaaagatgagtttttgattacttattttactgtgcatggatcagaaggtccctcctcagctgaaagttggttgtgttctcctctgtgaattcaaaccatttgttggggtagacaatttgaagtggaaactcaatgcaaggatgggcaactagattacagaccacacacaggcttgaaaacatttaaaagtctggttgtgtaatggaacacaatacaatgtaaaagacttggggtcstttgcaactggcatagaccagcccagaaccgtrggtttgagggcagcaacaccagtttctgctagctgaaatcccggcctttaatctgccgtcaatctaataaaattgagctgctctaattaccacagtgtctgtcgtttgcctgagatgataaagctgagttggatcccacacaagtcagcaaacactctgcaaatctgagttaaaccatttgtttgcccacttaaggaaaggttgtccacggtcatggtatgtgtggaaagacagcgggggagtgagaggaacaaccgaaacatatggccaaagtgagctgtctctggaatccaatgtac

SEQ ID NO: 82870 - DNA, 448 bp, Chicken  19866894378142_3
cgtttgcctgagatgataaagctgagttggatcccacacaagtcagcaaacactctgcaaatctgagttaaaccatttgtttgcccacttaaggaaaggttgtccacggtcatggtatgtgtggaaagacagcgggggagtgagaggaacaaccgaaacatatggccaaagtgagctgtctctggaatccaatgtactgggataagacaagctgttgaactgaagagaaagcttccatatatacacacacatgcatacatacatactatatatatatataacataccaatatatccttgyacacatatatgtgtacatatatttatatacaaacaccatatttcaaaattaaaactggaaggaattcggtatcactggtctcacgtgtgtttgaatgtgtttgaatgaaggtaaaacaggctgttaaactgaaagcctaggaaaaaag

SEQ ID NO: 82871 - DNA, 600 bp, Chicken  19866894378145_1
agggggaaatctgaaagctgccagccaatttaatttaccgtaggcttaaaagaggataatgtctgtcacagtctgctgttattacattgggcaagtcactttccttcacctctgcctcagtttcccatctggaaatgagaataacaaaactgatctccttctcgttgtgctttgaaaatgacagatgtaaagcacagcatacaagctctgtattctgtttgccatcaagattcataaccaatccatatggtaggtaaaatattctctatcaggacacaaatagagaacttaactgtttcwgagcagaaaaatcttcctcaaaaaccaacaagcaaacaaaaatcccacaaccagctgccacaaaacacacaaacagaaccctcctgccccctccaagtatccacctgtgctggaaccatgcttagccactggctgtacagggaagataggcagtcagaagcagcaggtaggtagctgggagcaccaaggcacgagcttacctcctatgctgaggactgcagtgccttccaagaatatccaagctccaagcatatcttggagcatattcaactaactgttgatttacgttttctttctttg

SEQ ID NO: 82872 - DNA, 600 bp, Chicken  19866894378149_1
ttggttgagtgcagagtcaccctgctctaacctgttcattctgcaccatgtcccttagaaggttttccactgatatctgctcacggggcttgaattcagcctacagtcagtgtatctcagcatggctttactgatgtcagtagagcatcttcactttacgctgactgaaaatgtagcccaagtacaagtttttgagtagatgtttttgaagaaacagcagatcatgtacatgaataatacatagactgtgtacatatgtatgtatttaagacagtctcttaaaactgcctcttctctatratgccacacagataattgtctgcaattyttagttgtatttcttgatgggggagctttaagcttcagtcaggggaactgctagttacttagagcatctgacttctgtcaaatacattctattgtgtagaacagtaacctttactttataaatatatttcttaattcaaattagactttgtatgatgataatttattttatgctrtctaaataatgaagttaaagcttaacattagttgcacagtaatattttggttatactgaacgtcttatatgattggagacatacctattttttctct

SEQ ID NO: 82873 - DNA, 600 bp, Chicken  19866894378149_2
aacctgttcattctgcaccatgtcccttagaaggttttccactgatatctgctcacggggcttgaattcagcctacagtcagtgtatctcagcatggctttactgatgtcagtagagcatcttcactttacgctgactgaaaatgtagcccaagtacaagtttttgagtagatgtttttgaagaaacagcagatcatgtacatgaataatacatagactgtgtacatatgtatgtatttaagacagtctcttaaaactgcctcttctctatratgccacacagataattgtctgcaattyttagttgtatttcttgatgggggagctttaagcttcagtcaggggaactgctagttacttagagcatctgacttctgtcaaatacattctattgtgtagaacagtaacctttactttataaatatatttcttaattcaaattagactttgtatgatgataatttattttatgctrtctaaataatgaagttaaagcttaacattagttgcacagtaatattttggttatactgaacgtcttatatgattggagacatacctattttttctctcagtttatgttgttttttgccattaaat

SEQ ID NO: 82874 - DNA, 553 bp, Chicken  19866894378149_3
ttttgaagaaacagcagatcatgtacatgaataatacatagactgtgtacatatgtatgtatttaagacagtctcttaaaactgcctcttctctatratgccacacagataattgtctgcaattyttagttgtatttcttgatgggggagctttaagcttcagtcaggggaactgctagttacttagagcatctgacttctgtcaaatacattctattgtgtagaacagtaacctttactttataaatatatttcttaattcaaattagactttgtatgatgataatttattttatgctrtctaaataatgaagttaaagcttaacattagttgcacagtaatattttggttatactgaacgtcttatatgattggagacatacctattttttctctcagtttatgttgttttttgccattaaatacacttgttaacttttatttgtgaagctaacagttatgggttgttaacttgaggggcagcttcatagacaattttatacacattacactgcctcctctagtgtattgcaaaatcatttaacttcagta

SEQ ID NO: 82875 - DNA, 600 bp, Chicken  19866894378152_1
tactgaaagagccaggttgttttaagaattatccacatataacattcagatgaaagttctagaaaaaggagataatgaaaacttctctgaaaataatttatcattaaaagcgatatctatccaactgcactataatactattagaagaaaaagcattctcaggaatcttagtgctctttgtcatgtagtacttggttatatttctttagacagatgttaaatgtagtgctgcaaaagcaaaaggtagcatttgccaaatatgcagcaggaaagaagcaggaaataaaacccttcaacttyttgcaagataataaattatcaagaacagtgaagcaataagagcttgcagaaaaatgaatctttatgagargcagaaaaaaaaatgcacacaagattgaaaaaggaaaaagaaactttagaaagtttcagtgtttgagaaaaagtatttaagagctgttatcctgataaactatataaaagttaggcatattgtattatgctatttgcctagtcaatggagatagaagcaactcctgaatagtgtctcaaatgtgtaagttaagtacatctgcaagtacctaatgctcttgtaaagggagc

SEQ ID NO: 82876 - DNA, 600 bp, Chicken  19866894378152_2
gataatgaaaacttctctgaaaataatttatcattaaaagcgatatctatccaactgcactataatactattagaagaaaaagcattctcaggaatcttagtgctctttgtcatgtagtacttggttatatttctttagacagatgttaaatgtagtgctgcaaaagcaaaaggtagcatttgccaaatatgcagcaggaaagaagcaggaaataaaacccttcaacttyttgcaagataataaattatcaagaacagtgaagcaataagagcttgcagaaaaatgaatctttatgagargcagaaaaaaaaatgcacacaagattgaaaaaggaaaaagaaactttagaaagtttcagtgtttgagaaaaagtatttaagagctgttatcctgataaactatataaaagttaggcatattgtattatgctatttgcctagtcaatggagatagaagcaactcctgaatagtgtctcaaatgtgtaagttaagtacatctgcaagtacctaatgctcttgtaaagggagctatgagtgcaacgataaatttaggagaaaaatatcacacagtagtgcattagtaagagacaataaataga

SEQ ID NO: 82877 - DNA, 600 bp, Chicken  19866894378157_1
tgaggcagcttttgtgggtgattaaacactgaacaggatcggacgcatttgttgaatgcaggatctgtttattgtgactttacatccatctccatctagagtatctttcctgttgcatagcaaaacaaaagaaagtcaccggccaaaaatatttcccttgcctcatcatgctttcaaattcccagctgtcttcttaaatttttctgctgctggcctcataggactctagagcatgatccaactcccactgaagtcagtcagagccttctcagtttgcttcagctaagccacatcagatcygaaatgaacagcaggtagggaaagggctgagggaaaacaactggtacatggatggacttctgtggaataacagtgtggttgacacaatgccattgagggytctgatgccatttgtgaaagagcaatctttgatttgttggaggtgtgtgattagccggaatcctttcctcatacagtatgaaacaccaaaagtggaaatccagactgaatgcatgagctcaacttctgctagcatcaataaggtttctgcacactcatcgatctgtgactgtatgtgaccctgaaatatgttttgctagt

SEQ ID NO: 82878 - DNA, 600 bp, Chicken  19866894378157_2
gtatctttcctgttgcatagcaaaacaaaagaaagtcaccggccaaaaatatttcccttgcctcatcatgctttcaaattcccagctgtcttcttaaatttttctgctgctggcctcataggactctagagcatgatccaactcccactgaagtcagtcagagccttctcagtttgcttcagctaagccacatcagatcygaaatgaacagcaggtagggaaagggctgagggaaaacaactggtacatggatggacttctgtggaataacagtgtggttgacacaatgccattgagggytctgatgccatttgtgaaagagcaatctttgatttgttggaggtgtgtgattagccggaatcctttcctcatacagtatgaaacaccaaaagtggaaatccagactgaatgcatgagctcaacttctgctagcatcaataaggtttctgcacactcatcgatctgtgactgtatgtgaccctgaaatatgttttgctagtatgcctgagatcattgctcatgcttggaatagaaatgacaggattggatttatcactgaaaagtaagcagtgcatatcttctgcgtgaaggataaccaat

SEQ ID NO: 82879 - DNA, 600 bp, Chicken  19866894378160_1
gcgggcttctttcagggcataaatctgagaggtcctctggaaggtgctagaggaatagagcaaagcaagcacctgcaccattacaaagggccaaggccatgtgggactcacacaagacttctagaggaaatcagatggcctacaatctccaatgcattgatcaaagtgtagtggaaggtgacagatgtgacagcaatccattaaaaatatccatggccatctggagagcacatggctgccaggcctgaatgccacatcaagatctcagtgcaaaacacagtgatgaacagactcagtagrcacctggataagcatataattcatgcaggaagcgtcctgagatgcgtaaagggtagtcaggtcccccaggtcttgggaaagagtcaaaaaggatgtggaggagagccatgtggtcaactgtttccagactgtgagctcctcctcgctctccatttccacttcccctatggatgctctgctcattttttctcacacctgaatcacaatcccctaattactcccactgtgctttttgcttctgagctctctgcaaaaagccctctctgtctcttctctttcttccttgtgctttctacttct

SEQ ID NO: 82880 - DNA, 599 bp, Chicken  19866894378169_1
  misc_feature (1)..(16): n is any nucleotide
nnnnnnnnnnnnnnnntgaactgaatcctcttggttttatttttaattagtttcacaggatattcccatatgggaaaaaattgagcaaaactcctctgagatcttttcatcatgtttgtgtgagtctgatcatccatcattactgaaagcctgttgtacttctagcactaagcctaacataaagcatttttttcttttgatagttcttatgtaaaccccagatgcagagaacaccacaagcacctatgatttgcaagagaaagaatgaaaatgcaagagaagcatttacaggccaacagyctccytgttatttctatagtgctctcatcactttcacagctctcactcatttttattaggcttgcttggaaatacttattttgggagggaaaattgcgtcttgcagctccactttattgctaagtaccaacatcacctttttttcctttttacatacctcaagtctggtctggaaattacatacttatcctttatctcattttctcatgataaccaaccattaggtttggccagtggctacccaaagaaacagcaactacttcacattgtttaatccacatagcagaccacctcactgt

SEQ ID NO: 82881 - DNA, 599 bp, Chicken  19866894378169_2
  misc_feature (1)..(11): n is any nucleotide
nnnnnnnnnnntgaactgaatcctcttggttttatttttaattagtttcacaggatattcccatatgggaaaaaattgagcaaaactcctctgagatcttttcatcatgtttgtgtgagtctgatcatccatcattactgaaagcctgttgtacttctagcactaagcctaacataaagcatttttttcttttgatagttcttatgtaaaccccagatgcagagaacaccacaagcacctatgatttgcaagagaaagaatgaaaatgcaagagaagcatttacaggccaacagyctccytgttatttctatagtgctctcatcactttcacagctctcactcatttttattaggcttgcttggaaatacttattttgggagggaaaattgcgtcttgcagctccactttattgctaagtaccaacatcacctttttttcctttttacatacctcaagtctggtctggaaattacatacttatcctttatctcattttctcatgataaccaaccattaggtttggccagtggctacccaaagaaacagcaactacttcacattgtttaatccacatagcagaccacctcactgtgagca

SEQ ID NO: 82882 - DNA, 600 bp, Chicken  19866894378172_1
tctgtgtgacatagtggttcctggaccatctaggtgtctgctgattggtgtatattgcttggtgatagggatatagagcattgtgtaatcctgtatgagaaaagacagtgcatagctcattctttgatacttataatctcttagatttatctctccatttagttttccctctcacagagagttgcattaaaagattattcaatttcacacctgctgagagaagtaaaaataagtgatctttttatttatttattaatttattgtaatctatctcttattgtctgtgtaagatgctatcaraataaacctgcttagatgaatgtctggatgtctctgtcctgtctctgtcggtacaagctccatgttggaaacaaggtaatccatactttgggtttgaaataggcttaggggaaaaggaagaatggaagggttcaattttcttgttttaagactcactgattgggatttgcaaaacataatgaactgccttgccatctctgtttatggtttgcagtcaaaagaataatgtatatccatgtgatttcggtatggtaatgtagtaatcaagcaaacaaaaaatcaccaccaacaaacaacaaa

SEQ ID NO: 82883 - DNA, 600 bp, Chicken  19866894378177_1
atatacatatagtaattctagtaataggtagacagaagttccagcaaactttgataaacactgacaaaggatcaaacaacattatttgaaagacaattattcaaatataactacactaaacttagtggactgggctaaattcaatacaaagacatatttgaagtataatatttagatattttttttttatcaaatttgtattgtagataatagaattcaccattaatctattggccacaaactaagttttttcgatgatattaaggatatcatgttttttatgccagaataatttatcakttataattctttaaaactatattgtactatataatgctatcttaataatatactctattatattatactctaaaataaatcactgacggacatttctaaatcaacaagtttcaatgtttggcctggcaattaacaggaacagcrgaataaggacttagaaactcctttctgaatccatttttggagccagattctatctgaatttttaatattatgtaagataattatgcaaatttttatttatacatatatatatctccaaaatatcattacactaaggccaaagtgtctcagtttcct

SEQ ID NO: 82884 - DNA, 600 bp, Chicken  19866894378177_2
tacaaagacatatttgaagtataatatttagatattttttttttatcaaatttgtattgtagataatagaattcaccattaatctattggccacaaactaagttttttcgatgatattaaggatatcatgttttttatgccagaataatttatcakttataattctttaaaactatattgtactatataatgctatcttaataatatactctattatattatactctaaaataaatcactgacggacatttctaaatcaacaagtttcaatgtttggcctggcaattaacaggaacagcrgaataaggacttagaaactcctttctgaatccatttttggagccagattctatctgaatttttaatattatgtaagataattatgcaaatttttatttatacatatatatatctccaaaatatcattacactaaggccaaagtgtctcagtttccttcaggatatgaataaaagaaatctgaacctcaaaagtactacaggctagattgagcagctttttttccccagaaactgtgggcttcttaaacagagtcgcagcctcctgtctctgtaaccctacccatgccctagaggaaggga

SEQ ID NO: 82885 - DNA, 600 bp, Chicken  19866894378185_1
ggaaaactgtaaataggagaacatatggcacaaattacaccataagggctaagcgaatcttaaattctaaacatcctcttgggttagaccttcttcttagcagtcttctgctgtctctagcataagctgatgcttcagtaaatattattataccgaaagagtttgttttgtttggacgtttgatgtcagaaaagcaattccattgcagcaagaggctgctcagcagcgacactacctgaacatcctgcacacggggagcaaacagcaagcctgagccccatcctggggggcttccagcartgggtggctgcgtatcaggggtgctcggctctggctctgttgggaaggcagaagggcattgcacacaatggagttgcatttatgagtcaaatacagcttcctagggacatgcactgcattagagaaacctttctcaaatcttttaagctgctgccaattaacttacgtgtcatcttacacacaatatatcttgaattcccagtggaactcattcaaagaaaggagctctaatcgtgtttctggaatacttttgattaactaagtgaatcttagttaatcaatcttgcagtaagcagaatc

SEQ ID NO: 82886 - DNA, 600 bp, Chicken  19866894378187_1
tatgcatgtgcttacttttaaaacagatacttatgtttctccatgtctgggctgtcacatatcttgccttttccatctcagtcaagtgcatgttatatacgcttgggatgagaagactggcagatttgttgtcagggtcttttgataattctgccatactgtatcttttcatgtgtgtatctcttgccttagcgaaggaaaaagattttcaaaataaatgaattcatttttgacagtatcacatagaagaaactacagtgataatagccaatgaggacaaaaatacatcataatgaatgrtacataatgaacaagtaccattaaccactgcatgtattgttgatgctattgcaacacacaccaatgctgcggtactacgacagcaatggcaagctgaacaccctctatatgctcctgctttaagaaggtgacgcttctcattactaagtgtgataacaattgagaaaggagggaaagaatgataaacaaaaaccctgattgtgttttttgactaggaagtatttgtacgttgagaatctattcaggagatggttcgaagaaactttgtggaaaagcggtgacacgtgactatctattgta

SEQ ID NO: 82887 - DNA, 600 bp, Chicken  19866894378192_1
tccctccccccgaggctcctggccacggcccagcccaggctgctccatctctgtcctctacccaagtgacagtgacaaagcccagagccccttacccccgcagcagaacaccatgttcctagggacagggtgtccactcctgctgccatctcccagctgctggccagccccaggcgggcagctctgccctcgtgtgctgcagcatgcccacgggggccatggagctcacaccccacacagggccgattgttcacgctgagctgcagctgccccggggtgagcttggctctgtggatgggytcccccatggcccacggcgcatcaagggctcccttgttcccacacaaggccgcacgctagcgagcccggggtgctgtcggctgctttttccagataaggagctgctctctccccagccctgcttgggaacaatgctcccagcatgcgggctcagtgatgctgtgcgtcacccagtgcggaggtggctgcaccgcgggtttggcatggggaacaccacttgctcccgtcctgcactgctcaccgcatgctgtgagcagggctgggagctgcagcgcagcagctgtagctgagatttcccca

SEQ ID NO: 82888 - DNA, 539 bp, Chicken  19866894378192_2
gtcgggacctctgggagcgtgaggaccctgaggccatgggatcagcgtgactcactctgggaacacccggtggcagggctgggacatggctttaactcttgctgtcccatcctccacgccccaggattgcaatgaggcgtgggaaagggcagtgccgcagcatttctgccagcactgtgccttcccgacccagtggtggctgagaacagtgaccagcactgctccctcggccaccccacgagcaggaggctctccttcctgaggttgcagcattgctgcatgttttgcatttcttttcawagggaaacgaaggattcggcagctgggaggaaaccattgggctgctggcagcgctgcaaatggaacaggatctcgtcaacctctcggcagggygccgcgggcagcgaggggatgtgggcagggagcagatctccttagcaaacactgcagctccaagccccgctgacctccccgtggccgtgtcagcacttgtgcaaacaggagagagggctgcaagcttcgtccctccgtctctgcat

SEQ ID NO: 82889 - DNA, 446 bp, Chicken  19866894378192_3
aactcttgctgtcccatcctccacgccccaggattgcaatgaggcgtgggaaagggcagtgccgcagcatttctgccagcactgtgccttcccgacccagtggtggctgagaacagtgaccagcactgctccctcggccaccccacgagcaggaggctctccttcctgaggttgcagcattgctgcatgttttgcatttcttttcawagggaaacgaaggattcggcagctgggaggaaaccattgggctgctggcagcgctgcaaatggaacaggatctcgtcaacctctcggcagggygccgcgggcagcgaggggatgtgggcagggagcagatctccttagcaaacactgcagctccaagccccgctgacctccccgtggccgtgtcagcacttgtgcaaacaggagagagggctgcaagcttcgtccctccgtctctgcat

SEQ ID NO: 82890 - DNA, 599 bp, Chicken  19866894378198_1
  misc_feature (1)..(116): n is any nucleotide
nnnnnnnnnnnnnnnnnnnnnnnnnnnnnnnnnnnnnnnnnnnnnnnnnnnnnnnnnnnnnnnnnnnnnnnnnnnnnnnnnnnnnnnnnnnnnnnnnnnnnnnnnnnnnnnnnnnnggcggttagggctttctgaaggagatagagagcagaagagtctatttcaacactacacacagagcagacccactgatggtggaaggaagaagccactactgcaggctcagctggagggtacatgggctggtcaaactagcattagggaatgtacattcgctgtgttctagtcttggaaaagctyggataagtagcccaacatgcaatctgatacaactgcatttaatacgactgctcattttctccccattggcattcccagggctacagtagcaatgcaaaataaaggagttacctctcatttaaacagaaataaagatgactacagcagtcaatatagggatctcaagaaaggctgaagctcaaagattagaaaatacatcacctaaytgttcagtacagcacctgctatgataggctycctgcacttgaaaactcgcaggcctcaaayacagtgaagagacaggctcagttgggtatgca

SEQ ID NO: 82891 - DNA, 600 bp, Chicken  19866894378198_2
agccactactgcaggctcagctggagggtacatgggctggtcaaactagcattagggaatgtacattcgctgtgttctagtcttggaaaagctyggataagtagcccaacatgcaatctgatacaactgcatttaatacgactgctcattttctccccattggcattcccagggctacagtagcaatgcaaaataaaggagttacctctcatttaaacagaaataaagatgactacagcagtcaatatagggatctcaagaaaggctgaagctcaaagattagaaaatacatcacctaaytgttcagtacagcacctgctatgataggctycctgcacttgaaaactcgcaggcctcaaayacagtgaagagacaggctcagttgggtatgcagtccagtattatgtcaggcaagattacaggatgacctgatcaggttctcatggcactgaacgtggcacctggcttcactcacatgtcccagcccaattctgcccctcctggctcacttgcatttggcatcaccacaggttgaatttgtccccagttaccatggccttacaaagactttaagaatggttacataggcaaagggaatgt

SEQ ID NO: 82892 - DNA, 600 bp, Chicken  19866894378198_3
atgggctggtcaaactagcattagggaatgtacattcgctgtgttctagtcttggaaaagctyggataagtagcccaacatgcaatctgatacaactgcatttaatacgactgctcattttctccccattggcattcccagggctacagtagcaatgcaaaataaaggagttacctctcatttaaacagaaataaagatgactacagcagtcaatatagggatctcaagaaaggctgaagctcaaagattagaaaatacatcacctaaytgttcagtacagcacctgctatgataggctycctgcacttgaaaactcgcaggcctcaaayacagtgaagagacaggctcagttgggtatgcagtccagtattatgtcaggcaagattacaggatgacctgatcaggttctcatggcactgaacgtggcacctggcttcactcacatgtcccagcccaattctgcccctcctggctcacttgcatttggcatcaccacaggttgaatttgtccccagttaccatggccttacaaagactttaagaatggttacataggcaaagggaatgtaagcttggacaagtcatttacgaaggaaact

SEQ ID NO: 82893 - DNA, 600 bp, Chicken  19866894378198_4
tacattcgctgtgttctagtcttggaaaagctyggataagtagcccaacatgcaatctgatacaactgcatttaatacgactgctcattttctccccattggcattcccagggctacagtagcaatgcaaaataaaggagttacctctcatttaaacagaaataaagatgactacagcagtcaatatagggatctcaagaaaggctgaagctcaaagattagaaaatacatcacctaaytgttcagtacagcacctgctatgataggctycctgcacttgaaaactcgcaggcctcaaayacagtgaagagacaggctcagttgggtatgcagtccagtattatgtcaggcaagattacaggatgacctgatcaggttctcatggcactgaacgtggcacctggcttcactcacatgtcccagcccaattctgcccctcctggctcacttgcatttggcatcaccacaggttgaatttgtccccagttaccatggccttacaaagactttaagaatggttacataggcaaagggaatgtaagcttggacaagtcatttacgaaggaaacttatgagaataacttcattcttcattcctca

SEQ ID NO: 82894 - DNA, 600 bp, Chicken  19866894378203_1
gctgcccgttcaaagtgtgtgtccgtgcagcacggtgacctgcaaagccattcagctcggtggctttctttgccatctctgcttatatagagttgctggctgtggtttagtgggcaatactggtggtaggtggacggttggactggatgatcttaggagtcttttctaaccttaatggttctgtgatatgtaggcaggtctgagctgtccagctggggtcgggggcagtgggttctgtgctccagatatgtgatgtggttggtgggagcgagtctcatttatcacttaatgttggcttayaagcaaaaagaatgaaatggaagaaagaattaagcaaaaagaggtggaagcattgaagctgcccrgttatgggttgctggagaggtggagctgattccagcctgcagcattaaaccatgcagtgacctgcaagggcagggagtagggcttagtgaaaataaaaggtaaagttgagcaggagcccgtgggtttagattacgttgcccttctctaatctctttgaagtggcttgctgctccctgaaacagacttctgtaaagccatctgaagatgcctctgggatcagaagcttggtgcaat

SEQ ID NO: 82895 - DNA, 600 bp, Chicken  19866894378203_2
ttctttgccatctctgcttatatagagttgctggctgtggtttagtgggcaatactggtggtaggtggacggttggactggatgatcttaggagtcttttctaaccttaatggttctgtgatatgtaggcaggtctgagctgtccagctggggtcgggggcagtgggttctgtgctccagatatgtgatgtggttggtgggagcgagtctcatttatcacttaatgttggcttayaagcaaaaagaatgaaatggaagaaagaattaagcaaaaagaggtggaagcattgaagctgcccrgttatgggttgctggagaggtggagctgattccagcctgcagcattaaaccatgcagtgacctgcaagggcagggagtagggcttagtgaaaataaaaggtaaagttgagcaggagcccgtgggtttagattacgttgcccttctctaatctctttgaagtggcttgctgctccctgaaacagacttctgtaaagccatctgaagatgcctctgggatcagaagcttggtgcaatggctgaagctttccctctgtgattgtttgtgggtttccagttctgaggcagctacatcctttcta

SEQ ID NO: 82896 - DNA, 599 bp, Chicken  19866894378207_1
  misc_feature (1)..(261): n is any nucleotide
nnnnnnnnnnnnnnnnnnnnnnnnnnnnnnnnnnnnnnnnnnnnnnnnnnnnnnnnnnnnnnnnnnnnnnnnnnnnnnnnnnnnnnnnnnnnnnnnnnnnnnnnnnnnnnnnnnnnnnnnnnnnnnnnnnnnnnnnnnnnnnnnnnnnnnnnnnnnnnnnnnnnnnnnnnnnnnnnnnnnnnnnnnnnnnnnnnnnnnnnnnnnnnnnnnnnnnnnnnnnnnnnnnnnnnnnnnnnnnnnnnnnnnnnnnnnnnnnnnnnnatcatttcctaaataattctccccacaataattcctagytttcaggacgactgctcctttggcagggggaaagcaagaaagaagaggaacactggtaacaagaaacagtggcaacaagagmaactatsgttcagattggcttctgcagagcacattttgtacccagagcagaggcacggtgctttgctcatggctcccatcctcttctcagccgcccctttgcccaagggctcctatccttgctgcttcccaatgccagagtcatgcttgggttgacagcagtgctggggctgcctccttctctgttcgcttaagtcttccacagtgtattttcttct

SEQ ID NO: 82897 - DNA, 599 bp, Chicken  19866894378207_2
  misc_feature (1)..(179): n is any nucleotide
nnnnnnnnnnnnnnnnnnnnnnnnnnnnnnnnnnnnnnnnnnnnnnnnnnnnnnnnnnnnnnnnnnnnnnnnnnnnnnnnnnnnnnnnnnnnnnnnnnnnnnnnnnnnnnnnnnnnnnnnnnnnnnnnnnnnnnnnnnnnnnnnnnnnnnnnnnnnnnnnnnnnnnnnnnnnnnnnnnnatcatttcctaaataattctccccacaataattcctagytttcaggacgactgctcctttggcagggggaaagcaagaaagaagaggaacactggtaacaagaaacagtggcaacaagagmaactatsgttcagattggcttctgcagagcacattttgtacccagagcagaggcacggtgctttgctcatggctcccatcctcttctcagccgcccctttgcccaagggctcctatccttgctgcttcccaatgccagagtcatgcttgggttgacagcagtgctggggctgcctccttctctgttcgcttaagtcttccacagtgtattttcttctccatccctaatctgcctcccagatttttttttttttaagttaacccaaactcagtgctgatttattttaaggtgccaggctg

SEQ ID NO: 82898 - DNA, 599 bp, Chicken  19866894378207_3
  misc_feature (1)..(172): n is any nucleotide
nnnnnnnnnnnnnnnnnnnnnnnnnnnnnnnnnnnnnnnnnnnnnnnnnnnnnnnnnnnnnnnnnnnnnnnnnnnnnnnnnnnnnnnnnnnnnnnnnnnnnnnnnnnnnnnnnnnnnnnnnnnnnnnnnnnnnnnnnnnnnnnnnnnnnnnnnnnnnnnnnnnnnnnnnnnnatcatttcctaaataattctccccacaataattcctagytttcaggacgactgctcctttggcagggggaaagcaagaaagaagaggaacactggtaacaagaaacagtggcaacaagagmaactatsgttcagattggcttctgcagagcacattttgtacccagagcagaggcacggtgctttgctcatggctcccatcctcttctcagccgcccctttgcccaagggctcctatccttgctgcttcccaatgccagagtcatgcttgggttgacagcagtgctggggctgcctccttctctgttcgcttaagtcttccacagtgtattttcttctccatccctaatctgcctcccagatttttttttttttaagttaacccaaactcagtgctgatttattttaaggtgccaggctgtaacctg

SEQ ID NO: 82899 - DNA, 600 bp, Chicken  19866894378209_1
tcttgtgcatccatccaatatactttctcatctcattgctcattattgcaagcactgtaaggatttctgtacagaatgagcatacaagctgaggcagaaaataaaggtataatagaataggcttcaaattgctccttgcagttctgcaactactgacattttgaaaaggcttctgacataaccaatatgacaatgtaattgttatataaagcagagaaaaagtatacattaggttcacactaaagcacagctgctcaggaaaaaaataatcacttgagtcatatctaacagccaaggcartatatgtaattagcataggcttcaaactgtaattaggtattagcagcgttgtttccttaattttattccaggctaggatctaggataagatttaggctattcaataacagacagcgatagtttcactacttttcaaatctcagtctctacaggcactgaaatttatcaggctgttacatattctccctcttctgcatttaaatttatggcattgtcttcatataaagtgttctggcagtatctttatcttgggctttagaaaaagcaaaaaaggcagaatagtcattgttctgctcctta

SEQ ID NO: 82900 - DNA, 535 bp, Chicken  19866894378209_2
gataagatttaggctattcaataacagacagcgatagtttcactacttttcaaatctcagtctctacaggcactgaaatttatcaggctgttacatattctccctcttctgcatttaaatttatggcattgtcttcatataaagtgttctggcagtatctttatcttgggctttagaaaaagcaaaaaaggcagaatagtcattgttctgctccttaaagactcctgctaagtagacaaccatttgtggagaacttcccaagtttcttgagcacttagctgcaactacctatacattctmagatgtgtctgctattgggaaaggagtatctagatctacatttgggcagataactgaagttcaaggctgttcagagataccacacttgcatcttgtataaaagtgtccttatcctgtaacagagatccctgcctgcatacatcttgactccactcaccacaaaatgaaagaacggtataattctagaaaatgaagctctcactctctcacacacacactttccctctttccttct

SEQ ID NO: 82901 - DNA, 600 bp, Chicken  19866894378211_1
atttcttggaaggaagcagagtgtgatgtgtgaacagaaaggttatgacagttcaatctattccaacaccattcaagacagaaaatgtctgaattacttaatgaaaaacaaaaaatgaggttaaatcttggttgactgctgggacctttacattttgaaaatcattaagaatgacgcactcaaaatatagtaatattaaatggggatattttctatgtcttttattttcttccctctttccctccttcgttccctccttcgttccttcgttccctcctttgttccctccttccctccttycttccttccttctgtccttccttcaatttcaagatattattcattagttgaatctggctatcttgtgttatgttgaaataactgactttgcaaaatgcctacttcagggtcaggaagtacaactggctacatgtagaaatgaaacaaatatgggggcaaggaaaaaattgaagtaagttaaaaataaaagtgtaggcacattggaaaatgatgtccttagaggccaagaagaaggcttgactctgatagctaggctgtggcacatctcatgctgctctcaggctcctatttactgtggga

SEQ ID NO: 82902 - DNA, 449 bp, Chicken  19866894378213_1
tgaaattggaagtctaaaaatggacaaaggagtaaactagagagcaattaaccttttgatgataaatgagatccctgacttgtgttccaaaatccacttcagggttgaaacatcgtaatttgctggatgcatgaatgccagcccctcgggcaggccctgcaccaccacagcagactggtctctctgaatcttctcataaggcaccgggaccaccgttgactttcctaaagctttccctaaaaccaaaaggagattgtcacaaagtcagcagctagcaaaaggacacatgcctcataaatyccattactttggagaggactggagagaaaacaaggcacagatgcaaacccctgcaggaaagcaagcacctcacgtaccaatattcagtggaacccactgaggcacagatgcttacttaaaagcaaaggggccatattgcacgacagcct

SEQ ID NO: 82903 - DNA, 600 bp, Chicken  19866894378217_1
caaacaatgcaaactggttccagtttcctacggcgtgtgagactttgtcagaggagcgtgcgtgggtatctacagaaggcaggtcaccagtcccactgggaaaaaaaaggaaaaagataacaaaagggatgaggttcatttattgcagaaggacattttcactgtgcttgatcagaaaagacagtgcccaggcatttgctccagcagctgcttgtctgcctcaaatcaaagaatcattaaagttggaagggacctttgaaagtcatccggttcaactcccctgcaatgaacaggaacacytacagcacgacaaggttgttgagagtcccatccaacctggccttcaatgtctccagcaatagggtatctaccacctctctgggcaacctgtgccagtgcttcactacctttattgcaaaaaaacttttttcttatattcaatataaatctcccctcttttactttgaaaccatttcccctcatcctatcacacagattctgctgaagagtatttcctcttctttcttacagcccctcacatggccttcagagggcccttccaacctcagtcagtccgtgggttctgtccttccgcaatgc

SEQ ID NO: 82904 - DNA, 600 bp, Chicken  19866894378239_1
taatgattgccatttgaataaccatgagttatgaaccttttgtaaaggttctgagcttctgaagactacaggatgtaaagtctatcttctttgataactcttgattaaaaagacattatttctttgcagcttgaactgatctgattcttgaaatgtattttttgctagcctaaaatttgcaggtgggtagcgctgaaggtcttgaactcaataccactaggtgtccatgtaataaaagcaggaattgttcgttttacacagctacagtaacagtacagtaacagctacagtaggtgtggrgatatgtagagtaagggtctgaagtaaagaatttaagttaccaaaagttcacttcagcctgcctttaatatattaaaattcgcactttcagttggttaaaggacaaataaagataagtgttgcattacaaagcatttcgagcctgttgattgtaagtgtacaggagatgcaacagtgctaccacaattgcacaatgtaagtgcaagagcaaaaaaagagcaaaaaatcacaacagtaacccaaaggtcaaagaaattaattcagataataaataaggaaacataacagttttaacttctc

SEQ ID NO: 82905 - DNA, 600 bp, Chicken  19866894378241_1
tattgttcttaatctgccaatatcacatttacgatttgcacaggctgcagatattctcttccataacaaagcagtcagagaaacacagccaaatctctgctcctcatcctcagtgtggattcctcctgtagctgtactggaattgcaatgtttcttcctctatcaacaattagactaacactgaataacgtatttagaatctggccaggatcaaagcaaactctgaggacagtcaggctaaggaggtgagaggtgatttctttgcagcttctgcttgcactggtgctctggtagcattcytctggcatggtttggggcaggaaggagaacatcctgcacagccacacacacacactgcctgctctgtggtggcctgggggatcagctgtcacttgccaacatctcatatacacaatgctgcacttcagagatctctggtaagggtaactggcctcctgcaagcattgcaggtgctcaccacccctccaggaatatcagaaatctgtctaatttctacaagcagcagtcatagctctggaactcagtcttctgggacccaaatttcaaatccaaatatcagttggatattgaaaaaccaaa

SEQ ID NO: 82906 - DNA, 599 bp, Chicken  19866894378245_1
  misc_feature (1)..(24): n is any nucleotide
nnnnnnnnnnnnnnnnnnnnnnnnccttcaagcactccagatgcccaaacctttatcctgccccaggaaagcaccccaactgaagtcgagcagctttcctctgggacgcgatcacttccgcatcctatcctcacactgtcctcattgcccacagaaacagatctgatcttcactgcacattatcctgctctccaacagcactgacaccacattacttaaacaaacacgagaagaaagactcagtgtacaaaaattcaatgcataaggaacctcctgtcccactattttacagtggctccrtgctctcaccagaaaaaaataccactttttcacaggcagtgctggaagtccaaaaagctttctgaagaattcggttactaaagggttctaagcttcagcaaaatacaggaatgccagaaaggagcaggatttcgtgaggaaagaatgacagaaactatacaacacaagctggaacagcagaacagaaattcccctctactttccaggaagtgaagagcacacacatgggagggagcactgtgctgtcactgcacaaaacaacaccagtgaactccaagagcgccaacgaaggcctaaaa

SEQ ID NO: 82907 - DNA, 599 bp, Chicken  19866894378277_1
  misc_feature (1)..(43): n is any nucleotide
nnnnnnnnnnnnnnnnnnnnnnnnnnnnnnnnnnnnnnnnnnntaccatagctccattttctcaggtccaaactgtattgagactgaatatatgttgctgataggctcatatacacacagtacgtacatatatatgtatacctacatatgcatatatgtgtgaccagacacatcaacaaagaaaatacagcattcacaaaagccaacacagtatgaacaacttcatcctcttgttctctatgcacaatcaggatgaaagcctattaatgaaaaatatagccatatatatatgcatatatwgaatctgaattccctagttactggttgtagacacacaacctgtctctggttcttctcttccctaggcagaacagacccaggttactcagcctttcctcatatgagagatgctccaggccctttgttgtctttgtggccctctgctggactgctaggagatccctgtcttttttgaactggggagctcagaactggactctgtagtcyacatgtgacctcaccagagcagagtagagggggaggaccatttccctcaacctgctggtcacrctctttttaattsacccaaaaaaacacat

SEQ ID NO: 82908 - DNA, 600 bp, Chicken  19866894378277_2
acagtatgaacaacttcatcctcttgttctctatgcacaatcaggatgaaagcctattaatgaaaaatatagccatatatatatgcatatatwgaatctgaattccctagttactggttgtagacacacaacctgtctctggttcttctcttccctaggcagaacagacccaggttactcagcctttcctcatatgagagatgctccaggccctttgttgtctttgtggccctctgctggactgctaggagatccctgtcttttttgaactggggagctcagaactggactctgtagtcyacatgtgacctcaccagagcagagtagagggggaggaccatttccctcaacctgctggtcacrctctttttaattsacccaaaaaaacacatacatgcatacatggttctctccactaggtagtctggaaactgatctagagataatttggcagtggtaccacaagggaaagcactgaaacccaggacagtcctcagcaatggctcaatatgagatgtcagagctcttgaggcattcgctgggtttcttacaataattgaaggcagcaagttaatttttaatcagacacttgcattatga

SEQ ID NO: 82909 - DNA, 600 bp, Chicken  19866894378277_3
aaaatatagccatatatatatgcatatatwgaatctgaattccctagttactggttgtagacacacaacctgtctctggttcttctcttccctaggcagaacagacccaggttactcagcctttcctcatatgagagatgctccaggccctttgttgtctttgtggccctctgctggactgctaggagatccctgtcttttttgaactggggagctcagaactggactctgtagtcyacatgtgacctcaccagagcagagtagagggggaggaccatttccctcaacctgctggtcacrctctttttaattsacccaaaaaaacacatacatgcatacatggttctctccactaggtagtctggaaactgatctagagataatttggcagtggtaccacaagggaaagcactgaaacccaggacagtcctcagcaatggctcaatatgagatgtcagagctcttgaggcattcgctgggtttcttacaataattgaaggcagcaagttaatttttaatcagacacttgcattatgacaggttcaatttgtttacagccagcctgagagtccctgtactgtcttcagccaacttaaaaga

SEQ ID NO: 82910 - DNA, 600 bp, Chicken  19866894378277_4
atatatatgcatatatwgaatctgaattccctagttactggttgtagacacacaacctgtctctggttcttctcttccctaggcagaacagacccaggttactcagcctttcctcatatgagagatgctccaggccctttgttgtctttgtggccctctgctggactgctaggagatccctgtcttttttgaactggggagctcagaactggactctgtagtcyacatgtgacctcaccagagcagagtagagggggaggaccatttccctcaacctgctggtcacrctctttttaattsacccaaaaaaacacatacatgcatacatggttctctccactaggtagtctggaaactgatctagagataatttggcagtggtaccacaagggaaagcactgaaacccaggacagtcctcagcaatggctcaatatgagatgtcagagctcttgaggcattcgctgggtttcttacaataattgaaggcagcaagttaatttttaatcagacacttgcattatgacaggttcaatttgtttacagccagcctgagagtccctgtactgtcttcagccaacttaaaagaaaaaatgacactg

SEQ ID NO: 82911 - DNA, 600 bp, Chicken  19866894378277_5
tgaggcattcgctgggtttcttacaataattgaaggcagcaagttaatttttaatcagacacttgcattatgacaggttcaatttgtttacagccagcctgagagtccctgtactgtcttcagccaacttaaaagaaaaaatgacactgcaatataactgcatacattggcaaagaggacagtgccttgactttacaacctctgcattagcagctcttccagtaccagagtaccaatgtttcacctaaatgcttgggatgggaattacctgaagtgactttatattatcaggtggatagygccaacttttaaagtgatgactactgtgtaatcacagtccttgtactggcatttcagcttctctcaatttgtttccttttccctttctttccaaatgctaatatgtgttacttgctggatttcttttacagaatgtcagatctcatgattgtgaaatgaattgtatagacgagctctaagtaacaacattctgccttccttctactgtagtgagcctgaccttgtctcagtcttgcaaacataaatcaggaatggaagattctgtttcaagttttgtgtaaccagtgacatgggtatata

SEQ ID NO: 82912 - DNA, 600 bp, Chicken  19866894378279_1
cccccttctgagttttgaaggagctgggagtttgtgacttggaaatattctttttaaaatattgtttcattcctgcataacaagtccttgaaaaattacctaagcagtaaggctgctttttaggaaacttctagaactattcgttgtgctgttcctttgcacctgcttgaaatgcatacagtattaatgagcctattgtaaatcgtgggccccttttctctctcactcacatttattttatgccaatgggatgatattaaatttccccctgcacctcccagcagcccaagcattctttaygctacttttttcatgtttcagattccaggctgcactggcctcatgtgggtagcaacagcagtccagtagctgccttgatatacagcttcttgctacaactcaatctgctccacatagcctacacagtgcatggcccagccattaacacttctgccacggcagaattttttgccccactgcaccctccatgcttaggaggggtgcagaaagccatgctgcagctacattctggttctctggcatcagcagggcaacagagaaaagcagccaggtccagtgctgtacgaatggctctacatc

SEQ ID NO: 82913 - DNA, 600 bp, Chicken  19866894378288_1
ccattcctggtattgctcaccttttcccacagaaaacgtggctgttaacagcacaatacacctttttcatttatgttttagaagaaacagtttacttaaattttagtctatagagaagactaggaaaaaaaaatgtttgcatagccacaggtcattcaacaagctgtattacaccaggaaagcctgaagaaaggcaaaaagcaattacatactctgacaccgtgtgtgacttttttctcttgtgcgatttgcttcgtgtcttatctcatgttctgtaagcactttctactatgttttaayggtatagaatagaaaaggaagggaataaaaaaagaagcataaaacaaaaacagtrsagtcatgaatgcggggataggtgggtagttactggtggagagaaaatttgcactcatctatgaagaaggaacatacatgagctaggaaaagttaaagacgatcaaaggaaaagaaattgcagttaacagaagatttctttctgaccacttgtgacctgagcaattktagtagtaacaactaatgttattcactgaataaatactgggagaaaaagatgataaatcaaaggcagagaagcacaga

SEQ ID NO: 82914 - DNA, 600 bp, Chicken  19866894378288_2
atacacctttttcatttatgttttagaagaaacagtttacttaaattttagtctatagagaagactaggaaaaaaaaatgtttgcatagccacaggtcattcaacaagctgtattacaccaggaaagcctgaagaaaggcaaaaagcaattacatactctgacaccgtgtgtgacttttttctcttgtgcgatttgcttcgtgtcttatctcatgttctgtaagcactttctactatgttttaayggtatagaatagaaaaggaagggaataaaaaaagaagcataaaacaaaaacagtrsagtcatgaatgcggggataggtgggtagttactggtggagagaaaatttgcactcatctatgaagaaggaacatacatgagctaggaaaagttaaagacgatcaaaggaaaagaaattgcagttaacagaagatttctttctgaccacttgtgacctgagcaattktagtagtaacaactaatgttattcactgaataaatactgggagaaaaagatgataaatcaaaggcagagaagcacagaaaaaaaatcttcagaaggtacgtttttcatgtcctcgttctgctcagaaacagca

SEQ ID NO: 82915 - DNA, 600 bp, Chicken  19866894378288_3
tacacctttttcatttatgttttagaagaaacagtttacttaaattttagtctatagagaagactaggaaaaaaaaatgtttgcatagccacaggtcattcaacaagctgtattacaccaggaaagcctgaagaaaggcaaaaagcaattacatactctgacaccgtgtgtgacttttttctcttgtgcgatttgcttcgtgtcttatctcatgttctgtaagcactttctactatgttttaayggtatagaatagaaaaggaagggaataaaaaaagaagcataaaacaaaaacagtrsagtcatgaatgcggggataggtgggtagttactggtggagagaaaatttgcactcatctatgaagaaggaacatacatgagctaggaaaagttaaagacgatcaaaggaaaagaaattgcagttaacagaagatttctttctgaccacttgtgacctgagcaattktagtagtaacaactaatgttattcactgaataaatactgggagaaaaagatgataaatcaaaggcagagaagcacagaaaaaaaatcttcagaaggtacgtttttcatgtcctcgttctgctcagaaacagcaa

SEQ ID NO: 82916 - DNA, 468 bp, Chicken  19866894378288_4
tgtgtgacttttttctcttgtgcgatttgcttcgtgtcttatctcatgttctgtaagcactttctactatgttttaayggtatagaatagaaaaggaagggaataaaaaaagaagcataaaacaaaaacagtrsagtcatgaatgcggggataggtgggtagttactggtggagagaaaatttgcactcatctatgaagaaggaacatacatgagctaggaaaagttaaagacgatcaaaggaaaagaaattgcagttaacagaagatttctttctgaccacttgtgacctgagcaattktagtagtaacaactaatgttattcactgaataaatactgggagaaaaagatgataaatcaaaggcagagaagcacagaaaaaaaatcttcagaaggtacgtttttcatgtcctcgttctgctcagaaacagcaaaaacatacagtccattacagagcctgctcatgtt

SEQ ID NO: 82917 - DNA, 600 bp, Chicken  19866894378290_1
ttccatagggacaggtcagaaagagcgagggatgttgcctctctctctgcaccccattccatattaaaaaaaatcacaattttccccagcaaatttactggcattggcgccatcacagcccatctagacctcaccattattcacatttagccttgatgttaaaataattgcaaagtgcaattgccttccgtgcaattttctcgtgtttccaaggcactctgctcagctttagcccgtgcacaaaggcttttgagaacatctctctctttataaagagcagagggcacagccctttaaatygagatagaaccagggctgttagcagagcctgagcttcccagccagtttcacgctgcaggatattttaatgcattgcagatgtcttaaatacccatgaagagtgatcttcagacgtggtgcaaaactgacaaaaagaaaacccaagccattaatacagaacacaattaacttaactggattctctctgcttttacatcaggcatttgggggatttataggtcaatgggttatgactttctgtagcttatcctactacaaaaattgagtgtgatgtcagaaacttgtcggataatttgaatt

SEQ ID NO: 82918 - DNA, 600 bp, Chicken  19866894378296_1
tgcaagtagacgtacttcatgaaactcagagtgaaggagatgaactattgacaatggtggcttggctattttcattgcagtgggtgaactgctgctctggatgtcagcagctgaggtcactgacagcactgatattacaagtttggtgatgctctgaagatactgcaccagtccaggtactgcagtcaagtagggaatacctgtcatcagttcacattctgaaataactctgttcatctcttcccaaaactcaacaaactgcattcctgaaacgagagttaataaactaagtaaagttgrccaatacatgttgttaccatctgctgcagacaatcaagtgattctgaagttgaaaatcttcagatatgcaaaaaacctctcaggtaaattyagaaataaaatgaaaatgtagatgtcaatttaaaattaattctgagttatgatacagctttcttggatatcatgtccattcatgtctgaatgcaaacaaatacgatagactgttctgaaaactataaattgttcaacatgtgatgaaagtgactgatgtaaacatacttaaatatatatgaaaacaatataggtagtttggaaagtcaa

SEQ ID NO: 82919 - DNA, 600 bp, Chicken  19866894378296_2
ctgctctggatgtcagcagctgaggtcactgacagcactgatattacaagtttggtgatgctctgaagatactgcaccagtccaggtactgcagtcaagtagggaatacctgtcatcagttcacattctgaaataactctgttcatctcttcccaaaactcaacaaactgcattcctgaaacgagagttaataaactaagtaaagttgrccaatacatgttgttaccatctgctgcagacaatcaagtgattctgaagttgaaaatcttcagatatgcaaaaaacctctcaggtaaattyagaaataaaatgaaaatgtagatgtcaatttaaaattaattctgagttatgatacagctttcttggatatcatgtccattcatgtctgaatgcaaacaaatacgatagactgttctgaaaactataaattgttcaacatgtgatgaaagtgactgatgtaaacatacttaaatatatatgaaaacaatataggtagtttggaaagtcaaaacacactaaatacaaatacacaatcatattaccctttatagaatagttctaagagtgaaagtgctccgttaggctacccagctgcagttg

SEQ ID NO: 82920 - DNA, 600 bp, Chicken  19866894378299_1
ctttagacagtacaatgtagatatacacttaaaactctgtctacactgtgaatttcatttaaattttatttcaaggattgctcctgatacgagttccacttgtgcacaagttccatcactctgatattctcctgtacaggtaaagcctgcatttattgtgatttgctggatgccaacattattgcttctcaggcctgagggtcccagtcctaaaatgttttttcccaatctctaattgtgctcagaaagaacaaagacacccttcctcatgcctcgaaatatgagaaaactcaaagagcmcaaagaatatctcttggcaccacacctctgcaaactgtactatagcaatcaaacaagaacagagggtgtgtagacgcacagcttgaatgctgcttcacagtctggttgttcttgcggaggtagtttaacggaagaacccaaatgaagctaaaggaagaacaccccctgatactgatgtgtttttttcaagcggacttcctgaataagtgagaacttcttggcaagacaatctgggtataagaatacacaatgaggttcctgacatttagcagcaatgtcttagcatagctttacagcata

SEQ ID NO: 82921 - DNA, 599 bp, Chicken  19866894378306_1
  misc_feature (1)..(29): n is any nucleotide
nnnnnnnnnnnnnnnnnnnnnnnnnnnnntctggctgggactgactgaactgcagaattcccactgctgcgaagttcagcactggtgtgcactccaactccaaagcctggaaatgcagtttgtgaaagatgttaaaaagtttgaattcccacccagcagccctcttgggatccgtgcctacacacccacccctgcagaaccttgcaggatacttttgacagaattttggattcagcaaaacagcatcttccactgaaattgttcactgtgcagccagggcaggctaaaggcctgcaatgrtgtagctgaggaagccctaatgcatggccatatcctgactygcagttccttttcagtgtacaatgagctgtatgcttgtagtgtacctggcttcttgcctgtaaaggctgtgatggttggacagagaaagcatctttcaacatggccgtgagtattatacagatcatgtagtagggaacgtactactccacagggcggtgttccagctcagctcttcatggtgtgtatttccttgtactgtttgcacctggaaacatttacttcagtttcttgcaacccccaaaggactggcagctcca

SEQ ID NO: 82922 - DNA, 600 bp, Chicken  19866894378306_2
tgactgaactgcagaattcccactgctgcgaagttcagcactggtgtgcactccaactccaaagcctggaaatgcagtttgtgaaagatgttaaaaagtttgaattcccacccagcagccctcttgggatccgtgcctacacacccacccctgcagaaccttgcaggatacttttgacagaattttggattcagcaaaacagcatcttccactgaaattgttcactgtgcagccagggcaggctaaaggcctgcaatgrtgtagctgaggaagccctaatgcatggccatatcctgactygcagttccttttcagtgtacaatgagctgtatgcttgtagtgtacctggcttcttgcctgtaaaggctgtgatggttggacagagaaagcatctttcaacatggccgtgagtattatacagatcatgtagtagggaacgtactactccacagggcggtgttccagctcagctcttcatggtgtgtatttccttgtactgtttgcacctggaaacatttacttcagtttcttgcaacccccaaaggactggcagctccagaacagctcttaatctttcattggttgctcttctttcttctc

SEQ ID NO: 82923 - DNA, 599 bp, Chicken  19866894378308_1
  misc_feature (1)..(15): n is any nucleotide
nnnnnnnnnnnnnnnctaaaatgccttcatctttcatgtaaagattcatactagctgacacaacagcactgagtcatgcacgtaggatcatgtctttattcatctagcaaaagtaaaacttgtgctctgaccgcgaactcagtgttcctacatggagcacacataatggatgtgccccgtgtcctggaaaagaagacggatttttagcaggtgctgagaactccatagtggacaatcattcaatattaacgtggttttttttcatgttccttttcctttcatccaagtggaaatgaatcygaatgacatttctgcacttcagctgggaaagaaaaggtcaaaggtgctaaaagcccctcttggtatatgagatactgcagatagaggtttgctctttgtccttaatactatgttaattaatcctgttaaggatggtgtgtgatttacacatgctttaacaagtgaacatcagtctgtgactgaggacrtgattctgtaagtcccttttgctcctgcctgactgtatgaatgcactcatcgcatggaaatgggctgcaggaatgccagttggaatgcacaaggccttagggctggatcga

SEQ ID NO: 82924 - DNA, 513 bp, Chicken  19866894378308_2
aaagaagacggatttttagcaggtgctgagaactccatagtggacaatcattcaatattaacgtggttttttttcatgttccttttcctttcatccaagtggaaatgaatcygaatgacatttctgcacttcagctgggaaagaaaaggtcaaaggtgctaaaagcccctcttggtatatgagatactgcagatagaggtttgctctttgtccttaatactatgttaattaatcctgttaaggatggtgtgtgatttacacatgctttaacaagtgaacatcagtctgtgactgaggacrtgattctgtaagtcccttttgctcctgcctgactgtatgaatgcactcatcgcatggaaatgggctgcaggaatgccagttggaatgcacaaggccttagggctggatcgaacttgcggaattaaggaaagaacagcagttttcactgcagctgggatcagatcttctgtatttggctatctaaactgcaggttcctagccacggtcagtcgt

SEQ ID NO: 82925 - DNA, 600 bp, Chicken  19866894378310_1
gctgtagaatttcctgctgctttcctctcttttattactcaggaactgtagtgagttttaactagaaatcctgatataattgtgcctatttctgtaaacagttttgaacaaaagggagtgttattcaatgttttagctttataggaacatgggtttctaaatatttactgaattaataaactagccaaaaaagagaaaagtccccatagagacagactgcagtgatatcagctgatgttaagtgttttgttggaggaaaggcgctcacgtgttcttgaggatagcagcaggatctaacaraggcaatgacatcagaagtaccccggtttatgtcacttactgccaaaatcaccaaattatttggkatcagagctgggattacactttggtagaagtgcctggttggggcttgttgcagagaagctgcaggcatgtgctagctgaagctggttcttgcctctggaaagcactgtgtgagtcaccttgctctgctggtagctgctggtgatgctgagccaggatggcaggggaaggcaccatgcagwgggggtagtggctgatagtgccctacagtcaccatcaagtcagtgtcctttctct

SEQ ID NO: 82926 - DNA, 600 bp, Chicken  19866894378310_2
aaatcctgatataattgtgcctatttctgtaaacagttttgaacaaaagggagtgttattcaatgttttagctttataggaacatgggtttctaaatatttactgaattaataaactagccaaaaaagagaaaagtccccatagagacagactgcagtgatatcagctgatgttaagtgttttgttggaggaaaggcgctcacgtgttcttgaggatagcagcaggatctaacaraggcaatgacatcagaagtaccccggtttatgtcacttactgccaaaatcaccaaattatttggkatcagagctgggattacactttggtagaagtgcctggttggggcttgttgcagagaagctgcaggcatgtgctagctgaagctggttcttgcctctggaaagcactgtgtgagtcaccttgctctgctggtagctgctggtgatgctgagccaggatggcaggggaaggcaccatgcagwgggggtagtggctgatagtgccctacagtcaccatcaagtcagtgtcctttctctaaaatgcagaagttttcttagcttactgccttatacacatgacatctagtgcaaaactgaaaggg

SEQ ID NO: 82927 - DNA, 543 bp, Chicken  19866894378310_3
tttgttggaggaaaggcgctcacgtgttcttgaggatagcagcaggatctaacaraggcaatgacatcagaagtaccccggtttatgtcacttactgccaaaatcaccaaattatttggkatcagagctgggattacactttggtagaagtgcctggttggggcttgttgcagagaagctgcaggcatgtgctagctgaagctggttcttgcctctggaaagcactgtgtgagtcaccttgctctgctggtagctgctggtgatgctgagccaggatggcaggggaaggcaccatgcagwgggggtagtggctgatagtgccctacagtcaccatcaagtcagtgtcctttctctaaaatgcagaagttttcttagcttactgccttatacacatgacatctagtgcaaaactgaaaggggacagagcctgcactaaataggcagcataatagcagcctaggagaagtgaaaaatgaaataatcagacatggaacaaaaacaagttttatagaggttgcacaatttgacaaaggtggtgcaat

SEQ ID NO: 82928 - DNA, 600 bp, Chicken  19866894378316_1
cctgtctcagtttaagaccattcccccttgtcctatcactatccaccctcctaaacagatgtatgaaggcttgtgtgttctcataacctaggttttcaaattgtcagtattacctacccatgagatacatgctttgtccagagcaaggtgacttgtccctcaggattttcatgaagcagagaagcttttctccaaaaataaaacaagataccatgggctacttctgcccaaatgtattaccctgtgtcctgcaggtcaaggcccatttggcctcagttaggcgatgttgcctttactggygctttgctcttagtggaccagagggatcttctgactcctacttcaattctgagctgccttattcattgaattagttmattttgctcaagtttgtacttctttttttcattgaaacacctgggcagtcagtggcaagggagtcccctcctgttccttgcacagaccagctgctgtaggattgcccagacagttctacaaaggaagggaaacaagtaacccagctgatgtggaatagagctgctgtgttggtgagaatgtggaaagtggttttgaagtcagcagttgctggtgctaaggtgg

SEQ ID NO: 82929 - DNA, 600 bp, Chicken  19866894378316_2
ttctcataacctaggttttcaaattgtcagtattacctacccatgagatacatgctttgtccagagcaaggtgacttgtccctcaggattttcatgaagcagagaagcttttctccaaaaataaaacaagataccatgggctacttctgcccaaatgtattaccctgtgtcctgcaggtcaaggcccatttggcctcagttaggcgatgttgcctttactggygctttgctcttagtggaccagagggatcttctgactcctacttcaattctgagctgccttattcattgaattagttmattttgctcaagtttgtacttctttttttcattgaaacacctgggcagtcagtggcaagggagtcccctcctgttccttgcacagaccagctgctgtaggattgcccagacagttctacaaaggaagggaaacaagtaacccagctgatgtggaatagagctgctgtgttggtgagaatgtggaaagtggttttgaagtcagcagttgctggtgctaaggtggttgaggtctcagcaatgtttggcagcattttccatgttagtctctgttgcacatgtgagaaaatgcttctggcaagc

SEQ ID NO: 82930 - DNA, 599 bp, Chicken  19866894378319_1
  misc_feature (1)..(119): n is any nucleotide
nnnnnnnnnnnnnnnnnnnnnnnnnnnnnnnnnnnnnnnnnnnnnnnnnnnnnnnnnnnnnnnnnnnnnnnnnnnnnnnnnnnnnnnnnnnnnnnnnnnnnnnnnnnnnnnnnnnnnnngaaaatcccttgctgtgtcacagacaaaaagtatgtcggggcactagcaagggacttcctaaaggcctgttatgtccccccatccttcattggcaagcaaataatttctatttatatgcccagaagagacctttttccacgaaagactgatgctatcacatgaatatcagcacgcatgacragcaatgtcctaggtcttcaatacgcagcgtaagatcattttatggtggctgataaaggcatttatttgagaccagggctgtggtttcatagcaacctaagagccatctgaaacattttttctacgctgagtgttaagaatactccaaacatctaaaaacgttcttcatttccactgtgccactcaagggctcgtgtaactcaaaaaaaaaagcaaaaatggggaayaaattcagtttctggctttttctggttagctgagttgtctaaatgcatggatttgccctcaacagaagaagt

SEQ ID NO: 82931 - DNA, 600 bp, Chicken  19866894378319_2
tatttatatgcccagaagagacctttttccacgaaagactgatgctatcacatgaatatcagcacgcatgacragcaatgtcctaggtcttcaatacgcagcgtaagatcattttatggtggctgataaaggcatttatttgagaccagggctgtggtttcatagcaacctaagagccatctgaaacattttttctacgctgagtgttaagaatactccaaacatctaaaaacgttcttcatttccactgtgccactcaagggctcgtgtaactcaaaaaaaaaagcaaaaatggggaayaaattcagtttctggctttttctggttagctgagttgtctaaatgcatggatttgccctcaacagaagaagttctgcctaaagaccttaattataacatttaattcaaggagcagaaaattcactgagcagaaaaaataaagaatctaagaaacaaagccgtgaagagtaaataggattagtgtgttacaatgaatgttttctaaccgatgggtggttttcttggttctaaatcacaggagccattctgctgaaaaagaagatctgctgatgggattacaaaacaaacaaactcattctg

SEQ ID NO: 82932 - DNA, 599 bp, Chicken  19866894378321_1
  misc_feature (1)..(71): n is any nucleotide
nnnnnnnnnnnnnnnnnnnnnnnnnnnnnnnnnnnnnnnnnnnnnnnnnnnnnnnnnnnnnnnnnnnnnnngacaggacgcataaccacaaggccgggggggactcagcaaaccatgaagtctgtcaagtctcagcatactctaagcctgccagatgttcacccaatgctgtcctggcagatgtttacccaatgtgctcatacaaaacctgaggttgggttctaggcacccttcccaggcagcacacagtacgaacaccctgtgcttgtgcagtaacctggggagtggagtgatgtgggkattcacagcaacaggctgtgcacgggcaggagattcagtcaggtagaagagaaatggttctggcatccagcccaccctgacaccagaataacagcatgacccacccagatggaaaattcaggctcacagctttatatttgtctaggcaagagcttgctaagtgtttttacactctcttcttattgtaaagagccatgcatatctctgcttctctgtgagttaggggaattgattgaaaatattcagttctggtttgttctatgagggaaaatatatcattccatattttaacgttttta

SEQ ID NO: 82933 - DNA, 600 bp, Chicken  19866894378326_1
atgcgacagtgtgcaataaaaggaaatactggttgtacacctgcccaggcaacaccgaacacttaagagtccacacagtgaggcttagcctgctctgcagtgtagtcatgcccaaagggctctcaggacagtggtgtcctatctgcagagatgacagcccttttgtctggtaacacttgaagcaaggcactcctgactgcctaggctgtcccctgaccaagagtcatgggttttatctccacagtctcttgcagtgctgtgcatgagttcagagaaagagttggttaatgtcattcatgwatggtgctggattggcagttttcaaatgtgtagaattcctctttttctcttctcagaaggcaagaacatttaagagcttacaacagggtcatctgtaagtataagaaccggatccagaaaatggcttgctggcttcctcwtttacttgccaggcttgttaactccaagagtttgcagatacaagaagcagaacccagcagctctccagtgcttgaatggtgacatctggtgggcatgaccctggagcagcaaacaggtcacaggtggtcacaacagagcayrcagaagtatggtgaggtg

SEQ ID NO: 82934 - DNA, 600 bp, Chicken  19866894378326_2
atctgcagagatgacagcccttttgtctggtaacacttgaagcaaggcactcctgactgcctaggctgtcccctgaccaagagtcatgggttttatctccacagtctcttgcagtgctgtgcatgagttcagagaaagagttggttaatgtcattcatgwatggtgctggattggcagttttcaaatgtgtagaattcctctttttctcttctcagaaggcaagaacatttaagagcttacaacagggtcatctgtaagtataagaaccggatccagaaaatggcttgctggcttcctcwtttacttgccaggcttgttaactccaagagtttgcagatacaagaagcagaacccagcagctctccagtgcttgaatggtgacatctggtgggcatgaccctggagcagcaaacaggtcacaggtggtcacaacagagcayrcagaagtatggtgaggtgcccacaacaccaccaacatrttttggagctcatccatactcacagtctgctcctatgatataagtcaccragacataaagtaacttctgagtgcagggggttatatcttctggagtaactcttaaattaattctctagaa

SEQ ID NO: 82935 - DNA, 600 bp, Chicken  19866894378326_3
tggttaatgtcattcatgwatggtgctggattggcagttttcaaatgtgtagaattcctctttttctcttctcagaaggcaagaacatttaagagcttacaacagggtcatctgtaagtataagaaccggatccagaaaatggcttgctggcttcctcwtttacttgccaggcttgttaactccaagagtttgcagatacaagaagcagaacccagcagctctccagtgcttgaatggtgacatctggtgggcatgaccctggagcagcaaacaggtcacaggtggtcacaacagagcayrcagaagtatggtgaggtgcccacaacaccaccaacatrttttggagctcatccatactcacagtctgctcctatgatataagtcaccragacataaagtaacttctgagtgcagggggttatatcttctggagtaactcttaaattaattctctagaagcaaacctttttacttgagtgcatctgggttcataccaccctagagattgctctaacagaggagctgggcacatgagaaggcagctgctacaaagaactacttgtcgcgtagctctttagttggcataaatgagcacgact

SEQ ID NO: 82936 - DNA, 600 bp, Chicken  19866894378326_4
ggttaatgtcattcatgwatggtgctggattggcagttttcaaatgtgtagaattcctctttttctcttctcagaaggcaagaacatttaagagcttacaacagggtcatctgtaagtataagaaccggatccagaaaatggcttgctggcttcctcwtttacttgccaggcttgttaactccaagagtttgcagatacaagaagcagaacccagcagctctccagtgcttgaatggtgacatctggtgggcatgaccctggagcagcaaacaggtcacaggtggtcacaacagagcayrcagaagtatggtgaggtgcccacaacaccaccaacatrttttggagctcatccatactcacagtctgctcctatgatataagtcaccragacataaagtaacttctgagtgcagggggttatatcttctggagtaactcttaaattaattctctagaagcaaacctttttacttgagtgcatctgggttcataccaccctagagattgctctaacagaggagctgggcacatgagaaggcagctgctacaaagaactacttgtcgcgtagctctttagttggcataaatgagcacgactg

SEQ ID NO: 82937 - DNA, 600 bp, Chicken  19866894378326_5
ttcaaatgtgtagaattcctctttttctcttctcagaaggcaagaacatttaagagcttacaacagggtcatctgtaagtataagaaccggatccagaaaatggcttgctggcttcctcwtttacttgccaggcttgttaactccaagagtttgcagatacaagaagcagaacccagcagctctccagtgcttgaatggtgacatctggtgggcatgaccctggagcagcaaacaggtcacaggtggtcacaacagagcayrcagaagtatggtgaggtgcccacaacaccaccaacatrttttggagctcatccatactcacagtctgctcctatgatataagtcaccragacataaagtaacttctgagtgcagggggttatatcttctggagtaactcttaaattaattctctagaagcaaacctttttacttgagtgcatctgggttcataccaccctagagattgctctaacagaggagctgggcacatgagaaggcagctgctacaaagaactacttgtcgcgtagctctttagttggcataaatgagcacgactgaagccagcagaactgtgctgatttaaatcagctatata

SEQ ID NO: 82938 - DNA, 600 bp, Chicken  19866894378326_6
taagagcttacaacagggtcatctgtaagtataagaaccggatccagaaaatggcttgctggcttcctcwtttacttgccaggcttgttaactccaagagtttgcagatacaagaagcagaacccagcagctctccagtgcttgaatggtgacatctggtgggcatgaccctggagcagcaaacaggtcacaggtggtcacaacagagcayrcagaagtatggtgaggtgcccacaacaccaccaacatrttttggagctcatccatactcacagtctgctcctatgatataagtcaccragacataaagtaacttctgagtgcagggggttatatcttctggagtaactcttaaattaattctctagaagcaaacctttttacttgagtgcatctgggttcataccaccctagagattgctctaacagaggagctgggcacatgagaaggcagctgctacaaagaactacttgtcgcgtagctctttagttggcataaatgagcacgactgaagccagcagaactgtgctgatttaaatcagctatataattcaacatgaggaaaattcaatggcagtaaagagtcttactgttgctta

SEQ ID NO: 82939 - DNA, 587 bp, Chicken  19866894378326_7
aaaactggaagatgaaaatggatgagaagaaaagcttttatttgcttgtgacagttaactgttagcaaagggcgagaaaaaaaatgacctcctttccttatgccactgcacaatgagcaaaaaatatctgtaagctcagcagctcaccttctctgaattgtcaacccagatactgtcagccagacttaagagtctacagagaactatctttctcctaacaggatttataaaatgggattaacacagttttatcaatcagtgaataagctgaagggatattaaatagaaaatccctacccraagaggaaaatgtaagacttctacaccattatgatttctgtactagactccattaagatgttggctaatttgtaggatacattatctccccctttaagctctcctccttgtgtgacaagtctcttggcagctgtcatgataacactctttaaaactgtttttcttgagaaattaaggcgataaaaccataaggagcatttgccacgactcagttaccatgtaatgactactcctcacttccctgttgattttaagcattcagccccttggagactgtagtgctcctg

SEQ ID NO: 82940 - DNA, 600 bp, Chicken  19866894378340_1
tgtagctcccattcaggtcagagccttctcttctccaggctgtatagccccagctctttcagtctgtccttgtaggagaggttccatcccttagatcatttttgtggcccttttctggatgtggtccaacaggtcaatgtttttcctctactgaggattccacatctggatgccatactccaggtgaggcatccaccagagcagagtattagagaaaggatcacctccctcaacctgatggccacgtttcttttgatgcagcccaggatatatagttggctttctggctgcaagggcatwttgctgcctcatgtccagcttcccatcagtacccctaggtcttttctggcaggtctgtacttgatcctttcatcttccagcttgtattggtggttgccttgacccaggtgcaagactttgcacttaaatttgctgaacctcatgaggttcacctggactaactactcaagcctgtctaggtccctctggatggcatcctgtcccttgggtgtgttgacagcactttacagcttggtgtcatcagcaaccttgctgaagatgcagtttatcctgctgtcagtgtcagtgaagatattaaag

SEQ ID NO: 82941 - DNA, 600 bp, Chicken  19866894378340_2
agactttgcacttaaatttgctgaacctcatgaggttcacctggactaactactcaagcctgtctaggtccctctggatggcatcctgtcccttgggtgtgttgacagcactttacagcttggtgtcatcagcaaccttgctgaagatgcagtttatcctgctgtcagtgtcagtgaagatattaaagagtattgatcccagcactgacccctgtgggacaccacttgtcattgatctccatctagatattgagctgttgaccaccaccctctggacttgatcctgcagccagttctttrtccattgaacagtccagtcatcaaatccatatctttccaattttgagagtaggatgttgtggggtactctgtcaaaggcctcatgaagtccagatagatgagatcagtgtctcttgacttgtcctttgatgcagtaacaccaacataaaagaccactgggttggtcaaacaggattagcccttggtgagaccatgctggttctcccatatcaactctctattttccatgtgccttagcatagctttcaggagaacctgctctgtgatctctcctgcactgaggtgagaccaccaarttgg

SEQ ID NO: 82942 - DNA, 476 bp, Chicken  19866894378340_3
tttrtccattgaacagtccagtcatcaaatccatatctttccaattttgagagtaggatgttgtggggtactctgtcaaaggcctcatgaagtccagatagatgagatcagtgtctcttgacttgtcctttgatgcagtaacaccaacataaaagaccactgggttggtcaaacaggattagcccttggtgagaccatgctggttctcccatatcaactctctattttccatgtgccttagcatagctttcaggagaacctgctctgtgatctctcctgcactgaggtgagaccaccaarttggtagtttcctaggtcatcctttttacccttcttaaaaatgggtgtgatgttgccttttttccrgtcaccagaggcttcacttgattgccatgacttttcaaatgtcactgtgagtggcttggtgactacatcagctaattcctccagtatgtctcttattggtacccacagac

SEQ ID NO: 82943 - DNA, 410 bp, Chicken  19866894378340_4
ggtactctgtcaaaggcctcatgaagtccagatagatgagatcagtgtctcttgacttgtcctttgatgcagtaacaccaacataaaagaccactgggttggtcaaacaggattagcccttggtgagaccatgctggttctcccatatcaactctctattttccatgtgccttagcatagctttcaggagaacctgctctgtgatctctcctgcactgaggtgagaccaccaarttggtagtttcctaggtcatcctttttacccttcttaaaaatgggtgtgatgttgccttttttccrgtcaccagaggcttcacttgattgccatgacttttcaaatgtcactgtgagtggcttggtgactacatcagctaattcctccagtatgtctcttattggtacccacagac

SEQ ID NO: 82944 - DNA, 599 bp, Chicken  19866894378341_1
  misc_feature (1)..(145): n is any nucleotide
nnnnnnnnnnnnnnnnnnnnnnnnnnnnnnnnnnnnnnnnnnnnnnnnnnnnnnnnnnnnnnnnnnnnnnnnnnnnnnnnnnnnnnnnnnnnnnnnnnnnnnnnnnnnnnnnnnnnnnnnnnnnnnnnnnnnnnnnnnnnnnnnntgagcaacttctttgtgactgaacggtgtcctgaggtacctcccagtacctggaatcacactcattgtcttttctttctttaatggatgtggctggtgacatatattagcagcacattacatcaaatccaacagcccctcctccatactttggaytttgcatgaagtattctacctggcccacacataaattagattaatgacctgytgtcaattaaaagtcyaacatatattttaccaagygctgtcctttcacacaaactggaatttactgccatccaagccctgcacactatctgaagccaacagcaaaaccagaatgcacacaactctcctgataagaagagagaaaattagaaacacggaagtttagttaagcaaatcscagtatccctggaaacaggtaactaacgccaggcaaacctcgcatgcttctgctcatagtgcactcataa

SEQ ID NO: 82945 - DNA, 599 bp, Chicken  19866894378341_2
  misc_feature (1)..(93): n is any nucleotide
nnnnnnnnnnnnnnnnnnnnnnnnnnnnnnnnnnnnnnnnnnnnnnnnnnnnnnnnnnnnnnnnnnnnnnnnnnnnnnnnnnnnnnnnnnnnntgagcaacttctttgtgactgaacggtgtcctgaggtacctcccagtacctggaatcacactcattgtcttttctttctttaatggatgtggctggtgacatatattagcagcacattacatcaaatccaacagcccctcctccatactttggaytttgcatgaagtattctacctggcccacacataaattagattaatgacctgytgtcaattaaaagtcyaacatatattttaccaagygctgtcctttcacacaaactggaatttactgccatccaagccctgcacactatctgaagccaacagcaaaaccagaatgcacacaactctcctgataagaagagagaaaattagaaacacggaagtttagttaagcaaatcscagtatccctggaaacaggtaactaacgccaggcaaacctcgcatgcttctgctcatagtgcactcataaggcaaaatctgctttgctgttcacaaggcatgggctcctgcatsaagagcca

SEQ ID NO: 82946 - DNA, 599 bp, Chicken  19866894378341_3
  misc_feature (1)..(77): n is any nucleotide
nnnnnnnnnnnnnnnnnnnnnnnnnnnnnnnnnnnnnnnnnnnnnnnnnnnnnnnnnnnnnnnnnnnnnnnnnnnnntgagcaacttctttgtgactgaacggtgtcctgaggtacctcccagtacctggaatcacactcattgtcttttctttctttaatggatgtggctggtgacatatattagcagcacattacatcaaatccaacagcccctcctccatactttggaytttgcatgaagtattctacctggcccacacataaattagattaatgacctgytgtcaattaaaagtcyaacatatattttaccaagygctgtcctttcacacaaactggaatttactgccatccaagccctgcacactatctgaagccaacagcaaaaccagaatgcacacaactctcctgataagaagagagaaaattagaaacacggaagtttagttaagcaaatcscagtatccctggaaacaggtaactaacgccaggcaaacctcgcatgcttctgctcatagtgcactcataaggcaaaatctgctttgctgttcacaaggcatgggctcctgcatsaagagccaagttagcttaagttaa

SEQ ID NO: 82947 - DNA, 599 bp, Chicken  19866894378341_4
  misc_feature (1)..(58): n is any nucleotide
nnnnnnnnnnnnnnnnnnnnnnnnnnnnnnnnnnnnnnnnnnnnnnnnnnnnnnnnnntgagcaacttctttgtgactgaacggtgtcctgaggtacctcccagtacctggaatcacactcattgtcttttctttctttaatggatgtggctggtgacatatattagcagcacattacatcaaatccaacagcccctcctccatactttggaytttgcatgaagtattctacctggcccacacataaattagattaatgacctgytgtcaattaaaagtcyaacatatattttaccaagygctgtcctttcacacaaactggaatttactgccatccaagccctgcacactatctgaagccaacagcaaaaccagaatgcacacaactctcctgataagaagagagaaaattagaaacacggaagtttagttaagcaaatcscagtatccctggaaacaggtaactaacgccaggcaaacctcgcatgcttctgctcatagtgcactcataaggcaaaatctgctttgctgttcacaaggcatgggctcctgcatsaagagccaagttagcttaagttaaatctctgaattataacact

SEQ ID NO: 82948 - DNA, 600 bp, Chicken  19866894378341_5
ggatgtggctggtgacatatattagcagcacattacatcaaatccaacagcccctcctccatactttggaytttgcatgaagtattctacctggcccacacataaattagattaatgacctgytgtcaattaaaagtcyaacatatattttaccaagygctgtcctttcacacaaactggaatttactgccatccaagccctgcacactatctgaagccaacagcaaaaccagaatgcacacaactctcctgataagaagagagaaaattagaaacacggaagtttagttaagcaaatcscagtatccctggaaacaggtaactaacgccaggcaaacctcgcatgcttctgctcatagtgcactcataaggcaaaatctgctttgctgttcacaaggcatgggctcctgcatsaagagccaagttagcttaagttaaatctctgaattataacactgagatgtaagacaaggagcagctgctgcaatggggcgctggggaggacagagcacatgcaaacagcagtgcagctgtaaccaaaagacgcaggcacacgtgtaagatcaccctgcgttggaattctgcacctatctttaaagg

SEQ ID NO: 82949 - DNA, 566 bp, Chicken  19866894378341_6
atgacctgytgtcaattaaaagtcyaacatatattttaccaagygctgtcctttcacacaaactggaatttactgccatccaagccctgcacactatctgaagccaacagcaaaaccagaatgcacacaactctcctgataagaagagagaaaattagaaacacggaagtttagttaagcaaatcscagtatccctggaaacaggtaactaacgccaggcaaacctcgcatgcttctgctcatagtgcactcataaggcaaaatctgctttgctgttcacaaggcatgggctcctgcatsaagagccaagttagcttaagttaaatctctgaattataacactgagatgtaagacaaggagcagctgctgcaatggggcgctggggaggacagagcacatgcaaacagcagtgcagctgtaaccaaaagacgcaggcacacgtgtaagatcaccctgcgttggaattctgcacctatctttaaaggtactgcacgtggagaaccagatctgataaaaccatccagctccgggttcgtttgtgtgcatgtttttgaagggctgtctg

SEQ ID NO: 82950 - DNA, 600 bp, Chicken  19866894378350_1
tgactgatattcttctttctgataactatgctaaaaggatatggtcaagaagactactactaaagaaaggcatcataaatgaggagacacataatgatttaggaactgagggatgggtgagccagcatatcatctcttctggaaactggagtcaaccattaatttagaatcttgtttcatgcatgttcaatctttctttcttttttttcccaggtattctgactgagaacttcctctctcatcatgctttcccttcacttcttctgtcccttcacttctctcatccctcaggtacttctkaaactattytcaaagctgaagttgcagatcagtttgtacatcccgagtgacaatgaggggctctgtttcgatagttgaaggcttcaacagcagaccaaggtccctaaagcccaaagactatgaaaccatccataatctgaataaaacgagtcactactgatgctccagcacagtttctccttagaatattcctctgttttaaaaacccaagttaattaggatttattttatccaggctattgtatcttttctttgaaaaaagaattttcctgcaagactaaatacagaagttacggtccc

SEQ ID NO: 82951 - DNA, 600 bp, Chicken  19866894378350_2
ttcttctttctgataactatgctaaaaggatatggtcaagaagactactactaaagaaaggcatcataaatgaggagacacataatgatttaggaactgagggatgggtgagccagcatatcatctcttctggaaactggagtcaaccattaatttagaatcttgtttcatgcatgttcaatctttctttcttttttttcccaggtattctgactgagaacttcctctctcatcatgctttcccttcacttcttctgtcccttcacttctctcatccctcaggtacttctkaaactattytcaaagctgaagttgcagatcagtttgtacatcccgagtgacaatgaggggctctgtttcgatagttgaaggcttcaacagcagaccaaggtccctaaagcccaaagactatgaaaccatccataatctgaataaaacgagtcactactgatgctccagcacagtttctccttagaatattcctctgttttaaaaacccaagttaattaggatttattttatccaggctattgtatcttttctttgaaaaaagaattttcctgcaagactaaatacagaagttacggtcccaatacttcc

SEQ ID NO: 82952 - DNA, 600 bp, Chicken  19866894378352_1
ttttgtctaagtcatatgttcatgatacgttctgatagaataaaattaatattataaatattttattcaatttgctataaatctatgtaataagcatctagaattgttgtaatttccaaggtagtaactttgaatcattgtttgcaagtctttggataaaaatgttgatggagacttaaacaagatcacagatctgttcggggtttttttagtatgcaagatatttttcctaattattggataaaaacaactgaacaaatatttgttaattaatagcttgcaatttagcagtaaacatgmagagctgtttcaaagggatttctccctctcttaaattacatacaatcctttactaagtatgtcaatttcagtttttattttcattaaataaaattatttggcatgattactggtatgatattgacaatttcatcttttgattcatctgtgtttaatattttcaaaggcaactgtttcttgaatacacttgtacagcaacaaatagtaatttttctttattttccttttccttttcctgtttcttttttaatgatagatgctttaggtttccatgtgagaggagagtctcagcatgaattt

SEQ ID NO: 82953 - DNA, 600 bp, Chicken  19866894378353_1
ttaaggaaacatgccacatcttttacccactgatttttacccaaaagttccttggatagagtggtgataagtggcataataaaaatgcaagctatgtaggttttggtctgtccaacactgaatttgcaaacaacactatggggaacagacagtatagtgatgacaataactaagagtctcgatacttttaagatgagattcaacatagagtaactgcttattgaagtgtttgatttatccttcacagaatccataacacattcctactactctgccttgacagtattcctgaagcttgayctgagtagatttgtgttcaacccttttgcacgcgttcaagattcattaatcttttctgcgagcaaattaagatggtcaagtgagacaaacatcctcatacttaatttccttccagtctttgtttagatcaatagaagataatttattgatctttcatggattttgattgcaggcaatatccatctcaacagcatttcactgcaactgcaaagcaaactaacttgttagctaacaaaatcattttaggtctataatgtgacacaggtgaaaataattctgaagaaacttggggtgaagtag

SEQ ID NO: 82954 - DNA, 600 bp, Chicken  19866894378362_1
tcccaccagtgttctgtcccatgttgttgctgtgtgacagacagcagcagaggggcagtctgacaaaatggtgtctgacatggaattacccgggaagcaaaagtgtggaactgaattcctccgtgtggaaaaaactgcactaacactcatcagtgcttgctgaacctttatggagaccaaacagtggttgtgaacgcagtgaggcagtgggtggtgaaacactgtggaatagtggttcacttctgctggtgaaggtttttatgagcacagtatacaggctcttgttcattgctggcaaamatgcacagctaatcgtggtgactatgttgaaaaatagtgttttgtagctgagaatttgctctatcacatagtgttatcgtactctttttatctcttgtagtttccasggaagcaaataggaggcattactttcagagcgactcaggtagatgctaatgcagtgtttttgttatgycctcactattcagaggaaaaagtgaagaggtaccaacyaacagaacttgcaggacaaataaatcaccaaaggccaagatgctggggaagctagtagagggaatgaagaagaaaggttaggttgaa

SEQ ID NO: 82955 - DNA, 600 bp, Chicken  19866894378362_2
gaactgaattcctccgtgtggaaaaaactgcactaacactcatcagtgcttgctgaacctttatggagaccaaacagtggttgtgaacgcagtgaggcagtgggtggtgaaacactgtggaatagtggttcacttctgctggtgaaggtttttatgagcacagtatacaggctcttgttcattgctggcaaamatgcacagctaatcgtggtgactatgttgaaaaatagtgttttgtagctgagaatttgctctatcacatagtgttatcgtactctttttatctcttgtagtttccasggaagcaaataggaggcattactttcagagcgactcaggtagatgctaatgcagtgtttttgttatgycctcactattcagaggaaaaagtgaagaggtaccaacyaacagaacttgcaggacaaataaatcaccaaaggccaagatgctggggaagctagtagagggaatgaagaagaaaggttaggttgaaatgatctctgcttgcagaattattgcagcttttcaagtagggaatgaaaaagtgttattacttgactaaatatccatgataccagggaaaaacagactgaaagttat

SEQ ID NO: 82956 - DNA, 600 bp, Chicken  19866894378362_3
accaaacagtggttgtgaacgcagtgaggcagtgggtggtgaaacactgtggaatagtggttcacttctgctggtgaaggtttttatgagcacagtatacaggctcttgttcattgctggcaaamatgcacagctaatcgtggtgactatgttgaaaaatagtgttttgtagctgagaatttgctctatcacatagtgttatcgtactctttttatctcttgtagtttccasggaagcaaataggaggcattactttcagagcgactcaggtagatgctaatgcagtgtttttgttatgycctcactattcagaggaaaaagtgaagaggtaccaacyaacagaacttgcaggacaaataaatcaccaaaggccaagatgctggggaagctagtagagggaatgaagaagaaaggttaggttgaaatgatctctgcttgcagaattattgcagcttttcaagtagggaatgaaaaagtgttattacttgactaaatatccatgataccagggaaaaacagactgaaagttatttgaacaggtatgaagagctcattctttcaacagtaaagacaaggaactgagcaatctgtaacagaaa

SEQ ID NO: 82957 - DNA, 572 bp, Chicken  19866894378362_4
gtgaaacactgtggaatagtggttcacttctgctggtgaaggtttttatgagcacagtatacaggctcttgttcattgctggcaaamatgcacagctaatcgtggtgactatgttgaaaaatagtgttttgtagctgagaatttgctctatcacatagtgttatcgtactctttttatctcttgtagtttccasggaagcaaataggaggcattactttcagagcgactcaggtagatgctaatgcagtgtttttgttatgycctcactattcagaggaaaaagtgaagaggtaccaacyaacagaacttgcaggacaaataaatcaccaaaggccaagatgctggggaagctagtagagggaatgaagaagaaaggttaggttgaaatgatctctgcttgcagaattattgcagcttttcaagtagggaatgaaaaagtgttattacttgactaaatatccatgataccagggaaaaacagactgaaagttatttgaacaggtatgaagagctcattctttcaacagtaaagacaaggaactgagcaatctgtaacagaaagcatcccaaa

SEQ ID NO: 82958 - DNA, 599 bp, Chicken  19866894378369_1
  misc_feature (1)..(226): n is any nucleotide
nnnnnnnnnnnnnnnnnnnnnnnnnnnnnnnnnnnnnnnnnnnnnnnnnnnnnnnnnnnnnnnnnnnnnnnnnnnnnnnnnnnnnnnnnnnnnnnnnnnnnnnnnnnnnnnnnnnnnnnnnnnnnnnnnnnnnnnnnnnnnnnnnnnnnnnnnnnnnnnnnnnnnnnnnnnnnnnnnnnnnnnnnnnnnnnnnnnnnnnnnnnnnnnnnnnnnnnnnnnnnnnnnntaaaagataacaatttctcatcctgtgcacttaacatattctcagtctccatctacccagtttacagtttgagkttttttttttactacatgcttcaaattactcgatgagaatgttgttgtggtagacaaagcagggttttctgttgtttgtttgtttttaaataaaaatattcaaaatttctttttgctttaaagaaaatttatctgataatctttaatgcctcagacagatacttcccaacaggatgtctatctctgggttttatctgttttcatcatgcccttttgttctttccctttcatccttgtagatgttgtaatttctttgcagttatacaagccaaagcacaaatgcttataaattcttcatg

SEQ ID NO: 82959 - DNA, 600 bp, Chicken  19866894378369_2
ttttttttttactacatgcttcaaattactcgatgagaatgttgttgtggtagacaaagcagggttttctgttgtttgtttgtttttaaataaaaatattcaaaatttctttttgctttaaagaaaatttatctgataatctttaatgcctcagacagatacttcccaacaggatgtctatctctgggttttatctgttttcatcatgcccttttgttctttccctttcatccttgtagatgttgtaatttctttgcagttatacaagccaaagcacaaatgcttataaattcttcatgwtcattatatcactgacaactttaaaatctactaaggagtaacacttcatctgtctttcagcttctccactttgtattgtcagaggctgcccctgcagcattcggcttttaccccctataaacactacttattagtgaattaattgagcaggaggctagttgacacaaaatggttcatgtccgtactcctagccctaaaaaccagagtagctatatccaaattcacttctgggaatggtcacctttaaatgttagggagagagctaattggcctggagaaattcttgcaggcccttctcta

SEQ ID NO: 82960 - DNA, 600 bp, Chicken  19866894378370_1
tctcacagaggccttttgccctgctcatctttggtgctcagggattgcaagctgtctcactgcaccatcccctcctctctgcttggacagcctggcactacaagctctagcaagcctcttggatccctgttttcctgcagctggagctttccctagcaagcagccttgggttttaaaatctcacttctcttccccttggtgtagttggtctcatttccaccaacccatgtaatgtctccccaaattatttaacaccagtcaccaaggcaatactgtacttatttttagcattatcagaaytttacagacctttggaatagcttgctttttaaaatcatcttctaattacttggttttcaaaccttaactgtgttgagctagcacgccatcatgtaatagtgttttaaatgagtagctaatgtttacaggtataattattgtaccagtttcttgaacatttttctttctgaagcagcagagcagtattctttccagaagcttaaaatgaacaaatgtgatgctatatgataatggcaatgatgttaagctgttaccagtgcagatagaaacagtttttttggaggcttgctttagctgtgg

SEQ ID NO: 82961 - DNA, 600 bp, Chicken  19866894378370_2
tgctatatgataatggcaatgatgttaagctgttaccagtgcagatagaaacagtttttttggaggcttgctttagctgtggcactcctactacacacatttttaggaagagaaatcaactgtctggttctgcagaatattatgcaatttctttcagaatgcttgccctggtgccatcgtacatctccctcctacagtcttgagttctcgcagtgtttcttattttctggcattttactttgaatgatgatttatgaaggcagtgtttggagaaagtgctctgtgtgatatactctcgcrtagyrctttcagaacatcaatttcaaaattaattggaaaccatcatattttcggatcttaaatttgttgtactttaatgatggctttgtttcaacccaataaaatatgcagacctgtctcttcatgtgaaaatgcttgyattttgttaactagtagtcattttcctgtcagtctaagaatttctgccacatgttaagacaggagacaagactgaggttggataatagctatctagcaaagatgaattaattctagtctaaggaaataatatttattttgtcgtagacccaagttgactcg

SEQ ID NO: 82962 - DNA, 600 bp, Chicken  19866894378370_3
atatgataatggcaatgatgttaagctgttaccagtgcagatagaaacagtttttttggaggcttgctttagctgtggcactcctactacacacatttttaggaagagaaatcaactgtctggttctgcagaatattatgcaatttctttcagaatgcttgccctggtgccatcgtacatctccctcctacagtcttgagttctcgcagtgtttcttattttctggcattttactttgaatgatgatttatgaaggcagtgtttggagaaagtgctctgtgtgatatactctcgcrtagyrctttcagaacatcaatttcaaaattaattggaaaccatcatattttcggatcttaaatttgttgtactttaatgatggctttgtttcaacccaataaaatatgcagacctgtctcttcatgtgaaaatgcttgyattttgttaactagtagtcattttcctgtcagtctaagaatttctgccacatgttaagacaggagacaagactgaggttggataatagctatctagcaaagatgaattaattctagtctaaggaaataatatttattttgtcgtagacccaagttgactcgtgcc

SEQ ID NO: 82963 - DNA, 600 bp, Chicken  19866894378370_4
tatgataatggcaatgatgttaagctgttaccagtgcagatagaaacagtttttttggaggcttgctttagctgtggcactcctactacacacatttttaggaagagaaatcaactgtctggttctgcagaatattatgcaatttctttcagaatgcttgccctggtgccatcgtacatctccctcctacagtcttgagttctcgcagtgtttcttattttctggcattttactttgaatgatgatttatgaaggcagtgtttggagaaagtgctctgtgtgatatactctcgcrtagyrctttcagaacatcaatttcaaaattaattggaaaccatcatattttcggatcttaaatttgttgtactttaatgatggctttgtttcaacccaataaaatatgcagacctgtctcttcatgtgaaaatgcttgyattttgttaactagtagtcattttcctgtcagtctaagaatttctgccacatgttaagacaggagacaagactgaggttggataatagctatctagcaaagatgaattaattctagtctaaggaaataatatttattttgtcgtagacccaagttgactcgtgccc

SEQ ID NO: 82964 - DNA, 600 bp, Chicken  19866894378370_5
ttatgcaatttctttcagaatgcttgccctggtgccatcgtacatctccctcctacagtcttgagttctcgcagtgtttcttattttctggcattttactttgaatgatgatttatgaaggcagtgtttggagaaagtgctctgtgtgatatactctcgcrtagyrctttcagaacatcaatttcaaaattaattggaaaccatcatattttcggatcttaaatttgttgtactttaatgatggctttgtttcaacccaataaaatatgcagacctgtctcttcatgtgaaaatgcttgyattttgttaactagtagtcattttcctgtcagtctaagaatttctgccacatgttaagacaggagacaagactgaggttggataatagctatctagcaaagatgaattaattctagtctaaggaaataatatttattttgtcgtagacccaagttgactcgtgcccccatcactcatcctgattcattagttgacagaattaggacatcatgacctttctacccgagtaaagtaatgaatgagacacttccattgttaaattataatattcattgcatgcccttattctgcctgtacgct

SEQ ID NO: 82965 - DNA, 600 bp, Chicken  19866894378371_1
gcaatttcagtccaacacaacttatctactgtgcccaagcttctccaccatgtgtgtcacttacatattggtttatactctggctttacctataataagcgagaggcttcttggacgctggtagagcaatggctggaacttgagcccaacccctaatgttctaacatctttcacaacctggagtacgaaatcccgttccacagtcgaacacagctaagagtggtaatgcataaaaatgtaatgttcctcaaatattatttggaagcacaaaaacctttcaattttctctttctggtccartgaaaaaattgcaattagcaaaaatcctattacagggaatgacagatctcttttattctatctctgcttcagtcaatgaagaatttggattaatacatgtgactaacaacaacaaaaaaaatgtaataaaactggtatgttttctttaacttccatgagcagtttagaactgccttgcagacatgcattcttctccggtagaaggacctgtactgaatgctccagtgcatttctttcaagctgttgaagcagctgtcagatgctaatgagctttggtcactgcaaacctggagcagaact

SEQ ID NO: 82966 - DNA, 600 bp, Chicken  19866894378376_1
accaggaaaaactcttccctgaaaactggcgttcagtagttttgttttgttggttggtttgttttttctctcctctcttctttgttatgtagttaatagccagcaaagatggattgtctcagctctccttccttccatttctctgagtagcctcagggccccacagtcttatgtcagggccattgaattcagttacttcatccttgatctatactgcagagatgcagcaagtgtgcaaaatacacatttttactaagttctaagctgtaactcatacagatgtaacacctagcttcacawtaaagtgggaataattgttataattgttagtrctttctgaacatagttttstcttatttgtttgtgatttgcttgtcagcgtttctgtaactgactttgcaacctttttcctgggaaarcggagtctgctgaatgttagactcggaaaaacaaaagaaaacaaacccagaaaagaaaccaaccgaaccaaaccccaaaacgaaccaacaagaaaaaaaaacaaacctgcaaaatggccctctgtgcaaaacattaatgtgttgattgatgagtttcatcctctgaaaactgaaatttcac

SEQ ID NO: 82967 - DNA, 581 bp, Chicken  19866894378376_2
tcagtagttttgttttgttggttggtttgttttttctctcctctcttctttgttatgtagttaatagccagcaaagatggattgtctcagctctccttccttccatttctctgagtagcctcagggccccacagtcttatgtcagggccattgaattcagttacttcatccttgatctatactgcagagatgcagcaagtgtgcaaaatacacatttttactaagttctaagctgtaactcatacagatgtaacacctagcttcacawtaaagtgggaataattgttataattgttagtrctttctgaacatagttttstcttatttgtttgtgatttgcttgtcagcgtttctgtaactgactttgcaacctttttcctgggaaarcggagtctgctgaatgttagactcggaaaaacaaaagaaaacaaacccagaaaagaaaccaaccgaaccaaaccccaaaacgaaccaacaagaaaaaaaaacaaacctgcaaaatggccctctgtgcaaaacattaatgtgttgattgatgagtttcatcctctgaaaactgaaatttcacttatatttttaat

SEQ ID NO: 82968 - DNA, 562 bp, Chicken  19866894378376_3
ggttggtttgttttttctctcctctcttctttgttatgtagttaatagccagcaaagatggattgtctcagctctccttccttccatttctctgagtagcctcagggccccacagtcttatgtcagggccattgaattcagttacttcatccttgatctatactgcagagatgcagcaagtgtgcaaaatacacatttttactaagttctaagctgtaactcatacagatgtaacacctagcttcacawtaaagtgggaataattgttataattgttagtrctttctgaacatagttttstcttatttgtttgtgatttgcttgtcagcgtttctgtaactgactttgcaacctttttcctgggaaarcggagtctgctgaatgttagactcggaaaaacaaaagaaaacaaacccagaaaagaaaccaaccgaaccaaaccccaaaacgaaccaacaagaaaaaaaaacaaacctgcaaaatggccctctgtgcaaaacattaatgtgttgattgatgagtttcatcctctgaaaactgaaatttcacttatatttttaat

SEQ ID NO: 82969 - DNA, 494 bp, Chicken  19866894378376_4
cagctctccttccttccatttctctgagtagcctcagggccccacagtcttatgtcagggccattgaattcagttacttcatccttgatctatactgcagagatgcagcaagtgtgcaaaatacacatttttactaagttctaagctgtaactcatacagatgtaacacctagcttcacawtaaagtgggaataattgttataattgttagtrctttctgaacatagttttstcttatttgtttgtgatttgcttgtcagcgtttctgtaactgactttgcaacctttttcctgggaaarcggagtctgctgaatgttagactcggaaaaacaaaagaaaacaaacccagaaaagaaaccaaccgaaccaaaccccaaaacgaaccaacaagaaaaaaaaacaaacctgcaaaatggccctctgtgcaaaacattaatgtgttgattgatgagtttcatcctctgaaaactgaaatttcacttatatttttaat

SEQ ID NO: 82970 - DNA, 599 bp, Chicken  19866894378377_1
  misc_feature (1)..(159): n is any nucleotide
nnnnnnnnnnnnnnnnnnnnnnnnnnnnnnnnnnnnnnnnnnnnnnnnnnnnnnnnnnnnnnnnnnnnnnnnnnnnnnnnnnnnnnnnnnnnnnnnnnnnnnnnnnnnnnnnnnnnnnnnnnnnnnnnnnnnnnnnnnnnnnnnnnnnnnnnnnnnnnnttttaatgagtattttttctgctgccaataattggtttatgtacaaaaatgtttttacatttcaacagtagaaacatattcttccaattacagaactcagatttaaagtttgaaatggaggagaaagtacactgtaacttwaaaaaaaaaataaatttctaacgaattcctaaaaatatattcagtgctttgtggaacttttttgtgacaaaaaaaamaaacaaacaaaaaaaaaccaacaaataaacaaaaaaaccaataggtttaataacaatggaattgctaaaatcatttcagactgagtttttcccaattgatattaataatgtggtcaaacctatatgtacatacaatattattaaaacagacaatgtaaaaacatatatatatttaaacaaatatttakataagaatgaaaattttgacaaatattttttgtt

SEQ ID NO: 82971 - DNA, 599 bp, Chicken  19866894378377_2
  misc_feature (1)..(82): n is any nucleotide
nnnnnnnnnnnnnnnnnnnnnnnnnnnnnnnnnnnnnnnnnnnnnnnnnnnnnnnnnnnnnnnnnnnnnnnnnnnnnnnnnnttttaatgagtattttttctgctgccaataattggtttatgtacaaaaatgtttttacatttcaacagtagaaacatattcttccaattacagaactcagatttaaagtttgaaatggaggagaaagtacactgtaacttwaaaaaaaaaataaatttctaacgaattcctaaaaatatattcagtgctttgtggaacttttttgtgacaaaaaaaamaaacaaacaaaaaaaaaccaacaaataaacaaaaaaaccaataggtttaataacaatggaattgctaaaatcatttcagactgagtttttcccaattgatattaataatgtggtcaaacctatatgtacatacaatattattaaaacagacaatgtaaaaacatatatatatttaaacaaatatttakataagaatgaaaattttgacaaatattttttgtttcaaactttccatttctgacttttcaaataagctaccaaaactgccgaaagtggactaggaataaagttatttaaaa

SEQ ID NO: 82972 - DNA, 599 bp, Chicken  19866894378377_3
  misc_feature (1)..(77): n is any nucleotide
nnnnnnnnnnnnnnnnnnnnnnnnnnnnnnnnnnnnnnnnnnnnnnnnnnnnnnnnnnnnnnnnnnnnnnnnnnnnnttttaatgagtattttttctgctgccaataattggtttatgtacaaaaatgtttttacatttcaacagtagaaacatattcttccaattacagaactcagatttaaagtttgaaatggaggagaaagtacactgtaacttwaaaaaaaaaataaatttctaacgaattcctaaaaatatattcagtgctttgtggaacttttttgtgacaaaaaaaamaaacmaacaaaaaaaaaccaacaaataaacaaaaaaaccaataggtttaataacaatggaattgctaaaatcatttcagactgagtttttcccaattgatattaataatgtggtcaaacctatatgtacatacaatattattaaaacagacaatgtaaaaacatatatatatttaaacaaatatttakataagaatgaaaattttgacaaatattttttgtttcaaactttccatttctgacttttcaaataagctaccaaaactgccgaaagtggactaggaataaagttatttaaaataatt

SEQ ID NO: 82973 - DNA, 599 bp, Chicken  19866894378377_4
  misc_feature (1)..(74): n is any nucleotide
nnnnnnnnnnnnnnnnnnnnnnnnnnnnnnnnnnnnnnnnnnnnnnnnnnnnnnnnnnnnnnnnnnnnnnnnnnttttaatgagtattttttctgctgccaataattggtttatgtacaaaaatgtttttacatttcaacagtagaaacatattcttccaattacagaactcagatttaaagtttgaaatggaggagaaagtacactgtaacttwaaaaaaaaaataaatttctaacgaattcctaaaaatatattcagtgctttgtggaacttttttgtgacaaaaaaaamaaacaaamaaaaaaaaaccaacaaataaacaaaaaaaccaataggtttaataacaatggaattgctaaaatcatttcagactgagtttttcccaattgatattaataatgtggtcaaacctatatgtacatacaatattattaaaacagacaatgtaaaaacatatatatatttaaacaaatatttakataagaatgaaaattttgacaaatattttttgtttcaaactttccatttctgacttttcaaataagctaccaaaactgccgaaagtggactaggaataaagttatttaaaataatttca

SEQ ID NO: 82974 - DNA, 600 bp, Chicken  19866894378377_5
agtttgaaatggaggagaaagtacactgtaacttwaaaaaaaaaataaatttctaacgaattcctaaaaatatattcagtgctttgtggaacttttttgtgacaaaaaaaamaaacaaacaaaaaaaaaccaacaaataaacaaaaaaaccaataggtttaataacaatggaattgctaaaatcatttcagactgagtttttcccaattgatattaataatgtggtcaaacctatatgtacatacaatattattaaaacagacaatgtaaaaacatatatatatttaaacaaatatttakataagaatgaaaattttgacaaatattttttgtttcaaactttccatttctgacttttcaaataagctaccaaaactgccgaaagtggactaggaataaagttatttaaaataatttcaaaagcatcaaaacacttaaactacaaacaaatttaaggagtaagaaaaagaccatggaagggcagctgtgtacacttacaaacttaccatgctgttcaaattcttcttgtactttttttcagaaaacaatagaggttaacttagtgtaacatcttgctaaacactcaaacaccaagatgta

SEQ ID NO: 82975 - DNA, 600 bp, Chicken  19866894378378_1
ggacgtaattagtcaccactgattacccagtctaaatgatgagagcacccatttacactgggagaaaagtgcaacattggacacaaactcaaagcaaagctctgaaggatgatcctgatgctgcttttcaaatattatacactagagtttctctttatcttgtccttttcttaatctctttctctttctagttcatttctcctggcttgttttatggagttcaggtggataggggatcacaaatggaagaggctctcttatagaacccaaaccagtatgacttgcttggcatctgatttstattttctttatgtgcacagttggtatttcagagctatgaggcaaatactggcatgatacacaaaagacgtagctctctactgaaaagcacagtgtgtctattgatcagggatttaataaagctgcttcttgtcaactctcatcagatgtgcccagtgagtgagtacctgttatgcaattatggagagatgacgaggaggaagtgacaggagccaaacttgtactgcactcgctctcctacctgtttgaaatatactttaccttcagtgacagtatcagctaagacattggtgtaattaa

SEQ ID NO: 82976 - DNA, 600 bp, Chicken  19866894378382_1
atgctactctacaggaataactttttcgtgttttatctgccatggcatgtcatagcatcatagactccagctgttggagtaacaaaaatgaaaattgagccacccaaggtatttttgaagactattcttcgctttcctatcatcaatggtcccaattattttgttcattaaatagtgcctttctcctgaccctcgtgcttgggacagtcaacagtggaattgcagtaaaatccttttttctgagaagtcttaagtctcttcagtgctaattggctttggcttcagaaactcacagggcakctcccagctgtgtttcatgaattccttaagccctatctgctcaggctttcaccactttgtgccagctgtatcttcgacaatctttttgcctgtagctaaatgccgtgtaaagcagcagcatatccatactggtcatttactgctcacacagccctctgaatgtttacagtgctataaaacatggagcttccattctaatctggatttcattgctgttctaagacaacaaaataaatgaaatccctttatatccctctatgcaatatacccagctttgggcaatgtctgtgttttatctgg

SEQ ID NO: 82977 - DNA, 600 bp, Chicken  19866894378382_2
gctaaatgccgtgtaaagcagcagcatatccatactggtcatttactgctcacacagccctctgaatgtttacagtgctataaaacatggagcttccattctaatctggatttcattgctgttctaagacaacaaaataaatgaaatccctttatatccctctatgcaatatacccagctttgggcaatgtctgtgttttatctgggttcattattttgctgcatttcttttgccacataccagggcagccatggggttgaaagaagactctgtgaatttaaatgcaattgtttgggaaytctgagatatactcatgaaaaacaatcccatatctccttaacagcctttctcattaaagcatgaaatgagctgaacctcattyaaagcgttcacacacatgccagcccttggcactgatggtccacagctcctgtggtcacagagcaagggggaaaaaatgaattgaagcaaatgggaggaaagagaagggagggaagagatgcagagagagatcagaaagttaaagagataggaaagagaggtataggataagaagaaagaaatggcagaagaaagcatcagcaagcaagaggcatcaa

SEQ ID NO: 82978 - DNA, 600 bp, Chicken  19866894378382_3
aacatggagcttccattctaatctggatttcattgctgttctaagacaacaaaataaatgaaatccctttatatccctctatgcaatatacccagctttgggcaatgtctgtgttttatctgggttcattattttgctgcatttcttttgccacataccagggcagccatggggttgaaagaagactctgtgaatttaaatgcaattgtttgggaaytctgagatatactcatgaaaaacaatcccatatctccttaacagcctttctcattaaagcatgaaatgagctgaacctcattyaaagcgttcacacacatgccagcccttggcactgatggtccacagctcctgtggtcacagagcaagggggaaaaaatgaattgaagcaaatgggaggaaagagaagggagggaagagatgcagagagagatcagaaagttaaagagataggaaagagaggtataggataagaagaaagaaatggcagaagaaagcatcagcaagcaagaggcatcaaagacactactgcagtctgctggagtcaaaggagagtcagaaataacagcatatggatggacaagtgattatcttaatttcaaa

SEQ ID NO: 82979 - DNA, 600 bp, Chicken  19866894378382_4
ttctagcagtaatatatcctacagaaattctccacctcctcagaagacattcccagaactaccaacctggcaggcttgctaaaaaagacattcccccagaagaattaatgtgccctttaaaatcaaaatgttaacaaaggcagcaatttacctgtgagaatttattatattattttattgggggttaaaatgatctgcgttcaaagttctgacaaaatgcctggggttagaaaatgggggatttttattctccttcccccataaaatgtgggacaatatttatttttgcactgtgacacrgattttttttatgggcagagagaagaggttaatttaatttaaagttatgatttcaaaaggtatctgtaatggttgggatgatccatgcccagcagctgggaaatggctcatggctacctttasaacagacctcgggacccagcctttgtcctccgaaatggggccttcaaaacacctctcatagtaaatgaataagaaaatatcacatttttgaggaagagggacagcagtggaaatgggtacgcaagaaacttctgcaaaaattaagccacctagttagctgccaaaatagaagtgcag

SEQ ID NO: 82980 - DNA, 600 bp, Chicken  19866894378382_5
caaaatgttaacaaaggcagcaatttacctgtgagaatttattatattattttattgggggttaaaatgatctgcgttcaaagttctgacaaaatgcctggggttagaaaatgggggatttttattctccttcccccataaaatgtgggacaatatttatttttgcactgtgacacrgattttttttatgggcagagagaagaggttaatttaatttaaagttatgatttcaaaaggtatctgtaatggttgggatgatccatgcccagcagctgggaaatggctcatggctacctttasaacagacctcgggacccagcctttgtcctccgaaatggggccttcaaaacacctctcatagtaaatgaataagaaaatatcacatttttgaggaagagggacagcagtggaaatgggtacgcaagaaacttctgcaaaaattaagccacctagttagctgccaaaatagaagtgcagcaattgaacccrtttctgaaagttatgaccatgttatcatttgccctagaggactagctctttttgagtttctaattaaggcactgaatagttttatgatctagatccttttcatatgaatta

SEQ ID NO: 82981 - DNA, 597 bp, Chicken  19866894378382_6
gggcagagagaagaggttaatttaatttaaagttatgatttcaaaaggtatctgtaatggttgggatgatccatgcccagcagctgggaaatggctcatggctacctttasaacagacctcgggacccagcctttgtcctccgaaatggggccttcaaaacacctctcatagtaaatgaataagaaaatatcacatttttgaggaagagggacagcagtggaaatgggtacgcaagaaacttctgcaaaaattaagccacctagttagctgccaaaatagaagtgcagcaattgaacccrtttctgaaagttatgaccatgttatcatttgccctagaggactagctctttttgagtttctaattaaggcactgaatagttttatgatctagatccttttcatatgaattaggaacagtgtagaagtaaaaaaaaaaaagaagttgacttgtgactttgagataatggcaaactctggaaggtggttgagaccttctgactcctcatcccctacttacggaccaaggagcatcctctgcaatggcattatttatggttctaattttcttaaactgtttttcattcagttgttttatt

SEQ ID NO: 82982 - DNA, 600 bp, Chicken  19866894378383_1
aatgttcctggtaaatacacttgcacataatatgcagtgaagttcctagcatgtttattttctagaatgtccctcattaagtcatcaaactgtacgttttgttggttttttgattgctttctaaaaacgaacataaagctgcacattttgccatgtcatccagaagaggatcatctttctcttctgtctcttatgggtgacagttgtgaaaaccacagagttcacaagtactttgacagaattgtttttccaggcaagtacctagtaaaaagttaacgttgaaatttttaggacacttarttttttttcagtaatgactgagtgcccacgtatctcagaacaaatgtaatgatcagaagattcaggtcgaaaggcaccgtaggaagtgacctggtgcagtgtcctgctcaaagcatatgttagcacgtccattttaaaatttggggaataaaggttcaggctttaggagatytttatttgacttcattgagataatccatctcaaggagtcaagctcctctttcctataacttcaagatcatctttcttctttccaacaagatggaaaagagaatgaataaaatacctttaataccccct

SEQ ID NO: 82983 - DNA, 488 bp, Chicken  19866894378383_2
atctttctcttctgtctcttatgggtgacagttgtgaaaaccacagagttcacaagtactttgacagaattgtttttccaggcaagtacctagtaaaaagttaacgttgaaatttttaggacacttatttttttttcagtaatgactgagtgcccacgtatctcagaacaaatgtaatgatcagaagattcaggtcgaaaggcaccgtaggaagtgacctggtgcagtgtcctgctcaaagcatatgttagcacgtccattttaaaatttggggaataaaggttcaggctttaggagatytttatttgacttcattgagataatccatctcaaggagtcaagctcctctttcctataacttcaagatcatctttcttctttccaacaagatggaaaagagaatgaataaaatacctttaataccccctttaaagctcgttatgacactagttgtgagcacaggatactgcacaggatactgagcacag

SEQ ID NO: 82984 - DNA, 600 bp, Chicken  19866894378394_1
gtttatcattacaagaacagcttaagaaaaataagtaaagctttgtgcaactcagagcaacgggacacgcgctcccacatccccccaaaatcagaacctgatcaaatgaaaacaacatttagaatagcatacttcattctgaagcctccagaaagcgtttgaagtcaccaagacaaaagaaaaccaatagcaattcctgaagaaaaaccaaagctggttatgttagttcagcctcagcactcagcctggttacaacagggttttgttccattacagaaacattcccaacactgcaggtgmgtgtgagcttctgaagacttaccccaaatgttaaactgtttgaatataagatgtaatactccaggccgtgctttcttttgatgtatcagcaaaggcaagggagactcaggtcattagaatctccttcttacttattctcacaacagttgtgataataaattcattattttcttaattgctgcattataatttagtaataggttcacattaatttcaaaagtcctactacaaggcattatccaaacaaagtaagaaacaattagaattaaattaatctaaaaatcctacttacaagccatt

SEQ ID NO: 82985 - DNA, 600 bp, Chicken  19866894378405_1
taaactaaaatgttggcaggagaccactaattgtgcattcctcaattccttgacattatttcaaggtcgcagaggcaggtaaggagaagatcacagctgtgagtatgtgagttcatgtgcgaattcatgctaggatgtgctaggagtaggacactgcattcaacacttcagaccagactctcagaagtaacgcagttctgtgttccagtgctggctatgctacctattaactttctgacctctgggaagtctctttgtcttgatttccccacctgtaaaatggagataataacactctcrtctcttagtggagatgaatttattaatgtttacgaggcatgaagattctgtggtgatgagcactctagaaacaccatgaggaaataaacaattctgcattcactgcaggcttttgatggtgtgcagtaaataaaacaggggccagtaatagcatgttaaggatagaaatattgaagagctgtctctttccctgagaagtatttatcttgggctttgagcaaggaaggggagctgctgtgaaaaaaatattatattgtcttgtaattaaaatttgtatcattacaattatgcatggggggt

SEQ ID NO: 82986 - DNA, 600 bp, Chicken  19866894378407_1
atgttggaggggaataaagacatgctggtatgtccacgaagcagggtggggagcttggcggccctccctttaaagcctgtttgctgctgttccctccttgagccaaacaacgtaattcatctccatgcctcgtttgctttcttctgtaaggatttgagcataaatatgtatattcccagcccgttgtgagtaattacactagtttagtgaagcaaatatgttatattagtttgaatactacataagtaccgctacacagcctttttgttattatctgctacatcacatcctgcagttaaytgacgttagaagatgactttggattaatttctctacttagaagtgcagtgctgtgtcctttcaggagcaagtgttaccagtgggcagagttcagacagaagcccccgagccccaacacacgtgtattacctgcagagcctggcgcctggagcccatcaccagctacttcactgctggccacttcaggtcatttattagcacttctcttcccagcgtgatacagattttgctctttacatctcattacacaatgctttcatcatgtttctcctgacatcttcaaacaatcctccgctcact

SEQ ID NO: 82987 - DNA, 600 bp, Chicken  19866894378408_1
tggcttgagccttcacagctccattacggcaaggcgctgaatataatctgggacagagctgcgggccctgcacagcacatgctacagataagcacaaacacaaaaactttcattaacaactcttctgttaacaagcaaaaaaggaaacctccttacaacacaatttgtagacattgttattttgctttgagatcaaggtctggcacaaactgtcccttctctgttgattctgcaattgcacgcaatgcttacactggctacgctctcaccctgctgatcctctctgtcatatcttctcartgtgctcctgtgcaacctctgctctgaacacagcaatgatgcyctgctatctctcaccatcagcgactggttttaaaagatttatcccaacttttattaaaaagtcagtcattacattcacatttgaaaagcacttaaaaaaaagaaaaaaaaaagcttcttttctgctatgctcatagaattggaaaaattctgctggaaagttctaatgataccactgtatatttaaatttcaacacacactaactttagaataagataatgtggcattttaattatgggttttctatttctgtattt

SEQ ID NO: 82988 - DNA, 600 bp, Chicken  19866894378408_2
taatctgggacagagctgcgggccctgcacagcacatgctacagataagcacaaacacaaaaactttcattaacaactcttctgttaacaagcaaaaaaggaaacctccttacaacacaatttgtagacattgttattttgctttgagatcaaggtctggcacaaactgtcccttctctgttgattctgcaattgcacgcaatgcttacactggctacgctctcaccctgctgatcctctctgtcatatcttctcartgtgctcctgtgcaacctctgctctgaacacagcaatgatgcyctgctatctctcaccatcagcgactggttttaaaagatttatcccaacttttattaaaaagtcagtcattacattcacatttgaaaagcacttaaaaaaaagaaaaaaaaaagcttcttttctgctatgctcatagaattggaaaaattctgctggaaagttctaatgataccactgtatatttaaatttcaacacacactaactttagaataagataatgtggcattttaattatgggttttctatttctgtatttcctatgtggcacaagacccctttaatgaaagcacgttttggaa

SEQ ID NO: 82989 - DNA, 600 bp, Chicken  19866894378412_1
aaaatgacgtctctaaatgttttctcccccagtaaatcagcagacattctcacatagctaatcatggaaatacacgcacacggacaggctgtttgctgttcaacacaacgcagcgtgtagaaacacgactcgcaggcctcagctcacatctgcaaccacatccgtgggtctcagactgctgttccaaacttcacgctggataaacaagagaagacacttctgtccctatcgcccgtcctcacagcacgtcccccagcagcaccaccggctgctctccgcacgcagccccatgcacagccrtgcccagagctgcctccagctgcagcccctgcacgacaacctcatgcacagatagtgcttccttactcttaggaagtctttcactgaggtgtctgctaatgatttcgataggttcgcatacccatgtgaatggtcccttgtgctttcctcacctgtgtggtctgagaaacaacagataggtctggagacttcaggagagtcaaaagctttgaaagctctgactgaggacacatgggtgcttacagtacacctgacacaagtatgaaaatccttcaaaagaaaccacttgtacattttacc

SEQ ID NO: 82990 - DNA, 600 bp, Chicken  19866894378417_1
ttcagctttaaaaaatattcaggtttccctattgcatcttctgtctccatatgtagaaggttaaagtaggagaaaaagtctttagggatctgttttctggaatcgttgctaaggaaggtaaatttcacaataccactggctatttccccaaatccaggcatttaaaaatacagatataccaaacgctattaaataatacaggaaagggaggggaaagactctttgtaaaaggtgacattgcacacagaagctttctttttttcttttctcttttttgcacaggagcacaatcacaacttkttttattactgatgcaccaaaagaatttagaactattcggagcgcaatcagtcctcagaccacaaaccctggatggacttcacacaaatgctcaggtaaacagagaaagtagaggcatgaaaacaaccattaccaagaaaaaattgagcatgtgttcccagctggagagtgaatggaaccatagtcaacaagaaagaaatatgcgcccgcacgttattctccaaggcagtgctgtaaatgagagtgtccagggatggcttgcctatagtaatctcaattggcctctttagttaatacatt

SEQ ID NO: 82991 - DNA, 600 bp, Chicken  19866894378424_1
cttgaggggcaaaggtgttgcaatgaagtacaaagcaaacgtaacagcaaccatatgaaccttggaaactgcagctgtgtgatgtggctgttccatgaaaccggggctacagtagcctggcagacctgttgtgatggaaacaagctgagaagagtgaccaaaaactcttttctgaaatcaagatgctgagtttatattattcaggtaatggtccctacgcacttaaaacccaggtcattcccaatagcacaactctgtgatattcatggccatcttattagaaaagtggaagccccaaawtgtttgcaacggaaataatggcttggaaatctccttctggcccattcgttgaagctgaatgctccattttgctaagttatcaagtgagagaatattcttcactcctaataattggtaagggatattgaccagacaactgactgtgagtgcctattagtctcattttaaataatttcccatgaatcatggtattttttcccttctgaagtgatcatacagaagttatttactaggagctcacactgagcataggcctgctcctacctaccacattgcacatctgcttccaattaaaaccat

SEQ ID NO: 82992 - DNA, 600 bp, Chicken  19866894378425_1
gagggaactgggactctttaatctggaaaacaggaggttcaggactgaccttatctacaactctctacaactgcctgaaggaaggttgtggcaaggtgagggttggcctcttctcccatgtaactagcaataggacttgagggaacggcttcaagttgtgccaggggagatttaggttggacattaggaaaaaattcttctctgaaagagtggtcaggtgctggaacaggctgcccagtgaggtgatggagtcactgatcctggaggtgttcaagaaacatttagatgttgtactgaggracatggtttagtggaaaatattggtgaaagatggatggtcagactgaatgatcttggaggtcttttccgaccttggagattctacrgttttcacatggccccttacttaaaacttacctttgcttctttactttaattaccagactaaagaaagtgcattttcatatggagaaatttatgacagcttatccaatggaccattgcaaaccatctgacttactatatgacactttcaaatcataatcttaagaaataacaatctgcaaagtattctaaaactgcatgctgttctctgccatt

SEQ ID NO: 82993 - DNA, 600 bp, Chicken  19866894378425_2
tgtggcaaggtgagggttggcctcttctcccatgtaactagcaataggacttgagggaacggcttcaagttgtgccaggggagatttaggttggacattaggaaaaaattcttctctgaaagagtggtcaggtgctggaacaggctgcccagtgaggtgatggagtcactgatcctggaggtgttcaagaaacatttagatgttgtactgaggracatggtttagtggaaaatattggtgaaagatggatggtcagactgaatgatcttggaggtcttttccgaccttggagattctacrgttttcacatggccccttacttaaaacttacctttgcttctttactttaattaccagactaaagaaagtgcattttcatatggagaaatttatgacagcttatccaatggaccattgcaaaccatctgacttactatatgacactttcaaatcataatcttaagaaataacaatctgcaaagtattctaaaactgcatgctgttctctgccatttccaatttcattttcttaagacgtcaatttcatcacagttttgtatggtgggttatcggatttgttatttaatcagaaataaaact

SEQ ID NO: 82994 - DNA, 600 bp, Chicken  19866894378428_1
tttggtggtagaaaacccagctgaggtccaccaagcccttaagaggtcagcagaggcagaaggtgcccctggactttatggtgtagaaagatgtactgagggtacagtaactttctgtgttttcatgtttctcccttcagcatctcttgccatagggattctgaccctgacaaagcctaaccggcccaaacataaagcagggagaggtatgaaatgacaaaactggggttgctgccagtaagcagccccttctgcactgcacaaaacccaacttcagaaatgatttgtgtactactcacygctagccctaagaataggcctgggctaaggactgcacagtgtgattaatgtccctgctctgtttcctctcttttttcccctcatttccctgtaactctgtgccactccttgtaattgctgcagaagtgtaattgctgctctgtgtaattgctgcagaaacaatctgagctgtcattgacttacattgttcacccatcaggagaaactggcagatcagattcaccccaccatgagagacatgctgcatatgtatctacatctgaggcaggcactgaggatcccattacaagcaatggagat

SEQ ID NO: 82995 - DNA, 600 bp, Chicken  19866894378429_1
caatgcgcacagattatattttggtcttactgcagcctccaggaaaactcttacgtactccagaagaaaaatatcttagtctgaccgcagaacatcaataaaactataattatcttaatggggaaaggatcacttacatttgtttgcttgtcttctcttcctaccccagatgtcttatatatatgtatatatctggtcacatacacatttaagcacatatatatgtctgtataaggtacactatttcagtaccaaaatgaaatttaaaacagtttccattttttacaagaaattttcacwattattattattaaaaaaaatagctctctcagcaatttccagyattcatccattattcttgatctgttcacagaaagtactcatataacagtatggacaaagtcttttttctataggcttatcatttgacattctctagtttctgatactatgctagccttttaaaatagtaaaatatatctcagagtagacagttataaatgctgaggaggaatcaggagaacaactgttcagcattccgctttgattctttcagccaacatcaactttttttccaaggctgaattctgctttcgggca

SEQ ID NO: 82996 - DNA, 600 bp, Chicken  19866894378429_2
aaaactcttacgtactccagaagaaaaatatcttagtctgaccgcagaacatcaataaaactataattatcttaatggggaaaggatcacttacatttgtttgcttgtcttctcttcctaccccagatgtcttatatatatgtatatatctggtcacatacacatttaagcacatatatatgtctgtataaggtacactatttcagtaccaaaatgaaatttaaaacagtttccattttttacaagaaattttcacwattattattattaaaaaaaatagctctctcagcaatttccagyattcatccattattcttgatctgttcacagaaagtactcatataacagtatggacaaagtcttttttctataggcttatcatttgacattctctagtttctgatactatgctagccttttaaaatagtaaaatatatctcagagtagacagttataaatgctgaggaggaatcaggagaacaactgttcagcattccgctttgattctttcagccaacatcaactttttttccaaggctgaattctgctttcgggcacttcagttaatttctgtatgtgataaattcagctaagatatat

SEQ ID NO: 82997 - DNA, 600 bp, Chicken  19866894378429_3
tcatacaaactgacaatctaatattgaatccgattttattttaaagagatgaaagtaatttaattgtatctgcatacttctgccaatttttacattcttattcaatacatttgccattgttgctgtcattgggtgtaaggtccatactagcagaaaaaaattgaccggaaaattgagatccccaaggaaagaataaaactgattatacaacaaatcattatttaatgcaaaatgcttcagatatatagctttctgaaatcagtggtgagattactttcactgatatgtggatttcactaygataaattaagcagatggagagaaaaattataaatatttctggttgtttcatttgctgtgatctcagtcattacttctacctacagtagataagaaattgtcccttcagaagcaaacaaatgaagaaaaaggaggtcacaaactgaaataccatcttctgtcttcattaagccttcttccatagataccaatggaagcttttggaattttaatatttctgtaggtactgacatattattacagcataatgaggactttcttgttgaagagaacactgtatctgaaagaagcccaactgcc

SEQ ID NO: 82998 - DNA, 600 bp, Chicken  19866894378449_1
gaagcagaactttaaaagggacttatcccacattaaaatatagtaaatcattatgctttgtgtcaattctgaaaagctctgaatattctgataggatgtctttttacactttctttccgttgttatcttctatacagaaataacaaaagaattccataagcaagcaggatctactcatagcactcagagtttggatgtgtatactgccatgaaggaactgagggctaaacatctttattggcataaactcagtgaacattctttttttgattccaaaatatctattactccatactactrgatgtatgcaactttacaaatatcagaactacagcagtgattttcttcttatttcaggactactcatatgtctaaaaagagagtatgttgtgatttaagctatcagtgcatttcatctgcaaaacaatcctttttgaaactgtgtatgttagctctgttacaagcacagacaagtagaaactgctgactattagtgcttcatgtgtcgtctatctcaaatctcactgtatgttactaatttccacgtaggactatgactccagtcacatttaggtttctttttctaccagtatatatgaa

SEQ ID NO: 82999 - DNA, 600 bp, Chicken  19866894378451_1
tgtgttaccctggaagagacagacatgcagacacagcttgacagcagaatacactttagggtttctgagaaaacaaaacaaaaaacctccctgatgtacctggaagcaagtcacagggaaaggacagaacatgtatcatgttcttgaagaatatcctgtgccttgaaacagtagaatgctttcatatttactttctttacaatgcgtacagaagagaaaaagccttacagggataaaagatatctaataaaatgtgttgcgttggttttctaaagtttaagatctgctatgtctgacaaygtgacaaatgttgaatctgattctcattggacttaggtggaaggcataaaaaccatgttgtatttgtaacctaatgataaagagaaaatgtactctttcctagattgtctaaaagcattaagatgattgtataagtacagagcaattgaggttgggtgggaccattggagacttcaatgcaaccgaacttggagtgggttgctgaggactgtttccagctggattttgagtatttttaaggatagctatctgagcaacctgctttggtaactgttctgttttcagttgaaaaagatgcat

SEQ ID NO: 83000 - DNA, 599 bp, Chicken  19866894378454_1
  misc_feature (1)..(3): n is any nucleotide
nnncacagagaggaacttctcccatttcaaatctctgagttgtttccattcagtaatgatctggtttcacaattcacttctatgatatgtgctagttcattcaagtgaaatggcctgcactctgctatagagctggggaggagggagaggattttatcttctgactatcaaagctgccaatcactgacagccattgtgaggacagaagtagaaaattcccaagactttgaatgagaaagcagaaacgttatacaagtgaagtcgtatctggacactagaacataatgtcgtataattacyatacagagttttcttctggattaaaagtctccccataattatgtatgataaaatatattgctctggttatccggtaattactgtaatttgccttctgtactgacacaaatgagctctttctcattttccttgccttactgcactgctcgtgctggtaactgtaaataccagtatataactatgtatgtaagtaaatgtaagccagtctattagtatgctctgtaatgcctaactggaaataacatcagaacttccatacagtagttttattctcctatgttttcccaacagtagaaata

SEQ ID NO: 83001 - DNA, 600 bp, Chicken  19866894378454_2
gttttcccaacagtagaaataaaaagatgtcaacctcaggcttatctgcaaacttcttcttagtcactctcttcaaactctcttcaattccttttgtagatttcttaaggatttcatctgactggtctactaacaccacagtgtgaccactggctgctgcaacctgaaaattaaaagaagattcaacatcaagatcataaacaaccatattgatttgtcttggggcagacaactgaccagaattaaacaaaagagagctacaatatattgaatcgagaattattgaatcaagaattacamgctttactagaaaacataaaatcctgcagacgtttrgggcagaagagaaggaagaaaggaccagaacaactttagagaataagaaatccatttgtttccctgagctgtctgcagatgtgcacttggaggcagttgaactctgccgctatgacttgtgaaagaacagctgtcttttcttgaaaagagtaagtggcttcgctgtgatccctggatctcctacaactggtacagctggttggtaccattaaattcaaacatacaacgtcattttcttacctgcaacaccctattaaagcacag

SEQ ID NO: 83002 - DNA, 600 bp, Chicken  19866894378454_3
caggcttatctgcaaacttcttcttagtcactctcttcaaactctcttcaattccttttgtagatttcttaaggatttcatctgactggtctactaacaccacagtgtgaccactggctgctgcaacctgaaaattaaaagaagattcaacatcaagatcataaacaaccatattgatttgtcttggggcagacaactgaccagaattaaacaaaagagagctacaatatattgaatcgagaattattgaatcaagaattacamgctttactagaaaacataaaatcctgcagacgtttrgggcagaagagaaggaagaaaggaccagaacaactttagagaataagaaatccatttgtttccctgagctgtctgcagatgtgcacttggaggcagttgaactctgccgctatgacttgtgaaagaacagctgtcttttcttgaaaagagtaagtggcttcgctgtgatccctggatctcctacaactggtacagctggttggtaccattaaattcaaacatacaacgtcattttcttacctgcaacaccctattaaagcacagctttctattatctcttacttcactattggttaattt

SEQ ID NO: 83003 - DNA, 600 bp, Chicken  19866894378455_1
gaaaaaaaaaaaaaaaaaaaaagataaaagcataataaaggaaaaaaaagcaggaaaaaaaaccctgaaagattatgcctgctacacaggatttttctctgtgctaaatcttactttctcaagggaaagagtgatctggtggtatgtacattcctataaagtctctctaggaagcacatcattttcattagctgtgcagatattggtgaatgcatttattgtatgttcttcctcagttgaactgatgtagaaagaaaaatcttagatcttgtcaaaactgcaataaacaatcctaatttkgggattttgccttgtccagtatcagcaacsctcattctcatctcaaaatgccagctacygagaatctggttctcttctgtgttctcccatcttgactgatrtaatttaataaaaccttctccatcagccttctctgtcttccygtcacccttttcagggaagtctaaaacaccactgataaaattatctccagctattctacttcaattatatcaaataattccctgaatcttttatcaatttcctttcatttttttttctccacatcaaattcaagatcacttcctgtttgaggtccca

SEQ ID NO: 83004 - DNA, 600 bp, Chicken  19866894378455_2
cataataaaggaaaaaaaagcaggaaaaaaaaccctgaaagattatgcctgctacacaggatttttctctgtgctaaatcttactttctcaagggaaagagtgatctggtggtatgtacattcctataaagtctctctaggaagcacatcattttcattagctgtgcagatattggtgaatgcatttattgtatgttcttcctcagttgaactgatgtagaaagaaaaatcttagatcttgtcaaaactgcaataaacaatcctaatttkgggattttgccttgtccagtatcagcaacsctcattctcatctcaaaatgccagctacygagaatctggttctcttctgtgttctcccatcttgactgatrtaatttaataaaaccttctccatcagccttctctgtcttccygtcacccttttcagggaagtctaaaacaccactgataaaattatctccagctattctacttcaattatatcaaataattccctgaatcttttatcaatttcctttcatttttttttctccacatcaaattcaagatcacttcctgtttgaggtcccacaaaactttgttataaaacacaataaaact

SEQ ID NO: 83005 - DNA, 600 bp, Chicken  19866894378455_3
aaaccctgaaagattatgcctgctacacaggatttttctctgtgctaaatcttactttctcaagggaaagagtgatctggtggtatgtacattcctataaagtctctctaggaagcacatcattttcattagctgtgcagatattggtgaatgcatttattgtatgttcttcctcagttgaactgatgtagaaagaaaaatcttagatcttgtcaaaactgcaataaacaatcctaatttkgggattttgccttgtccagtatcagcaacsctcattctcatctcaaaatgccagctacygagaatctggttctcttctgtgttctcccatcttgactgatrtaatttaataaaaccttctccatcagccttctctgtcttccygtcacccttttcagggaagtctaaaacaccactgataaaattatctccagctattctacttcaattatatcaaataattccctgaatcttttatcaatttcctttcatttttttttctccacatcaaattcaagatcacttcctgtttgaggtcccacaaaactttgttataaaacacaataaaactcttttctttatattcttccctcattctcc

SEQ ID NO: 83006 - DNA, 600 bp, Chicken  19866894378455_4
tgctaaatcttactttctcaagggaaagagtgatctggtggtatgtacattcctataaagtctctctaggaagcacatcattttcattagctgtgcagatattggtgaatgcatttattgtatgttcttcctcagttgaactgatgtagaaagaaaaatcttagatcttgtcaaaactgcaataaacaatcctaatttkgggattttgccttgtccagtatcagcaacsctcattctcatctcaaaatgccagctacygagaatctggttctcttctgtgttctcccatcttgactgatrtaatttaataaaaccttctccatcagccttctctgtcttccygtcacccttttcagggaagtctaaaacaccactgataaaattatctccagctattctacttcaattatatcaaataattccctgaatcttttatcaatttcctttcatttttttttctccacatcaaattcaagatcacttcctgtttgaggtcccacaaaactttgttataaaacacaataaaactcttttctttatattcttccctcattctcctttgttactgcatttttattatattcataacactcttttttg

SEQ ID NO: 83007 - DNA, 600 bp, Chicken  19866894378455_5
atgtacattcctataaagtctctctaggaagcacatcattttcattagctgtgcagatattggtgaatgcatttattgtatgttcttcctcagttgaactgatgtagaaagaaaaatcttagatcttgtcaaaactgcaataaacaatcctaatttkgggattttgccttgtccagtatcagcaacsctcattctcatctcaaaatgccagctacygagaatctggttctcttctgtgttctcccatcttgactgatrtaatttaataaaaccttctccatcagccttctctgtcttccygtcacccttttcagggaagtctaaaacaccactgataaaattatctccagctattctacttcaattatatcaaataattccctgaatcttttatcaatttcctttcatttttttttctccacatcaaattcaagatcacttcctgtttgaggtcccacaaaactttgttataaaacacaataaaactcttttctttatattcttccctcattctcctttgttactgcatttttattatattcataacactcttttttgaagctaaaatgaagcaattcatgttctccccacacccacttt

SEQ ID NO: 83008 - DNA, 600 bp, Chicken  19866894378455_6
aaagaaaaatcttagatcttgtcaaaactgcaataaacaatcctaatttkgggattttgccttgtccagtatcagcaacsctcattctcatctcaaaatgccagctacygagaatctggttctcttctgtgttctcccatcttgactgatrtaatttaataaaaccttctccatcagccttctctgtcttccygtcacccttttcagggaagtctaaaacaccactgataaaattatctccagctattctacttcaattatatcaaataattccctgaatcttttatcaatttcctttcytttttttttctccacatcaaattcaagatcacttcctgtttgaggtcccacaaaactttgttataaaacacaataaaactcttttctttatattcttccctcattctcctttgttactgcatttttattatattcataacactcttttttgaagctaaaatgaagcaattcatgttctccccacacccactttttatcacctactaatcctcccataaaacttattctcacagaaattcctatcttgttctccttgaaaaataaacttggcacacctttcattatctgcacctgtctttg

SEQ ID NO: 83009 - DNA, 600 bp, Chicken  19866894378456_1
ctatttgaggtttttgcattggacaagactgtgtcagagaaaggtctccactaagcacaagaatttgagctgagaaactgaactaagctgacttcagatgcaggtctttgcattctggagaacaataaaatgacagtcctcctgtgaaaaatgactgtgcagatggactgttttcttacttgatcctcccattccttatatgcacttcaagtctgcttacttgctaatcagaatggatttttgccatttatccactcctggtctagccccatcaagccaactcagctcgaataaaattcrttggaatcttttttttaagctcagacagcatcagagctgctgcagaactgtatgagaatttcacagacccttggagcatgcatgtcattttatttggcttcaatggtccactcaagcttaaagaaacgcacatggtccctgctcagtctcatacccattctaatgatctataagccagaaataacccatctttttactctactcctagatttgctgtgtctgaatatggttctctggttgtgcttaggtgaaaagctccgtgtcctgggctacaatcataatggtgaatggtgtgaggcc

SEQ ID NO: 83010 - DNA, 600 bp, Chicken  19866894378461_1
agaagtaaatgaatgcagggtataaataaaagtatttgtgatattgcactgtgtctcaatagatattaaaattctacctaaaaggacaccatcactatatttttaaaacttctattatcccctgcaagctgatacaacagagtctgtcctctctccattcttcacaacctgccctcaagtcttgaatctgttcctgttcaaaaacctatgtggatggttccagttaaaattaacatttctccctgcccagactgagcaagtggaaaaggcttgtcacatacaagcactgagttactagartcttcttgtaattcaggctcaagactccaggacaacaaggctcatttctcattagcagcactggtaccacaataccagtgccaccttggggagtggcacgtcttggcctaaacaactggagatgcttgttggcattcagaaaagtaaggctaatgctagagctctgctcatggcagtagttacttctctcctgccgaagagaaacagtaaaggaaatcaaaatctgaactctaacaactttccttatctttaattttttgtgacctggcacgtttgtggctttcctgccacaggaagaac

SEQ ID NO: 83011 - DNA, 462 bp, Chicken  19866894378462_1
ttatattgaagatgctttcagtagaagtgatttctatctctgtgtttatatgaatgaaaaccagacactaagaaacatatcttggaggtttgagcttggtctttgttaaatgttggtgttatgtgaaactgctgttgaggggattatgatgagatcatgtagtttaatgggcactttttaattgcacatctgaggactaacttgccttgttgaaaccctgtgtatgcctgttgtatggataatgtgtgcgggtttttttgttgtgggcttttttggtgtttgcatgttttttgttttttkttttttaaagatcattgcgctctctactgtaagcccactaaaacacacagagaaccttgcccagagtgtctgctctgcgggtagtggggtctggtttaacagctgaacaaacagttccatgaccatcaaagtaattcgtctgatggacttgtctttgtgttt

SEQ ID NO: 83012 - DNA, 600 bp, Chicken  19866894378471_1
taacactaccacagaaattaaacctgcccttcaggttaggggctaatttgtgcatggcctgtacggctatacactgtgacaaccacacacctttggccatgctggcttactggctgctactcttgaagaagacaagaacctgatagttctatcctgttttatgacagaaaatgaagtctgtgtctgtttacataggctactgtgatgaatcccaccctggggctgtttctagatgcatcattttatttaatggcttggctaacttttgatagaccggggaaaggctgtgaaggagatgarctggggttggtctggaacaggagtggggaacacatggcctcacaaacagtttcagatggcagtcgtaaggggtacagccagcaatgtgggatttgggctctttctgaaggagttactactggaaatgaaggcctctacagccccatacaagaaaacagtctgttcctcttcaagcttgagatagggggtaaaatcttaccttgtaaatccaaggcctttgcaatacaaggaaaggcaggaagagagcagatgctcaaccaacctggtgatacagctgcagtgtgctcagactagatgagg

SEQ ID NO: 83013 - DNA, 600 bp, Chicken  19866894378479_1
gtttgaagaaaacaaacatgagtctaatcagtccacagcactatgcaggctgctttcaatgacacgtttcattattgctgtgtctcgagttacagtggcctgtaaaatctttaaaggagcctgctgcttctttaagcaattactccatggtcacttttatgtgtgcatatattgttctccatagcaaagcagagcttgggggagtagttctaggaatcaactcagagctcctccatggacatagccctgtagtctttgcagaaaatacctagacaggtttttgctgcctggacacactgrcatcatattaatacactctttaaaagagcaatgtattgaacttccagctaaaagagccaagcagaaaaaggtagaaagtatatgagcatagaatcacacaatcayagaatggcttaggttggaaaggacctcaaagatcatatagttccaaacccctcagccatgggttgattgcctcccagcagctcaggctatccagggcyccatctaacctggcctggaacacctccagggatggagcatccacagcctgttccaccacctcaccaccctctgagtaaaaaaattttttctaatatc

SEQ ID NO: 83014 - DNA, 600 bp, Chicken  19866894378479_2
aatctttaaaggagcctgctgcttctttaagcaattactccatggtcacttttatgtgtgcatatattgttctccatagcaaagcagagcttgggggagtagttctaggaatcaactcagagctcctccatggacatagccctgtagtctttgcagaaaatacctagacaggtttttgctgcctggacacactgrcatcatattaatacactctttaaaagagcaatgtattgaacttccagctaaaagagccaagcagaaaaaggtagaaagtatatgagcatagaatcacacaatcayagaatggcttaggttggaaaggacctcaaagatcatatagttccaaacccctcagccatgggttgattgcctcccagcagctcaggctatccagggcyccatctaacctggcctggaacacctccagggatggagcatccacagcctgttccaccacctcaccaccctctgagtaaaaaaattttttctaatatctaaattaaatttcccctcttttactttaaaactattcccacttgtcctattactattagattgtgtaaaattcggtccccctcctgcttataagctaccttcaag

SEQ ID NO: 83015 - DNA, 600 bp, Chicken  19866894378479_3
gtagttctaggaatcaactcagagctcctccatggacatagccctgtagtctttgcagaaaatacctagacaggtttttgctgcctggacacactgrcatcatattaatacactctttaaaagagcaatgtattgaacttccagctaaaagagccaagcagaaaaaggtagaaagtatatgagcatagaatcacacaatcayagaatggcttaggttggaaaggacctcaaagatcatatagttccaaacccctcagccatgggttgattgcctcccagcagctcaggctatccagggcyccatctaacctggcctggaacacctccagggatggagcatccacagcctgttccaccacctcaccaccctctgagtaaaaaaattttttctaatatctaaattaaatttcccctcttttactttaaaactattcccacttgtcctattactattagattgtgtaaaattcggtccccctcctgcttataagctaccttcaagtactggaaagctgcagagaggtctcatggagccttctcatctccaaacttaacaagcccaattctctcagtctttctgaataggagaggtcctccagc

SEQ ID NO: 83016 - DNA, 600 bp, Chicken  19866894378485_1
gaagataccatattaaaaaaaatggttgcatgcttacatttactgtagctataccagtgctgctgccagtgcttacatatatgtcatcatccaaaggtacctaagggattggtgttaaatataaatagttataatagtaaagaatataattgaagccagatgaactgcttgtctttcctatattcaaatgcaaattaaggacacaaactgcttctacaaaaaaaataaaaaataaaaaagcacttcacaggaacaagtagagacaattaggcattgaaaagcacattaaatgattaaatrtagcagataagcaaattccttaaacactttctatgtcatattaatatcagtttatcaaaagataaagctaatctagtagtgatttttaagttcacagtaccacttaacaaattatatacaattctgctttgacttttcagaagagataccattcactcactgtcacagatcttcccacaaaattatcttctgtgagtttaaatagatgaagatctccatgatttctgtatgcaaccttaatgcccatgtccagatgaagccgtttgacaagaagggaatattcagtcaaggcctcaagag

SEQ ID NO: 83017 - DNA, 599 bp, Chicken  19866894378488_1
  misc_feature (1)..(180): n is any nucleotide
nnnnnnnnnnnnnnnnnnnnnnnnnnnnnnnnnnnnnnnnnnnnnnnnnnnnnnnnnnnnnnnnnnnnnnnnnnnnnnnnnnnnnnnnnnnnnnnnnnnnnnnnnnnnnnnnnnnnnnnnnnnnnnnnnnnnnnnnnnnnnnnnnnnnnnnnnnnnnnnnnnnnnnnnnnnnnnnnnnnntgcacgtagcagaggggttgaaactggatgaacattgtggtccttttcaacccaggccattctatgattattctatgattctatgattaagataaaaagagtctgcagaagagtgctctygttctctgctgcaggacattttttgtagggaaggttttgtactggttcctaactgtcacctccattaggtgttctcaagggagtgatgcaatggttccagtctccaggacatggttctcggtctagatattcttctgcctctccttgtctgcttcacaggtttattttctcctgtataaacagctaacactttatgcccttttactatgctgtcctaagtggtgttcttaatacccataatctttttttttgggtgttaagtaagaatkaaacttcattcaaatakagaaaaaaagatt

SEQ ID NO: 83018 - DNA, 600 bp, Chicken  19866894378488_2
agataaaaagagtctgcagaagagtgctctygttctctgctgcaggacattttttgtagggaaggttttgtactggttcctaactgtcacctccattaggtgttctcaagggagtgatgcaatggttccagtctccaggacatggttctcggtctagatattcttctgcctctccttgtctgcttcacaggtttattttctcctgtataaacagctaacactttatgcccttttactatgctgtcctaagtggtgttcttaatacccataatctttttttttgggtgttaagtaagaatkaaacttcattcaaatakagaaaaaaagattgtagtctccatatttgtgcccagaaatggatctagtagaaataatcagttttactaaagccgctgcctcacatcccaaaccaaagctagagtgaaaaaaaaamcaaacaaaaaatgtacttatgttttctttgaagttagtctaatttttaaagaaaaataaatgagttttaaaagtttttgagaagtttggaactggattcgttttggccaaaaaaaraaaaaaaaagaaaaaagaaaagaaattgttccttctcaagtgtcttaaagt

SEQ ID NO: 83019 - DNA, 600 bp, Chicken  19866894378488_3
agaagagtgctctygttctctgctgcaggacattttttgtagggaaggttttgtactggttcctaactgtcacctccattaggtgttctcaagggagtgatgcaatggttccagtctccaggacatggttctcggtctagatattcttctgcctctccttgtctgcttcacaggtttattttctcctgtataaacagctaacactttatgcccttttactatgctgtcctaagtggtgttcttaatacccataatctttttttttgggtgttaagtaagaatkaaacttcattcaaatakagaaaaaaagattgtagtctccatatttgtgcccagaaatggatctagtagaaataatcagttttactaaagccgctgcctcacatcccaaaccaaagctagagtgaaaaaaaaamcaaacaaaaaatgtacttatgttttctttgaagttagtctaatttttaaagaaaaataaatgagttttaaaagtttttgagaagtttggaactggattcgttttggccaaaaaaaraaaaaaaaagaaaaaagaaaagaaattgttccttctcaagtgtcttaaagtgtagagaaaatgctcat

SEQ ID NO: 83020 - DNA, 600 bp, Chicken  19866894378488_4
tccaggacatggttctcggtctagatattcttctgcctctccttgtctgcttcacaggtttattttctcctgtataaacagctaacactttatgcccttttactatgctgtcctaagtggtgttcttaatacccataatctttttttttgggtgttaagtaagaatkaaacttcattcaaatakagaaaaaaagattgtagtctccatatttgtgcccagaaatggatctagtagaaataatcagttttactaaagccgctgcctcacatcccaaaccaaagctagagtgaaaaaaaaamcaaacaaaaaatgtacttatgttttctttgaagttagtctaatttttaaagaaaaataaatgagttttaaaagtttttgagaagtttggaactggattcgttttggccaaaaaaaraaaaaaaaagaaaaaagaaaagaaattgttccttctcaagtgtcttaaagtgtagagaaaatgctcatgttctttagtctttcttcagagaacagtgcagctctacataatgaacacaagtttcatgccttggatataaaattaatttccaaaacattgcaataccgggacagctgtacagtac

SEQ ID NO: 83021 - DNA, 600 bp, Chicken  19866894378488_5
gtggtgttcttaatacccataatctttttttttgggtgttaagtaagaatkaaacttcattcaaatakagaaaaaaagattgtagtctccatatttgtgcccagaaatggatctagtagaaataatcagttttactaaagccgctgcctcacatcccaaaccaaagctagagtgaaaaaaaaamcaaacaaaaaatgtacttatgttttctttgaagttagtctaatttttaaagaaaaataaatgagttttaaaagtttttgagaagtttggaactggattcgttttggccaaaaaaaraaaaaaaaagaaaaaagaaaagaaattgttccttctcaagtgtcttaaagtgtagagaaaatgctcatgttctttagtctttcttcagagaacagtgcagctctacataatgaacacaagtttcatgccttggatataaaattaatttccaaaacattgcaataccgggacagctgtacagtacaaatcactattttttatactaccaagaccagattgcatgagtttttcacacattggttagaggaaaagacaattgaatagtgacagctgaacccgaatgggcttcctagacagctg

SEQ ID NO: 83022 - DNA, 600 bp, Chicken  19866894378493_1
caacaagatgctattttgtataaggattttagaaacagaagattattgatgtggcactctggcttcagcagaaataaaacagtggagtttttcttcataacttaaatgcgagtcgtaagagatgaagccaggaagaagtcacaaatattacctgggttttatctaatctcagtctaatttgatagtccacgttctgggtccacagcctctagtggagaccaacactacgtttttcataaaggagtcttaaagacctagtgatattctgttgtagtttagaagtgggtggcagatatgccygaaaagcacaattaagaagccctcatacagacttgagttgctctgttgactttcttagtgtggacataccatgatttgctccaaaatctctaccatgcttacttgataaatttgcacttataatatgggaaaagcccatgccgtatgatatagcggtaacaatgaaaataatgacatttaacaggaattctaaaggaagaactgcaaaccagatgggaaggaacacagacatccaagaatacagccaggttgcttagtggcagaaaacagtaaacttagttcatatcttcctttgtctct

SEQ ID NO: 83023 - DNA, 570 bp, Chicken  19866894378505_1
gttttcagaaaggagccatgtgaggctcatgcagcacagcagaacaaaacccagaagacagcaaacaacacgtgaggcattggacagacagagcagtgtctctgtgatgttctgtaaatggagaactgaattccagctgccattcagcacacagcacctatcctccagtgatcagagctgatatcagaaaaggtgactttctaatggaaatgtccatagatcagctgtaatatggtaatcaaggggatcaaatactcattttctcaacttgtgagttcatcatgccagcactgtgccccyccattccccrcatgtggaatcagtgagygcagcactcagctgcagcacagatctggagaaacctgagctcaggagctgctgctcccaggggaggcagaactggtaggaaggcacaggtgggaactcccatgaacagaccagatcctattgggtcagggtggccacacacaactcctgcttccaggctggaagcttactgtcctcatcccaaaagccagagcagtgcaggaataaaaccattagtcctaaaatcatacacagcagttagaa

SEQ ID NO: 83024 - DNA, 560 bp, Chicken  19866894378505_2
aggagccatgtgaggctcatgcagcacagcagaacaaaacccagaagacagcaaacaacacgtgaggcattggacagacagagcagtgtctctgtgatgttctgtaaatggagaactgaattccagctgccattcagcacacagcacctatcctccagtgatcagagctgatatcagaaaaggtgactttctaatggaaatgtccatagatcagctgtaatatggtaatcaaggggatcaaatactcattttctcaacttgtgagttcatcatgccagcactgtgccccyccattccccrcatgtggaatcagtgagygcagcactcagctgcagcacagatctggagaaacctgagctcaggagctgctgctcccaggggaggcagaactggtaggaaggcacaggtgggaactcccatgaacagaccagatcctattgggtcagggtggccacacacaactcctgcttccaggctggaagcttactgtcctcatcccaaaagccagagcagtgcaggaataaaaccattagtcctaaaatcatacacagcagttagaa

SEQ ID NO: 83025 - DNA, 542 bp, Chicken  19866894378505_3
atgcagcacagcagaacaaaacccagaagacagcaaacaacacgtgaggcattggacagacagagcagtgtctctgtgatgttctgtaaatggagaactgaattccagctgccattcagcacacagcacctatcctccagtgatcagagctgatatcagaaaaggtgactttctaatggaaatgtccatagatcagctgtaatatggtaatcaaggggatcaaatactcattttctcaacttgtgagttcatcatgccagcactgtgccccyccattccccrcatgtggaatcagtgagygcagcactcagctgcagcacagatctggagaaacctgagctcaggagctgctgctcccaggggaggcagaactggtaggaaggcacaggtgggaactcccatgaacagaccagatcctattgggtcagggtggccacacacaactcctgcttccaggctggaagcttactgtcctcatcccaaaagccagagcagtgcaggaataaaaccattagtcctaaaatcatacacagcagttagaa

SEQ ID NO: 83026 - DNA, 600 bp, Chicken  19866894378506_1
attagaatgcctgaagaaatagtaaaggtgaaaaaaagtgaagttgagatacattactggcaaggactgatggcttaagaagagatgtcactgattctcacaagcaaacaaaggacaaatgctgacaggtgagatcatcagtttttttgtcagaaagtggatgacctttgagatttgtgcagtgactttttctaagcaaatgatcactgctaaagtttgctcagcatttccgaagagcattagtttgacaggcacagagaggtaaatcctccgcggtacactcatacacacaaaacaggraaagcattctgggatcagcattagcagacctgttctgcagtggccaagtgctagagtgacagaatcatttagtcttcaaactacttcagtgcttgacctctgctgaatctgccaagtagacatcaataccagttataacacctaactgtataatttagatatctgtcagcagcaaactagacaacatctccatttcaggtaagtcaccaaatagccatcagtgagcacaatgctgtactgacaagtctccccaagactagattgaaatatacaataggctttctttattggtacttttgc

SEQ ID NO: 83027 - DNA, 600 bp, Chicken  19866894378506_2
gtgctagagtgacagaatcatttagtcttcaaactacttcagtgcttgacctctgctgaatctgccaagtagacatcaataccagttataacacctaactgtataatttagatatctgtcagcagcaaactagacaacatctccatttcaggtaagtcaccaaatagccatcagtgagcacaatgctgtactgacaagtctccccaagactagattgaaatatacaataggctttctttattggtacttttgccttttcaaataaacgaaaagatactgcattgagcacaagtgaacagraaagaaccaactgcacctctgcatagaggagtagtcatacaggactcttgacagtgagaagattagtatggtagagcatggcaaaagtaagaaaatcgagaggtgagcaagagaatcaaatcaacttgacctcagaaattggattttgtacagggctaggtgaggtgtacctttggaaaagcaggaagtgaaaaggtggtgagttactcaaggatattaygatagcctaaatgggagattctgaataaagtgacagaaatgggtgatctgagggaatgttgaagatgaatagacagcagt

SEQ ID NO: 83028 - DNA, 600 bp, Chicken  19866894378506_3
tatacaataggctttctttattggtacttttgccttttcaaataaacgaaaagatactgcattgagcacaagtgaacagraaagaaccaactgcacctctgcatagaggagtagtcatacaggactcttgacagtgagaagattagtatggtagagcatggcaaaagtaagaaaatcgagaggtgagcaagagaatcaaatcaacttgacctcagaaattggattttgtacagggctaggtgaggtgtacctttggaaaagcaggaagtgaaaaggtggtgagttactcaaggatattaygatagcctaaatgggagattctgaataaagtgacagaaatgggtgatctgagggaatgttgaagatgaatagacagcagtagcacagggactttccatggatatctgatgtaactggcaaaacacagacttcaggttttggtattcagagttgccagctggaacacagatggagggtaagagaagctatgaaagtaatttaaggagttaactaacttagttgcattgagttaaaatgatgatggctcatactgacagagatactggggacatcagtatcagtgtgagattagaaaattca

SEQ ID NO: 83029 - DNA, 600 bp, Chicken  19866894378511_1
cagaggaatttgttataaagggttatgaatgattcctttttatcacctcccaaaataatttctttagaataactaaaagaaatgttatctttttccacgttctgtttggttttattacagtatgttgatacgtagattatgatactaatgtgtatttaatttcttcctaactctgggaaaactacaagatgatgggtaacgctgtggtagcaaaaaaatgattatatagattccagctatctctatcaatataaaatcacaccgcttttcacacatattagaaaaagagcttttcccaaytttttttttttttttttaagataggatttgtgaatacttattaccatgtagaaatatagttaagcctactgtagcttcttgtcaatatactttgtttctgtttaatgacttggccactgaacattcaggtaagtggctgcatccttgctttttcttttcaataatttcatatgtatttcacttagaaattttgttctgtttctgttttcttaattgtttatttgctacttttcatatttttacaggggaaaaaaagaaagactgcttaaactcaagttttgatgacttttttggaactgt

SEQ ID NO: 83030 - DNA, 600 bp, Chicken  19866894378511_2; identical to SEQ ID NO: 83029

SEQ ID NO: 83031 - DNA, 600 bp, Chicken  19866894378516_1
ctcctcgcccacgtgtaggtggcacaaacagctacccaaggcctaaggactggccctactcaagtgcccaggctcataaaggatgtccaggcagagcggggccagcattgcctcagaggagaagcagggacagcccccacatctgcgagcaccgctctgcacctacctggtgaagctggacagccgagactgggatttgaacggtgcctgatggggctgtcaggaacacctgggggacgccacctgccacagagagaatgacacaaatgacataattttccagatgctgggagccaggcrtaagccttcaatccacatcctgcatgcatgcctccatactgttttggccccccatgcacctatgcgtcctttccagtcttcctggctccccccgcctgctactgcctgccccattttccatgctccccgcaccagcaactctcaccctctcccccagcaaatggctcaaggaaccctttacacaggagaaaagctggttctaaacagcacagagccttgctggctctttttggcagatatgatggcttagaagaaaaccctctggaattgataagtagcaaaaaaaacacatgcaagaag

SEQ ID NO: 83032 - DNA, 600 bp, Chicken  19866894378519_1
taagttactctactttaatcacttgataaatagctacaatgtttggaagaattgatagtgtcattatagcaacatccctttttataaacagcctggtgttgatttgattctaattgctgccagaggagcagtatcagagtgtgctgtgctggccgtgtaactgcagggtgaacggagcagggttatctcactggaaggagggaggcccatgctttcctgagggatgaactccaattctgagaggggtggaggaaactgagtcaatttggtggtgtgagaagctacagtgaaaatgcttamggaagagaaggcatgaagcagacaaaacaggctgcttaagtgcatgaaatagtggcaaaccagtgagagaactggagagctttgagtgtgacgcattcttgctctcttgtctggtgaggccctgacaccaaactgagcgctgagctctccagctctgagctttgcactctctctgattgcagcacttcatttacaacggccttatcctaaatggatttccattatggatgccccaatttttttgcaagcccattaccagataccaagggcctaatttttaaggcatttttaattattaat

SEQ ID NO: 83033 - DNA, 600 bp, Chicken  19866894378519_2
gctctccagctctgagctttgcactctctctgattgcagcacttcatttacaacggccttatcctaaatggatttccattatggatgccccaatttttttgcaagcccattaccagataccaagggcctaatttttaaggcatttttaattattaattacagctttgtacactcatgagcaccatgtccacattttggtggccatgaaagtccataaaaatgaggactatctttgcaaatttgaccctttgcaattctatgcttcagctcttcctctgcagatcctggatttgacccttyttgggctgcacagctattaaggagacatcagcattatactgatgatcgctagaacgtttgagggcaatacatttttatttatccaggaaatttgtttctagtgcagatgcttctaagtgggttgctttttgatgtcatattttgtggatggtagcaggaaaagcagggaactgtaaggagaggaggagaggaatgtgtttagtagtttggtcatgttagcaacaaatgcaaggataaacggaaatgcaaaagggagacgtacttacctgcctacacaaatcatttgataagcttctccca

SEQ ID NO: 83034 - DNA, 600 bp, Chicken  19866894378525_1
aaacaattttttgctatttcttttatcaaacatatatttttttctaatgcagcaacatgcttcattagcatttaataaaagaattactgctagtgtaatcctgtaaagaagaaaatcacatgcaagtatttacaaatccagactgccagcaaatactcagtgttatttcatctattgcaagctatgtgcatactaactgcttggttttacagatggagatcttcactacttaagctgtttctttgttttttcctactgttcattctttaagtagcaacacttccaatattgaccacatcstcggtctgagcaataycttttgagaaataacaataataagatactcagcatgttttttaaagaaaaaaaaaagtctgtttttaattaccactatggatgatttgcaggatttagtcctaaaagcaaatgctaggaagaaaggtagcttcctacattagtgatacacgacatgctttaaatgaaaagacataaacacattgcggttagatttaattacattctttaagtgcacaaatgccttcagatacaagtaactgactataaaagaacaccgaccttttaacaacaatgctttttaag

SEQ ID NO: 83035 - DNA, 600 bp, Chicken  19866894378525_2
tttcttttatcaaacatatatttttttctaatgcagcaacatgcttcattagcatttaataaaagaattactgctagtgtaatcctgtaaagaagaaaatcacatgcaagtatttacaaatccagactgccagcaaatactcagtgttatttcatctattgcaagctatgtgcatactaactgcttggttttacagatggagatcttcactacttaagctgtttctttgttttttcctactgttcattctttaagtagcaacacttccaatattgaccacatcstcggtctgagcaataycttttgagaaataacaataataagatactcagcatgttttttaaagaaaaaaaaaagtctgtttttaattaccactatggatgatttgcaggatttagtcctaaaagcaaatgctaggaagaaaggtagcttcctacattagtgatacacgacatgctttaaatgaaaagacataaacacattgcggttagatttaattacattctttaagtgcacaaatgccttcagatacaagtaactgactataaaagaacaccgaccttttaacaacaatgctttttaagcattacctgcgtttcc

SEQ ID NO: 83036 - DNA, 599 bp, Chicken  19866894378528_1
  misc_feature (1)..(72): n is any nucleotide
nnnnnnnnnnnnnnnnnnnnnnnnnnnnnnnnnnnnnnnnnnnnnnnnnnnnnnnnnnnnnnnnnnnnnnnnctcctgctcccaacgatcacctaacaccaacacccgtatcatacacagctggcttctacaggatccctgtcattggtctgacaacacgcatgtctatatattctgataaggtaactgatgcatgtttctagtctagtacctcatacgtgtggtgtaaatcgagaatgcccatcaggagggttgatgatgttaaaagctatctatgtgtctgtctgtctgtccaccctstccagttcaaacrgcagctccctccctctytcacatccccggaacatcctttttttcgcagctgacagtgttgacctacatagtgcaggatgatttctgcagcatttccctgccaggctgttgggctcgctgctctccagccaagccaagtgcttgcactcactcctgcccccatggctggggggcccctgggtgctctccaggtgtggggcacctgtggaggggaagacgttcatgtgacattactaggggagcaaatagaattggctaacgtgttatcctaaggccgatgccccatc

SEQ ID NO: 83037 - DNA, 599 bp, Chicken  19866894378528_2
  misc_feature (1)..(59): n is any nucleotide
nnnnnnnnnnnnnnnnnnnnnnnnnnnnnnnnnnnnnnnnnnnnnnnnnnnnnnnnnnnctcctgctcccaacgatcacctaacaccaacacccgtatcatacacagctggcttctacaggatccctgtcattggtctgacaacacgcatgtctatatattctgataaggtaactgatgcatgtttctagtctagtacctcatacgtgtggtgtaaatcgagaatgcccatcaggagggttgatgatgttaaaagctatctatgtgtctgtctgtctgtccaccctstccagttcaaacrgcagctccctccctctytcacatccccggaacatcctttttttcgcagctgacagtgttgacctacatagtgcaggatgatttctgcagcatttccctgccaggctgttgggctcgctgctctccagccaagccaagtgcttgcactcactcctgcccccatggctggggggcccctgggtgctctccaggtgtggggcacctgtggaggggaagacgttcatgtgacattactaggggagcaaatagaattggctaacgtgttatcctaaggccgatgccccatccctgggagtgctc

SEQ ID NO: 83038 - DNA, 599 bp, Chicken  19866894378528_3
  misc_feature (1)..(42): n is any nucleotide
nnnnnnnnnnnnnnnnnnnnnnnnnnnnnnnnnnnnnnnnnnctcctgctcccaacgatcacctaacaccaacacccgtatcatacacagctggcttctacaggatccctgtcattggtctgacaacacgcatgtctatatattctgataaggtaactgatgcatgtttctagtctagtacctcatacgtgtggtgtaaatcgagaatgcccatcaggagggttgatgatgttaaaagctatctatgtgtctgtctgtctgtccaccctstccagttcaaacrgcagctccctccctctytcacatccccggaacatcctttttttcgcagctgacagtgttgacctacatagtgcaggatgatttctgcagcatttccctgccaggctgttgggctcgctgctctccagccaagccaagtgcttgcactcactcctgcccccatggctggggggcccctgggtgctctccaggtgtggggcacctgtggaggggaagacgttcatgtgacattactaggggagcaaatagaattggctaacgtgttatcctaaggccgatgccccatccctgggagtgctcaatgctgggttgggtgg

SEQ ID NO: 83039 - DNA, 600 bp, Chicken  19866894378528_4
tcacagtgcaatcactgagagcaaaagcagcagggctgggttgcccaggtgctgtcacagccccggtgcggggttttgttcaggtgcatgagctcagtgtgtgacagcaggcctgctgcagagcacgagtcagagcacgagtcatcggcctttacttgggaaatgtgaatattcacaaatgcaaatgttcagtgcaaaaatagtcactccacccacatgctaaacgaagccaaatttcaggaggggaggagcagaggctcacagagagccaaaccagcagggctgctgtgcaggggcagytgtagggcttggtgaaaccgtggcaggacagccagcaatccctgaccatgacaacgacagtgggtggggatgtgcacacccttctgggttgtggtgctgcgggatggggacagggataggctgagtggcagaccagaggagcagggggccagggcagcagagatggggctggtgctgctgcaggatggggttgggtttgatcagcaatgatggcaggagagatgtggtgcagggagcaggaacccacgtgctgctggtcctgtttggtctcagcagagccctgattaccatttccagatg

SEQ ID NO: 83040 - DNA, 599 bp, Chicken  19866894378533_1
  misc_feature (1)..(75): n is any nucleotide
nnnnnnnnnnnnnnnnnnnnnnnnnnnnnnnnnnnnnnnnnnnnnnnnnnnnnnnnnnnnnnnnnnnnnnnnnnnttttcaacccaggccatgctgtgattctatgatgatttccccatctgaatcagagcctttcaagcccaggaaacaataacctgaggctaatgctttatctccatccaacctgccccaatcggcatagctaattgatatctaactggcatcaggtatttctgataaaggtctgatgaaagcaggactcagtgaattgggagaggctggtgccaggcctcctgcttstgcctgctgggtgcctgtgaccccttagcaatagaacgggcatctgatagtgctgaggctgtgctgggcccataccttcacttgggtgccttggcaaagtgttaattatattaatatatacttagaatatctcaaattacactaaagctcccatgaaaacagaatgcaaaatctatttctacaggcagcaaagctcaccagtgtccctttgactgaggagatgccccaagtccacctcaaggaaatccatatttctatcattttcccctcttgttttgggatccagaattcctcgtggc

SEQ ID NO: 83041 - DNA, 570 bp, Chicken  19866894378533_2
tgaggctgtgctgggcccataccttcacttgggtgccttggcaaagtgttaattatattaatatatacttagaatatctcaaattacactaaagctcccatgaaaacagaatgcaaaatctatttctacaggcagcaaagctcaccagtgtccctttgactgaggagatgccccaagtccacctcaaggaaatccatatttctatcattttcccctcttgttttgggatccagaattcctcgtggctgtgtttgcttccagctctgccccctaattgctgccatcacgattggtgctgawaaactacygaccacctcgtgtgtgctaattgycattgtgtgacactgaagtggttttgaactctgcccatctcaggatctcccatrtgttaccgcatgcctttttttcggttgctttttcgtaacaccaactctcattcatatacatgttttggatagacgtgaagtgggacttatgtccaaaatgaaaacaccctataggatggcatgtgtggagaagacaccttgcaacacacatctcagtgtaaagagccaaccaggaataaaagct

SEQ ID NO: 83042 - DNA, 562 bp, Chicken  19866894378533_3
tgctgggcccataccttcacttgggtgccttggcaaagtgttaattatattaatatatacttagaatatctcaaattacactaaagctcccatgaaaacagaatgcaaaatctatttctacaggcagcaaagctcaccagtgtccctttgactgaggagatgccccaagtccacctcaaggaaatccatatttctatcattttcccctcttgttttgggatccagaattcctcgtggctgtgtttgcttccagctctgccccctaattgctgccatcacgattggtgctgawaaactacygaccacctcgtgtgtgctaattgycattgtgtgacactgaagtggttttgaactctgcccatctcaggatctcccatrtgttaccgcatgcctttttttcggttgctttttcgtaacaccaactctcattcatatacatgttttggatagacgtgaagtgggacttatgtccaaaatgaaaacaccctataggatggcatgtgtggagaagacaccttgcaacacacatctcagtgtaaagagccaaccaggaataaaagct

SEQ ID NO: 83043 - DNA, 538 bp, Chicken  19866894378533_4
gtgccttggcaaagtgttaattatattaatatatacttagaatatctcaaattacactaaagctcccatgaaaacagaatgcaaaatctatttctacaggcagcaaagctcaccagtgtccctttgactgaggagatgccccaagtccacctcaaggaaatccatatttctatcattttcccctcttgttttgggatccagaattcctcgtggctgtgtttgcttccagctctgccccctaattgctgccatcacgattggtgctgawaaactacygaccacctcgtgtgtgctaattgycattgtgtgacactgaagtggttttgaactctgcccatctcaggatctcccatrtgttaccgcatgcctttttttcggttgctttttcgtaacaccaactctcattcatatacatgttttggatagacgtgaagtgggacttatgtccaaaatgaaaacaccctataggatggcatgtgtggagaagacaccttgcaacacacatctcagtgtaaagagccaaccaggaataaaagct

SEQ ID NO: 83044 - DNA, 484 bp, Chicken  19866894378533_5
cactaaagctcccatgaaaacagaatgcaaaatctatttctacaggcagcaaagctcaccagtgtccctttgactgaggagatgccccaagtccacctcaaggaaatccatatttctatcattttcccctcttgttttgggatccagaattcctcgtggctgtgtttgcttccagctctgccccctaattgctgccatcacgattggtgctgawaaactacygaccacctcgtgtgtgctaattgycattgtgtgacactgaagtggttttgaactctgcccatctcaggatctcccatrtgttaccgcatgcctttttttcggttgctttttcgtaacaccaactctcattcatatacatgttttggatagacgtgaagtgggacttatgtccaaaatgaaaacaccctataggatggcatgtgtggagaagacaccttgcaacacacatctcagtgtaaagagccaaccaggaataaaagct

SEQ ID NO: 83045 - DNA, 600 bp, Chicken  19866894378536_1
ggaagagttcaggctgttccaacccaaggagtgggggctgaaacccatcatctctatttggtccttctgcaccatggaaggatttgccctctgcattgccccaggtctgcccttcctaccagcatagatatggtgtgtgcacaatagagacaaggggagcacgtgctgtggttcagggcttcccagccctttcatccatttcatgaccacttcttctaccctaccctatggcacaacattcctgccttccactgttctgcagctcactgcgagaactcctgtgctccacatttctcaatyytctgaaaagataaggtgtttttctttcaataaacggaacagctgctgaattagttcagttcttcagccattagcctcttctcctagaagcctttctgtgcttttcttcactcctacgcattttttctgcatggtttctatggcaacctgtgtacctctccatctgctgcagatcctagttaccatgttttgtttctggtcatctctgccaaatgcagtttccaggtgtatcatgataacaagattagattggaaaccaagccaaagcactcattttggtagtcaaacttgtcatatgta

SEQ ID NO: 83046 - DNA, 600 bp, Chicken  19866894378536_2
gaagagttcaggctgttccaacccaaggagtgggggctgaaacccatcatctctatttggtccttctgcaccatggaaggatttgccctctgcattgccccaggtctgcccttcctaccagcatagatatggtgtgtgcacaatagagacaaggggagcacgtgctgtggttcagggcttcccagccctttcatccatttcatgaccacttcttctaccctaccctatggcacaacattcctgccttccactgttctgcagctcactgcgagaactcctgtgctccacatttctcaatyytctgaaaagataaggtgtttttctttcaataaacggaacagctgctgaattagttcagttcttcagccattagcctcttctcctagaagcctttctgtgcttttcttcactcctacgcattttttctgcatggtttctatggcaacctgtgtacctctccatctgctgcagatcctagttaccatgttttgtttctggtcatctctgccaaatgcagtttccaggtgtatcatgataacaagattagattggaaaccaagccaaagcactcattttggtagtcaaacttgtcatatgtaa

SEQ ID NO: 83047 - DNA, 600 bp, Chicken  19866894378536_3
cctttctgtgcttttcttcactcctacgcattttttctgcatggtttctatggcaacctgtgtacctctccatctgctgcagatcctagttaccatgttttgtttctggtcatctctgccaaatgcagtttccaggtgtatcatgataacaagattagattggaaaccaagccaaagcactcattttggtagtcaaacttgtcatatgtaatcccactgctccactgccatatatgctctacctatgggagactgacactgagctcttttcaataccagatgtcctacatgtatcagcaygctctaatcaattctgcagccacttcataatatccagattacatccttccttctcaytgcagcytctgctgcctacagagtaggtatatttggattctggaaagtctatgtagctctgttgcctgaggactgctttgaagacaattaccaataagcttccagggctgtttttcttccagcaaatgcatttttcatctctgctgtagccatgtaataatttgcttctcctgaaaaccttctccattagattacagaaagccctacacagtagagactgcatacaaacaaccttctcatcca

SEQ ID NO: 83048 - DNA, 600 bp, Chicken  19866894378536_4
ctgtgtacctctccatctgctgcagatcctagttaccatgttttgtttctggtcatctctgccaaatgcagtttccaggtgtatcatgataacaagattagattggaaaccaagccaaagcactcattttggtagtcaaacttgtcatatgtaatcccactgctccactgccatatatgctctacctatgggagactgacactgagctcttttcaataccagatgtcctacatgtatcagcaygctctaatcaattctgcagccacttcataatatccagattacatccttccttctcaytgcagcytctgctgcctacagagtaggtatatttggattctggaaagtctatgtagctctgttgcctgaggactgctttgaagacaattaccaataagcttccagggctgtttttcttccagcaaatgcatttttcatctctgctgtagccatgtaataatttgcttctcctgaaaaccttctccattagattacagaaagccctacacagtagagactgcatacaaacaaccttctcatccattcttcttgaatgatgaaaactgcttggaattcacttagattcctataggcctaaaa

SEQ ID NO: 83049 - DNA, 600 bp, Chicken  19866894378536_5
cctctccatctgctgcagatcctagttaccatgttttgtttctggtcatctctgccaaatgcagtttccaggtgtatcatgataacaagattagattggaaaccaagccaaagcactcattttggtagtcaaacttgtcatatgtaatcccactgctccactgccatatatgctctacctatgggagactgacactgagctcttttcaataccagatgtcctacatgtatcagcaygctctaatcaattctgcagccacttcataatatccagattacatccttccttctcaytgcagcytctgctgcctacagagtaggtatatttggattctggaaagtctatgtagctctgttgcctgaggactgctttgaagacaattaccaataagcttccagggctgtttttcttccagcaaatgcatttttcatctctgctgtagccatgtaataatttgcttctcctgaaaaccttctccattagattacagaaagccctacacagtagagactgcatacaaacaaccttctcatccattcttcttgaatgatgaaaactgcttggaattcacttagattcctataggcctaaaatccaact

SEQ ID NO: 83050 - DNA, 600 bp, Chicken  19866894378536_6
agcctgcagcagagaactcaactgaataccaatgaatggagcaaaaacttcactgttgatttgtttcctagatcccatgagctggtaaagtcagactgcaagaaatccgcgtggaagcagcaaagctgtaagtaatttggactgcaagatcttacagacagaaactgacactacttgtttgtattcagcatcctttaggagctgtagtgagatattagatgtggcccctgcataaatggctgctatttaatacctacaattaacagtagttgtgcgtacagtaaactagtacttatatawaacatttctgcaaaacttcaatttagagtgtaattcagggaaagcttgtgaaaaaaattcattggaaatcacataggcctgtaktatatgaacaatgctgatgttaaggctgtccatcatttgaaggcatgggtcagatgtgatgctggtagtttaggtagaggcagaattttacctagagctctgtgcttaggaaggatgtgaactgcaatgcagatagcacaggacatctcagaaatacacagaaagcatagggaaaagggaaaaaaaagtgatatgcagagaaagctatctttcaaa

SEQ ID NO: 83051 - DNA, 600 bp, Chicken  19866894378536_7
gtaaagtcagactgcaagaaatccgcgtggaagcagcaaagctgtaagtaatttggactgcaagatcttacagacagaaactgacactacttgtttgtattcagcatcctttaggagctgtagtgagatattagatgtggcccctgcataaatggctgctatttaatacctacaattaacagtagttgtgcgtacagtaaactagtacttatatawaacatttctgcaaaacttcaatttagagtgtaattcagggaaagcttgtgaaaaaaattcattggaaatcacataggcctgtaktatatgaacaatgctgatgttaaggctgtccatcatttgaaggcatgggtcagatgtgatgctggtagtttaggtagaggcagaattttacctagagctctgtgcttaggaaggatgtgaactgcaatgcagatagcacaggacatctcagaaatacacagaaagcatagggaaaagggaaaaaaaagtgatatgcagagaaagctatctttcaaacatcaacagttaaaggtgtagcagcagaactgctcaaaatccaaacaaaccagaccatgcacagggatggaaaatcaagatgaa

SEQ ID NO: 83052 - DNA, 599 bp, Chicken  19866894378539_1
  misc_feature (1)..(207): n is any nucleotide
nnnnnnnnnnnnnnnnnnnnnnnnnnnnnnnnnnnnnnnnnnnnnnnnnnnnnnnnnnnnnnnnnnnnnnnnnnnnnnnnnnnnnnnnnnnnnnnnnnnnnnnnnnnnnnnnnnnnnnnnnnnnnnnnnnnnnnnnnnnnnnnnnnnnnnnnnnnnnnnnnnnnnnnnnnnnnnnnnnnnnnnnnnnnnnnnnnnnnnnnnnnnnnngttttatgtattatcagcacaagaggataaatgtgattcgatctcaagtctgcccctagggtggaatgtgaatgtcagaggccaagtgctaasccttgttgcagtgttcagacttctatttttttatttgattttgctgcagtggagcatctcactcaacaggtcatgactgacctcaacccaaggcctttaacagcaggatcgctttcaggagtgcacttcttagcaaaatgggatggaagactgacaacatatgtgatgccccacaccggagctgggttcctgggtgtgcaaactgggtgcatgtggttgccagcctggaggcctccagcactaatgatgcctgagggctactgcaggcagccccagcaggcagctctgctcagcgtccc

SEQ ID NO: 83053 - DNA, 599 bp, Chicken  19866894378543_1
  misc_feature (1)..(107): n is any nucleotide
nnnnnnnnnnnnnnnnnnnnnnnnnnnnnnnnnnnnnnnnnnnnnnnnnnnnnnnnnnnnnnnnnnnnnnnnnnnnnnnnnnnnnnnnnnnnnnnnnnnnnnnnnnncctggttttgggaccatccacaccctggtgggttggcctcagatctgaaacggaagctctaagacaaagcagttggatttaaatatggcaatcggtgatgggcttgtcttctccttcgttttactgttcagaagggaagtgtgaggcaccagggctgcacaggcagagaatggatggctacagttggacgtaragaaattactttctcacgtttttccaagctctatctttgaattcacctgccagatgtgctaaggacagtatttgttctgagccaggaactctcagcacagcctcaatttccyaaccctttaatcccacctgacaccagtgagtgcgtgggatgaggtgctgcagggtgagcacagcaagctggcagtagagcaaggcagtgatgctgcrcacagctggggcacagaacagggggggtctcatctctgtttctgctctgtgcgaggagtaaataaaggtaggtgcacgtgcgtgtgtctg

SEQ ID NO: 83054 - DNA, 600 bp, Chicken  19866894378543_2
ttttgggaccatccacaccctggtgggttggcctcagatctgaaacggaagctctaagacaaagcagttggatttaaatatggcaatcggtgatgggcttgtcttctccttcgttttactgttcagaagggaagtgtgaggcaccagggctgcacaggcagagaatggatggctacagttggacgtaragaaattactttctcacgtttttccaagctctatctttgaattcacctgccagatgtgctaaggacagtatttgttctgagccaggaactctcagcacagcctcaatttccyaaccctttaatcccacctgacaccagtgagtgcgtgggatgaggtgctgcagggtgagcacagcaagctggcagtagagcaaggcagtgatgctgcrcacagctggggcacagaacagggggggtctcatctctgtttctgctctgtgcgaggagtaaataaaggtaggtgcacgtgcgtgtgtctgtgctgcttgagccattcagtgctgcatttgctccttgattctgctccatcaggaggttctgatttaatttgtagttaaaatagtctcattaacagaagcaaagtatttaaaga

SEQ ID NO: 83055 - DNA, 600 bp, Chicken  19866894378543_3
cttgtcttctccttcgttttactgttcagaagggaagtgtgaggcaccagggctgcacaggcagagaatggatggctacagttggacgtaragaaattactttctcacgtttttccaagctctatctttgaattcacctgccagatgtgctaaggacagtatttgttctgagccaggaactctcagcacagcctcaatttccyaaccctttaatcccacctgacaccagtgagtgcgtgggatgaggtgctgcagggtgagcacagcaagctggcagtagagcaaggcagtgatgctgcrcacagctggggcacagaacagggggggtctcatctctgtttctgctctgtgcgaggagtaaataaaggtaggtgcacgtgcgtgtgtctgtgctgcttgagccattcagtgctgcatttgctccttgattctgctccatcaggaggttctgatttaatttgtagttaaaatagtctcattaacagaagcaaagtatttaaagacagcagaacaaagtagctgtgccgtgttacagaatttcaaaggggtgacttgccccacttgtaacttctgattctggtggtgtttcccccatggcag

SEQ ID NO: 83056 - DNA, 600 bp, Chicken  19866894378543_4
cagaacagggggggtctcatctctgtttctgctctgtgcgaggagtaaataaaggtaggtgcacgtgcgtgtgtctgtgctgcttgagccattcagtgctgcatttgctccttgattctgctccatcaggaggttctgatttaatttgtagttaaaatagtctcattaacagaagcaaagtatttaaagacagcagaacaaagtagctgtgccgtgttacagaatttcaaaggggtgacttgccccacttgtaacttctgattctggtggtgtttcccccatggcagcactgctgaaacrcctgtggtgcaaggaaggtaataacaaagctgattttaaaattcactggtgaggttggagataatagtaagaatttaatgaattccagagatgttcttaaatatcacaaggcttactgaaagtctctgggtctcacagtctgctggctctctggacttggtggctcttggtgcatggcgcagaggcccagcaccccaaacccaggtgtcctctttgtttctcctcccccttgaagttgtatcctgctcctgggaaagggaagaatgaaaacacaaaagcaaggaaacatgaaaggctcag

SEQ ID NO: 83057 - DNA, 600 bp, Chicken  19866894378544_1
tgatacactttacccaagccatgggcagacagcccatagttggtaaccaaagtctgaacttctaagggacctgaggctctcagctcttgtttttagattatatttacagacacagctatttctacaaaggcactgccagcttcctacttaattggcagtgcccagatagaatacagcctctgtttgtaccccatgtctttgtgagggtaaggtagtcaagactcttttgactagaattgaaaaatttccagatggcctcagcaagagacctctcttctagcttcctgtgaagcatctctkactcatctctatgatcagtcataaatagcttgttcagaaacactttgaggaagtcaacctaactggacctaactctacacagaaagactgggccccatctatgaagtctatctgatatttttttcctctgtacatcaggctgtcacttggtgttgttgttagactgttgtctgtgtgctaactttctgagcatttgccttgcctcctttcatgatgacagcaagagattttctgatatttgacatggtcatataaatgagaacaattttaaaagaaattatatccattacaaatgtcttc

SEQ ID NO: 83058 - DNA, 600 bp, Chicken  19866894378547_1
tagctattccagacattttgttccactgcacttagtccctgtttttttcagtttttattccctacaataatcactgactaaattatttgatatgtatcatttgtggagtaaaatactgtagatcagcacagataaatctgagcaacttccctcatttcacttgatcagttccttgacccatcatctctcctttctcaataatgatcaagaagacacaatcaagttttctacataggtgaagacaggcttatctctttacatacacatacttccccttgcttaataattacacaattaaamtaattttttatcaagaatcataaaacattttcattatgtcccaatattaacacattgattttcctccccactgtgtagaagagtcttctgaataaaatgatcccatttggaaatcattaattaaaaaaaaaaaaaaaaaaagagagaaacacactccatctctcctgtaagagctgtctttcttatcctaaacttacaggcaccataccactatttagacactaccaatatttacttttgccaatatttactttttttaaccaaaatcaggggcaatgtttattacattatgccttagaa

SEQ ID NO: 83059 - DNA, 600 bp, Chicken  19866894378552_1
aggcacaagtcactggataagccattttcagtcatacacgctactgttctctcctttacccctgctccacaagacactgagcactagacatggatagcaatcaggagttagtttagaaggcagttaatgattaacagaggtatatcagcaaatgccttggcacccatgtgtttttgaggcagctatcaaacatcatcttgcacatctgtactcaccttggtccacttcccccctctccaggtagctgcttgtgagcatcctttgatattacagttataaatgtatggggagggtgttackgggcattctcgatatgccacmgttcgaaggccgtaagcgtgcttgttttgaacakaatggattccaacacagtatgtgatcctctgccggtaatccaacccacagctggctgaacactaaaacaaaatcccacttattggtgttattcctgtgaagctgaaccrtcccacagcactgcaaacacagataagccatccccaacccttgttttggcaaaatcatataatctgatgtatgccatatcggttaaacagtgtgcagaagttgaggtctgctgcaatagcgcatgcaaggagatag

SEQ ID NO: 83060 - DNA, 600 bp, Chicken  19866894378552_2
ccattttcagtcatacacgctactgttctctcctttacccctgctccacaagacactgagcactagacatggatagcaatcaggagttagtttagaaggcagttaatgattaacagaggtatatcagcaaatgccttggcacccatgtgtttttgaggcagctatcaaacatcatcttgcacatctgtactcaccttggtccacttcccccctctccaggtagctgcttgtgagcatcctttgatattacagttataaatgtatggggagggtgttackgggcattctcgatatgccacmgttcgaaggccgtaagcgtgcttgttttgaacakaatggattccaacacagtatgtgatcctctgccggtaatccaacccacagctggctgaacactaaaacaaaatcccacttattggtgttattcctgtgaagctgaaccrtcccacagcactgcaaacacagataagccatccccaacccttgttttggcaaaatcatataatctgatgtatgccatatcggttaaacagtgtgcagaagttgaggtctgctgcaatagcgcatgcaaggagataggacacggtatgcagctcttct

SEQ ID NO: 83061 - DNA, 600 bp, Chicken  19866894378552_3
ttacccctgctccacaagacactgagcactagacatggatagcaatcaggagttagtttagaaggcagttaatgattaacagaggtatatcagcaaatgccttggcacccatgtgtttttgaggcagctatcaaacatcatcttgcacatctgtactcaccttggtccacttcccccctctccaggtagctgcttgtgagcatcctttgatattacagttataaatgtatggggagggtgttackgggcattctcgatatgccacmgttcgaaggccgtaagcgtgcttgttttgaacakaatggattccaacacagtatgtgatcctctgccggtaatccaacccacagctggctgaacactaaaacaaaatcccacttattggtgttattcctgtgaagctgaaccrtcccacagcactgcaaacacagataagccatccccaacccttgttttggcaaaatcatataatctgatgtatgccatatcggttaaacagtgtgcagaagttgaggtctgctgcaatagcgcatgcaaggagataggacacggtatgcagctcttctcagagcttacagagcagttccctctcagctgcaa

SEQ ID NO: 83062 - DNA, 600 bp, Chicken  19866894378552_4
catgtgtttttgaggcagctatcaaacatcatcttgcacatctgtactcaccttggtccacttcccccctctccaggtagctgcttgtgagcatcctttgatattacagttataaatgtatggggagggtgttackgggcattctcgatatgccacmgttcgaaggccgtaagcgtgcttgttttgaacakaatggattccaacacagtatgtgatcctctgccggtaatccaacccacagctggctgaacactaaaacaaaatcccacttattggtgttattcctgtgaagctgaaccrtcccacagcactgcaaacacagataagccatccccaacccttgttttggcaaaatcatataatctgatgtatgccatatcggttaaacagtgtgcagaagttgaggtctgctgcaatagcgcatgcaaggagataggacacggtatgcagctcttctcagagcttacagagcagttccctctcagctgcaatattcacatacacatatatatgtcagtagtgcaagggaaacaagagattgagcccacttaaatcaaggaaaagatttctgtttgcttcagtgagagtgtcccataaaga

SEQ ID NO: 83063 - DNA, 600 bp, Chicken  19866894378552_5
actgcaaacacagataagccatccccaacccttgttttggcaaaatcatataatctgatgtatgccatatcggttaaacagtgtgcagaagttgaggtctgctgcaatagcgcatgcaaggagataggacacggtatgcagctcttctcagagcttacagagcagttccctctcagctgcaatattcacatacacatatatatgtcagtagtgcaagggaaacaagagattgagcccacttaaatcaaggaaaagatttctgtttgcttcagtgagagtgtcccataaagacatttcccygagagccagcagaggagccctgtggtcasgccactcaaactcagatgaaaatatgctttttttttttcccctctgcacattttacagcagtataatacccttcagtgtaaagttccacagaagagatgtaagcgaaatcattagtttacctgtgacagttctcctgtgagcacaatgtatttggagggagctctcctgcagtttttgacggatggaggctttgtggcaggatcgcagaagctttcatccacttggatctgcttttcatccacacacttaaccttctggtgtatttccttt

SEQ ID NO: 83064 - DNA, 600 bp, Chicken  19866894378552_6
ccttgttttggcaaaatcatataatctgatgtatgccatatcggttaaacagtgtgcagaagttgaggtctgctgcaatagcgcatgcaaggagataggacacggtatgcagctcttctcagagcttacagagcagttccctctcagctgcaatattcacatacacatatatatgtcagtagtgcaagggaaacaagagattgagcccacttaaatcaaggaaaagatttctgtttgcttcagtgagagtgtcccataaagacatttcccygagagccagcagaggagccctgtggtcasgccactcaaactcagatgaaaatatgctttttttttttcccctctgcacattttacagcagtataatacccttcagtgtaaagttccacagaagagatgtaagcgaaatcattagtttacctgtgacagttctcctgtgagcacaatgtatttggagggagctctcctgcagtttttgacggatggaggctttgtggcaggatcgcagaagctttcatccacttggatctgcttttcatccacacacttaaccttctggtgtatttcctttcttctatatgacgtcgagcactgagtatg

SEQ ID NO: 83065 - DNA, 509 bp, Chicken  19866894378572_1
ctccacttgttacattttggctgcagcaagtactattaacaaaatggattcatgccatctgactgccacttcccatcacaagccctgtatagaaggtaccaattgagttttatacgccagcccacagcaatggcactgtggctacttctgttttaagttctatcctgcggaattgctaaacaaaaccaaataaaagcaccctcatacctaccccttgcaaacattatgactgaaatcatattaaaaatgaaaaattgtagagtgctttgaccacatgcagaaccaacttctaaccataaycttcccttcctcctccaacatgagaaattatttccttgagcattaaaacattagcattaaygagagggctgaacacaccttaccaactctgtttcattttttgtttttaaacttccaggatttcaggaaaatgtaattaaactatttaaaaaaagcaacaaaaaacaataactaataagtacctaaatcacagtaagcctacagtaaga

SEQ ID NO: 83066 - DNA, 448 bp, Chicken  19866894378572_2
actgccacttcccatcacaagccctgtatagaaggtaccaattgagttttatacgccagcccacagcaatggcactgtggctacttctgttttaagttctatcctgcggaattgctaaacaaaaccaaataaaagcaccctcatacctaccccttgcaaacattatgactgaaatcatattaaaaatgaaaaattgtagagtgctttgaccacatgcagaaccaacttctaaccataaycttcccttcctcctccaacatgagaaattatttccttgagcattaaaacattagcattaaygagagggctgaacacaccttaccaactctgtttcattttttgtttttaaacttccaggatttcaggaaaatgtaattaaactatttaaaaaaagcaacaaaaaacaataactaataagtacctaaatcacagtaagcctacagtaaga

SEQ ID NO: 83067 - DNA, 600 bp, Chicken  19866894378578_1
gcaatttcacagcctttgccttaaaacatctgctgcaacattttagattatatcgcgattgtttttgaacacctttttcgtggaattgtaaaacttacagagaaataaacatatgtcatcatatccactcatacaacagtgacagatatcccctgcagtgtaatttttccagtgctttatgtagtctttatttagaggcatcgtaaatactgaggtttccatgacccactgacatcaagtgatctatcaacctaaaaatcttgcaagtataacttccagtctcttctctttcctcatcayctctttggaagatttccattagtcatcaatcgatgcttttaagtataaataccatgatgactcagattcttcccaccaaacttcacccatttctctgtgcacaagtcaggtacttagctgtcaggtagtcctatttattcttcggagctacccctccctctccctgctgacttcaaagggaagctctgaaaagagaagtcctggccttatgaacaagccattttcagtctaaatctcaggtaaccttttctgatcaaggataactttgtatcttcttccccctgccatttctcttccact

SEQ ID NO: 83068 - DNA, 600 bp, Chicken  19866894378578_2
gatttccattagtcatcaatcgatgcttttaagtataaataccatgatgactcagattcttcccaccaaacttcacccatttctctgtgcacaagtcaggtacttagctgtcaggtagtcctatttattcttcggagctacccctccctctccctgctgacttcaaagggaagctctgaaaagagaagtcctggccttatgaacaagccattttcagtctaaatctcaggtaaccttttctgatcaaggataactttgtatcttcttccccctgccatttctcttccactcaatgtcttmtgggcatggtactgtctaacctgagcgcaatttccatcagtagactcatcaaacttgttcagaagaggtctacaaacatcctagctctaagacccttctatgtatttcaaatcacactatatttctttgtttttaagaagacaaaagcataggcaacttgtgagacatttcccctaaaatccttacatatgattttccacacagattctgatagctctttgcaagatgtaggtcagatgagagaggaaaggaacctcctacagacaaaaagaagctccggaagccagaaggcactaaatg

SEQ ID NO: 83069 - DNA, 600 bp, Chicken  19866894378578_3
gcaatttccatcagtagactcatcaaacttgttcagaagaggtctacaaacatcctagctctaagacccttctatgtatttcaaatcacactatatttctttgtttttaagaagacaaaagcataggcaacttgtgagacatttcccctaaaatccttacatatgattttccacacagattctgatagctctttgcaagatgtaggtcagatgagagaggaaaggaacctcctacagacaaaaagaagctccggaagccagaaggcactaaatgcagtacggtattgtatgtgaacagaygaacaaaagaaccgggccactgaatctcacctcaaaaatctgctacgtgccagcagtctggtgacctcctaccaaactgtgttatgatacattaaagttgaaccaaccatccatttgaccagaatcgttcttttaaatgaacacgctcgaaagcaagagcactgaaccttacctctcagatctgctagacacacactgcttctttactcaaaccaccaagggctccatgatcttcatcctcacctcatgatttcttctacccctaatcattaagtgtgacagaaagtaagttttggcaag

SEQ ID NO: 83070 - DNA, 600 bp, Chicken  19866894378582_1
gttctgtgatttgttaagactgtgttaacaacatgcacatcagtaccaaaacattggtgtattgaaggactataattcattttaggaattcttttaaacttctcattttatttcagttttggttttatttttaatatgaatacaccacttttcctaatccaacagatttcactcactcctttggtctattcacattttgaacagtagcttgtcttcaactcacccttccttctcaccaggcctatttcctcgtgtacctacaaagccagtacttccaggaaaattgattgtgacaactaygggtaaaatcatgttttgtttatatttcaggtactaagcagatgctactagatattgctaccagatgttctagaattatatgcaacattatgctcaattttaacttttacaaaattacaagctaataaaaaatgacactgctatagtcaaatgatttattaaacgaaaagccattaaattgcttttaagcttcaccaccccactaccccaaatagctcgtcactgtatacatcaatgaacagattgaaatgtctgtaccattttgtgatttcagtactatcccatataataattatatat

SEQ ID NO: 83071 - DNA, 599 bp, Chicken  19866894378586_1
  misc_feature (1)..(88): n is any nucleotide
nnnnnnnnnnnnnnnnnnnnnnnnnnnnnnnnnnnnnnnnnnnnnnnnnnnnnnnnnnnnnnnnnnnnnnnnnnnnnnnnnnnnnnnngaaatcattgaatgcttttcaaccatttcaaaacatactgcatgacctcagctgaccagtgctgcctagaagattgagatcatttgcctagtgtctgttgaatacatcaacctgccactttgacaacactatttgtagcgtacaggcccaccagcaaccaagtcatacctcaaaaatgaagttccatacagggacacagaataaaccccatmaatatgtaaatgcttccctttgtgcccctgtccgcatgtttatacccattactaagatcttyacttttccttaaaatcttgtccctcttccttttcttctctgttctagaacagactggactcttgwtgggctgtcacttgcatcaaggctagcttcctaactgagctttagcaacagtaacagtaggagatgctgttcaggactgcagtctgaacttaatcccaaaactgtaactggcttagaagcagtagaaactagaaacttaccacctttccaggatgtccttctgtgcaaccct

SEQ ID NO: 83072 - DNA, 599 bp, Chicken  19866894378586_2
  misc_feature (1)..(26): n is any nucleotide
nnnnnnnnnnnnnnnnnnnnnnnnnngaaatcattgaatgcttttcaaccatttcaaaacatactgcatgacctcagctgaccagtgctgcctagaagattgagatcatttgcctagtgtctgttgaatacatcaacctgccactttgacaacactatttgtagcgtacaggcccaccagcaaccaagtcatacctcaaaaatgaagttccatacagggacacagaataaaccccatmaatatgtaaatgcttccctttgtgcccctgtccgcatgtttatacccattactaagatcttyacttttccttaaaatcttgtccctcttccttttcttctctgttctagaacagactggactcttgwtgggctgtcacttgcatcaaggctagcttcctaactgagctttagcaacagtaacagtaggagatgctgttcaggactgcagtctgaacttaatcccaaaactgtaactggcttagaagcagtagaaactagaaacttaccacctttccaggatgtccttctgtgcaacccttccagaaatcccttcttaccagtattggttgtttcctcaacaaaacatgtgttcatctccac

SEQ ID NO: 83073 - DNA, 600 bp, Chicken  19866894378586_3
gcatgacctcagctgaccagtgctgcctagaagattgagatcatttgcctagtgtctgttgaatacatcaacctgccactttgacaacactatttgtagcgtacaggcccaccagcaaccaagtcatacctcaaaaatgaagttccatacagggacacagaataaaccccatmaatatgtaaatgcttccctttgtgcccctgtccgcatgtttatacccattactaagatcttyacttttccttaaaatcttgtccctcttccttttcttctctgttctagaacagactggactcttgwtgggctgtcacttgcatcaaggctagcttcctaactgagctttagcaacagtaacagtaggagatgctgttcaggactgcagtctgaacttaatcccaaaactgtaactggcttagaagcagtagaaactagaaacttaccacctttccaggatgtccttctgtgcaacccttccagaaatcccttcttaccagtattggttgtttcctcaacaaaacatgtgttcatctccacttatccatacctctgctctcagtgaatagccattcaataatcacctagtctcatctgaaataaatt

SEQ ID NO: 83074 - DNA, 600 bp, Chicken  19866894378594_1
tatattatccactagacttactttacgctcaaactaacttatatggaaatttatctgaaatgctcttaagattattaaaacaaacaaacaagccattaattcctacgaaaccattttcactggcagaaggctcttaacgcagatgacagacaaaagcatttcaatactcaacatatctccaagtcattttttttctgtaaaccaatatctcattcctaacccagtattcatcttcatcagcagaagttctttaaagttgtataaaacttcctcacggaaacaagttttttagtatcatcrtaataatattgagcttatttatttctacaaagaktaatgtgacactttcaaagctaaacagtcagtgctggccttcaaatgtattattggtaaaaagcattttggaaaaagacacaaagtcactgtatctggacatcccaaacagatctgaaaacagtaactgaggcagaaataaataaattcagttcttaagtaaagataccattaactgaaaatcaagtttaaaaaacttacaagcaatataaaaagccaattattcttgagtagttttaccaagtggaacatttaagtcaattaaaa

SEQ ID NO: 83075 - DNA, 600 bp, Chicken  19866894378594_2
taacttatatggaaatttatctgaaatgctcttaagattattaaaacaaacaaacaagccattaattcctacgaaaccattttcactggcagaaggctcttaacgcagatgacagacaaaagcatttcaatactcaacatatctccaagtcattttttttctgtaaaccaatatctcattcctaacccagtattcatcttcatcagcagaagttctttaaagttgtataaaacttcctcacggaaacaagttttttagtatcatcrtaataatattgagcttatttatttctacaaagaktaatgtgacactttcaaagctaaacagtcagtgctggccttcaaatgtattattggtaaaaagcattttggaaaaagacacaaagtcactgtatctggacatcccaaacagatctgaaaacagtaactgaggcagaaataaataaattcagttcttaagtaaagataccattaactgaaaatcaagtttaaaaaacttacaagcaatataaaaagccaattattcttgagtagttttaccaagtggaacatttaagtcaattaaaaggaaaaaagaaataggcacataaaattaacacat

SEQ ID NO: 83076 - DNA, 600 bp, Chicken  19866894378606_1
tatgtagttgacagttcaatggatttccaacataaaagaccactgaggtttcagctaaaagcactctaagcccaccagatcaatatttaaactcttaacattttatatcctgctgttttagtatggagaataatgcatggttcaatagtgaataaaagcctgttattctttctagcagctgtgctgatggcaaaaacaagtactgagaaaatagtttatagatggtaacaggctctcaagcatccagaaccatctctcgctatttacagagagacggttgctttagaaagatttcttcamttttgagagaaattggaggtccagattttattaaagaacagttctgttgtggaccaaaaatgtttcgatgtgcggaatagccttagagtgtcactacagcactgacgttattcacaaagagaaaatatgcagggaagagggaaaaaaaaaatgattaaaatactgaagtattaagagtgtaccaggaaagttggtggaaatcttagtgctaaggcattatcagtttaagggttcttcatcatcagtaacaaggtgatcttcaaaacattgtgagttttacttcttacccattttatagca

SEQ ID NO: 83077 - DNA, 599 bp, Chicken  19866894378612_1
  misc_feature (1)..(89): n is any nucleotide
nnnnnnnnnnnnnnnnnnnnnnnnnnnnnnnnnnnnnnnnnnnnnnnnnnnnnnnnnnnnnnnnnnnnnnnnnnnnnnnnnnnnnnnnnattgtgctgtcagcaatgaactgtctctggaaattttctcttggatgcatcgttctgtctgagaaagtagtccagagcacctgagggaatcctacagctggtaaaaaggagtttgtttctctggtatctgtgcagctgtgcctacatgtgcccattgaaagtcatgctttttaagttgatctgtcatatgaacctgacagcaaaaatgtgytgctgaggatttcatgtgcttgctggccactaatgaatgcagcggcagtgaagygcccaggctgagcaggctgcaatctgctttcaccagtcttcacggcatcacctctccaagctgctgtcaagctgccaggacacataactgccaattactgagcaactcctgtcttcttcaggtgctgttcagggcttgggatattccagctccagttttatctgaatcctggcagcccgccatgcatttgtatgagcttgacggcagaggtcagagcaatttcatgcttctcgctgagcggaggt

SEQ ID NO: 83078 - DNA, 599 bp, Chicken  19866894378612_2
  misc_feature (1)..(35): n is any nucleotide
nnnnnnnnnnnnnnnnnnnnnnnnnnnnnnnnnnnattgtgctgtcagcaatgaactgtctctggaaattttctcttggatgcatcgttctgtctgagaaagtagtccagagcacctgagggaatcctacagctggtaaaaaggagtttgtttctctggtatctgtgcagctgtgcctacatgtgcccattgaaagtcatgctttttaagttgatctgtcatatgaacctgacagcaaaaatgtgytgctgaggatttcatgtgcttgctggccactaatgaatgcagcggcagtgaagygcccaggctgagcaggctgcaatctgctttcaccagtcttcacggcatcacctctccaagctgctgtcaagctgccaggacacataactgccaattactgagcaactcctgtcttcttcaggtgctgttcagggcttgggatattccagctccagttttatctgaatcctggcagcccgccatgcatttgtatgagcttgacggcagaggtcagagcaatttcatgcttctcgctgagcggaggtgttgtcagagatgtgctcttgcacaagagattggatcattcggtaggtttattt

SEQ ID NO: 83079 - DNA, 600 bp, Chicken  19866894378612_3
gctgtcaagctgccaggacacataactgccaattactgagcaactcctgtcttcttcaggtgctgttcagggcttgggatattccagctccagttttatctgaatcctggcagcccgccatgcatttgtatgagcttgacggcagaggtcagagcaatttcatgcttctcgctgagcggaggtgttgtcagagatgtgctcttgcacaagagattggatcattcggtaggtttattttgaagccccatgattgtggaggagctacagtgtagccattgagaacactgaatgttcaaaacstaaggtagagtcaagcagacacggactcaccggaaaaagtccagtggagggccaccaagatgatgaagagtctggagcagctctcatgtgagaagaggctgaagagagggcccatgacacttgttgatgtgtacattttgtccctaggtttttcaatctctagccagcctatgaaaagtcagaaagctgaacaagccacctatttgtacaaatggggaacaaaaaaataccatttgttttgaataattccctttatgaggagcacaagatgggcatcagctttttctctgtttcaggtca

SEQ ID NO: 83080 - DNA, 600 bp, Chicken  19866894378616_1
caaaacttttgctccagcctaaggagtagagggtaactggccagcacttgttagtctccatgttaacagcacaagaagtattcaaatccactgtcaattaaaagtaaggtataactgaattagcagaagcaacttatggcagaaattcaattacaaagcagaattaaaggaagagatgccagtaacttttggaggctgggcaggaagaggcgagtgcatcaatctactattttcagagctgttagcagaaagcttaaggaagagatgcgttcaaagaacaacttgtaaagagcttcctcraaaagagagcttcactgatggatgagagaaatgaaggtgacagatgctttttttgtctcattttccaaggtgatttcaaccccttcccattgctccacgtcacagacattaagtgtaggtttctttgtacacaatggagaagcctcaagtgttgtcggcgcttctcattctctaagggctgccctttcaccccactccatcccagcctccacttgtttccctcaggctgataattctcttgatcaatctcaatgccaactaccgataaggccctcccacacttccaaagtccagctttca

SEQ ID NO: 83081 - DNA, 600 bp, Chicken  19866894378628_1
tgtgaaaatgaatttattcttaatgtttcaactgcatcaatttactatgattcagctcttggtattcaaagcatgaagatgagtcgtcttattcttttatttttcagttatgacagtgattgttaccctgacaaggctcacaaaattctatcaccaaacatcaggtatttatggcagcaaaacacaactgtatgttaaggaatgctgtctattcccctaatattttagcaagttattgctgaagtgaaatacatttctgaagcttggacaggatacttctggaaaaattacttgtttccytcaagaaygtctatggagattgatattgcacagtattttctttgaagagaacaggtgtggcatcatccatgtctttatttcctggacactgggaggaaataattgtgattcagctcctgaagcactcactgtgagctaagacaagcgcaggagctgggctcgatgatccttgtggatcccctccaactcgggctcttctatgatgacaagaaacacctcatttagcaaagccaccgcagcccaatttcttatctatcacattgccttgcctctgtggtatactggggaacacgagagcag

SEQ ID NO: 83082 - DNA, 600 bp, Chicken  19866894378628_2
tgaatttattcttaatgtttcaactgcatcaatttactatgattcagctcttggtattcaaagcatgaagatgagtcgtcttattcttttatttttcagttatgacagtgattgttaccctgacaaggctcacaaaattctatcaccaaacatcaggtatttatggcagcaaaacacaactgtatgttaaggaatgctgtctattcccctaatattttagcaagttattgctgaagtgaaatacatttctgaagcttggacaggatacttctggaaaaattacttgtttccytcaagaaygtctatggagattgatattgcacagtattttctttgaagagaacaggtgtggcatcatccatgtctttatttcctggacactgggaggaaataattgtgattcagctcctgaagcactcactgtgagctaagacaagcgcaggagctgggctcgatgatccttgtggatcccctccaactcgggctcttctatgatgacaagaaacacctcatttagcaaagccaccgcagcccaatttcttatctatcacattgccttgcctctgtggtatactggggaacacgagagcagccccactg

SEQ ID NO: 83083 - DNA, 600 bp, Chicken  19866894378630_1
ctcctaagaaaactgaaagtgtatattcattttaggaaagacaggaattttgcttttgaacaaggtaagcattgagaccacttcccagtaaaattatgaggaagtaagcattcttaacattatttcaatagaacttttaaaactacatagaatatgccatttttacatcttcatttttctcttcagtcgtataatagaatcatagaatggtttgggttggaatggacctcaatgatcattaagttccaaccctcttgctgcaggcagggttgccaaccagtagatcaagcaatagatcasgttgcccagggcctccatccaacttggccttgaacacctccaggaacagggcatccacagacactctaggcaaccttttccagcacctcaccaccctctcagtgaaaaacttccctgacatcaaatcaaaatcattcctccttgtcctatcactgtctagccatgtaaaaagttgatttccctcctgtttataatctccctgtaaatactggaaggccgtaatgaggtctccttacagccttctcttctccaggatgaacaagcccagctcctgtcttcataggagaggtgctccatccc

SEQ ID NO: 83084 - DNA, 600 bp, Chicken  19866894378630_2
gaacacctccaggaacagggcatccacagacactctaggcaaccttttccagcacctcaccaccctctcagtgaaaaacttccctgacatcaaatcaaaatcattcctccttgtcctatcactgtctagccatgtaaaaagttgatttccctcctgtttataatctccctgtaaatactggaaggccgtaatgaggtctccttacagccttctcttctccaggatgaacaagcccagctcctgtcttcataggagaggtgctccatccctctgatgatcttcatggtcctcctctggacmctctacagaagtcttatatctttcttatgttaggggccctggacctggacacagtagtccagatgggacctcacgagggcagaatagggagggacaatcacctccctcaccctgtggccaacctttttctgatgcagtccacaatactgttggctttctgggctgcaagtgcacactactggctcatgttaagtttttcatctaccaggacttctaagtccttctcaacagggctactctcaaggacttcttattccagtctgtatacatatctagggttaccccaacccaagcgtaaaa

SEQ ID NO: 83085 - DNA, 600 bp, Chicken  19866894378630_3
tggacctggacacagtagtccagatgggacctcacgagggcagaatagggagggacaatcacctccctcaccctgtggccaacctttttctgatgcagtccacaatactgttggctttctgggctgcaagtgcacactactggctcatgttaagtttttcatctaccaggacttctaagtccttctcaacagggctactctcaaggacttcttattccagtctgtatacatatctagggttaccccaacccaagcgtaaaaccttgcattttgctttgttgaacctcatcatgttcacargggcccacctttcgggtttatgaaggttcctctggatggcatccattcattctgcctaatcaactacaccactcagcttgatgtcatcagcaaactcggtgagggtgcaatcaatcccatcatctgtatcattgataaagatgttaaagagtactagtcccaagactaacccacaagggacactggtcatcacctgccttcacctggacatagatccattaaccacaacactatggttgtgacattccaattccttatccacaaaacagtctacccttccaccaccaagcagggtaaaaa

SEQ ID NO: 83086 - DNA, 599 bp, Chicken  19866894378632_1
  misc_feature (1)..(43): n is any nucleotide
nnnnnnnnnnnnnnnnnnnnnnnnnnnnnnnnnnnnnnnnnnnatttttgtatgtcaaaagctattaggtcttagatatttgacccttaattattatggaagcaattagctcctgtgacaagaaggccttgcctgagtaattgtgatgagcagaatgttttctgtagtgtaagaaacaaatattctaagcaaaactcccaactaccgaggaccttagcattgccctgcacttcgtaagtgctatcttggcctcatactagactgcacaaggcggaacttccttcctttactggcacacaytgcatgatatcatagagccacataatggaagatttccttaagtaggaaatttagaattccaaaaygtaaagaacttccagcaacagacagattaagttgcttttaaatagttggatgaactttsagaaaactactctggtatcctaccttctgtgaagacaaccatgattaggaaacagctctaagtgccttaaaaactgtcatttctagaacagacaagaaayatattagggtttcaagacacagaagtatttaatgggattttatgcactgaaggaatttcattcatatatattgat

SEQ ID NO: 83087 - DNA, 600 bp, Chicken  19866894378632_2
taggtcttagatatttgacccttaattattatggaagcaattagctcctgtgacaagaaggccttgcctgagtaattgtgatgagcagaatgttttctgtagtgtaagaaacaaatattctaagcaaaactcccaactaccgaggaccttagcattgccctgcacttcgtaagtgctatcttggcctcatactagactgcacaaggcggaacttccttcctttactggcacacaytgcatgatatcatagagccacataatggaagatttccttaagtaggaaatttagaattccaaaaygtaaagaacttccagcaacagacagattaagttgcttttaaatagttggatgaactttsagaaaactactctggtatcctaccttctgtgaagacaaccatgattaggaaacagctctaagtgccttaaaaactgtcatttctagaacagacaagaaayatattagggtttcaagacacagaagtatttaatgggattttatgcactgaaggaatttcattcatatatattgatttttattaccttgtttcaatatattactatttaacaaaactacgcattttaattttcagcatcttt

SEQ ID NO: 83088 - DNA, 600 bp, Chicken  19866894378632_3
ggccttgcctgagtaattgtgatgagcagaatgttttctgtagtgtaagaaacaaatattctaagcaaaactcccaactaccgaggaccttagcattgccctgcacttcgtaagtgctatcttggcctcatactagactgcacaaggcggaacttccttcctttactggcacacaytgcatgatatcatagagccacataatggaagatttccttaagtaggaaatttagaattccaaaaygtaaagaacttccagcaacagacagattaagttgcttttaaatagttggatgaactttsagaaaactactctggtatcctaccttctgtgaagacaaccatgattaggaaacagctctaagtgccttaaaaactgtcatttctagaacagacaagaaayatattagggtttcaagacacagaagtatttaatgggattttatgcactgaaggaatttcattcatatatattgatttttattaccttgtttcaatatattactatttaacaaaactacgcattttaattttcagcatctttttccagtttccccagtgctgtaaagctgatctgacctctgcaaacagggctgctgctgg

SEQ ID NO: 83089 - DNA, 600 bp, Chicken  19866894378632_4
ctgcacttcgtaagtgctatcttggcctcatactagactgcacaaggcggaacttccttcctttactggcacacaytgcatgatatcatagagccacataatggaagatttccttaagtaggaaatttagaattccaaaaygtaaagaacttccagcaacagacagattaagttgcttttaaatagttggatgaactttsagaaaactactctggtatcctaccttctgtgaagacaaccatgattaggaaacagctctaagtgccttaaaaactgtcatttctagaacagacaagaaayatattagggtttcaagacacagaagtatttaatgggattttatgcactgaaggaatttcattcatatatattgatttttattaccttgtttcaatatattactatttaacaaaactacgcattttaattttcagcatctttttccagtttccccagtgctgtaaagctgatctgacctctgcaaacagggctgctgctgggaatggcagctgaacagcaggggacaacagagccattttagaaagtggtttgggatctttctgggtgagaaatcctacagaaatacagattatacacact

SEQ ID NO: 83090 - DNA, 599 bp, Chicken  19866894378640_1
  misc_feature (1)..(14): n is any nucleotide
nnnnnnnnnnnnnnaactccattgtgcaacagtatctgatctcccaaattctcctggcagccaattccccagctcagccctactgcaactgctccccagacacactgaaccacaaggaaaagccatttggattgtgctctcttgctttcatgtccatgggggatttcctgggattttgcaagccgcagggattgagggcaaagccaacagagaagcagacctgtgcttagggcacctgcacaagctagcctgcaggcttacagcttcactgtggtttgaggtttgaaggtttcctatcasctgctcatctcctgcctttatgtaacaacaataacaaaacacrcaaaaatatccctcagaaaatccaaccgtctttgctcttgcaggtcctgaactgtttgcctctgagggcagaacacagactttggatggttttgagaagtctcctgtctgggtggttttatttatatctgatgcattttaatgcagaatgggcagaaatgagatgcttcagagcaaagtcaaagcagagcagttctgcaggtccggccctcgctgggctcagtgggggggatgtgctcatcaccccctcttcaaaa

SEQ ID NO: 83091 - DNA, 600 bp, Chicken  19866894378640_2
ccaaattctcctggcagccaattccccagctcagccctactgcaactgctccccagacacactgaaccacaaggaaaagccatttggattgtgctctcttgctttcatgtccatgggggatttcctgggattttgcaagccgcagggattgagggcaaagccaacagagaagcagacctgtgcttagggcacctgcacaagctagcctgcaggcttacagcttcactgtggtttgaggtttgaaggtttcctatcasctgctcatctcctgcctttatgtaacaacaataacaaaacacrcaaaaatatccctcagaaaatccaaccgtctttgctcttgcaggtcctgaactgtttgcctctgagggcagaacacagactttggatggttttgagaagtctcctgtctgggtggttttatttatatctgatgcattttaatgcagaatgggcagaaatgagatgcttcagagcaaagtcaaagcagagcagttctgcaggtccggccctcgctgggctcagtgggggggatgtgctcatcaccccctcttcaaaataaccccccacgtctcttttcatccaacaaaacatttaggtgca

SEQ ID NO: 83092 - DNA, 599 bp, Chicken  19866894378646_1
  misc_feature (1)..(35): n is any nucleotide
nnnnnnnnnnnnnnnnnnnnnnnnnnnnnnnnnnncttttcccttctcctttctactaaaggtctgtggtcacccagtggaagactgttaaaaaatgaaacaaaattaaaaaaaaaaaaaaaaagatactcaggcattactgcgttataatctttttatttttggtcccatcaagaactgtgacatcaatgcatggatcatttatgtcatcccaaaaggtaattaggagaaagtaaaagccagaagttgatctgcatcagtgacacaaaggtgctctaaacctgtcaaagccagctgctrcaaatgaaggtccatctgctttacatcagagggatggtgagaaacagctggaggaactccatagttctgtccctaattgtccataatgggattattttctctttatagtcttatactgtattaaactaagttggcataattcctcctgtcctgggtctttgaagtgctgtatgtatcattcattttcctatgcaatcattatcatcattcttttccctgtattttcatagctattgttctctgtctccttctatctttttcctaggttagatctcaattcattctacttcttcacttat

SEQ ID NO: 83093 - DNA, 600 bp, Chicken  19866894378654_1
cagcatgtccctgtctgggtgggccaggagtgtctccagggatggagcttccatagcctttgcttttaatcgagccttgtcagtatttgactaccctcactttaaaatagtctcctacctctaagcttgtgctcgctgcctcctgccccatcatcattctcctattgggggaatctttctccactttctctgcagccacccattaattgaagacagcaacaaggttccctttcccttctcctcaggctgaagggtcctatttctctcagcatcccattgcctgatctgtgcatcagtgayagtggttctgtgcttcatggtttttgtgagcattgtattttgacaaagtgcagacccygactgctgcccagctaaccccaaagcccagcctggctggcagcaggaagaggaggtgattgatagggattggtcgtggcatgctgctgagggcatcgctgggagatggttgatgctattgactctgctgtcactattactgcactgaagagttatttggagcccttttgtcagcatttacaatccataaggttctatcatgctcagygctatcaataacagtgctttaaaaacatatttttg

SEQ ID NO: 83094 - DNA, 600 bp, Chicken  19866894378654_2
tttgcttttaatcgagccttgtcagtatttgactaccctcactttaaaatagtctcctacctctaagcttgtgctcgctgcctcctgccccatcatcattctcctattgggggaatctttctccactttctctgcagccacccattaattgaagacagcaacaaggttccctttcccttctcctcaggctgaagggtcctatttctctcagcatcccattgcctgatctgtgcatcagtgayagtggttctgtgcttcatggtttttgtgagcattgtattttgacaaagtgcagacccygactgctgcccagctaaccccaaagcccagcctggctggcagcaggaagaggaggtgattgatagggattggtcgtggcatgctgctgagggcatcgctgggagatggttgatgctattgactctgctgtcactattactgcactgaagagttatttggagcccttttgtcagcatttacaatccataaggttctatcatgctcagygctatcaataacagtgctttaaaaacatatttttgttgtgtattttctccacttgcgcacattgtcctttagaaaatgagtgcttttcatcct

SEQ ID NO: 83095 - DNA, 600 bp, Chicken  19866894378654_3
tcagcatcccattgcctgatctgtgcatcagtgayagtggttctgtgcttcatggtttttgtgagcattgtattttgacaaagtgcagacccygactgctgcccagctaaccccaaagcccagcctggctggcagcaggaagaggaggtgattgatagggattggtcgtggcatgctgctgagggcatcgctgggagatggttgatgctattgactctgctgtcactattactgcactgaagagttatttggagcccttttgtcagcatttacaatccataaggttctatcatgctcagygctatcaataacagtgctttaaaaacatatttttgttgtgtattttctccacttgcgcacattgtcctttagaaaatgagtgcttttcatcctggagtctttttctscttgctcacatgtgctgagctgtatcaggagcaggactgtgaaacagataaagaaccagccatatgctttctttatgttctcacagcgcctggagccctgcaatctggcatgggcttctgagcaaacacgagcaacctgaaggcgtctccacgctctgctggctgtaagcagcgctcctctgccaccagcact

SEQ ID NO: 83096 - DNA, 600 bp, Chicken  19866894378654_4
taaccccaaagcccagcctggctggcagcaggaagaggaggtgattgatagggattggtcgtggcatgctgctgagggcatcgctgggagatggttgatgctattgactctgctgtcactattactgcactgaagagttatttggagcccttttgtcagcatttacaatccataaggttctatcatgctcagygctatcaataacagtgctttaaaaacatatttttgttgtgtattttctccacttgcgcacattgtcctttagaaaatgagtgcttttcatcctggagtctttttctscttgctcacatgtgctgagctgtatcaggagcaggactgtgaaacagataaagaaccagccatatgctttctttatgttctcacagcgcctggagccctgcaatctggcatgggcttctgagcaaacacgagcaacctgaaggcgtctccacgctctgctggctgtaagcagcgctcctctgccaccagcactgtgctgcaccgacatgaagtgggaatgagagcactgctgctcagctgctcctcacgtggggcagttatctgctggggcaggcagtgctggggtgccattgctgttgt

SEQ ID NO: 83097 - DNA, 600 bp, Chicken  19866894378654_5
catgggcttctgagcaaacacgagcaacctgaaggcgtctccacgctctgctggctgtaagcagcgctcctctgccaccagcactgtgctgcaccgacatgaagtgggaatgagagcactgctgctcagctgctcctcacgtggggcagttatctgctggggcaggcagtgctggggtgccattgctgttgtgttgtaactgagatgcagccatagccatgtcccatctgaccatggctcccacccacacacacctgtaccagtgattagtgcaagtaggatgtagcagtgcaaaagcayacttctttttatcacctcggaaagcaaccaatcatctttcactggcagtccattgctgctcttattcaagagaatggtgtgttttagcagcctagccaattgcatggtaacttactagtgattccaaatggaaaatgtttctgtttgaagccttctgcttgtatatgctgttacttaacgaagggcatttgagtctgcagccttcttttcttgttttattaaaaagcattaaaaatattgctcataaaatatatatactattttgaacttctgctcctgctgcagggatggataaacact

SEQ ID NO: 83098 - DNA, 599 bp, Chicken  19866894378656_1
  misc_feature (1)..(210): n is any nucleotide
nnnnnnnnnnnnnnnnnnnnnnnnnnnnnnnnnnnnnnnnnnnnnnnnnnnnnnnnnnnnnnnnnnnnnnnnnnnnnnnnnnnnnnnnnnnnnnnnnnnnnnnnnnnnnnnnnnnnnnnnnnnnnnnnnnnnnnnnnnnnnnnnnnnnnnnnnnnnnnnnnnnnnnnnnnnnnnnnnnnnnnnnnnnnnnnnnnnnnnnnnnnnnnnnnnaaatgctgtcttgagctggaagctgcaaaatagaactgcacaaagcagctattgagggcctccatttctcagtcctcttggagaaaagcracagctttctgtaaggcagttattcagacagagggtggtcaggctttttttttgtttgtttgttttttaatttaaaaatcaggaagaagaagccartaagatactgcctgtgtgagaactgtgagctgsctgcttgtggtgcgctgtattcactcagtagcctctgccaagccatttttctttccctccctttcctacaaatagtaaccaaccaggcttgaaggagaagacataaagccccattcctcagtcttgaaaatcctgtcataaagtccttagatggacacaacgctgtgaca

SEQ ID NO: 83099 - DNA, 599 bp, Chicken  19866894378656_2
  misc_feature (1)..(114): n is any nucleotide
nnnnnnnnnnnnnnnnnnnnnnnnnnnnnnnnnnnnnnnnnnnnnnnnnnnnnnnnnnnnnnnnnnnnnnnnnnnnnnnnnnnnnnnnnnnnnnnnnnnnnnnnnnnnnnnnnnaaatgctgtcttgagctggaagctgcaaaatagaactgcacaaagcagctattgagggcctccatttctcagtcctcttggagaaaagcracagctttctgtaaggcagttattcagacagagggtggtcaggctttttttttgtttgtttgttttttaatttaaaaatcaggaagaagaagccartaagatactgcctgtgtgagaactgtgagctgsctgcttgtggtgcgctgtattcactcagtagcctctgccaagccatttttctttccctccctttcctacaaatagtaaccaaccaggcttgaaggagaagacataaagccccattcctcagtcttgaaaatcctgtcataaagtccttagatggacacaacgctgtgacatgggtatggtttaattccagcagacgtagagtgaggagcgctgaatgtacccttccatgtggtgggaacagcaccctgcaaatctaacatcaagca

SEQ ID NO: 83100 - DNA, 599 bp, Chicken  19866894378656_3
  misc_feature (1)..(81): n is any nucleotide
nnnnnnnnnnnnnnnnnnnnnnnnnnnnnnnnnnnnnnnnnnnnnnnnnnnnnnnnnnnnnnnnnnnnnnnnnnnnnnnnnaaatgctgtcttgagctggaagctgcaaaatagaactgcacaaagcagctattgagggcctccatttctcagtcctcttggagaaaagcracagctttctgtaaggcagttattcagacagagggtggtcaggctttttttttgtttgtttgttttttaatttaaaaatcaggaagaagaagccartaagatactgcctgtgtgagaactgtgagctgsctgcttgtggtgcgctgtattcactcagtagcctctgccaagccatttttctttccctccctttcctacaaatagtaaccaaccaggcttgaaggagaagacataaagccccattcctcagtcttgaaaatcctgtcataaagtccttagatggacacaacgctgtgacatgggtatggtttaattccagcagacgtagagtgaggagcgctgaatgtacccttccatgtggtgggaacagcaccctgcaaatctaacatcaagcacagagatctgaaaagtggtgtgtggctgtctgg

SEQ ID NO: 83101 - DNA, 600 bp, Chicken  19866894378656_4
aaagccccattcctcagtcttgaaaatcctgtcataaagtccttagatggacacaacgctgtgacatgggtatggtttaattccagcagacgtagagtgaggagcgctgaatgtacccttccatgtggtgggaacagcaccctgcaaatctaacatcaagcacagagatctgaaaagtggtgtgtggctgtctggcatcctcctgcagtgcagcccagcaggggctccccctgcagcaccccactccaggccattattgcaggagaactcaaatagccctaagatggtctctgctcccaracagcttatctgatcttgactgttggttttttttattgtgtgaatccattggagttctgtttgcttcctggatatttggagactaaagaaaaggagtgtgggaaagtcacatcacccatttttgggtgccactgaggcttgaaatgaattgtgtttttttaaatgactaaatagcttattacgctttacccaacccaggctgcacttccccagttctcggcagaacaaccagacgtgtcatgggccaaacgagggtcaaagcattacctttgctttcaaacaacattacctcggtcctgt

SEQ ID NO: 83102 - DNA, 599 bp, Chicken  19866894378663_1
  misc_feature (1)..(135): n is any nucleotide
nnnnnnnnnnnnnnnnnnnnnnnnnnnnnnnnnnnnnnnnnnnnnnnnnnnnnnnnnnnnnnnnnnnnnnnnnnnnnnnnnnnnnnnnnnnnnnnnnnnnnnnnnnnnnnnnnnnnnnnnnnnnnnnnnnnnnnncagagatggcgtcagtgtttctctttttcccatgtaagttcacagcagtcgtagtgtgaaaatactcagtggtcttgcaggctgctttgtaaaactggaataagcaaattcatcctgaaactgcagccaagagctccaaggtgagactaatgatgttaagagaakttgcatactatcacaaaacctaaattgaccacaacttgatgatgaagctcacagcaaatactgcgatctgaatatgagcagagctggtaattttaaaagatttgggaagtaaacagagctgttgcaactgctattcatgtatttggtagtgtgtttcacaaccaattcctatgcaggccagtcctttcttggtgggaaaaagaaacaaaagcacttggataagtggcattgccctctgctaatcactgggacagcttctgttggtgtcatctamgggatttctctggtgacctttgcag

SEQ ID NO: 83103 - DNA, 600 bp, Chicken  19866894378663_2
ggtgagactaatgatgttaagagaakttgcatactatcacaaaacctaaattgaccacaacttgatgatgaagctcacagcaaatactgcgatctgaatatgagcagagctggtaattttaaaagatttgggaagtaaacagagctgttgcaactgctattcatgtatttggtagtgtgtttcacaaccaattcctatgcaggccagtcctttcttggtgggaaaaagaaacaaaagcacttggataagtggcattgccctctgctaatcactgggacagcttctgttggtgtcatctamgggatttctctggtgacctttgcagtacatctttgaacacgagatactgtagtaccctcagtaccttttccatcaaggtgctgctggctcctgttctttttagtgtatcctaaaaccatttaggtgagttaagcagaattacggttagtttccctcttgcgtggaaataccttgcctaaccatctgacagcagtgctatgcatmttgttgctccaaaaagcttgcagtggatggtggctgcaatgaaggtggtccgtttccatagcagaagtttcattggtgctttctgccatcagaggg

SEQ ID NO: 83104 - DNA, 475 bp, Chicken  19866894378663_3
cagtcctttcttggtgggaaaaagaaacaaaagcacttggataagtggcattgccctctgctaatcactgggacagcttctgttggtgtcatctamgggatttctctggtgacctttgcagtacatctttgaacacgagatactgtagtaccctcagtaccttttccatcaaggtgctgctggctcctgttctttttagtgtatcctaaaaccatttaggtgagttaagcagaattacggttagtttccctcttgcgtggaaataccttgcctaaccatctgacagcagtgctatgcatmttgttgctccaaaaagcttgcagtggatggtggctgcaatgaaggtggtccgtttccatagcagaagtttcattggtgctttctgccatcagaggggatcagggcctgaaaatccctactgggaggagaaatagcgagtttcaaaatagagaaaagcagccaaacaagagcatat

SEQ ID NO: 83105 - DNA, 600 bp, Chicken  19866894378665_1
tctaagaacctttctgaattctgttaattgtctttgaagatattatgtttatgctaaacaatccacagtttaactaactttatttaaccagagaagtgtttcaaagaagaaaagaaagaaaaatgggattataataatttttagatgacttgaatgtttacaattgaaattcattacatctctgatttttgtgactattagcttatgaatatccaatgttttcatttcttatgactttgttgctaatctcctaatgtttgtttcctttaatcttctgctcttaaagtcacagaatttctrgcaaatccccactttcctgtgaaaaataaagcatctattttgcattgcctcaggaagtctatttattattattaatagtaagatttttaaatctgtctcatgacaatgaagatgttatttctgttgagcccaaaacagtctttcagcatttgacattatcttaaatagtatttgttaaggatggattagtagtaataatagaagtattaccatagcacttctgagcattaatcatgggtcagggtgacattacatgagcacagaatgcaagggatggtctttcctctaaaagctttgtgc

SEQ ID NO: 83106 - DNA, 600 bp, Chicken  19866894378674_1
ttctgtatttgttccatctcctacccagtgctttctttagctgaattgatttttgttttcattctgtatttctatactcatacatatgtgtgtctcttcacgtgtataccaactgatacaagaaatagtcacgtagaagaatgggcttatgttcaaatataatcaaactgtggtctggaatttgcccctctagtgggcacagctacctcctttgatttagctgatggtggaatcctctcccagttcctgatggatactaattaatgacacgacacctgtgtgatttagaaagactatgcrtcagacaagagtgtgccctgctgtaatagggaatggttaaaaaaaggatccagagagagtactgtgcttgatgtttataaatatttacaacaagaacagaagagactgtcctgaatcttcaagataaagatatttataaacctttaagtaactgacaatggtgttttttaaagctttgctagtaaagaagagtttgttttatgtacttgacccaattcataccaaacattttaaagaagatcagagtggaaaacagcaagtactagtgagaaaaaggcatgcccattaccccttcaggaa

SEQ ID NO: 83107 - DNA, 600 bp, Chicken  19866894378675_1
ctcagttgaattatgaggttttacattcaggcatcagtgcctgagggtcacgtcaagggtagaagcaggtgagatttgcatatttttgaacagcatcaccctctgacctcctcacctctaccaaaggagctgcttcaaatttgtcaaagtcaggatccctttttatatattcttgtgtctaatccggtgttacttgacaagtgtaactcttagagatggaaattctgttattagggcactgacgcttttctgaatattaaaaaccctcttgcttttttacagctatcaaaatcaatcttyctgatctccccttgagctgccgtgctttcttctgagctgattgctgctcctgagcaggtgcgtggcagcactgctttggctggaactgacaatattgacttccaaagaaattaaggtgcttctgcttctagtaacaacttctgcttttggtttttaatcctctcttccatcacaaatgctgcatgacgatttcacctccttctccaagggagaatagggttgtgcacagtaaccttgagtatagacttgtcatatctaatgagctcattaaggcttgatctgctcattacctgggtattc

SEQ ID NO: 83108 - DNA, 599 bp, Chicken  19866894378676_1
  misc_feature (1)..(142): n is any nucleotide
nnnnnnnnnnnnnnnnnnnnnnnnnnnnnnnnnnnnnnnnnnnnnnnnnnnnnnnnnnnnnnnnnnnnnnnnnnnnnnnnnnnnnnnnnnnnnnnnnnnnnnnnnnnnnnnnnnnnnnnnnnnnnnnnnnnnnnnnnnnnnntaatcagtgtctgttcagtccactcaatgagaaagtggctacgagaaaatatactcatgtcactcacattcctgcatgcaatgcacatgccaagaggactgaaaatacagttgtctgtgaaatcttggaaggttgtcagttttgagtgattgactttktatctgtaatgttcttttagtatgatttttgacatatatttaagtcactctgaaaagcattacctcctatttgtttacatggaaaccacaacagatacaaagagcacaataacgctatttgatagagcaaattctcaactacaaaacacagtttccgacagaatcatcaccgttagctatgyatttctgccagcagtgagcaagagcctgtatgccacattcagaaaaatctgcaccagtggaggtggcccattgtttcacagctgctacartggtgtcattgctgggaaaatgtgccc

SEQ ID NO: 83109 - DNA, 600 bp, Chicken  19866894378676_2
acgagaaaatatactcatgtcactcacattcctgcatgcaatgcacatgccaagaggactgaaaatacagttgtctgtgaaatcttggaaggttgtcagttttgagtgattgactttktatctgtaatgttcttttagtatgatttttgacatatatttaagtcactctgaaaagcattacctcctatttgtttacatggaaaccacaacagatacaaagagcacaataacgctatttgatagagcaaattctcaactacaaaacacagtttccgacagaatcatcaccgttagctatgyatttctgccagcagtgagcaagagcctgtatgccacattcagaaaaatctgcaccagtggaggtggcccattgtttcacagctgctacartggtgtcattgctgggaaaatgtgcccacacagtccatctttcatcagcttgaacagatagaagtcaaggaggcaccaaatctgggcttatatggtagatgtggtaggacagtccagccaaggcartgtgatccatggtcttcaaatgggtaaggggcttagtgttactgtgttgcaggasaaaggttgtcttcttctttgacctgactc

SEQ ID NO: 83110 - DNA, 600 bp, Chicken  19866894378676_3
ggttgtcagttttgagtgattgactttktatctgtaatgttcttttagtatgatttttgacatatatttaagtcactctgaaaagcattacctcctatttgtttacatggaaaccacaacagatacaaagagcacaataacgctatttgatagagcaaattctcaactacaaaacacagtttccgacagaatcatcaccgttagctatgyatttctgccagcagtgagcaagagcctgtatgccacattcagaaaaatctgcaccagtggaggtggcccattgtttcacagctgctacartggtgtcattgctgggaaaatgtgcccacacagtccatctttcatcagcttgaacagatagaagtcaaggaggcaccaaatctgggcttatatggtagatgtggtaggacagtccagccaaggcartgtgatccatggtcttcaaatgggtaaggggcttagtgttactgtgttgcaggasaaaggttgtcttcttctttgacctgactctggaagtttgagccttcagcttagtcagtattgtgatgtagcgatcagagttcatgatttgtcagggttccaggaaaaccagaagagtca

SEQ ID NO: 83111 - DNA, 585 bp, Chicken  19866894378676_4
aaagagcacaataacgctatttgatagagcaaattctcaactacaaaacacagtttccgacagaatcatcaccgttagctatgyatttctgccagcagtgagcaagagcctgtatgccacattcagaaaaatctgcaccagtggaggtggcccattgtttcacagctgctacartggtgtcattgctgggaaaatgtgcccacacagtccatctttcatcagcttgaacagatagaagtcaaggaggcaccaaatctgggcttatatggtagatgtggtaggacagtccagccaaggcartgtgatccatggtcttcaaatgggtaaggggcttagtgttactgtgttgcaggasaaaggttgtcttcttctttgacctgactctggaagtttgagccttcagcttagtcagtattgtgatgtagcgatcagagttcatgatttgtcagggttccaggaaaaccagaagagtcacccctttcctatctgaagacaatgcacaacgcacttcactttacctactgacggctgtgtcttgaatttgttcatcgatggggaattcacatgttgccgctccatggactg

SEQ ID NO: 83112 - DNA, 530 bp, Chicken  19866894378676_5
tccgacagaatcatcaccgttagctatgyatttctgccagcagtgagcaagagcctgtatgccacattcagaaaaatctgcaccagtggaggtggcccattgtttcacagctgctacartggtgtcattgctgggaaaatgtgcccacacagtccatctttcatcagcttgaacagatagaagtcaaggaggcaccaaatctgggcttatatggtagatgtggtaggacagtccagccaaggcartgtgatccatggtcttcaaatgggtaaggggcttagtgttactgtgttgcaggasaaaggttgtcttcttctttgacctgactctggaagtttgagccttcagcttagtcagtattgtgatgtagcgatcagagttcatgatttgtcagggttccaggaaaaccagaagagtcacccctttcctatctgaagacaatgcacaacgcacttcactttacctactgacggctgtgtcttgaatttgttcatcgatggggaattcacatgttgccgctccatggactg

SEQ ID NO: 83113 - DNA, 600 bp, Chicken  19866894378690_1
tgtaggttgaaagagttcgctctctttaatatgtgacaaagatgctatttaaagctgtgatactgcaaatgcatgcacatgagggatttgcacaaatgtgaatagtagcattgaactcacggggatggcttacagtagcatgaacctgtatgttcaaatagctacagaatttggttccagaccttataattcataaaagcaacaaaatatttccttaacaatttgctggcattgtagttagtcaatattcctaaggagacacagatgtagacttaaagagggaaaatggggtgtgtgaarccaccacaacacttgatacacaaacatgtaatgctcatgaagggaataattgcacatagctacattccagataaacccatgcctgtctaattgaaagtactgaaatagcagctatcataatcttaaattatatgaaaattgagtatgacttgcttgaataagattctttcaattattaatattgaggagtttccagacattgctccagcacatagggcaaatatctcacataaatgatagcyctcatgtagcttgcataggcttgcaatgtgggtgacaattctacttacggtgaataca

SEQ ID NO: 83114 - DNA, 600 bp, Chicken  19866894378690_2
caatattcctaaggagacacagatgtagacttaaagagggaaaatggggtgtgtgaarccaccacaacacttgatacacaaacatgtaatgctcatgaagggaataattgcacatagctacattccagataaacccatgcctgtctaattgaaagtactgaaatagcagctatcataatcttaaattatatgaaaattgagtatgacttgcttgaataagattctttcaattattaatattgaggagtttccagacattgctccagcacatagggcaaatatctcacataaatgatagcyctcatgtagcttgcataggcttgcaatgtgggtgacaattctacttacggtgaatacattcctttgtggtaccattaaatatcagtgtaaaaccagagattgcaccatagtttttcctagragattatgatagtacaaatttatgcaccctgaactrgcagtgaattatacactctgcgtgaggccagatcagycctgcaacttagcaagcacaagcttttacaaggtgtgtgtttggtttctagggttatgcagtgatagtccagctgtgcattccctagcacacagcaaaatagatgt

SEQ ID NO: 83115 - DNA, 559 bp, Chicken  19866894378690_3
attccagataaacccatgcctgtctaattgaaagtactgaaatagcagctatcataatcttaaattatatgaaaattgagtatgacttgcttgaataagattctttcaattattaatattgaggagtttccagacattgctccagcacatagggcaaatatctcacataaatgatagcyctcatgtagcttgcataggcttgcaatgtgggtgacaattctacttacggtgaatacattcctttgtggtaccattaaatatcagtgtaaaaccagagattgcaccatagtttttcctagragattatgatagtacaaatttatgcaccctgaactrgcagtgaattatacactctgcgtgaggccagatcagycctgcaacttagcaagcacaagcttttacaaggtgtgtgtttggtttctagggttatgcagtgatagtccagctgtgcattccctagcacacagcaaaatagatgtagctatatgcaaggcatgttctctcttaccactgtcctttctggtctatcttctttttctgaagattttcaaatggggat

SEQ ID NO: 83116 - DNA, 523 bp, Chicken  19866894378690_4
ctgaaatagcagctatcataatcttaaattatatgaaaattgagtatgacttgcttgaataagattctttcaattattaatattgaggagtttccagacattgctccagcacatagggcaaatatctcacataaatgatagcyctcatgtagcttgcataggcttgcaatgtgggtgacaattctacttacggtgaatacattcctttgtggtaccattaaatatcagtgtaaaaccagagattgcaccatagtttttcctagragattatgatagtacaaatttatgcaccctgaactrgcagtgaattatacactctgcgtgaggccagatcagycctgcaacttagcaagcacaagcttttacaaggtgtgtgtttggtttctagggttatgcagtgatagtccagctgtgcattccctagcacacagcaaaatagatgtagctatatgcaaggcatgttctctcttaccactgtcctttctggtctatcttctttttctgaagattttcaaatggggat

SEQ ID NO: 83117 - DNA, 486 bp, Chicken  19866894378690_5
aattgagtatgacttgcttgaataagattctttcaattattaatattgaggagtttccagacattgctccagcacatagggcaaatatctcacataaatgatagcyctcatgtagcttgcataggcttgcaatgtgggtgacaattctacttacggtgaatacattcctttgtggtaccattaaatatcagtgtaaaaccagagattgcaccatagtttttcctagragattatgatagtacaaatttatgcaccctgaactrgcagtgaattatacactctgcgtgaggccagatcagycctgcaacttagcaagcacaagcttttacaaggtgtgtgtttggtttctagggttatgcagtgatagtccagctgtgcattccctagcacacagcaaaatagatgtagctatatgcaaggcatgttctctcttaccactgtcctttctggtctatcttctttttctgaagattttcaaatggggat

SEQ ID NO: 83118 - DNA, 600 bp, Chicken  19866894378704_1
gcgttgtttttggccgcttggtggtggtggtacggatgacatcccaaaggccattgtctgaaagtgccacggaagggggagaacaaaatgctgttaccctcccaaaggtgcacccaacaagcccccggctgtacgcagccccagctcctacagagaggcgatgggcacggtgacacacctggcttccccggccgtgggaagggcctggcggttggcctggctggcctgctggtgggctccacagggttatcgaagtaatcagccaggtcaaagtctgtagagagagcggatgggcgagcyatggtgctggggctctgtgcaggcagcccttggcacatggtactgctcagcgtgtgagcagggacatgtggccagggctgggcatgagcatcctccagcaaggccggtgctgggatctgggcagccagggccctgacccccaccatcagaggtggttttccctgcatgggaaaatgccaccagcctgacactgttcagtgaaagccrgggatgtcctggagcaaaagctcctccccaggtcatagccagccggtgctgcacaggyagaaatgacggtccccatgcagctcagccgtgacc

SEQ ID NO: 83119 - DNA, 574 bp, Chicken  19866894378704_2
gcggttggcctggctggcctgctggtgggctccacagggttatcgaagtaatcagccaggtcaaagtctgtagagagagcggatgggcgagcyatggtgctggggctctgtgcaggcagcccttggcacatggtactgctcagcgtgtgagcagggacatgtggccagggctgggcatgagcatcctccagcaaggccggtgctgggatctgggcagccagggccctgacccccaccatcagaggtggttttccctgcatgggaaaatgccaccagcctgacactgttcagtgaaagccrgggatgtcctggagcaaaagctcctccccaggtcatagccagccggtgctgcacaggyagaaatgacggtccccatgcagctcagccgtgacctgtgtcaaatccattacaatactgcaaagtgtgcagaactcagccatggccataaatgctctcatgttggctgccttcacaacagacagaaacatcaatactgcatttacttaggcacaggtgcgcagcactgccgatggagaggggagatacaagcgacacaaaggctgcgtggtgatga

SEQ ID NO: 83120 - DNA, 516 bp, Chicken  19866894378704_3
ggtcaaagtctgtagagagagcggatgggcgagcyatggtgctggggctctgtgcaggcagcccttggcacatggtactgctcagcgtgtgagcagggacatgtggccagggctgggcatgagcatcctccagcaaggccggtgctgggatctgggcagccagggccctgacccccaccatcagaggtggttttccctgcatgggaaaatgccaccagcctgacactgttcagtgaaagccrgggatgtcctggagcaaaagctcctccccaggtcatagccagccggtgctgcacaggyagaaatgacggtccccatgcagctcagccgtgacctgtgtcaaatccattacaatactgcaaagtgtgcagaactcagccatggccataaatgctctcatgttggctgccttcacaacagacagaaacatcaatactgcatttacttaggcacaggtgcgcagcactgccgatggagaggggagatacaagcgacacaaaggctgcgtggtgatga

SEQ ID NO: 83121 - DNA, 600 bp, Chicken  19866894378720_1
aacttataaaatttgaaactagccagccagatcattgaaatgacacacagatgtgtgtacgtgtagtttctgtattgattttatttataaaaataagcaagctaaaagagatggtcagtaattataaagaaaaacataatgcaactgttttctttggtagctggaggtgacttaactgtgtccttgacagatggtagcttggccactcttgaaggaatacagttacaacttgctgctaatctggttggacaaaatgttcaaatctccggaatagatgctgctagtattaacaacataacmttacaggtaggttgctctcagtttttgatgrtgtctgatggtgtttttcccttctgctccttgccttttcactttcagtgatttgaaagcaataagccttgcatgcaacaataagacactacaaaatgccgatatagtaggtacccastatgcctatttgtaactgtgatcatgatttcccaaacatggaagttgaatagacttcctgcatgtagatacttcaaaaattgtttaatttttttattagtaagtttaaatattatatattctaaatgcacctttttgaattcagggtttgtt

SEQ ID NO: 83122 - DNA, 600 bp, Chicken  19866894378720_2
tcattgaaatgacacacagatgtgtgtacgtgtagtttctgtattgattttatttataaaaataagcaagctaaaagagatggtcagtaattataaagaaaaacataatgcaactgttttctttggtagctggaggtgacttaactgtgtccttgacagatggtagcttggccactcttgaaggaatacagttacaacttgctgctaatctggttggacaaaatgttcaaatctccggaatagatgctgctagtattaacaacataacmttacaggtaggttgctctcagtttttgatgrtgtctgatggtgtttttcccttctgctccttgccttttcactttcagtgatttgaaagcaataagccttgcatgcaacaataagacactacaaaatgccgatatagtaggtacccastatgcctatttgtaactgtgatcatgatttcccaaacatggaagttgaatagacttcctgcatgtagatacttcaaaaattgtttaatttttttattagtaagtttaaatattatatattctaaatgcacctttttgaattcagggtttgttataaatattcatgtaacccagatttattaaa

SEQ ID NO: 83123 - DNA, 600 bp, Chicken  19866894378720_3
tttctttggtagctggaggtgacttaactgtgtccttgacagatggtagcttggccactcttgaaggaatacagttacaacttgctgctaatctggttggacaaaatgttcaaatctccggaatagatgctgctagtattaacaacataacmttacaggtaggttgctctcagtttttgatgrtgtctgatggtgtttttcccttctgctccttgccttttcactttcagtgatttgaaagcaataagccttgcatgcaacaataagacactacaaaatgccgatatagtaggtacccastatgcctatttgtaactgtgatcatgatttcccaaacatggaagttgaatagacttcctgcatgtagatacttcaaaaattgtttaatttttttattagtaagtttaaatattatatattctaaatgcacctttttgaattcagggtttgttataaatattcatgtaacccagatttattaaattggattgattttgtttttcagattgatccaagcatactacagcagacattacagcagagtaatatacttgctcagcagctaactggagatcccaatatggctccacaaaatccctc

SEQ ID NO: 83124 - DNA, 600 bp, Chicken  19866894378723_1
cacaagctctgtaaatcacccacattggcctaattggttactagctgtgcctcaggtacaaacagacataatgcaacactttataatcttatcaaggtgaagggtaaatagtaatattataaaatgggctctgtacctttctgaaaatatgccattttggaaggaagcaatgtacacctttcttttgtctactggcataacatcaacataaccaccctcgttgcgtactacgccagcatgtacagctgcccgacagatactggatatctaagaaagaataaggagaagtttagttttaasttttttatttcaaattrttttaagaaaaaaataagaatgcataaaccaagctttaggcaatataaaataattacactcattgcatgactgattttattaatctttagagtacttaaatcagttacatatggattaagccaatttataggagtacagccactgtctcttcagcaaggtttcacagcatgatccaaaaatcattaatttcaacctatttcatttcaagaatcagaaacgtttaaattcttgggcttttcacaatgcaaggctctatctgccttcatttcagtagcagagagg

SEQ ID NO: 83125 - DNA, 597 bp, Chicken  19866894378723_2
acccacattggcctaattggttactagctgtgcctcaggtacaaacagacataatgcaacactttataatcttatcaaggtgaagggtaaatagtaatattataaaatgggctctgtacctttctgaaaatatgccattttggaaggaagcaatgtacacctttcttttgtctactggcataacatcaacataaccaccctcgttgcgtactacgccagcatgtacagctgcccgacagatactggatatctaagaaagaataaggagaagtttagttttaatttttttatttcaaattrttttaagaaaaaaataagaatgcataaaccaagctttaggcaatataaaataattacactcattgcatgactgattttattaatctttagagtacttaaatcagttacatatggattaagccaatttataggagtacagccactgtctcttcagcaaggtttcacagcatgatccaaaaatcattaatttcaacctatttcatttcaagaatcagaaacgtttaaattcttgggcttttcacaatgcaaggctctatctgccttcatttcagtagcagagaggtagtgaaaaccaaa

SEQ ID NO: 83126 - DNA, 599 bp, Chicken  19866894378725_1
  misc_feature (1)..(7): n is any nucleotide
nnnnnnnaccccaaagaagcaaacccattatgaaaagagcttgcaaaaactcacttgtctaaatgcactgacatgagagcagccatatattcagcatgcacataaggagtccaagccctttctttgcagggagaaaaacagagacgcagtgggagccattgccctaagtagggggcagagccaggcctacaatgagtgagccagggggtaccaggcactgccatccagaactggtgccagtactgggggctgtagaacagagaaatagattgaggttccaaagcacgtacagaaagcagrgcaaaatacaacgtgcagtaataacrtagcygtgggatgaacaattccggggagacggctgtctggaaagagaagtttggaactaccagcaaagaaacttctgctgatgtggaaagaggaaatgacttacactgcctctaaayaaacaagatcgtattgtaacagtgtgtctctcttctgattccattgatattagctaattgtgtgtgtcacagtgaagaaaatatagaaaaaaatagaaaccacatgcaaaaccagcagcatttgaacagcagcagtaactctacattggctgtgat

SEQ ID NO: 83127 - DNA, 600 bp, Chicken  19866894378725_2
attatgaaaagagcttgcaaaaactcacttgtctaaatgcactgacatgagagcagccatatattcagcatgcacataaggagtccaagccctttctttgcagggagaaaaacagagacgcagtgggagccattgccctaagtagggggcagagccaggcctacaatgagtgagccagggggtaccaggcactgccatccagaactggtgccagtactgggggctgtagaacagagaaatagattgaggttccaaagcacgtacagaaagcagrgcaaaatacaacgtgcagtaataacrtagcygtgggatgaacaattccggggagacggctgtctggaaagagaagtttggaactaccagcaaagaaacttctgctgatgtggaaagaggaaatgacttacactgcctctaaayaaacaagatcgtattgtaacagtgtgtctctcttctgattccattgatattagctaattgtgtgtgtcacagtgaagaaaatatagaaaaaaatagaaaccacatgcaaaaccagcagcatttgaacagcagcagtaactctacattggctgtgatagtgtctcttactccatggtaagcaca

SEQ ID NO: 83128 - DNA, 600 bp, Chicken  19866894378725_3
gaaaagagcttgcaaaaactcacttgtctaaatgcactgacatgagagcagccatatattcagcatgcacataaggagtccaagccctttctttgcagggagaaaaacagagacgcagtgggagccattgccctaagtagggggcagagccaggcctacaatgagtgagccagggggtaccaggcactgccatccagaactggtgccagtactgggggctgtagaacagagaaatagattgaggttccaaagcacgtacagaaagcagrgcaaaatacaacgtgcagtaataacrtagcygtgggatgaacaattccggggagacggctgtctggaaagagaagtttggaactaccagcaaagaaacttctgctgatgtggaaagaggaaatgacttacactgcctctaaayaaacaagatcgtattgtaacagtgtgtctctcttctgattccattgatattagctaattgtgtgtgtcacagtgaagaaaatatagaaaaaaatagaaaccacatgcaaaaccagcagcatttgaacagcagcagtaactctacattggctgtgatagtgtctcttactccatggtaagcacaataga

SEQ ID NO: 83129 - DNA, 600 bp, Chicken  19866894378725_4
acgcagtgggagccattgccctaagtagggggcagagccaggcctacaatgagtgagccagggggtaccaggcactgccatccagaactggtgccagtactgggggctgtagaacagagaaatagattgaggttccaaagcacgtacagaaagcagrgcaaaatacaacgtgcagtaataacrtagcygtgggatgaacaattccggggagacggctgtctggaaagagaagtttggaactaccagcaaagaaacttctgctgatgtggaaagaggaaatgacttacactgcctctaaayaaacaagatcgtattgtaacagtgtgtctctcttctgattccattgatattagctaattgtgtgtgtcacagtgaagaaaatatagaaaaaaatagaaaccacatgcaaaaccagcagcatttgaacagcagcagtaactctacattggctgtgatagtgtctcttactccatggtaagcacaatagaaaatgaatcagtaacatctggccctaaaataacttttagatacagaattgttcacttgctggtggcttcctgcaccgttagtgaaggcatgaggtgtggattatggaaatac

SEQ ID NO: 83130 - DNA, 599 bp, Chicken  19866894378728_1
  misc_feature (1)..(119): n is any nucleotide
nnnnnnnnnnnnnnnnnnnnnnnnnnnnnnnnnnnnnnnnnnnnnnnnnnnnnnnnnnnnnnnnnnnnnnnnnnnnnnnnnnnnnnnnnnnnnnnnnnnnnnnnnnnnnnnnnnnnnnntcactccaaatactccgttgtagactattcactaagatttcctttcattcccagcgatgacctcactgcaaccctctcatttacgttatgctaaccactttttcatttcccagggatggatataaaaaaaaaagcaggagctgacctcacactctctcactaagatgacaaacatggctcrtttttgttcacttttagaataaattgatttcctctctgaattatttmatttgaaatggtttaaatgctgctcttctatgactctcttctttaatggaagaatgactttagcataaatgcacagaatcgtgtcactttttccactcagatttgtctagaagaagaaagttagcaactactagagttgagcatccaggaccctgtctcttaaagataagcacrtttaaatcaaaatgcatcaaaagatagctctgaaggtgaatttatgacgtatttttgaccacactcaccattacgtga

SEQ ID NO: 83131 - DNA, 599 bp, Chicken  19866894378728_2
  misc_feature (1)..(72): n is any nucleotide
nnnnnnnnnnnnnnnnnnnnnnnnnnnnnnnnnnnnnnnnnnnnnnnnnnnnnnnnnnnnnnnnnnnnnnnntcactccaaatactccgttgtagactattcactaagatttcctttcattcccagcgatgacctcactgcaaccctctcatttacgttatgctaaccactttttcatttcccagggatggatataaaaaaaaaagcaggagctgacctcacactctctcactaagatgacaaacatggctcrtttttgttcacttttagaataaattgatttcctctctgaattatttmatttgaaatggtttaaatgctgctcttctatgactctcttctttaatggaagaatgactttagcataaatgcacagaatcgtgtcactttttccactcagatttgtctagaagaagaaagttagcaactactagagttgagcatccaggaccctgtctcttaaagataagcacrtttaaatcaaaatgcatcaaaagatagctctgaaggtgaatttatgacgtatttttgaccacactcaccattacgtgatggcatgaacatggaaatagatgtaagataagaaacagcaagcttgc

SEQ ID NO: 83132 - DNA, 600 bp, Chicken  19866894378728_3
tcatttcccagggatggatataaaaaaaaaagcaggagctgacctcacactctctcactaagatgacaaacatggctcrtttttgttcacttttagaataaattgatttcctctctgaattatttmatttgaaatggtttaaatgctgctcttctatgactctcttctttaatggaagaatgactttagcataaatgcacagaatcgtgtcactttttccactcagatttgtctagaagaagaaagttagcaactactagagttgagcatccaggaccctgtctcttaaagataagcacrtttaaatcaaaatgcatcaaaagatagctctgaaggtgaatttatgacgtatttttgaccacactcaccattacgtgatggcatgaacatggaaatagatgtaagataagaaacagcaagcttgcccgcctggccaaccagttaaataataatcaatttaaataaaagtcaaagaaagataccttctcatgagcgcatacatcctgtgctcagcagtagagcagctaatatgctactgatacttctgggatgagctactccctccttagccttcaagagattgacttcagctgttacttt

SEQ ID NO: 83133 - DNA, 567 bp, Chicken  19866894378733_1
gctaaaaaacaaacaaaactcactgtacaaagcaccatgaagttcagtcaacatttctattctgcctgtattcctttcccttcactaacgaaggagagtagggtattttctgatagtacaaaaactatgcttgctacagtctcaactggcttacatttcaattgcatgccagcacattttcttaaggtttgcactcagagaaagtctatatagacctgtatgtgcgttttgcaggtaatactgacattccagaatgaaatttacctcccaagtgcctttaagtactttacaatttactcyagaatttacatatactttttcaaatctaatcttttacgttagtttgcattctgtaaattcttctgttaaaagcacatatactgctacttaagtcagtctttgaaagagttttagttctagattattcaatggaaataacaagcaggtataaagcttagcctcaggtttcacagaaaagagccagtagcactacagagcatcagaagaaggatgggtttcaccaaagaatgcatttttaccgtctctaaaatagagaaaattttctca

SEQ ID NO: 83134 - DNA, 600 bp, Chicken  19866894378747_1
aatcacaaggtgtatatctgggcagtgatatatacagggtatgaatagaaggttcatagttcactatgtgagaaaatatgatttgctgcatccgactatgggcagcccttggctgcaggcttcagctgtctgggatcctaagcctggtttgttctggcatacctctgtggtcttgattcagttttaatgagagaaatgcttaaagatcggaaagttcagcagctgaagctatgcaaaatgagaaaagtaaaatcacagaaagtgtagtatggttgaaagggtaatagaagcagctcaagrattgagaagtaaaatgtccatgccctgagggataaaaaaagccatccttaaaagcagagaatcagaaagtggtaactcagcaacacagaggatcagcctgttctgcggaccaggatgcacaattcccactcgactgatgcttgtctgcctagcaggcatcttatcagggctggtgagcatattaatagtagctcattagttgtagttcccattagccaaggcataactgctccatatgaaacttattctatatcattcttgcagtctctttgtacatcttaaaagctctctgatcaaaaa

SEQ ID NO: 83135 - DNA, 600 bp, Chicken  19866894378747_2
atccttaaaagcagagaatcagaaagtggtaactcagcaacacagaggatcagcctgttctgcggaccaggatgcacaattcccactcgactgatgcttgtctgcctagcaggcatcttatcagggctggtgagcatattaatagtagctcattagttgtagttcccattagccaaggcataactgctccatatgaaacttattctatatcattcttgcagtctctttgtacatcttaaaagctctctgatcaaaaatgacctggtgactatgcaagactgctctcactgattcatggartgccatctagcaatatacaggatgttccaaggcaaggtcttgcacctgggtcaaggcaacatccattaccaataaaagctgagggatgaaagcattgagcgcagccctgctgaaaaagacctagggatactggtggatgggaagctggacatgagccagcaatgtgctctcgcagctcagaaggtcaaccatatcctgggctgcatcaaaagcaacatagccagcagttcaagggaagtgatcctacccctctactctgcactggtgaggcctcacctggagcactgcatccagatgtgg

SEQ ID NO: 83136 - DNA, 600 bp, Chicken  19866894378749_1
tccctaaaacgccacagcaaacaacgtggagtgcggaaaaatgcatatttttgcaatcttcatcttctgctttttccccgctaacctccccatctccctcaaaatgacacagcagcaacccctaatgcagaataatgcattctttgtgatctctgtttttcctttatttcacaataaccatcatccgagcgcctctctctgaaccagcacagcagctgcacatcaagaaacctctctgcacccagagttggatggacgtaatcttcccctgcattgtgttttccttttcttttcctgttytatgagaaacataattgcaaaccaaacaaatctacctgcgtggtttgttgggatgagatgacgtgcacgcgtcttggcatcatctcgggaggaggaggatggaggctttgtccttgcaggatctgcactgggtccccattgggtccccattagttctcctctgtattcccataggatccctgttgtgtccccattgtatccccgttgcttccccacaggatccctgttgtgtctccattgttttccataggatacccattgtgtccctgctctattcccactgcatccccattggatcct

SEQ ID NO: 83137 - DNA, 600 bp, Chicken  19866894378762_1
ctctgtgctccgggggccgaatcccccgaaagagaagcagggaacgggcggagcccccgacccagcgctgccattcagcccgacccctcccggctgggaacggctcctggggggggattatctgaaatgcagccatcctgagggccgaggccactgaccccaccgggaaatcactgacccagcgatccctggagctatttatggattaattactccattaaacaacatcttccccgtgtgagctctgagctggggttccccgagatcgacccctctcagcaaggacacggccctttgtcytcagcgctttgcgaggtgccctggaagcctatrcaagattccttaaaagcagaaccctccgcagagttcaggagattcagtaacacggtcggacaccgcaggaatgaaggagttcctgggccacgaggccacatcggtcccactgggatttctcagctgagaaaccaccagaaccacaattcccatctggggtccccagcacagcatcccccccccccaaagctgttctgtgctctaccgaactcaacagcgcccaacactttgcagactcataatacacataaaaagtatgtaagagca

SEQ ID NO: 83138 - DNA, 600 bp, Chicken  19866894378762_2
gaagcagggaacgggcggagcccccgacccagcgctgccattcagcccgacccctcccggctgggaacggctcctggggggggattatctgaaatgcagccatcctgagggccgaggccactgaccccaccgggaaatcactgacccagcgatccctggagctatttatggattaattactccattaaacaacatcttccccgtgtgagctctgagctggggttccccgagatcgacccctctcagcaaggacacggccctttgtcytcagcgctttgcgaggtgccctggaagcctatrcaagattccttaaaagcagaaccctccgcagagttcaggagattcagtaacacggtcggacaccgcaggaatgaaggagttcctgggccacgaggccacatcggtcccactgggatttctcagctgagaaaccaccagaaccacaattcccatctggggtccccagcacagcatcccccccccccaaagctgttctgtgctctaccgaactcaacagcgcccaacactttgcagactcataatacacataaaaagtatgtaagagcagggcactgatcattcttgctaacgatctgctgg

SEQ ID NO: 83139 - DNA, 600 bp, Chicken  19866894378763_1
tattactgttttctaagaactcaaattttaagagaaagtatgctagataaagtcttctagaatcatctagaatatttcttgatatggctgacaaggaataactattcctttgatgaagtttcctctccccaaatatttggtcccagtgatggtgtaggggcttgatttacatatgatgaggatctcataaggttaagacattaaatctgaaatcaacacctgattttgtattcatttcattgaaatggttttgctgaagttctgaatattcaaaagtgttgggtattaaccaaacctgawctctaactttgttctattttattcacaaattttacctgtcttaaagatcaagatttttatctacaactcttcaatcaccaataagatttcttaaaaatgtgcagcaggttgtgacacagagctacccttagttcaaattttattatgcagaagtaacttaataagaaagtaattgttatcatgtcagtccaacttctacacgggaaagaatgagatcttgtccaaggaaacaaaacacttaaaatcctttcagtgagtataaaaaaaaaatagcaatggattttctcatgctatcatatt

SEQ ID NO: 83140 - DNA, 600 bp, Chicken  19866894378763_2
cagtccaacttctacacgggaaagaatgagatcttgtccaaggaaacaaaacacttaaaatcctttcagtgagtataaaaaaaaaatagcaatggattttctcatgctatcatattctcttacagccttgcacattaaaaaaagtatctctagcttttcattatctgtatagattggcaaaactaaagaaggatgcatgtgtgcattgaggggtagggcacagcagctgactgctcttttctgacagtactccattatttcagaccctctctcagctatcctagaaatgtttagattccrttaagtyctttgtagtggtgtcctgaagaaaaacagatcctacaatgcctttgaaaaacctgtaaaaataaggttatagtaatgtggccactttacaccaacataaatccagactgttgttgcaaaaagaaaggtagatctacatggctttttctcctgcttccttggccagcacagacattgagtctgcatgaggatacagggatccacactagtaaatggatcctgcccagcactgtccattttctaggggctgtgttcagctggatccctgctggctcactactggagacttgtact

SEQ ID NO: 83141 - DNA, 600 bp, Chicken  19866894378763_3
acttctacacgggaaagaatgagatcttgtccaaggaaacaaaacacttaaaatcctttcagtgagtataaaaaaaaaatagcaatggattttctcatgctatcatattctcttacagccttgcacattaaaaaaagtatctctagcttttcattatctgtatagattggcaaaactaaagaaggatgcatgtgtgcattgaggggtagggcacagcagctgactgctcttttctgacagtactccattatttcagaccctctctcagctatcctagaaatgtttagattccrttaagtyctttgtagtggtgtcctgaagaaaaacagatcctacaatgcctttgaaaaacctgtaaaaataaggttatagtaatgtggccactttacaccaacataaatccagactgttgttgcaaaaagaaaggtagatctacatggctttttctcctgcttccttggccagcacagacattgagtctgcatgaggatacagggatccacactagtaaatggatcctgcccagcactgtccattttctaggggctgtgttcagctggatccctgctggctcactactggagacttgtactggtatga

SEQ ID NO: 83142 - DNA, 600 bp, Chicken  19866894378764_1
tcctggagaacatctgtaatgtgcgaatacatatctaagtgattagcttttttccatataaatgtaaagcactcaagaaacaatagatttgttatttatttatttatttaggtttattacttcaagtatttgaggtcatatgaaacatttttacttactgttgttatgattttagttaatgccagaaaattcaagccactggttagttattttgttagttttcttggtgttaactggcaggcatagtaaagctcaaaacccccaacctgttatcacaggtaactattagcaataatagcrtaccgtatagaaaatggataacctgagcagccagcagctctgttaatgttgcataacttctatattatggatgactcactaaaaatcagtgctgcaatgtagcaggatctatactgctctactttcgcagcctgacttacatgtttatgcattaatgtagcgtagggaaagcaacagagaaaatgcattgtcacgctgaagaaggcaacatgctgtttggtrggacttatcaccaaatgaatgattgttttcagaagaaatgtttgttgattctttttttgagttttgttttgttcttgt

SEQ ID NO: 83143 - DNA, 600 bp, Chicken  19866894378764_2
cttggtgttaactggcaggcatagtaaagctcaaaacccccaacctgttatcacaggtaactattagcaataatagcrtaccgtatagaaaatggataacctgagcagccagcagctctgttaatgttgcataacttctatattatggatgactcactaaaaatcagtgctgcaatgtagcaggatctatactgctctactttcgcagcctgacttacatgtttatgcattaatgtagcgtagggaaagcaacagagaaaatgcattgtcacgctgaagaaggcaacatgctgtttggtrggacttatcaccaaatgaatgattgttttcagaagaaatgtttgttgattctttttttgagttttgttttgttcttgtctactctggttacctcaacascttgatacctcatgggaaatgccacccttctgacttcaaattcttcagcctgtttcttttgttcttctgtagtgtcattgacagaattgtgcatacctacttttttagtctggagattacacaactacatcctttagggtactcatttttaagaactaaaaaatattctataatgaaagtactatatctggtaggcttgtg

SEQ ID NO: 83144 - DNA, 600 bp, Chicken  19866894378764_3
cctgagcagccagcagctctgttaatgttgcataacttctatattatggatgactcactaaaaatcagtgctgcaatgtagcaggatctatactgctctactttcgcagcctgacttacatgtttatgcattaatgtagcgtagggaaagcaacagagaaaatgcattgtcacgctgaagaaggcaacatgctgtttggtrggacttatcaccaaatgaatgattgttttcagaagaaatgtttgttgattctttttttgagttttgttttgttcttgtctactctggttacctcaacascttgatacctcatgggaaatgccacccttctgacttcaaattcttcagcctgtttcttttgttcttctgtagtgtcattgacagaattgtgcatacctacttttttagtctggagattacacaactacatcctttagggtactcatttttaagaactaaaaaatattctataatgaaagtactatatctggtaggcttgtgaataataaatcttgcagtgaaagacaacttgaaagattgttgggtctaaaataaaaagtaactatgaataggaaaaagggtgtttttttgtttttgttt

SEQ ID NO: 83145 - DNA, 600 bp, Chicken  19866894378770_1
tgcatgacaaatgcacctctccattaccgttggaatgaggctggatgaggctctcacctaaatctggggtttttactatctctgattctcgtgttgggttgcagcatccctgctgtttgtgtctctgtggagctcaactggtgattctgcctgccctgctggcaggtgctttttggctaattcctgcccaaatggtaccagcttgctaggaagtgtgctaagggaattgctgagaactgagttccacagagcccagtgctttaataaaggtaaagtgcagtaggtgtggtggcaccaaawggaacgcaggccgcctggttgtgcagcccctgaggaacagaagtttctccaattggcttccacgtgtgcrggatcctgcctctctgagcagtgtacctaattaccctgccmgwgcagcacatcgtcattgtgagcgcttcctgctgacaggcagctctgtgcagcgaaaccccacctaattccacaacagaacgagataaaaatatcatccttggtgcataagaaatatgtttcagtatttgtaaaaaaaacaaaacaaaacaacaggcagcaaacaaatcttatcgtgtgtatcacaaa

SEQ ID NO: 83146 - DNA, 600 bp, Chicken  19866894378770_2
ttttactatctctgattctcgtgttgggttgcagcatccctgctgtttgtgtctctgtggagctcaactggtgattctgcctgccctgctggcaggtgctttttggctaattcctgcccaaatggtaccagcttgctaggaagtgtgctaagggaattgctgagaactgagttccacagagcccagtgctttaataaaggtaaagtgcagtaggtgtggtggcaccaaawggaacgcaggccgcctggttgtgcagcccctgaggaacagaagtttctccaattggcttccacgtgtgcrggatcctgcctctctgagcagtgtacctaattaccctgccmgwgcagcacatcgtcattgtgagcgcttcctgctgacaggcagctctgtgcagcgaaaccccacctaattccacaacagaacgagataaaaatatcatccttggtgcataagaaatatgtttcagtatttgtaaaaaaaacaaaacaaaacaacaggcagcaaacaaatcttatcgtgtgtatcacaaaatgggaaaaaaaaatctgggataatcttcgcattcagcagacaagcagtattctctgtacaaacctcttc

SEQ ID NO: 83147 - DNA, 600 bp, Chicken  19866894378770_3
gctgtttgtgtctctgtggagctcaactggtgattctgcctgccctgctggcaggtgctttttggctaattcctgcccaaatggtaccagcttgctaggaagtgtgctaagggaattgctgagaactgagttccacagagcccagtgctttaataaaggtaaagtgcagtaggtgtggtggcaccaaawggaacgcaggccgcctggttgtgcagcccctgaggaacagaagtttctccaattggcttccacgtgtgcrggatcctgcctctctgagcagtgtacctaattaccctgccmgwgcagcacatcgtcattgtgagcgcttcctgctgacaggcagctctgtgcagcgaaaccccacctaattccacaacagaacgagataaaaatatcatccttggtgcataagaaatatgtttcagtatttgtaaaaaaaacaaaacaaaacaacaggcagcaaacaaatcttatcgtgtgtatcacaaaatgggaaaaaaaaatctgggataatcttcgcattcagcagacaagcagtattctctgtacaaacctcttccactatcatcctccaaaatgtatgctaagcttgtctgtgca

SEQ ID NO: 83148 - DNA, 600 bp, Chicken  19866894378770_4
tgtttgtgtctctgtggagctcaactggtgattctgcctgccctgctggcaggtgctttttggctaattcctgcccaaatggtaccagcttgctaggaagtgtgctaagggaattgctgagaactgagttccacagagcccagtgctttaataaaggtaaagtgcagtaggtgtggtggcaccaaawggaacgcaggccgcctggttgtgcagcccctgaggaacagaagtttctccaattggcttccacgtgtgcrggatcctgcctctctgagcagtgtacctaattaccctgccmgwgcagcacatcgtcattgtgagcgcttcctgctgacaggcagctctgtgcagcgaaaccccacctaattccacaacagaacgagataaaaatatcatccttggtgcataagaaatatgtttcagtatttgtaaaaaaaacaaaacaaaacaacaggcagcaaacaaatcttatcgtgtgtatcacaaaatgggaaaaaaaaatctgggataatcttcgcattcagcagacaagcagtattctctgtacaaacctcttccactatcatcctccaaaatgtatgctaagcttgtctgtgcaca

SEQ ID NO: 83149 - DNA, 600 bp, Chicken  19866894378778_1
ctgttcttcatctgaatggtgaaggcagaagagcagagactctcagaagacgcttcaggtaattctacttaagcaagaactgaacacttaaattcagacgttctgaataactgaaggatgaatgcctttgttggtatagggttcctacccttctcacctagactttttcatttaataagcacaactatagaaacttcagtcttttcttgtgcatctgaagcttaaaaagaagcacagcatagacaagtgcaatctggaaataaagatactgggtctagagagaaaggggcagccaaaaarccttgagttggtgtatcattgccacagctactctgagagtccattcataaccccatctaacaaagtagaggagtattttgggacagtttgcagccagcagactgctcctaaagggaatattttcttcagcataattagataaagctctagggcccttacctaccctagaactggaagctaaaataataactcaccttccatcaagaccctgtaccacttcagtaagatgagccaaaaaagagtgaactaggttacatagcaatagaataagatccagacatcctagatgatattgaagta

SEQ ID NO: 83150 - DNA, 600 bp, Chicken  19866894378778_2
tctagggcccttacctaccctagaactggaagctaaaataataactcaccttccatcaagaccctgtaccacttcagtaagatgagccaaaaaagagtgaactaggttacatagcaatagaataagatccagacatcctagatgatattgaagtaggtggaatggcaaaaaagaaaaaaaaaaaagagagagagagaatttaagtagagaacagaaactgaacagcactaggtgaaaattctttatagcctagtaatgtgctcttatgaaatcaacagatgtaagctcataactacacayacatttgtaaacgagtgactcctatagactgcaaaccgatgttggtttgtttctgtatgtggtaacacacagcactgctcatattatgacatacagtctgtataccttcctgacattttactggcttactgtgaacctcactgcctcactgccttgtgctcagctagccagccagcaggtgtggctatagagcctggtcctacctctgaaacaaccggacgtctttcggctgccagtgaacagatgaggatgtaatcactgtgaccatttctaagaaggatatgataatactgcaagctt

SEQ ID NO: 83151 - DNA, 600 bp, Chicken  19866894378781_1
cagcaatttcttgaatggtctgccacagttttgtacagcgggccttctattaccaatttagtgtttatctgaattaaaactgccaacagttttctgggattacttttcgttagtcatgactgcttttattcaacatttctctgaaccttcctttttacctttgtaaaaatgagtacaaaaacccaccactgttccatctcaaaatgaccactatatctaaaccttatatatagctttgaaagtctctgtatggatttccctaattgcttttctagactcccaaactaattgctttcctaygtgcaaaacgtctccacatggaaacaatagaactggctatacatwtgtatctacacatagtcttcaatgtgccaaaaaacatctcaggctttcatcaagtctggttccatgaagtaaatcccacctccattcacactgatattccctccctcttctatccacacaacatcagccatctcsctcctctcccctggcctctcagtaagagttgtctccttgcagcttctgctctttggaaaattccctcccactgaaactgagtaacagagatctaaccacaggtcatgttctggtctaccc

SEQ ID NO: 83152 - DNA, 600 bp, Chicken  19866894378781_2
tctattaccaatttagtgtttatctgaattaaaactgccaacagttttctgggattacttttcgttagtcatgactgcttttattcaacatttctctgaaccttcctttttacctttgtaaaaatgagtacaaaaacccaccactgttccatctcaaaatgaccactatatctaaaccttatatatagctttgaaagtctctgtatggatttccctaattgcttttctagactcccaaactaattgctttcctaygtgcaaaacgtctccacatggaaacaatagaactggctatacatwtgtatctacacatagtcttcaatgtgccaaaaaacatctcaggctttcatcaagtctggttccatgaagtaaatcccacctccattcacactgatattccctccctcttctatccacacaacatcagccatctcsctcctctcccctggcctctcagtaagagttgtctccttgcagcttctgctctttggaaaattccctcccactgaaactgagtaacagagatctaaccacaggtcatgttctggtctaccctcttttttatgtcttttgttcaaatacttattgaccaacagtttt

SEQ ID NO: 83153 - DNA, 600 bp, Chicken  19866894378781_3
acccaccactgttccatctcaaaatgaccactatatctaaaccttatatatagctttgaaagtctctgtatggatttccctaattgcttttctagactcccaaactaattgctttcctaygtgcaaaacgtctccacatggaaacaatagaactggctatacatwtgtatctacacatagtcttcaatgtgccaaaaaacatctcaggctttcatcaagtctggttccatgaagtaaatcccacctccattcacactgatattccctccctcttctatccacacaacatcagccatctcsctcctctcccctggcctctcagtaagagttgtctccttgcagcttctgctctttggaaaattccctcccactgaaactgagtaacagagatctaaccacaggtcatgttctggtctaccctcttttttatgtcttttgttcaaatacttattgaccaacagttttaaaacagcatagcaagacagttggccagaaagacatcacacagctgaactaaatcttagacaaccttcctttaaaattatgagtgagaaagacttaggtggcctgaaatatttacaccaatttctgttagaaaaa

SEQ ID NO: 83154 - DNA, 600 bp, Chicken  19866894378796_1
atttatcttgcagaccgactgaccccctggctctgaggtgagacgctgcacgcgtgcttgcacacgcgtgcatctgtgctagatcccagcgagccagccttgcacagcacccaagagacaaacttccaggaagagatcagaatggagcctgatctgcttcatctgaaaaggttttgcctgtcagctgtactttgaatcattccattctgctgcgaacaccgctgctgtctggcagctgctcagcctaccagctctgtcccccactgacgcgctcagaacaacagctcagtgttgctgacrttgtatgttttgcagggaggagcaaacccttccgttctctgcccacccccgttccccayctttcacctcaaggacacgatcctcctccacccttctaactaactcagccagcctctgctggcactcagacgagacaacagtgagtattgcactgtgacccttctcttccctttaactcaacaacactgctgaacaatatagtttgttaaacggtgccaaccaacctgcagcatgartaacgttcacgaatcgctctagtgggtttgttacataagttagagaaaaatgtgcctaaattaa

SEQ ID NO: 83155 - DNA, 600 bp, Chicken  19866894378796_2
gcacacgcgtgcatctgtgctagatcccagcgagccagccttgcacagcacccaagagacaaacttccaggaagagatcagaatggagcctgatctgcttcatctgaaaaggttttgcctgtcagctgtactttgaatcattccattctgctgcgaacaccgctgctgtctggcagctgctcagcctaccagctctgtcccccactgacgcgctcagaacaacagctcagtgttgctgacrttgtatgttttgcagggaggagcaaacccttccgttctctgcccacccccgttccccayctttcacctcaaggacacgatcctcctccacccttctaactaactcagccagcctctgctggcactcagacgagacaacagtgagtattgcactgtgacccttctcttccctttaactcaacaacactgctgaacaatatagtttgttaaacggtgccaaccaacctgcagcatgartaacgttcacgaatcgctctagtgggtttgttacataagttagagaaaaatgtgcctaaattaatactgtactcaattccttagattctcttctatcattctgccatatttcctggccaatga

SEQ ID NO: 83156 - DNA, 600 bp, Chicken  19866894378796_3
tgctcagcctaccagctctgtcccccactgacgcgctcagaacaacagctcagtgttgctgacrttgtatgttttgcagggaggagcaaacccttccgttctctgcccacccccgttccccayctttcacctcaaggacacgatcctcctccacccttctaactaactcagccagcctctgctggcactcagacgagacaacagtgagtattgcactgtgacccttctcttccctttaactcaacaacactgctgaacaatatagtttgttaaacggtgccaaccaacctgcagcatgartaacgttcacgaatcgctctagtgggtttgttacataagttagagaaaaatgtgcctaaattaatactgtactcaattccttagattctcttctatcattctgccatatttcctggccaatgaaaatgctcattgtttgtaatgtgtttatttatggtataaaccagaactgtgtattttgtaagtctgtaattgttcttgtcagatgttaactcgatgcctgttttgtctgttttatttttattttttaaataacacaaggtcaacatttgcaaactgctcccagaagtcagagtctgc

SEQ ID NO: 83157 - DNA, 600 bp, Chicken  19866894378797_1
caactacgctttaacttgcaatttttattgttttaaaagattgttaaacttgatttggaacacggaaacttttgaacattggctgcaagcaagtttagtagtttgaatacacagaattcattgaaagttttgtgccaatcaggttatctctgcttcacttaaaacaaatttcagtataacaaagcaaagtcttaagttcttggtcccaaagcaggaaatacattttataaaggaaaagcagaaaagcaagaaaatgaagatatgcagtggcatttgcctcttgttccagttctactttcyaagtggtacatcgccttgaacatactttttttacaagaagtactcaatcctatatgtataacacaaatactgggtgagtttcttcttgctgctaaacactagatgagcttttcttaaatacttcattttttttatcgtaagtgaggctttgatttgaggctttggcaactctgaggctatgccactatgacagtactttaattattggagtggaaaacattcctactcttagatagaggctaaaatattatcttactggtagactaacagaagcatctgccatttgagtggctgtgattc

SEQ ID NO: 83158 - DNA, 600 bp, Chicken  19866894378799_1
gctgaatgcatgtgaagagtgcacagaggactcggtatgcaataagtgcacagctgatctgctgaatagtgtaatgctttctgacttccctgtgtaggcaaggcctcagtttctccatagatcctcaatattgcaaagacaaaatgttcagcttttgctcttgattttgatttagctctgtttgtctttgtaaaagcagtgcttgtctgcctgcctctgtaccatacacctgcaggagccagtgaaggactgtaagcaggttactcctgctgctgtcatagctctaagggaaaatacaaytttaatcagctggactatcaagcttctgctgtcattcactcaatttatgaagttgcagcaaatccagctttgatttgacttgtctggcttacccccatcccttacttgctctaccttacagctcccttatttgctttttatttctgcttcactttttcaaaaggtgctcacctccttgttcaagatacgcctaggctcagcagcctggtgtgcagcagaggaccctaattagtgggtgatgcagttgtcattgcaaccatttctgtttttcctatctccttcatggcacacgcctgagtc

SEQ ID NO: 83159 - DNA, 413 bp, Chicken  19866894378800_1
ttaaacggttaattgcagttcatgggttttaagtaaaaggactggggcctgctttttaccatagcaaccacggaaaaagaaatttcttaaagcatgtattcaactcacatcagaaaaaaaaaaaaaaaaaaaaaaaaagctaagaaaataaatatacttgggattcagcatttaaattgtaattatttggagaaattcttcttcccaaatttacattcagagtatcatggccagaataagacatttgttcaaaaactgccagtagtctttcctgagggacaagaagatgaattagattcytttgccactccaaccatttcttttgtttgctgaggtcagcttattagtgctcttttagtaagagaaataagttacaaggccaacatttctgattgtttaaccccaggtcaggt

SEQ ID NO: 83160 - DNA, 600 bp, Chicken  19866894378808_1
tgttttgttttgaaaagatgatttaacaatgactttcatcaaccaagcaaacaggcccaagtattaacaacctagaaaatggtgcacttagactgggcacaacctcaaacttaatttctccctcagactgagggatttcacagactcacatcattgtttcagtggaaaggtacctcttgagagtccacctctcctgctcaagcagggaaaacaagggcaggttgcccatgatcgtgtccagtattgttttgaacatcttcaaggattaagtcttcacagcctttctcatcaaattcttcmaaatttttgccacctttgcagtgaaaaactgtttgcatatgtttcattgcctcttgtcctgtcagtaggcactactgaaagaagtatggctccctcctcatttctttccgtcaggtatttacacacattgataagtgccctccttacccttctcttcttcaagctaacgaattccagcttcatcctctgttsctccagtcacttaatcaaattagtggtccttcactggactctattctgtgtgaccacgtctctcttctactgtgaagaccagaactggataaagcactccaggtatgg

SEQ ID NO: 83161 - DNA, 600 bp, Chicken  19866894378808_2
cctgctcaagcagggaaaacaagggcaggttgcccatgatcgtgtccagtattgttttgaacatcttcaaggattaagtcttcacagcctttctcatcaaattcttcmaaatttttgccacctttgcagtgaaaaactgtttgcatatgtttcattgcctcttgtcctgtcagtaggcactactgaaagaagtatggctccctcctcatttctttccgtcaggtatttacacacattgataagtgccctccttacccttctcttcttcaagctaacgaattccagcttcatcctctgttsctccagtcacttaatcaaattagtggtccttcactggactctattctgtgtgaccacgtctctcttctactgtgaagaccagaactggataaagcactccaggtatggtctcttcagagctgagtagaatggaagggtcacttcccttgacctgccggtaacactccaagtgatcttacactagaggctgtgttctgcttagtgttgggaatgcccaggatcagtcctccaggcatctaagtacctccaattttagaaaatccagtgcatagcaacataatggaacaatttgagggtaat

SEQ ID NO: 83162 - DNA, 600 bp, Chicken  19866894378812_1
agaaggtgccctgcagcaagtgtcttcatgctagtaaatgcacaacctccattgcacagctgtatctgaactccccttaaagtagttagttcaggaattggcaacagtttaccagcagcatcatggaggacagcattagcaaaagcccagccattgctctgcaggaaagtttttcaggttaaatctaggttatcacagcccaatttagctgaaaacaaattactgcagctccactgtgcttatgccattaggcacctgtcctgttagaaaatggccctctgatccattaagtacacaaamagtattccttctgtgaagaacttcccattggggaaaaaaaaaagacctttgtgttcttactctgttaattgaaggagataggagaggaacaatatccagtgttgcagagaatggctgtttctccctatgctaatacatccctctttcacagtgctctcccagactgcactcccacttctgccctagcaattcttcctgctgccctatgcctacctgtgaaaagcatagagtgccatcagcactctactaccagcccttccagcacgcagaacctctcagcagagaccattaaatacatag

SEQ ID NO: 83163 - DNA, 600 bp, Chicken  19866894378819_1
tggcaagttcctgcccaggagaggtccaggccaggtggtggggctctgcagcccgctccttcctgttgtttgtaaacagccatctcaagcttttcttctccagcagtgaggttgagagtctgtgaagcgtggccagcatagtccatgtgaatatttctaaaggaagctaataaggctgcatgccttccttcttttgcctccagtcagctctttgactgaatttaacttgaagattagagaagaggatgcagccacaagcatgcatgcagaagcttgtagagcaatgaatgttccaagggmaaaaaaatgcccagagtaaatttttagtgtgtgcaaacaaatacatcataaacattcagtgcctgcttgcttctttattcggtaggttaccctgtatattgcctagtggcatatgcaaaatacttatcagtgctgggcttgaacttttgggatctcttcaaagaaataggctgagcktcttcatccttctgcatgcatgacatggaggctgcctgccttcctggggcttagttgatcccatagttaagttcagagagaagaaacaccaaacaggatggtgtgacctacatctgttgtggt

SEQ ID NO: 83164 - DNA, 600 bp, Chicken  19866894378819_2
gcatgccttccttcttttgcctccagtcagctctttgactgaatttaacttgaagattagagaagaggatgcagccacaagcatgcatgcagaagcttgtagagcaatgaatgttccaagggaaaaaaaatgcccagagtaaatttttagtgtgtgcaaacaaatacatcataaacattcagtgcctgcttgcttctttattcggtaggttaccctgtatattgcctagtggcatatgcaaaatacttatcagtgctgggcttgaacttttgggatctcttcaaagaaataggctgagcktcttcatccttctgcatgcatgacatggaggctgcctgccttcctggggcttagttgatcccatagttaagttcagagagaagaaacaccaaacaggatggtgtgacctacatctgttgtggtgaagatgataagggaggaggcattgtggaccttctggagagaaaaggcctcatcctgtgagggaaaggccagcgtggcctggagggggctgtgaagggggagggtagcccagcagaaaccacaggggttgttggggaaggctggctggcactttgagatgctggcagcctgctccta

SEQ ID NO: 83165 - DNA, 600 bp, Chicken  19866894378823_1
ccaacgtaaggggtcttgttcttctggaaagaaagagagatgctcttgggcctcatgagagctccctgaccttatgaggacgggctgagaggtctgagcagagactgtaaggatgactagcaaggccaaggtgggtgttaaaggtgcagacctcccttctaggctcactcctgatgcatttgacaggcacagccctatcagtgcttgcacacaaactcccctgtccataggaaatgctaaacagcttggcccaaactccagctctgattgggcaattttacatatgaaataatagtattygcctgcaaagctttctaaaactgccacttgagaagtgcaaaaataatgagaattactgtagagcacccacagagaactacgttccacaggagttactgtaattagttttattagtgaatgttaaagaaaacagcttgatattagtattaaatcttttgtggtgacagcattgtgagatgaacagaaaaacagatgtctctgttttatataagcctccagactaatacttgtaacaggctacagctaatgctttgtggataatctttctcatgccttccacgcaattgctaaataagggga

SEQ ID NO: 83166 - DNA, 600 bp, Chicken  19866894378823_2
ttgagaagtgcaaaaataatgagaattactgtagagcacccacagagaactacgttccacaggagttactgtaattagttttattagtgaatgttaaagaaaacagcttgatattagtattaaatcttttgtggtgacagcattgtgagatgaacagaaaaacagatgtctctgttttatataagcctccagactaatacttgtaacaggctacagctaatgctttgtggataatctttctcatgccttccacgcaattgctaaataaggggaaaccccccatgccagccagacagatcrctatttcacttrctatttctccttccccttaacttcctcaaagtattggcaatcaaagctgaaaactgaaggtgatttgctacacctttgactcgcaggcctgaatatcaatgagccacaagagacagagatggaagagcaacaaaaggtgaggggaagagacaaaggttggaaacggtctgtttcccagcacacacactgacagacaggtagtgttaacactgtacctagagaggctgccctcagtggccaggctcggggagtcatcgaggacattaggttcactgcaggaggggcagg

SEQ ID NO: 83167 - DNA, 600 bp, Chicken  19866894378823_3
aaaataatgagaattactgtagagcacccacagagaactacgttccacaggagttactgtaattagttttattagtgaatgttaaagaaaacagcttgatattagtattaaatcttttgtggtgacagcattgtgagatgaacagaaaaacagatgtctctgttttatataagcctccagactaatacttgtaacaggctacagctaatgctttgtggataatctttctcatgccttccacgcaattgctaaataaggggaaaccccccatgccagccagacagatcrctatttcacttrctatttctccttccccttaacttcctcaaagtattggcaatcaaagctgaaaactgaaggtgatttgctacacctttgactcgcaggcctgaatatcaatgagccacaagagacagagatggaagagcaacaaaaggtgaggggaagagacaaaggttggaaacggtctgtttcccagcacacacactgacagacaggtagtgttaacactgtacctagagaggctgccctcagtggccaggctcggggagtcatcgaggacattaggttcactgcaggaggggcagggagattaaaaat

SEQ ID NO: 83168 - DNA, 600 bp, Chicken  19866894378826_1
ttcagtgcaaagggctcgaggtctctatttatagttgaaatagcgtagcagcaagcataatgtgatgcctccgcagctgcctgccaatgacgcacagtcgaagtacagctttttgaggtaggtctgtgacagacgctgaccacaatggcagaagtgctgtttactgctgagaaagtctctgctctctcagcccacacctcctgtctttctcccatacagtgtgtgtggaaacatacgtgtatggaaacatttccagatgaagagaccgaggaaaatactactcgaggataattgtgctcrcttctgtggtggcctgcaagcacagcatgatggagccaaccacttctatccttggaaaatcatcaggatctacaagctgcaaaaataacctgatgggtttttttctgtgtgcaagacttgttagcaaaactatccttcaaacccacagtaaagcaatgttgtttgccaaatttcaaacacgtacaaagaaaattcttcaacgtccagttcatgcaagcacamatattcccccwaagtcctygggtataaaaataatgttgctctaccagtgtatggaacttatatttaagcacattaaaa

SEQ ID NO: 83169 - DNA, 600 bp, Chicken  19866894378826_2
gtgtggaaacatacgtgtatggaaacatttccagatgaagagaccgaggaaaatactactcgaggataattgtgctcrcttctgtggtggcctgcaagcacagcatgatggagccaaccacttctatccttggaaaatcatcaggatctacaagctgcaaaaataacctgatgggtttttttctgtgtgcaagacttgttagcaaaactatccttcaaacccacagtaaagcaatgttgtttgccaaatttcaaacacgtacaaagaaaattcttcaacgtccagttcatgcaagcacamatattcccccwaagtcctygggtataaaaataatgttgctctaccagtgtatggaacttatatttaagcacattaaaatagcctctgatggtaacaaaattatggtctttgcctcacgtgtattttcagttcataagaggagttcatttcccctgcaacatggaagagctgaaatccaggctccttcctaagctgggaaggctgtaacagagtaactgccaacacaaggaacaaaccttggaactccatgcatgctgcccttatcaggggcctgattcaaagtttcctgaatgcagcctt

SEQ ID NO: 83170 - DNA, 600 bp, Chicken  19866894378826_3
tacgtgtatggaaacatttccagatgaagagaccgaggaaaatactactcgaggataattgtgctcrcttctgtggtggcctgcaagcacagcatgatggagccaaccacttctatccttggaaaatcatcaggatctacaagctgcaaaaataacctgatgggtttttttctgtgtgcaagacttgttagcaaaactatccttcaaacccacagtaaagcaatgttgtttgccaaatttcaaacacgtacaaagaaaattcttcaacgtccagttcatgcaagcacamatattcccccwaagtcctygggtataaaaataatgttgctctaccagtgtatggaacttatatttaagcacattaaaatagcctctgatggtaacaaaattatggtctttgcctcacgtgtattttcagttcataagaggagttcatttcccctgcaacatggaagagctgaaatccaggctccttcctaagctgggaaggctgtaacagagtaactgccaacacaaggaacaaaccttggaactccatgcatgctgcccttatcaggggcctgattcaaagtttcctgaatgcagccttcagtgacttca

SEQ ID NO: 83171 - DNA, 600 bp, Chicken  19866894378826_4
tggaaacatttccagatgaagagaccgaggaaaatactactcgaggataattgtgctcrcttctgtggtggcctgcaagcacagcatgatggagccaaccacttctatccttggaaaatcatcaggatctacaagctgcaaaaataacctgatgggtttttttctgtgtgcaagacttgttagcaaaactatccttcaaacccacagtaaagcaatgttgtttgccaaatttcaaacacgtacaaagaaaattcttcaacgtccagttcatgcaagcacamatattcccccwaagtcctygggtataaaaataatgttgctctaccagtgtatggaacttatatttaagcacattaaaatagcctctgatggtaacaaaattatggtctttgcctcacgtgtattttcagttcataagaggagttcatttcccctgcaacatggaagagctgaaatccaggctccttcctaagctgggaaggctgtaacagagtaactgccaacacaaggaacaaaccttggaactccatgcatgctgcccttatcaggggcctgattcaaagtttcctgaatgcagccttcagtgacttcagtggcgtc

SEQ ID NO: 83172 - DNA, 600 bp, Chicken  19866894378827_1
aatatccttcaaagcaaataactgaattaaactgaattacccgcatcttgattgactaaactgaatggccatttctttttcagctcagcctctttgtatgtaacttattctcagataaaaggaaataccttattctaatagagaaagaatgtttcattgacctcactgtgctttggaacaggctaaataaaaacaatgattccctgaaggcaaatctgttttctttctctggtctggaaagagcagtagctgggaagttcaatatcctatatgcagcatgggactctagaggaaagcagyggtgataagattttacagtgagatgtggaaaaaataactttgaaattggcactccagaaatgaaagctaaagcttatccctaggaaaacaagcaaaaatttttgatggtattcaaagaagcagcagcattacattctctcttcatttcaatttcttgtcatgactctaccactgtctctacagttgcaatcagttctgctcttgttttattgatgtctctgaaagaaatctcaattatcagtgccttgctgtatgaatgtcatccatagtaataaagttttactcagcaacagaagaaaa

SEQ ID NO: 83173 - DNA, 599 bp, Chicken  19866894378832_1
  misc_feature (1)..(32): n is any nucleotide
nnnnnnnnnnnnnnnnnnnnnnnnnnnnnnnntctctcttagacagacttattcagagaggaagcagctcatctgttccacgctggagagcagaaaccaggtacgggtcgaatagattccagggttatatccacattttctgtcttctcctatgtgtaaaatgggtagggaaaaaaagaattgctttgtagaagaatgtgagcttgctttacaatcatgtaacgtatagttatgaagtcaaatttggagagtggacttcagtttggtcattcagaaataagagagcactctgaatcatcytccttttcccttctttggtgcagtgtctctcccagggtcacattgttacagccatcctttttcccttttgcatctttctgtgaattacttagggatctctctgaccaaagctgcccagctatagctgaattcagtgtgtggggaaaacaaaacaaaacccaacaaaataaaaactggacaggatgggtttatctacaagcaatagagtctgtgcatctgtaagattctgcctgagcttgctgagatagaggaactccagggttgataaacattgctaggatctgtttcctgctgctatt

SEQ ID NO: 83174 - DNA, 600 bp, Chicken  19866894378838_1
tatgacttcgtactaatgatgacaatacgatattgcatgtacacaatgaagtttgagaagaattctgcctgatgtactgactttcacttggaaacatgtaaagtagctttatgctcctttgcacaatgagcccaatctatgctatgcagagttgcttgtgcatgtgttgtaaggctgactcatcagatttgttgcacagtgggaaaggttgctattttcagcctggacacctggcacccaaaagtccctattctttcagaggcctttggggcaatgattggtcaggatctgatcactacwskrcttmccctgtaatagagtcaaattttattaactcagtatgtgtacaaatgcatagctttcacctattttagtcaaaatgagccacactccagaaatcaatttacataaacgttgggtgtgtaatgctattttagatgctaagctatcataagtgtcttccggtcagttatctaaaaaggtgcagatgtttcataaatcagatttcttagctattggctctgtaggtgcctttgacagtctagaatactttaaatgtcagcagtgttcaagcaactgattcaagtcccaggtatctat

SEQ ID NO: 83175 - DNA, 600 bp, Chicken  19866894378838_2
atgacttcgtactaatgatgacaatacgatattgcatgtacacaatgaagtttgagaagaattctgcctgatgtactgactttcacttggaaacatgtaaagtagctttatgctcctttgcacaatgagcccaatctatgctatgcagagttgcttgtgcatgtgttgtaaggctgactcatcagatttgttgcacagtgggaaaggttgctattttcagcctggacacctggcacccaaaagtccctattctttcagaggcctttggggcaatgattggtcaggatctgatcactacwskrcttmccctgtaatagagtcaaattttattaactcagtatgtgtacaaatgcatagctttcacctattttagtcaaaatgagccacactccagaaatcaatttacataaacgttgggtgtgtaatgctattttagatgctaagctatcataagtgtcttccggtcagttatctaaaaaggtgcagatgtttcataaatcagatttcttagctattggctctgtaggtgcctttgacagtctagaatactttaaatgtcagcagtgttcaagcaactgattcaagtcccaggtatctata

SEQ ID NO: 83176 - DNA, 600 bp, Chicken  19866894378838_3
tgacttcgtactaatgatgacaatacgatattgcatgtacacaatgaagtttgagaagaattctgcctgatgtactgactttcacttggaaacatgtaaagtagctttatgctcctttgcacaatgagcccaatctatgctatgcagagttgcttgtgcatgtgttgtaaggctgactcatcagatttgttgcacagtgggaaaggttgctattttcagcctggacacctggcacccaaaagtccctattctttcagaggcctttggggcaatgattggtcaggatctgatcactacwskrcttmccctgtaatagagtcaaattttattaactcagtatgtgtacaaatgcatagctttcacctattttagtcaaaatgagccacactccagaaatcaatttacataaacgttgggtgtgtaatgctattttagatgctaagctatcataagtgtcttccggtcagttatctaaaaaggtgcagatgtttcataaatcagatttcttagctattggctctgtaggtgcctttgacagtctagaatactttaaatgtcagcagtgttcaagcaactgattcaagtcccaggtatctataa

SEQ ID NO: 83177 - DNA, 600 bp, Chicken  19866894378838_4
gacttcgtactaatgatgacaatacgatattgcatgtacacaatgaagtttgagaagaattctgcctgatgtactgactttcacttggaaacatgtaaagtagctttatgctcctttgcacaatgagcccaatctatgctatgcagagttgcttgtgcatgtgttgtaaggctgactcatcagatttgttgcacagtgggaaaggttgctattttcagcctggacacctggcacccaaaagtccctattctttcagaggcctttggggcaatgattggtcaggatctgatcactacwskrcttmccctgtaatagagtcaaattttattaactcagtatgtgtacaaatgcatagctttcacctattttagtcaaaatgagccacactccagaaatcaatttacataaacgttgggtgtgtaatgctattttagatgctaagctatcataagtgtcttccggtcagttatctaaaaaggtgcagatgtttcataaatcagatttcttagctattggctctgtaggtgcctttgacagtctagaatactttaaatgtcagcagtgttcaagcaactgattcaagtcccaggtatctataaa

SEQ ID NO: 83178 - DNA, 600 bp, Chicken  19866894378838_5
tcgtactaatgatgacaatacgatattgcatgtacacaatgaagtttgagaagaattctgcctgatgtactgactttcacttggaaacatgtaaagtagctttatgctcctttgcacaatgagcccaatctatgctatgcagagttgcttgtgcatgtgttgtaaggctgactcatcagatttgttgcacagtgggaaaggttgctattttcagcctggacacctggcacccaaaagtccctattctttcagaggcctttggggcaatgattggtcaggatctgatcactacwskrcttmccctgtaatagagtcaaattttattaactcagtatgtgtacaaatgcatagctttcacctattttagtcaaaatgagccacactccagaaatcaatttacataaacgttgggtgtgtaatgctattttagatgctaagctatcataagtgtcttccggtcagttatctaaaaaggtgcagatgtttcataaatcagatttcttagctattggctctgtaggtgcctttgacagtctagaatactttaaatgtcagcagtgttcaagcaactgattcaagtcccaggtatctataaaattt

SEQ ID NO: 83179 - DNA, 600 bp, Chicken  19866894378845_1
ttggtagagcaaattcttagctacaaaacactgcttttcaacatagccaccatcgttatctatgcacttttgccagtaatgaacagggccctgcttgctgtgctcatatatatctgcattagagtacttctaacttcgaggctatacctagagtatgttgatcagttttggaccctcactataagaaaaacatcaaggtgctggagcatgtccagaaaagggcaatgaagctagtggagggtctagagtgaaagttttgtgaggagtggctgaaggaactgggactgtttagtctggagraaaggaggttcaggggggatcctatagccctctatagctgcttgaaaggagtctgtggaaagtcagggtcagccttttctccacagtaacaatgataagactagagggaatgatctcaagctgcaccaggggaaataacagattacatattcggaaaaaaattcttctctgaaatagtggtaaggtatcagaatgggttgcctagggagataatggaggcattatctccctggaggcattcaagaaaagagtagatgtgtcaacaggggacacggtttttgtgggcatggttgtggtggg

SEQ ID NO: 83180 - DNA, 600 bp, Chicken  19866894378863_1
atacttggaggcaaattcagagttctagagaagaaagaatgagtttatcatgggaaaagtgtacgcaaggggaaagaaaggaagagattatagaatcgtagggattggaaggggtctctggaattaatctaggttccccacagcatctggagtaatgagtatctccagagaaagagattccacagcctcactgggcagtctgtccctgtgctctgttactctcaaagttttacatgtgtttgtatggaacttcctgtgttccattccactttatgcccattgtcccttttcctgtcagtrcacactgctgagaaatgtatggccccaaatatctgggggaagcagagaatggaagaaggagaattaagggtgagtacatgaattggagaagtaargaaagaggtagaacttggaaaagaaatggtacaggaggattttcaaggggagggaaagtgaaacagggagatcttaggtaaggaaaggtactaataatggaaggtaggggaatattytgggagactggaacagtctcagacattttgaaggaggtctgagagaaaatgtcatagcacaatacaggggaaaataagagtacttgaa

SEQ ID NO: 83181 - DNA, 600 bp, Chicken  19866894378863_2
tcgtagggattggaaggggtctctggaattaatctaggttccccacagcatctggagtaatgagtatctccagagaaagagattccacagcctcactgggcagtctgtccctgtgctctgttactctcaaagttttacatgtgtttgtatggaacttcctgtgttccattccactttatgcccattgtcccttttcctgtcagtrcacactgctgagaaatgtatggccccaaatatctgggggaagcagagaatggaagaaggagaattaagggtgagtacatgaattggagaagtaargaaagaggtagaacttggaaaagaaatggtacaggaggattttcaaggggagggaaagtgaaacagggagatcttaggtaaggaaaggtactaataatggaaggtaggggaatattytgggagactggaacagtctcagacattttgaaggaggtctgagagaaaatgtcatagcacaatacaggggaaaataagagtacttgaaaggagcaacataggaggtaaatgatagaaaaccaacagttgatagcttttggcaagcactcagtatctcctgattgtggtcagcagtaacaactg

SEQ ID NO: 83182 - DNA, 600 bp, Chicken  19866894378863_3
ctgttactctcaaagttttacatgtgtttgtatggaacttcctgtgttccattccactttatgcccattgtcccttttcctgtcagtrcacactgctgagaaatgtatggccccaaatatctgggggaagcagagaatggaagaaggagaattaagggtgagtacatgaattggagaagtaargaaagaggtagaacttggaaaagaaatggtacaggaggattttcaaggggagggaaagtgaaacagggagatcttaggtaaggaaaggtactaataatggaaggtaggggaatattytgggagactggaacagtctcagacattttgaaggaggtctgagagaaaatgtcatagcacaatacaggggaaaataagagtacttgaaaggagcaacataggaggtaaatgatagaaaaccaacagttgatagcttttggcaagcactcagtatctcctgattgtggtcagcagtaacaactgagaaattataattgattcttaagttatcagtctggaaattaccaagactatgacttataacattgaatattacaattataacttcatttttatagagttgtactgcttagagacact

SEQ ID NO: 83183 - DNA, 600 bp, Chicken  19866894378867_1
gtcttcaagggttcagacaggcattggtgatccctatacatgcattttttttttttgtaatactactaaagccactgcttctctacacagaactaaagtgagcacagaggtataacattcctcctgattatctgaactttggaatactgtcttatctttcctagttaagaggaacttgcaagatacacagctgtaaactagtttcagtattttttcttcccataaagcttgtaggttccttgacataaggaaatcataggcatttcagctctgggtcttaaaaaaataaataaatacaayactaactcaataagyatttgagtttgtttggctcgggaggttttaggtaggtttttttttcccctcctctcttacctttggactgcgctgtgggagggaagagtacacytcctacacacagctttcaaaacttcacaaatcccttaaacagaacttaaatcattcaagctccgcttwtaaaagaaagaaaaaaaaaaacctaatacaacaaataaaattataaatgttaatcctactcaggtgtgcccaaattatatagaaaatraagtattcagctgctaaaccaatctttgaaacaca

SEQ ID NO: 83184 - DNA, 600 bp, Chicken  19866894378867_2
gacaggcattggtgatccctatacatgcattttttttttttgtaatactactaaagccactgcttctctacacagaactaaagtgagcacagaggtataacattcctcctgattatctgaactttggaatactgtcttatctttcctagttaagaggaacttgcaagatacacagctgtaaactagtttcagtattttttcttcccataaagcttgtaggttccttgacataaggaaatcataggcatttcagctctgggtcttaaaaaaataaataaatacaayactaactcaataagyatttgagtttgtttggctcgggaggttttaggtaggtttttttttcccctcctctcttacctttggactgcgctgtgggagggaagagtacacytcctacacacagctttcaaaacttcacaaatcccttaaacagaacttaaatcattcaagctccgcttwtaaaagaaagaaaaaaaaaaacctaatacaacaaataaaattataaatgttaatcctactcaggtgtgcccaaattatatagaaaatraagtattcagctgctaaaccaatctttgaaacacaaaatgcaaattgaat

SEQ ID NO: 83185 - DNA, 600 bp, Chicken  19866894378867_3
gtataacattcctcctgattatctgaactttggaatactgtcttatctttcctagttaagaggaacttgcaagatacacagctgtaaactagtttcagtattttttcttcccataaagcttgtaggttccttgacataaggaaatcataggcatttcagctctgggtcttaaaaaaataaataaatacaayactaactcaataagyatttgagtttgtttggctcgggaggttttaggtaggtttttttttcccctcctctcttacctttggactgcgctgtgggagggaagagtacacytcctacacacagctttcaaaacttcacaaatcccttaaacagaacttaaatcattcaagctccgcttwtaaaagaaagaaaaaaaaaaacctaatacaacaaataaaattataaatgttaatcctactcaggtgtgcccaaattatatagaaaatraagtattcagctgctaaaccaatctttgaaacacaaaatgcaaattgaatctttaaatttatagtgaaaacttgaaggaaatggacaatactaaactactgcatatgccaaagaccttagtatgcagtagtctggtaatagcta

SEQ ID NO: 83186 - DNA, 600 bp, Chicken  19866894378867_4
gcaagatacacagctgtaaactagtttcagtattttttcttcccataaagcttgtaggttccttgacataaggaaatcataggcatttcagctctgggtcttaaaaaaataaataaatacaayactaactcaataagyatttgagtttgtttggctcgggaggttttaggtaggtttttttttcccctcctctcttacctttggactgcgctgtgggagggaagagtacacytcctacacacagctttcaaaacttcacaaatcccttaaacagaacttaaatcattcaagctccgcttwtaaaagaaagaaaaaaaaaaacctaatacaacaaataaaattataaatgttaatcctactcaggtgtgcccaaattatatagaaaatraagtattcagctgctaaaccaatctttgaaacacaaaatgcaaattgaatctttaaatttatagtgaaaacttgaaggaaatggacaatactaaactactgcatatgccaaagaccttagtatgcagtagtctggtaatagctaaagaacagagaatagagcataagaattcaattttaataacaattttaataacttaaaagagattgttg

SEQ ID NO: 83187 - DNA, 600 bp, Chicken  19866894378867_5
cagctctgggtcttaaaaaaataaataaatacaayactaactcaataagyatttgagtttgtttggctcgggaggttttaggtaggtttttttttcccctcctctcttacctttggactgcgctgtgggagggaagagtacacytcctacacacagctttcaaaacttcacaaatcccttaaacagaacttaaatcattcaagctccgcttwtaaaagaaagaaaaaaaaaaacctaatacaacaaataaaattataaatgttaatcctactcaggtgtgcccaaattatatagaaaatraagtattcagctgctaaaccaatctttgaaacacaaaatgcaaattgaatctttaaatttatagtgaaaacttgaaggaaatggacaatactaaactactgcatatgccaaagaccttagtatgcagtagtctggtaatagctaaagaacagagaatagagcataagaattcaattttaataacaattttaataacttaaaagagattgttgttttgtgtttaagtcaattttagcagagaatcactttagcagagaaatcacagatagcctgacacagggcaaaatccaagaaagtcac

SEQ ID NO: 83188 - DNA, 600 bp, Chicken  19866894378870_1
tctggagaatttgaaaggtttttgtcccgtcatatttaggacttttccaaatcctaaaacatcagaaatgttcttgtgtttgtattaggcctatttctgccctttaaggccccttaagtttttatttcttaaatgcataatttctgtaatatctctggaagagtcttcggctttttggttgtattaatttgcttgagtgcgacaagcttttaacaaatgttggtttctgcttagatttctgtcttgccatgatgactctggcctgtattttgaaatataacgctgttttccaaagtgctkcttcttgccaaattctgttctgcatttcctgtcatctgagctcttgcataccttccagtgctggaagtggagttctgttgtggaagcagaagctcacagagaacaggatctgtgagctgctctgggcacaggcagaactttgatggttctggaagcgatgcctcacactgaggtgccacagccctggaggggacccaaggtcaggacttggcagtgcgtccatgggctgcctggccctgtcacttccatgccccgtggtggtgaggggtctgcggtctgtgctgcactgcttctgggcct

SEQ ID NO: 83189 - DNA, 600 bp, Chicken  19866894378877_1
acgactgtaattttctgtgacaaacatttacttttttgacagagttcaaaccaacttcttgcaaaatacaccgaagtaacatccaagtggcaatgctaattgcaagcctactaggtaaaaacataaagtgtagttgaagatggtgaccaaaaggtcattaactgctgatgtttcagatttctcagagatctttacaattagggatcatattcaatagcttacaacaccatctacgatacttgagaaaaaatagcatctgtagcacagctggaacagctgtgttggaaaatcaatcattgyctggcaactgaacaactgattttccatcaatcaatacacaaggcattctgttaggtttttaaaacacataaatttgttgcagtatctgcaaatgcaataagtgggttagaaatgtaagagcaatagataaaagacaggtttaaagcagctatcaagcttaatatgaaaagagcagtatttatgcatactgtatatacaatatttgtggtaacaaacagatgaactactcagtgtgattaactttgacaacagatagagccaagagtaatccagaaacaaggacttagtccaccagagcaa

SEQ ID NO: 83190 - DNA, 600 bp, Chicken  19866894378880_1
tcaggcctttttcaaacatgcaacagttctggatgagaggccagcaacctgccctgattgccacttcaccattctgaagcttgctgcattattagtattattatggggtcaagtacaccctcttgaacctgacaggtaaactccagcaacaaaattctcaaggcatcaattttagtgatagcaaacaatttgaacaatttttgctccaaccacggcaggaaatttctgcagttgagttacctttcttgggcagaagaggggaagaaggaaagagcaggagaatggggctggtgttttttyccccccccttcaatatatatttcacagaactctacatctgcccactctttcagcacaatatatctagttaatacggacagcttagcgcttattaatataacacagcatttgctaacttgattcaatgacagtggagcaaagaaactatatgttgtttcaaactacagaagaacagacctgcacacacagttccaaaaccatactggataactgatgcagcccaccaaaaataccaatcttttaatacagaatttataatacttcaataaagcattaaacaaagcacacattttaaacaaa

SEQ ID NO: 83191 - DNA, 600 bp, Chicken  19866894378880_2
ttcacagaactctacatctgcccactctttcagcacaatatatctagttaatacggacagcttagcgcttattaatataacacagcatttgctaacttgattcaatgacagtggagcaaagaaactatatgttgtttcaaactacagaagaacagacctgcacacacagttccaaaaccatactggataactgatgcagcccaccaaaaataccaatcttttaatacagaatttataatacttcaataaagcattaaacaaagcacacattttaaacaaactccccagctgctacatcaraagaaaacaatccaaagccttatttttcaacaagcaagtcaggtataagcctgaggtagtcaataaaatgctttaaatcagtagtttctagtaaaagagagcatctggaacaacaaatcttactgccattttcagaaagaccaagactataatttaccagagaacagataaacaacctgtcagtgtcactgggagagactgaaagaagtttcctattcaagggtgactttcttaataaaactgtctttcattgaacaatttaattaacattcagagctcaaaggtctaggaacagaaaag

SEQ ID NO: 83192 - DNA, 600 bp, Chicken  19866894378884_1
gtctctttccagtaacaggaacctacatggctggttacatatttaactcctcttaccaaagacagaacacatggctgtgtctgccaaagtagagcgctctaattgttcacacactgcatatacaagaagtaaaacagagccacatgaaacctgtgagtcaaatgcaggagggcaccaacagaaatagcacaaacacaacgacgtgaaagaagagtttttgccatcttcttttattggttccaccttttaatttcaggtcttaagtacctgctttctttcaaggtattaagagatgatatrtagaaytgtcatcatctttgcaagtgagtgtgctttctgcgtgtgacagagctgtcaaagycagtattgcccagccccagtcagcaagggcactactatggtacattgtgaacacagagtaaaaggaagtgatttctgccataagagtattgaggacggacatttgacaggcaatataggtcacaagctgctacagagacatgcatcagtgtagcagagaggcacagcctcttgctgctgctggagtagttccttggcagaggttgatttgtcttcaagctcagtcattctttgacccca

SEQ ID NO: 83193 - DNA, 600 bp, Chicken  19866894378884_2
ttccagtaacaggaacctacatggctggttacatatttaactcctcttaccaaagacagaacacatggctgtgtctgccaaagtagagcgctctaattgttcacacactgcatatacaagaagtaaaacagagccacatgaaacctgtgagtcaaatgcaggagggcaccaacagaaatagcacaaacacaacgacgtgaaagaagagtttttgccatcttcttttattggttccaccttttaatttcaggtcttaagtacctgctttctttcaaggtattaagagatgatatrtagaaytgtcatcatctttgcaagtgagtgtgctttctgcgtgtgacagagctgtcaaagycagtattgcccagccccagtcagcaagggcactactatggtacattgtgaacacagagtaaaaggaagtgatttctgccataagagtattgaggacggacatttgacaggcaatataggtcacaagctgctacagagacatgcatcagtgtagcagagaggcacagcctcttgctgctgctggagtagttccttggcagaggttgatttgtcttcaagctcagtcattctttgaccccaaataca

SEQ ID NO: 83194 - DNA, 600 bp, Chicken  19866894378884_3
acagaacacatggctgtgtctgccaaagtagagcgctctaattgttcacacactgcatatacaagaagtaaaacagagccacatgaaacctgtgagtcaaatgcaggagggcaccaacagaaatagcacaaacacaacgacgtgaaagaagagtttttgccatcttcttttattggttccaccttttaatttcaggtcttaagtacctgctttctttcaaggtattaagagatgatatrtagaaytgtcatcatctttgcaagtgagtgtgctttctgcgtgtgacagagctgtcaaagycagtattgcccagccccagtcagcaagggcactactatggtacattgtgaacacagagtaaaaggaagtgatttctgccataagagtattgaggacggacatttgacaggcaatataggtcacaagctgctacagagacatgcatcagtgtagcagagaggcacagcctcttgctgctgctggagtagttccttggcagaggttgatttgtcttcaagctcagtcattctttgaccccaaatacacattttgctctttcccttctactacatcttaccttttggcataatcaggaaaagg

SEQ ID NO: 83195 - DNA, 600 bp, Chicken  19866894378900_1
attttagccaaggatttctggtgtcacaacactccaaggttacatgcacaacgtcaactgtttcagactgtatcaccacactgctagtgtcaaatacatgtactttttgattcacatatgcagtcatgctgaagacaacctactgaatactcaaaggccatggacatgaaataatccatgagtactgcctctgctgcttgctcttcaacctgagagattctcatcatttcaaatcctgcaaatcactgtttaggggcgagtggaagaaaactttttccaaattaatccatcagaaaaaargcaacaaactaccacaaacaagcaacactaagctaacaagacaggcagagctacagttaaaacccgtaagtttcacgaaggaaggcaatttctgcaatggagctcccattcatatctcgtattccagctcagattattgtacccagcagaagtataaacacctctctaaaacgagtggcttcgactccatttgttggcaagaatcaaggctgctgtacaggatgacaaaatctgggtacagcccaaagatgagccaaaaatacagcaaacaaggaactgtgcaggaataatcaatataag

SEQ ID NO: 83196 - DNA, 600 bp, Chicken  19866894378901_1
tgtcatggagcgtacaatgccaactatattttgccacatcaccattcttgaaagtcacacagaggagagcatgtgaaagtgttctgtattaaaaaacaaaacaacattatttccaaacctgctaaactggcattttattctctacattattgtatttggctactgtttatggatggaagaatcaagaacctataatttaaaaccttgtagaataccatggtatgaaaactttaaactcatttaaaggttttattccattttggaaagtgttagacaaagagagaatattttttcctatgraaacaatattgggctaagatgacattcaaagtaaaaaattttcataccttccaggaacccccatgtttctcctgttttcccttccaacttataaaattatcagttcttctacatagcagaaattaatccctttcctgagggtcctccctgtgcaaggcataaatgtgatgtacatagtcctttgcagaatcaagactgaaattcgtcttccaatgaaaaattatagggagtgtctttgatgattagtagtatcagatataagagctaacatcaggctttggctagtggaaagatgttcat

SEQ ID NO: 83197 - DNA, 600 bp, Chicken  19866894378902_1
agaattaaggaagttctgtgagaaagctaagaggaaattaatttagaaattattgaataaagattctacagacatcttcaactttaattctctactcagaggatcccagagacttcatcatgaaggccccatgtatttgagactcatagtctgggatgtcccacatcatccaaatatcactgtgtgtacagatacattttctcttgatctttgaaaccaagcatgatttacaaatattgtgtaaatatttttctccaaggctaatatttatgtccatatcttgcagatgtgactaaaaawcttgttttcttagagaaaaatatttatttttagtcacagggaaggagagactcctatttaaaaaaattaaaaagattcctccttttgtatgctagtaattttcctacaatatggcttaaagatacaaccagagacatttttatgggaggtaataaagatctggtaaaatttcagcattaattctcaagagactgaatgcatatatatgcatttatatattgagtgctctatgcatgtatatattggatagcaattagtaacagtttattaagagatctttatgttgaatcttcaaaggaa

SEQ ID NO: 83198 - DNA, 600 bp, Chicken  19866894378913_1
agaaattaaatgcatgatttcatctgttgttaaaaaaaaaaaaaagttaacactgcttatgtgactgtttcatctccctgaatcaatttctgattaggaaatgaaacattataaagttattgcattttttaattctgataggaatggactttaagggcaaaactttagaaagaatgcatttaaatttacatttcagtttcatttatagattcattcagctgtgaaggacaaggagaaaattgcaaaagtaaaggaatatctattaatggtaatgcacaggtgttaggattacttgagtgytaataaatttacattgcaaatgtgataaatctattgcagttctaatgctactgtaatgactatcagctgcaagcatgaggacagaagaaagctgttaaaatctgcatactcttagtgtgtggaaaatgtactctctcagcagcttacatactgcttggcattcatttatgaaggcttctttcacacaggatctttcaattctatagaattttactttgtaatgctttatttgtaaatgatgtgatttgactgtcaaggcagaatacttactcattaagctttttggtaatatgaatatat

SEQ ID NO: 83199 - DNA, 600 bp, Chicken  19866894378915_1
gcagatagagcactgatgcaaactttccgttagctacattcacacgaggttaatccctcacagaagatctcggcttactctatctcatgcttcgggatgaattttatcaggctgcttcctcattggctgattccagaatcttaaaattaggcacttgcgctttcattaccaaaggccctttgtcacttgtgtgacccgtgccagccatctgatagcagatatccttgtggagagtttgaccacaaaaaggcattaaacacttcggccctctcagcatcttctgtttatatctctcctccycttggagcagcagacaaaagctttctcagcttttgcaattttagtgcaattacaaaaggacttcctgttactctttacagacccwgcctttctgctttcatcctaaaacagaatatttctcttttaatgctgttgccacgctaggctttttagctgcttccttctgcttctggatgggtagcagagccttccccagtggcagcttgctcatgttccatcctcccaacttgtttgtttccctgtgggtttacctatcatcctctcaaaatggtgaaatctactttttttgagtacctattg

SEQ ID NO: 83200 - DNA, 600 bp, Chicken  19866894378915_2
catgcttcgggatgaattttatcaggctgcttcctcattggctgattccagaatcttaaaattaggcacttgcgctttcattaccaaaggccctttgtcacttgtgtgacccgtgccagccatctgatagcagatatccttgtggagagtttgaccacaaaaaggcattaaacacttcggccctctcagcatcttctgtttatatctctcctccycttggagcagcagacaaaagctttctcagcttttgcaattttagtgcaattacaaaaggacttcctgttactctttacagacccwgcctttctgctttcatcctaaaacagaatatttctcttttaatgctgttgccacgctaggctttttagctgcttccttctgcttctggatgggtagcagagccttccccagtggcagcttgctcatgttccatcctcccaacttgtttgtttccctgtgggtttacctatcatcctctcaaaatggtgaaatctactttttttgagtacctattgcctaacactgttcctcttttcacaaaatagggaactcagtgcagaagcagaaagctgctctcatcgtgatctccacacttgtcga

SEQ ID NO: 83201 - DNA, 600 bp, Chicken  19866894378918_1
atcacaagactgaagtcatcatgtaatcggagaataaaaatgtatacactaatcaaaatgtttggagagaagacaaaaagacccaaacctctctcaggccatatgatgtcttaactttctaaacaccttgttgtttatttttttgttttgtaacttggctttattgttgcaaatctgtgtttctgaacaaatgcagtcctttatgctcagcaagcgatgaagctgatgctctgtaacagtcagtagatagcagagtctctgtgacttcagttggaggcacaattgctactcagaggtgcrccagcaaattcctctggatgtggagctgggagttttcagaacgtctgaaggagactgtcccagaactgcacgattctgcatgcaggagtctgacaaakctcgccagctcccggagaagagggacgtgaatccccttggcaattggaaaaagtcaggacctgaaccctcgagctcagtccctgtgtttccctttttggaatgtttctggtgtctcccctgcttctcgttggatttgcttgtgcagaacctgtctggtttgttgaagtggctatataccacttatataccatgtgtgctaat

SEQ ID NO: 83202 - DNA, 600 bp, Chicken  19866894378918_2
ccatatgatgtcttaactttctaaacaccttgttgtttatttttttgttttgtaacttggctttattgttgcaaatctgtgtttctgaacaaatgcagtcctttatgctcagcaagcgatgaagctgatgctctgtaacagtcagtagatagcagagtctctgtgacttcagttggaggcacaattgctactcagaggtgcrccagcaaattcctctggatgtggagctgggagttttcagaacgtctgaaggagactgtcccagaactgcacgattctgcatgcaggagtctgacaaakctcgccagctcccggagaagagggacgtgaatccccttggcaattggaaaaagtcaggacctgaaccctcgagctcagtccctgtgtttccctttttggaatgtttctggtgtctcccctgcttctcgttggatttgcttgtgcagaacctgtctggtttgttgaagtggctatataccacttatataccatgtgtgctaatgctttcttaggcaatgaagtttgcaattaactcagagtcctgcctagctagtgcacttactgaagatgtatttgctagcgtgtacatcagctgtaaat

SEQ ID NO: 83203 - DNA, 600 bp, Chicken  19866894378919_1
tctgacctaaacaccgacaaccatcagcccaatatgggcctccactccctttgggcattcttaatgaaagagccctttttcaggaagagctgagcatctgcaattcccaggtggtttgtaaaaccttgttctgaactcaggaaccaaagctcaattgacttcagtggtacacagctgggatcacggctcattgagtgctctgcatccctgaatacagggatgccttcctctggccatgaaggctccagtcagaaaacatcagttttaacacaggcaaattcatcctttgtaagccaagcragtcatcttcagctctgtctatttgctgaaagcaaactgagatgagaaggcaggaagtttcccacaatccagcaatgataacatttcatatcaggttcttttaggaaaattataccattcctgcatgttttatttggatggaaaactttttcagactaatttctctctttacgtgtcatcttctcttctctctttctttttttttttcaataagatctgagaaatgaggaattcttccttctttattgctggaaacaaatagctatttcacatgatcttgtgtttcatgaaacaaaacta

SEQ ID NO: 83204 - DNA, 599 bp, Chicken  19866894378925_1
  misc_feature (1)..(127): n is any nucleotide
nnnnnnnnnnnnnnnnnnnnnnnnnnnnnnnnnnnnnnnnnnnnnnnnnnnnnnnnnnnnnnnnnnnnnnnnnnnnnnnnnnnnnnnnnnnnnnnnnnnnnnnnnnnnnnnnnnnnnnnnnnnnnnntctgagaactgtgtacaggacagggtggaatggttttgaactggcactgggagatttgggttcgatactgtgaggaggtttttcactcagagggtggtgtcacactggaacaggttgcccagaggaactgtgggtgctccatccttgaaggcattcaaggccaggctggatgyggctctgggcagcctggtctggtggttggcgaccctgcacwcagcagggggttgaaactagacraactttaagatccttttaaattcccattctatgattctgtgacagccttatgtttgagcagtaagcagtatcacctagccctcattctcattactttgttacattttcatttcagatttataagaagctgcaattgatttcttacccctgactcctgggatcttcccactgygtgatacgtgtgttgtgattaacaaaatacactctgccattgctgtcagttctcttttctaaa

SEQ ID NO: 83205 - DNA, 599 bp, Chicken  19866894378925_2
  misc_feature (1)..(86): n is any nucleotide
nnnnnnnnnnnnnnnnnnnnnnnnnnnnnnnnnnnnnnnnnnnnnnnnnnnnnnnnnnnnnnnnnnnnnnnnnnnnnnnnnnnnnntctgagaactgtgtacaggacagggtggaatggttttgaactggcactgggagatttgggttcgatactgtgaggaggtttttcactcagagggtggtgtcacactggaacaggttgcccagaggaactgtgggtgctccatccttgaaggcattcaaggccaggctggatgyggctctgggcagcctggtctggtggttggcgaccctgcacwcagcagggggttgaaactagacraactttaagatccttttaaattcccattctatgattctgtgacagccttatgtttgagcagtaagcagtatcacctagccctcattctcattactttgttacattttcatttcagatttataagaagctgcaattgatttcttacccctgactcctgggatcttcccactgygtgatacgtgtgttgtgattaacaaaatacactctgccattgctgtcagttctcttttctaaaaatatacaaaaggaaaacaartttcaatacctaggttacca

SEQ ID NO: 83206 - DNA, 599 bp, Chicken  19866894378925_3
  misc_feature (1)..(63): n is any nucleotide
nnnnnnnnnnnnnnnnnnnnnnnnnnnnnnnnnnnnnnnnnnnnnnnnnnnnnnnnnnnnnnntctgagaactgtgtacaggacagggtggaatggttttgaactggcactgggagatttgggttcgatactgtgaggaggtttttcactcagagggtggtgtcacactggaacaggttgcccagaggaactgtgggtgctccatccttgaaggcattcaaggccaggctggatgyggctctgggcagcctggtctggtggttggcgaccctgcacwcagcagggggttgaaactagacraactttaagatccttttaaattcccattctatgattctgtgacagccttatgtttgagcagtaagcagtatcacctagccctcattctcattactttgttacattttcatttcagatttataagaagctgcaattgatttcttacccctgactcctgggatcttcccactgygtgatacgtgtgttgtgattaacaaaatacactctgccattgctgtcagttctcttttctaaaaatatacaaaaggaaaacaartttcaatacctaggttaccatactgttgaaatattaaataaaa

SEQ ID NO: 83207 - DNA, 600 bp, Chicken  19866894378925_4
acaggttgcccagaggaactgtgggtgctccatccttgaaggcattcaaggccaggctggatgyggctctgggcagcctggtctggtggttggcgaccctgcacwcagcagggggttgaaactagacraactttaagatccttttaaattcccattctatgattctgtgacagccttatgtttgagcagtaagcagtatcacctagccctcattctcattactttgttacattttcatttcagatttataagaagctgcaattgatttcttacccctgactcctgggatcttcccactgygtgatacgtgtgttgtgattaacaaaatacactctgccattgctgtcagttctcttttctaaaaatatacaaaaggaaaacaartttcaatacctaggttaccatactgttgaaatattaaataaaacaaataaatccaactaccagagcctgccacagcctcacctgtgctcaagtttctctgtaccctcctctcagacaacatcttttcactttcattgacattactccttactagtctattcacaaacaggagtttatctaaatagtaccaactgctaataattgtatgatactgca

SEQ ID NO: 83208 - DNA, 589 bp, Chicken  19866894378925_5
ggtggttggcgaccctgcacwcagcagggggttgaaactagacraactttaagatccttttaaattcccattctatgattctgtgacagccttatgtttgagcagtaagcagtatcacctagccctcattctcattactttgttacattttcatttcagatttataagaagctgcaattgatttcttacccctgactcctgggatcttcccactgygtgatacgtgtgttgtgattaacaaaatacactctgccattgctgtcagttctcttttctaaaaatatacaaaaggaaaacaartttcaatacctaggttaccatactgttgaaatattaaataaaacaaataaatccaactaccagagcctgccacagcctcacctgtgctcaagtttctctgtaccctcctctcagacaacatcttttcactttcattgacattactccttactagtctattcacaaacaggagtttatctaaatagtaccaactgctaataattgtatgatactgcatcatcacccatcctcagtgaaaagctgcactttaagggggttcgtgcataatttcttagcatctcatttatta

SEQ ID NO: 83209 - DNA, 599 bp, Chicken  19866894378928_1
  misc_feature (1)..(145): n is any nucleotide
nnnnnnnnnnnnnnnnnnnnnnnnnnnnnnnnnnnnnnnnnnnnnnnnnnnnnnnnnnnnnnnnnnnnnnnnnnnnnnnnnnnnnnnnnnnnnnnnnnnnnnnnnnnnnnnnnnnnnnnnnnnnnnnnnnnnnnnnnnnnnnnnnctgagtggtgcggtcgacatggaggaaggaagggatgccattcagagggaccttgagagacttgaaaggtgggcgcaggtgaacctaatgaggttcaacacagcaaagtgcagggttttgcacttaggccagaggaaccccaggcatctatacasactggaaggagtagtccttgagagcagctctgcagagaaggacctgggggtcctgatggatgacaaacttaacatgagccagcagygtgctcttgcagcttggaaagcaaatggtatcctgggctccatcatgagaatggacagcagggacagggaggtgattgtccctctctactctgctcttgtgaggccccatctggagtactgtgtccaggtatggagcccccagtacaagaaagacagagagctgttgtagagggtccagagaagggccacaaagatgatcaggggactggagc

SEQ ID NO: 83210 - DNA, 599 bp, Chicken  19866894378928_2
  misc_feature (1)..(59): n is any nucleotide
nnnnnnnnnnnnnnnnnnnnnnnnnnnnnnnnnnnnnnnnnnnnnnnnnnnnnnnnnnnctgagtggtgcggtcgacatggaggaaggaagggatgccattcagagggaccttgagagacttgaaaggtgggcgcaggtgaacctaatgaggttcaacacagcaaagtgcagggttttgcacttaggccagaggaaccccaggcatctatacasactggaaggagtagtccttgagagcagctctgcagagaaggacctgggggtcctgatggatgacaaacttaacatgagccagcagygtgctcttgcagcttggaaagcaaatggtatcctgggctccatcatgagaatggacagcagggacagggaggtgattgtccctctctactctgctcttgtgaggccccatctggagtactgtgtccaggtatggagcccccagtacaagaaagacagagagctgttgtagagggtccagagaagggccacaaagatgatcaggggactggagcacctccctacgaggacaggctgagggakctgggcttattcagcctggagaagagaaggctgcagagtgaccttattgcagcctwtc

SEQ ID NO: 83211 - DNA, 549 bp, Chicken  19866894378928_3
ctctgcagagaaggacctgggggtcctgatggatgacaaacttaacatgagccagcagygtgctcttgcagcttggaaagcaaatggtatcctgggctccatcatgagaatggacagcagggacagggaggtgattgtccctctctactctgctcttgtgaggccccatctggagtactgtgtccaggtatggagcccccagtacaagaaagacagagagctgttgtagagggtccagagaagggccacaaagatgatcaggggactggagcacctccctacgaggacaggctgagggakctgggcttattcagcctggagaagagaaggctgcagagtgaccttattgcagcctwtcagtacctgaagggagcctataaacaggaagggagtaaactctttgaaagggtagataacagcaggacaagggggaaacggttttaagttgaaggagggaagatttaggttggatgttagagggaagttctttaccaggagagtggtgaagtgctgaaatgggctgcccagagaggttgtggatgccccgtc

SEQ ID NO: 83212 - DNA, 493 bp, Chicken  19866894378928_4
agygtgctcttgcagcttggaaagcaaatggtatcctgggctccatcatgagaatggacagcagggacagggaggtgattgtccctctctactctgctcttgtgaggccccatctggagtactgtgtccaggtatggagcccccagtacaagaaagacagagagctgttgtagagggtccagagaagggccacaaagatgatcaggggactggagcacctccctacgaggacaggctgagggakctgggcttattcagcctggagaagagaaggctgcagagtgaccttattgcagcctwtcagtacctgaagggagcctataaacaggaagggagtaaactctttgaaagggtagataacagcaggacaagggggaaacggttttaagttgaaggagggaagatttaggttggatgttagagggaagttctttaccaggagagtggtgaagtgctgaaatgggctgcccagagaggttgtggatgccccgtc

SEQ ID NO: 83213 - DNA, 599 bp, Chicken  19866894378930_1
  misc_feature (1)..(170): n is any nucleotide
nnnnnnnnnnnnnnnnnnnnnnnnnnnnnnnnnnnnnnnnnnnnnnnnnnnnnnnnnnnnnnnnnnnnnnnnnnnnnnnnnnnnnnnnnnnnnnnnnnnnnnnnnnnnnnnnnnnnnnnnnnnnnnnnnnnnnnnnnnnnnnnnnnnnnnnnnnnnnnnnnnnnnnnnnntcacccttcactggacactctctcttgatactctcagatactgtggagcccagaactgctcaatagtaggcactacaatatactttcctaaggggttggcatcctcataatgtctgttgtagcttactawcactattataattactgaagatacttacagttagctttgagaagcactgtataagacaacagaaaatagtggaagtattaggatcttgctaaggatgtcttacagaagtactattctagtaggaatgtattttaccaatcattacgcagtttttattattctaacttcagtgtacaagattcaaaacattatgcaccactttcatgcctattaagttgccttaccactagaaattaaagacaaacacaaaagaatcacaagatgaacattacaaacactagatgacaaagctagataaa

SEQ ID NO: 83214 - DNA, 600 bp, Chicken  19866894378930_2
ttagctttgagaagcactgtataagacaacagaaaatagtggaagtattaggatcttgctaaggatgtcttacagaagtactattctagtaggaatgtattttaccaatcattacgcagtttttattattctaacttcagtgtacaagattcaaaacattatgcaccactttcatgcctattaagttgccttaccactagaaattaaagacaaacacaaaagaatcacaagatgaacattacaaacactagatgacaaagctagataaagctagataaaaccttgaaacaaacttcatayatataaatatgtacatggaagaatacttttatgcaaactcaaagaggaagaaaaaataaataaacacaaaggaaagtgacacaacgcttacataaatgattcattagctcatcactctttcagtacttccaggaaaatccaaggatcctatgaaataccaaatgataacagtgaatggtttatagtgattttaatgaaaagatgttgttgatttctcggaagatacccatagtaacagtatgagtattgatgagataaatctctcttttccaccccgtcactggagcaagaaggtctgcc

SEQ ID NO: 83215 - DNA, 600 bp, Chicken  19866894378931_1
atgggaggagcagaacagtttaagtgtataaatagaaaccactacacacacctttttacgtcacagttctataaatgctttgccctgttcctcaggatgtattatctggagcattataaattcaatcaactcaattaatgtgaactatttctagatagattgctcttaaaaatcatagatttaagtctcacatgaactaatgtctacttttcccaatatcttttgtagctgagataaataacagaatctgacgcaaaccagggagttagtattctatttttaaattccagtctaattttyaaaatataacctccagcagctctactgtcattacaatcaatgaatgtaatagctttgaaactgcacaccatttcctcagtcacatctgctattgcaatatttatgaactactttcttcatcccaataattttagttactattactaaagacaatagagcaagagcttgtctgattccaaatatcataaattaatacacaaaatttttaagcacatctacaatatacctatgaaaactatagtgaacataattaaatgttgagcagaaaaccaataataattattattcaagcagtttgtt

SEQ ID NO: 83216 - DNA, 600 bp, Chicken  19866894378940_1
agtatggagtgttttattaatgctgcactgagctagacattgctaaccattttaaccatgatgtttcaaattccatgctccacaccgatcaccgaaacctgcatcaacagaggtgaaggcaggaggaggaacaacagctggttacaacactacaacatcagctggtattttcagagaataagaaagttaagtcataaaatcccagttatcttaaatagtatttgacttcagttcaaaatttcttcctttcaacttatttataagatcatcaagttaatatcaaacagagaatgcatttcrgcaattatttatatttgggtaggtcttgaaggctgttgtcagggctgccttccaattaaactaagaaatatataaataaagcacacaggtctaaatgaagcaggtgcttaaatcctcttagaagaatttaaagcactgtaatgacccctacataagcagtgacatacctgaagagactgcaggatatataaaaatacgtagttcagaaaaggaaaaagaaagggagatggagaactgaggctgaggaggcttacagtactgaagtgaggggttaaaaatatgcaaactcactaccaaaat

SEQ ID NO: 83217 - DNA, 600 bp, Chicken  19866894378953_1
aatttcactgttatctcctccaatgctgtaactttgagtcaagcaagctgcaaaagtggaaggtcaggtaaccctctgaaggctgcaaaagttcattcacttggtggaatttgctttggttttcctttgaacatgccttagtggctccttaaaatatttatattatgatttctaacatagcattatttatttaacaaatatcactacagaacaagagttgcaaggcaatgtatggaaaccaactctgtggaagaggaatccagaatttccaaatctgcaaaattgaaaatcgttgaggartctgctgtgaatgtccctatattagctgacataagggaacacttttgagaattacgtcacacacttatttaagctttcaaatactttgcaaaggaaaaattagaatgaaatgaagctaatatgtttttttttcaattagaaatgttttgtgttaaaaacagaaatttgatccttgagtcaccaaggtgttttgctgaggaagcaaatgaaaatttcacttcagacactttccacttcaagagaaactcaaaggagctgtaatctaagtagaaatcgggaccaaccatgtaggacttggta

SEQ ID NO: 83218 - DNA, 600 bp, Chicken  19866894378954_1
aattctgtttctttacttgaaatctgggatttttcttccctacctcaagaactgctttgagctcttcagagagaacatgctgcagaaaataacctacaagctgtaaaggaaaatgctttttaactttaagcactctaactcagagggaatgaagtattttggatctgatcttcttccccctcaccacattcatggacagagattatactgccatgataccacaaaacactgcctgaaattagcttgccatggaaagaactgttctttaccattcgtgggttagtctgaaagaccagtgcrtttcacgtgctttcagagtccccatttctgcatttatgtggacataggactgtgtttaccaaaaaaaagcccaccctgagcacaaactttgcacattaccctgacaagaggtcagtttgcacttacaagaaaaaaaagctagattaaaaagaaaaaaaaagtccatttactaaaaagtaaaatgttttgacagtgggttacaatgtccaaataatgaaaacacagagaaaagagtagaacaaaatacgctctttgggaacactgacatatcttcagttccagatgctggccaccactggg

SEQ ID NO: 83219 - DNA, 600 bp, Chicken  19866894378954_2
tttactaaaaagtaaaatgttttgacagtgggttacaatgtccaaataatgaaaacacagagaaaagagtagaacaaaatacgctctttgggaacactgacatatcttcagttccagatgctggccaccactggggctggagatcaaatgtgagagaccacagctatggagagaagtgggactgctaggggatgttcaaacagtgatgctcaagtctctctttgataaaagttgactacaagacagcagcacaccctgatatgtgttaatgcttgttcactgccatgcttgacagctgcraagcattgcagttgaaagaattaccagccctgcagactttcagatgagttcaaaatgcaatatcccagttgccaaacgccacagctccccagctacgcataaacccaatctctgctctcactattgattcctctgtaaataccaacacagcttccaagrgcccatctgaactgccagaagtctttgtgggacaggtcccggctacccaagagacctcttcttcatgactccccaacaaagacacaattttcaggagcaatgcaactgctgtgttgcacaaagctctggagcagagcagat

SEQ ID NO: 83220 - DNA, 600 bp, Chicken  19866894378954_3
acagctatggagagaagtgggactgctaggggatgttcaaacagtgatgctcaagtctctctttgataaaagttgactacaagacagcagcacaccctgatatgtgttaatgcttgttcactgccatgcttgacagctgcraagcattgcagttgaaagaattaccagccctgcagactttcagatgagttcaaaatgcaatatcccagttgccaaacgccacagctccccagctacgcataaacccaatctctgctctcactattgattcctctgtaaataccaacacagcttccaagrgcccatctgaactgccagaagtctttgtgggacaggtcccggctacccaagagacctcttcttcatgactccccaacaaagacacaattttcaggagcaatgcaactgctgtgttgcacaaagctctggagcagagcagatagctttcttggcagctggccctcagtgctggagctcgttctcaggagagattagagggagtaaaaacctcattgcctttagagcaaagcactcaacctgcttctaccagagatttctcacaagagggaaaaaaaatccaaacgtctctacaaatagaag

SEQ ID NO: 83221 - DNA, 600 bp, Chicken  19866894378955_1
ttaaaggtcagatctagcacagatagcatgataagtacaactctgggacagattttatctgtcacaggtgaaagacaagaccatatttgtcatgatacaaaaaaagtctcagtgctgcccaaatctgtttgtcacacaacttagtgatttcagtgagaacactgcaaacgtgcttgttatcttgaattcagcatgagttaatactctcatttacctcagccaaactacaatatgccacaaatgcacaaatttagtatatacaaaatcagggaagaaaacaaaccatccgtcttttttttycctgcctgcatggtctcttctgagccttctgcttcagtagcaactgcctgctgacattgttttcctgggaaaaaaacaagtaccagccatgacacaaagcttagtgattgaataaatacacatataaaatactaaagcaagccgatcagctatagctttaattagctttgccamaaagtaaaacagagtttaaatacatgtagagcaattgtattggtctactgtaggctgatgatgcatatctgctatgcaagtagttattttgatccctgggattaatatcctaccattactgacaac

SEQ ID NO: 83222 - DNA, 600 bp, Chicken  19866894378955_2
aaagacaagaccatatttgtcatgatacaaaaaaagtctcagtgctgcccaaatctgtttgtcacacaacttagtgatttcagtgagaacactgcaaacgtgcttgttatcttgaattcagcatgagttaatactctcatttacctcagccaaactacaatatgccacaaatgcacaaatttagtatatacaaaatcagggaagaaaacaaaccatccgtcttttttttycctgcctgcatggtctcttctgagccttctgcttcagtagcaactgcctgctgacattgttttcctgggyaaaaaacaagtaccagccatgacacaaagcttagtgattgaataaatacacatataaaatactaaagcaagccgatcagctatagctttaattagctttgccamaaagtaaaacagagtttaaatacatgtagagcaattgtattggtctactgtaggctgatgatgcatatctgctatgcaagtagttattttgatccctgggattaatatcctaccattactgacaacactcacactggaaatgaaatacactcaaagcaggtttgcttccaggaattttagaagtacagccctttgg

SEQ ID NO: 83223 - DNA, 600 bp, Chicken  19866894378955_3
tgttatcttgaattcagcatgagttaatactctcatttacctcagccaaactacaatatgccacaaatgcacaaatttagtatatacaaaatcagggaagaaaacaaaccatccgtcttttttttycctgcctgcatggtctcttctgagccttctgcttcagtagcaactgcctgctgacattgttttcctgggaaaaaaacaagtaccagccatgacacaaagcttagtgattgaataaatacacatataaaatactaaagcaagccgatcagctatagctttaattagctttgccamaaagtaaaacagagtttaaatacatgtagagcaattgtattggtctactgtaggctgatgatgcatatctgctatgcaagtagttattttgatccctgggattaatatcctaccattactgacaacactcacactggaaatgaaatacactcaaagcaggtttgcttccaggaattttagaagtacagccctttggtttgggctgaagggtttgaattttccatggctgtacttctcagtcattttatcccatgcctcactcattgtgaaatagcacctctttctgccacattcagcctg

SEQ ID NO: 83224 - DNA, 600 bp, Chicken  19866894378961_1
aatcctgcaactccaggcacattcatgccattcccagcagaggatctgagacagccttgaatgaggatgcacaagcactctaattttcaccaaccactcaaaacattccctacttgcaatagtttaaaggaggtggtatgtctgcacaggacactacatctaaatcatagtgcaacttctccagacttaagagaatgcatcacaagccagatcttcaagtcttctcatagccactgtttctaaagttacacattcagagcaaaggcagtcatttgctaaaatcatcagctgatcctagaygaagcttcaaatacaaactggatttgcaaacctggcattctgcagagattctcagacatgtttatcaarcctaaaacagttatgttcctatttctgaagagggaaaaaaatctgtgtaaattccaggccattgctrtttcacagtcccctaaataagcatcagaaattttccattgcaggttaaacttcctggtcataaatctgactccagagtgcttccacatctttttatagttctgtcctmcagtaacaagaagcagattatccagatgaacttattccatagtgtcacactaacac

SEQ ID NO: 83225 - DNA, 600 bp, Chicken  19866894378961_2
cacaagcactctaattttcaccaaccactcaaaacattccctacttgcaatagtttaaaggaggtggtatgtctgcacaggacactacatctaaatcatagtgcaacttctccagacttaagagaatgcatcacaagccagatcttcaagtcttctcatagccactgtttctaaagttacacattcagagcaaaggcagtcatttgctaaaatcatcagctgatcctagaygaagcttcaaatacaaactggatttgcaaacctggcattctgcagagattctcagacatgtttatcaarcctaaaacagttatgttcctatttctgaagagggaaaaaaatctgtgtaaattccaggccattgctrtttcacagtcccctaaataagcatcagaaattttccattgcaggttaaacttcctggtcataaatctgactccagagtgcttccacatctttttatagttctgtcctmcagtaacaagaagcagattatccagatgaacttattccatagtgtcacactaacacagcctgagaagacacaggaaaaaggatactacttctaaccaactgagtctcacattcttgtaacttcct

SEQ ID NO: 83226 - DNA, 600 bp, Chicken  19866894378961_3
tatgtctgcacaggacactacatctaaatcatagtgcaacttctccagacttaagagaatgcatcacaagccagatcttcaagtcttctcatagccactgtttctaaagttacacattcagagcaaaggcagtcatttgctaaaatcatcagctgatcctagaygaagcttcaaatacaaactggatttgcaaacctggcattctgcagagattctcagacatgtttatcaarcctaaaacagttatgttcctatttctgaagagggaaaaaaatctgtgtaaattccaggccattgctrtttcacagtcccctaaataagcatcagaaattttccattgcaggttaaacttcctggtcataaatctgactccagagtgcttccacatctttttatagttctgtcctmcagtaacaagaagcagattatccagatgaacttattccatagtgtcacactaacacagcctgagaagacacaggaaaaaggatactacttctaaccaactgagtctcacattcttgtaacttcctgtttattcaaaaggaacattacttctagtgaaataaccacagctgaaaaatctgtgaacttgtgtgt

SEQ ID NO: 83227 - DNA, 600 bp, Chicken  19866894378961_4
gttacacattcagagcaaaggcagtcatttgctaaaatcatcagctgatcctagaygaagcttcaaatacaaactggatttgcaaacctggcattctgcagagattctcagacatgtttatcaarcctaaaacagttatgttcctatttctgaagagggaaaaaaatctgtgtaaattccaggccattgctrtttcacagtcccctaaataagcatcagaaattttccattgcaggttaaacttcctggtcataaatctgactccagagtgcttccacatctttttatagttctgtcctmcagtaacaagaagcagattatccagatgaacttattccatagtgtcacactaacacagcctgagaagacacaggaaaaaggatactacttctaaccaactgagtctcacattcttgtaacttcctgtttattcaaaaggaacattacttctagtgaaataaccacagctgaaaaatctgtgaacttgtgtgttactgacaggccactgtaagcaaacacgaggtctgatacaatcattattcaccgcaacatgctgtattttacttcctcagttccagcagtagcttacttcagtttgaa

SEQ ID NO: 83228 - DNA, 600 bp, Chicken  19866894378961_5
ccatagtgtcacactaacacagcctgagaagacacaggaaaaaggatactacttctaaccaactgagtctcacattcttgtaacttcctgtttattcaaaaggaacattacttctagtgaaataaccacagctgaaaaatctgtgaacttgtgtgttactgacaggccactgtaagcaaacacgaggtctgatacaatcattattcaccgcaacatgctgtattttacttcctcagttccagcagtagcttacttcagtttgaatacaaaaacagagtaatacaatacttacaaaaaccwgctgtaaaaatcaaacaggtactgaagacaaactgcccttacatttacttgctacagatgatgctatgggggaggtaggcctttttcatatggcaagttctactgttctcagagaagactgaagtaactgataagagctgaagccatgtaactctccatttctaccactggatgtgatggataccgtaagtgtgcgtaaatgcaaacacaaacagtaataagtgatacaaagtcttcatatatgaatgtgtgtatatatatattcatatatcatattcatatatgaatgtgtatatacac

SEQ ID NO: 83229 - DNA, 600 bp, Chicken  19866894378963_1
ttgaaaacaaaattaagtgttttatttttagacactgaggcagaggcataataaaatgctgtatttccgaaaaagtttttactgaatcctcaagattagttcacccactttaccctcagcatttcatattgcatattttctctaggaattcaacgtatttttcctgatgtgtaactgaaagctttattcagagaagaaacaaagggcttagaaaatgtcactgtttttgaatgtgtcctgagcttgcaaacttttttgcagcaaaaccaggattttcatgtcacagccataggtgtggcrtaagtacactggagagcagtacagaggctctcctgccatcacttgggcacttgtcccaacagagcacatgcctcccattcccaggctatggatgctgataatgtggacatccaagctgactgtcctgggcccataatggagatgtccaagtgcagacaaaatgaatattctccatattgtatttcagtgtccatggctaagaagtagatctgaggcatttagttttctttaatgcattaaaaatttktctaacttcatttttaaaggtgagcactttgacaagtctgagtctcagtgtag

SEQ ID NO: 83230 - DNA, 600 bp, Chicken  19866894378963_2
aaacttttttgcagcaaaaccaggattttcatgtcacagccataggtgtggcrtaagtacactggagagcagtacagaggctctcctgccatcacttgggcacttgtcccaacagagcacatgcctcccattcccaggctatggatgctgataatgtggacatccaagctgactgtcctgggcccataatggagatgtccaagtgcagacaaaatgaatattctccatattgtatttcagtgtccatggctaagaagtagatctgaggcatttagttttctttaatgcattaaaaatttktctaacttcatttttaaaggtgagcactttgacaagtctgagtctcagtgtagtgatttgcagtgagatgaaatggtactatgcataggcagctttcactcattgcagtggggttttataggccaaaatgcaacaaatctgatgatgttattgttaatagactgcaaaagatggctgagaagctgagttagctggtaatacccttggactagcccttggattaggagttgctgaatacagaaatgtaagtacgggaaaagaatcaccaagttgcaaaaaatctgtggagcacaacgattt

SEQ ID NO: 83231 - DNA, 599 bp, Chicken  19866894378965_1
  misc_feature (1)..(119): n is any nucleotide
nnnnnnnnnnnnnnnnnnnnnnnnnnnnnnnnnnnnnnnnnnnnnnnnnnnnnnnnnnnnnnnnnnnnnnnnnnnnnnnnnnnnnnnnnnnnnnnnnnnnnnnnnnnnnnnnnnnnnnnagaaaatggtttattggccccaaaggcccttttttcaaccagaatgggtagaagaggaatacattaactgaaagcttcagttaaagcctcaggctgcacatctctgtgcagaatattaatctgtatcaagagtaaccaaggtgtgggtgtgtgtagagagacaaagcagtgctgatagcaygggggggtggacttttcaagaactgtcagctttggtgtggaagtactcaaaatgcagctgcgctgttggtaggccaacatactctgtgcatccctaagagtagcaatcatataagaagcagttcatttctgtgcaaagacagagtgcctctgttgcacgtcctccagctgaattccacagtgcccttatctcttggcatcccagaagaaaagttgcagtgctaacgtaaaagcaaaacacaagctgcactaaaatggatactgtatagttctcaggctgacaaagacttcaagggaggg

SEQ ID NO: 83232 - DNA, 600 bp, Chicken  19866894378965_2
tggtaggccaacatactctgtgcatccctaagagtagcaatcatataagaagcagttcatttctgtgcaaagacagagtgcctctgttgcacgtcctccagctgaattccacagtgcccttatctcttggcatcccagaagaaaagttgcagtgctaacgtaaaagcaaaacacaagctgcactaaaatggatactgtatagttctcaggctgacaaagacttcaagggagggatgaagatgctgtagctttaggaaccagaagagtagatgcttctatattcatgtaagtcataaaagyttgtagtgataacgtattcctaagaygagacraaatctgtccatatctckgtcaataaggtttccagtttaagtttagtaggatgtgtttccctgcacgttttttttttttaagtggtttcaaatgttcattttcttcctcttgcttctcaggttattggaggagctggttcaaaaggagagagaatttcaagtccttttacatcaagctatagaagaaaaagatcaggagatcaaaaacctccggcttaggtcacagccaataggtgagaagcaatttcagagaaagatttcacactgg

SEQ ID NO: 83233 - DNA, 600 bp, Chicken  19866894378965_3
cctaagagtagcaatcatataagaagcagttcatttctgtgcaaagacagagtgcctctgttgcacgtcctccagctgaattccacagtgcccttatctcttggcatcccagaagaaaagttgcagtgctaacgtaaaagcaaaacacaagctgcactaaaatggatactgtatagttctcaggctgacaaagacttcaagggagggatgaagatgctgtagctttaggaaccagaagagtagatgcttctatattcatgtaagtcataaaagtttgtagtgataacgtattcctaagaygagacraaatctgtccatatctckgtcaataaggtttccagtttaagtttagtaggatgtgtttccctgcacgttttttttttttaagtggtttcaaatgttcattttcttcctcttgcttctcaggttattggaggagctggttcaaaaggagagagaatttcaagtccttttacatcaagctatagaagaaaaagatcaggagatcaaaaacctccggcttaggtcacagccaataggtgagaagcaatttcagagaaagatttcacactggctacagatgaaaacagacagacttgt

SEQ ID NO: 83234 - DNA, 600 bp, Chicken  19866894378965_4
agtagcaatcatataagaagcagttcatttctgtgcaaagacagagtgcctctgttgcacgtcctccagctgaattccacagtgcccttatctcttggcatcccagaagaaaagttgcagtgctaacgtaaaagcaaaacacaagctgcactaaaatggatactgtatagttctcaggctgacaaagacttcaagggagggatgaagatgctgtagctttaggaaccagaagagtagatgcttctatattcatgtaagtcataaaagtttgtagtgataacgtattcctaagaygagacraaatctgtccatatctckgtcaataaggtttccagtttaagtttagtaggatgtgtttccctgcacgttttttttttttaagtggtttcaaatgttcattttcttcctcttgcttctcaggttattggaggagctggttcaaaaggagagagaatttcaagtccttttacatcaagctatagaagaaaaagatcaggagatcaaaaacctccggcttaggtcacagccaataggtgagaagcaatttcagagaaagatttcacactggctacagatgaaaacagacagacttgtttttat

SEQ ID NO: 83235 - DNA, 600 bp, Chicken  19866894378965_5
agcagttcatttctgtgcaaagacagagtgcctctgttgcacgtcctccagctgaattccacagtgcccttatctcttggcatcccagaagaaaagttgcagtgctaacgtaaaagcaaaacacaagctgcactaaaatggatactgtatagttctcaggctgacaaagacttcaagggagggatgaagatgctgtagctttaggaaccagaagagtagatgcttctatattcatgtaagtcataaaagtttgtagtgataacgtattcctaagaygagacraaatctgtccatatctckgtcaataaggtttccagtttaagtttagtaggatgtgtttccctgcacgttttttttttttaagtggtttcaaatgttcattttcttcctcttgcttctcaggttattggaggagctggttcaaaaggagagagaatttcaagtccttttacatcaagctatagaagaaaaagatcaggagatcaaaaacctccggcttaggtcacagccaataggtgagaagcaatttcagagaaagatttcacactggctacagatgaaaacagacagacttgtttttattgagccagcctcagcaaa

SEQ ID NO: 83236 - DNA, 600 bp, Chicken  19866894378967_1
ctgcacaggtgaggagctgcaggcagtgttctataggacagctctacaaaggcactcattttttttctacctaccctttttttatcaaaacagtaggtgtgagtacagcaatcctgcacgatcttgaatggaaaacctacttccactgtgaaagtcttgtgatttttcagtgcctcttaatataacttttccacagtaacatctataaaataaattcttgctttatacagtaatattcttacaaagggaagtggataaaattagatggacccttgtcctgctgccacaaggtgctttgaygctcctcagagttttcaagggcacacagcgtggccctaagcaagaggcagatgctgtgtcccggcataaaaaaatctgtacgcaaactggggtaatatggaaaggatggacagaccacaaggkgaaaaactgactgtatcactaggatgaaagagtgcggtcactggtttggaggctgcctgataaccagtttagagtggagctcctcagaggtcagtattggcgtaagtcttgtttgacgtcttcatcaatgacttggaagatgagatagagcaagtttgcaggtgatgtcaggaggta

SEQ ID NO: 83237 - DNA, 600 bp, Chicken  19866894378967_2
ttgaatggaaaacctacttccactgtgaaagtcttgtgatttttcagtgcctcttaatataacttttccacagtaacatctataaaataaattcttgctttatacagtaatattcttacaaagggaagtggataaaattagatggacccttgtcctgctgccacaaggtgctttgaygctcctcagagttttcaagggcacacagcgtggccctaagcaagaggcagatgctgtgtcccggcataaaaaaatctgtacgcaaactggggtaatatggaaaggatggacagaccacaaggkgaaaaactgactgtatcactaggatgaaagagtgcggtcactggtttggaggctgcctgataaccagtttagagtggagctcctcagaggtcagtattggcgtaagtcttgtttgacgtcttcatcaatgacttggaagatgagatagagcaagtttgcaggtgatgtcaggaggtaccactgccattaaacagagctattgagaggggatccaattactgggtttcttttaacaggaagaggatactctgaaggtgtaaattattacccaaggaacgcaggaaccatcctgctaacaaa

SEQ ID NO: 83238 - DNA, 600 bp, Chicken  19866894378970_1
tgacagcttagaattcagttgctggctatcacaattagctgtgtgtaattacttcatccctttgaaaaactagaggaaatgccaattacttctcttccaagtaggaggctgtggcatcttaatcactaacaaagcatggggagtgtacagaaataggggagctgaagcaataaaagtaaattttatggatctggtgtcccacatactttccaaagagccgagataggagaataaatcacttcacagttgcagagagaaggaaatctcataggctattgcttcttcaatccatgagaagakaaatgctttcacttttgctttgagktaatgataaaggtagagtttccttgttctcttggcagcttaaggacatgaacctacacagtctttgctatgtggtgcttggccttcagtgctccaagcataatgcccaggagcacaatcaatacagctggaaaactgacaaaatttttgtgcagttcaagtagtctaacaggttctgctaaaccagtacaggtgatacatggcaggtggtttgccaaattttggtccattcaattactgacaagatctttggtgaaagacagcagcaaagtggta

SEQ ID NO: 83239 - DNA, 600 bp, Chicken  19866894378970_2
ctatcacaattagctgtgtgtaattacttcatccctttgaaaaactagaggaaatgccaattacttctcttccaagtaggaggctgtggcatcttaatcactaacaaagcatggggagtgtacagaaataggggagctgaagcaataaaagtaaattttatggatctggtgtcccacatactttccaaagagccgagataggagaataaatcacttcacagttgcagagagaaggaaatctcataggctattgcttcttcaatccatgagaagakaaatgctttcacttttgctttgagktaatgataaaggtagagtttccttgttctcttggcagcttaaggacatgaacctacacagtctttgctatgtggtgcttggccttcagtgctccaagcataatgcccaggagcacaatcaatacagctggaaaactgacaaaatttttgtgcagttcaagtagtctaacaggttctgctaaaccagtacaggtgatacatggcaggtggtttgccaaattttggtccattcaattactgacaagatctttggtgaaagacagcagcaaagtggtacaaagcagtgatactgtggagcctg

SEQ ID NO: 83240 - DNA, 600 bp, Chicken  19866894378971_1
tggtccaacagacctgcctgctaggtgtaaaatgaccgaacccagtgggtgttggggagaaaaaaatgcttaaagttgaatacttcatcatacagttttgtcatttcagctttaacacgtcagctgcaataactgtggtggtttgctctgtgtttgtgtaatttttctttcagcaaaatgcaattttcgtaacctcattgctgcctccgctcgttcacagtggaatccagtgcttgcaggtcaggctgatgtagcagctcagtggatctcctctgtattttctgttccttgcaaacacastgcctgattgtagccacttagagtgccttaaaagtcaatgggaactctgctgtgacttaagaggtttaattgcaaactcttgcatgctctatttattgtcatgtaaatctcatctaataagcaagctaagcaacctcttttgttcatttctattcatctgcaggctgaattagtgttccttatacttactgatagttttatgtgtgtttgcatctctatcagtacctctgttggtatagcagtaaacaaaatagggaagttggaatagtcaaagtgaagttggatacagtcacagttcat

SEQ ID NO: 83241 - DNA, 600 bp, Chicken  19866894378972_1
ttttcccatgcagtagcctcctgggcacctcccctgtgccactgctgggctcccacagcgctgctccatagcggcatcctctccttgggcacaggtcacagcagggtgcccagcattctccatggccccgctgccagcagctccttcccccaacgctgcatcctgccccgcagcgccctcggctgcaggaggatggggcggctgcctgccctgcacgctgggcatggcagcaagcagcgggcagacgggctgcttgcctccacgtagaatggatgagcacggatctgcttcgtcctctcygcacagcccacgtggggagcagctcgccttgccaagccctggctcggcgcctgccctggtgctgcacagagcgggcacactgtccccttgctcaatgtcactgaggcactgctcctccaccgtagccagggcagccggctcttggttgcattcctccacygcctgcaagaactcagcccagtcgcggtcgttcagatggatgctgtactcgaagttatccatgcctgcagcagcacagcaaggggagggggccggagagagcagggagtgaggagggggcatggcatcactagcagagca

SEQ ID NO: 83242 - DNA, 600 bp, Chicken  19866894378972_2
tcctgccccgcagcgccctcggctgcaggaggatggggcggctgcctgccctgcacgctgggcatggcagcaagcagcgggcagacgggctgcttgcctccacgtagaatggatgagcacggatctgcttcgtcctctcygcacagcccacgtggggagcagctcgccttgccaagccctggctcggcgcctgccctggtgctgcacagagcgggcacactgtccccttgctcaatgtcactgaggcactgctcctccaccgtagccagggcagccggctcttggttgcattcctccacygcctgcaagaactcagcccagtcgcggtcgttcagatggatgctgtactcgaagttatccatgcctgcagcagcacagcaaggggagggggccggagagagcagggagtgaggagggggcatggcatcactagcagagcatgccccctggccatcggccctgctcattctggggctggaatcagtgggatctcatcccatgaggatggctgatggcagaccccacaggtggtgctgagcttggtatggccatggccactccattcggggctgctctgggtattccctctgcacagcacta

SEQ ID NO: 83243 - DNA, 600 bp, Chicken  19866894378972_3
attcactgctaaaaatagtccccgtgtcacctgagctgtgggggagggcagctccttatttagaagctgctggggcagaggcgaggtggcgggcggcacgtcactgccctgtgctctatggggtccatgggattgtagccccatgggatgggcatcacagccccacggggtgggtatcacagccccacaggatgggtattacagccccacgggcatcgcagccccatgggatggcccatagatggagagcatcagcgggatcatagagtgcgcacaggggaactgagcggccacgggacrgcaaccagaaccagaaatagccccagcagccagaaatagctgggaactgctgccctgcccctgctgcggccccgttctgcakggaggaagctcccctgcgcggctgccgtcacgcactgcacggccacgcggcagcacgcggccctatgcatcctgcaggctgacgcacacgcggagagggccagtgggaacacggcggagggaagagggctgctgcctgcccgccctatctgccgtctgatctggctgcaccccgctccccctgctccccgcacgtgctcgcagacgcagaagggaaac

SEQ ID NO: 83244 - DNA, 600 bp, Chicken  19866894378972_4
gaggtggcgggcggcacgtcactgccctgtgctctatggggtccatgggattgtagccccatgggatgggcatcacagccccacggggtgggtatcacagccccacaggatgggtattacagccccacgggcatcgcagccccatgggatggcccatagatggagagcatcagcgggatcatagagtgcgcacaggggaactgagcggccacgggacrgcaaccagaaccagaaatagccccagcagccagaaatagctgggaactgctgccctgcccctgctgcggccccgttctgcakggaggaagctcccctgcgcggctgccgtcacgcactgcacggccacgcggcagcacgcggccctatgcatcctgcaggctgacgcacacgcggagagggccagtgggaacacggcggagggaagagggctgctgcctgcccgccctatctgccgtctgatctggctgcaccccgctccccctgctccccgcacgtgctcgcagacgcagaagggaaaccagccggcttcctccccttggctgcgcccgcttccttccctttgagccctccaccccgcctcgcagaccgcagcggggaaca

SEQ ID NO: 83245 - DNA, 599 bp, Chicken  19866894378986_1
  misc_feature (1)..(216): n is any nucleotide
nnnnnnnnnnnnnnnnnnnnnnnnnnnnnnnnnnnnnnnnnnnnnnnnnnnnnnnnnnnnnnnnnnnnnnnnnnnnnnnnnnnnnnnnnnnnnnnnnnnnnnnnnnnnnnnnnnnnnnnnnnnnnnnnnnnnnnnnnnnnnnnnnnnnnnnnnnnnnnnnnnnnnnnnnnnnnnnnnnnnnnnnnnnnnnnnnnnnnnnnnnnnnnnnnnnnnnnntctttgttcaattatgaaccctctagacctggtccagctgcaacacgttgttatggacttacctgggatcccagagccccagaytgcatctcaggaacaaacagttatctgaaagcacttgcatttgctgaatgggaagctctttgaatgggtagcttcatccccaggaaccaggagctcctgggctggggtctgcagctggagcagagattgatgccccatgtaagcctgcccaggatgccatgcaagggctgcattctgccgcagggaggttctgtgggaatgctgaggggtccactgtctgcaggaaggtctgtttaaaacacacctgctaatctcagtgcacgtgtcatggcccaccgctgcacacggcactgtcaccc

SEQ ID NO: 83246 - DNA, 600 bp, Chicken  19866894378995_1
atcctgtggctctgaggctttctgacttgtggttttgcactgttgcagccaaatatagttaaagctttcctgaggtctgctgagtgaagggcagcgctgtgccatggagaaacgactaaggaaagcaggctgcaagaagggatgaggtggtggctggggtctctacccatccacacactgatctgtggctgtgggtgcattgtggtcttgtcccgcgcgtcagtcattgcacaggccacagtgttgagaaatcaagttcattacaaactacggggagagcggttgtaagtgtcacggagycaaatggagatagccagttcccaygtgaggtggaaggggctgggatgtgagaggaagagaggcaggcaggggctgctgacttatcccagcagcccttgatrgggaccagtttctacagcaatgctttgagggagaatgcacaagtgtccattttcatacagaggatctgactgtgtatgtgcagcgacmaaggcagagcactctgcaaatccactatttggggctctgcctgcatttcccagcagagagcagcagagactcgtagctgcttgcgggggctccgagagcatcctccaagac

SEQ ID NO: 83247 - DNA, 600 bp, Chicken  19866894378995_2
acttgtggttttgcactgttgcagccaaatatagttaaagctttcctgaggtctgctgagtgaagggcagcgctgtgccatggagaaacgactaaggaaagcaggctgcaagaagggatgaggtggtggctggggtctctacccatccacacactgatctgtggctgtgggtgcattgtggtcttgtcccgcgcgtcagtcattgcacaggccacagtgttgagaaatcaagttcattacaaactacggggagagcggttgtaagtgtcacggagycaaatggagatagccagttcccaygtgaggtggaaggggctgggatgtgagaggaagagaggcaggcaggggctgctgacttatcccagcagcccttgatrgggaccagtttctacagcaatgctttgagggagaatgcacaagtgtccattttcatacagaggatctgactgtgtatgtgcagcgacmaaggcagagcactctgcaaatccactatttggggctctgcctgcatttcccagcagagagcagcagagactcgtagctgcttgcgggggctccgagagcatcctccaagacttcttgtactttcttcttcaaaac

SEQ ID NO: 83248 - DNA, 600 bp, Chicken  19866894378995_3
ccatggagaaacgactaaggaaagcaggctgcaagaagggatgaggtggtggctggggtctctacccatccacacactgatctgtggctgtgggtgcattgtggtcttgtcccgcgcgtcagtcattgcacaggccacagtgttgagaaatcaagttcattacaaactacggggagagcggttgtaagtgtcacggagycaaatggagatagccagttcccaygtgaggtggaaggggctgggatgtgagaggaagagaggcaggcaggggctgctgacttatcccagcagcccttgatrgggaccagtttctacagcaatgctttgagggagaatgcacaagtgtccattttcatacagaggatctgactgtgtatgtgcagcgacmaaggcagagcactctgcaaatccactatttggggctctgcctgcatttcccagcagagagcagcagagactcgtagctgcttgcgggggctccgagagcatcctccaagacttcttgtactttcttcttcaaaacacaacagtcaaccttcattgagcttgcaggcacgtcagacctatcaagagcactggtgtgaacaaacagaaaacatg

SEQ ID NO: 83249 - DNA, 600 bp, Chicken  19866894378995_4
tgtgggtgcattgtggtcttgtcccgcgcgtcagtcattgcacaggccacagtgttgagaaatcaagttcattacaaactacggggagagcggttgtaagtgtcacggagycaaatggagatagccagttcccaygtgaggtggaaggggctgggatgtgagaggaagagaggcaggcaggggctgctgacttatcccagcagcccttgatrgggaccagtttctacagcaatgctttgagggagaatgcacaagtgtccattttcatacagaggatctgactgtgtatgtgcagcgacmaaggcagagcactctgcaaatccactatttggggctctgcctgcatttcccagcagagagcagcagagactcgtagctgcttgcgggggctccgagagcatcctccaagacttcttgtactttcttcttcaaaacacaacagtcaaccttcattgagcttgcaggcacgtcagacctatcaagagcactggtgtgaacaaacagaaaacatgtgctagcaatcccataaatttggtgctttcatgaaaatctgggttttcacagagccagagtatccagagccaaaaggggatacctcaa

SEQ ID NO: 83250 - DNA, 600 bp, Chicken  19866894379000_1
caagcagatatcaacaacttctgcaccctcaaaaaggaagcaggcaaagaataaaacatcttctcacagcgcaccttcagggaagtgtgtgttcaggtaataaatagtaaaatatacatgattggccaaagttcaaagagaactaatcaagaaatcataatcacagcaaaaggtcgcatttaatttcatttccaattaaaaacgcattggtttatttttatacaggaaaaaattggtctgaaaaattgcaaactcagtcagaggatttgatttcaaacttcagcacagacacagcttcayagcaaaatgaggtgttttgtatttaagaagctctctctatgaaagctgagcacagagtgggtgctatgaatccaaaagtatctgaacacgccaacatcctttttgcactaacagccaatgactataaatgaaatagatgggagaggtayaggcacattttgaaaagagctttccccttgcatccttgtttactggaagatttmagaaataacgcctccgttataattaacaattcagctatttttaacttggataaycttttatttagaatgatggaaacatcgaagatgctggacaaac

SEQ ID NO: 83251 - DNA, 600 bp, Chicken  19866894379000_2
agaaatcataatcacagcaaaaggtcgcatttaatttcatttccaattaaaaacgcattggtttatttttatacaggaaaaaattggtctgaaaaattgcaaactcagtcagaggatttgatttcaaacttcagcacagacacagcttcayagcaaaatgaggtgttttgtatttaagaagctctctctatgaaagctgagcacagagtgggtgctatgaatccaaaagtatctgaacacgccaacatcctttttgcactaacagccaatgactataaatgaaatagatgggagaggtayaggcacattttgaaaagagctttccccttgcatccttgtttactggaagatttmagaaataacgcctccgttataattaacaattcagctatttttaacttggataaycttttatttagaatgatggaaacatcgaagatgctggacaaacattctctggaaaaccaagaatgcagaatgtccctttatcaaagggtgacagcagaacgaggctcattttatactttcaaggatttttgtgccatatgctgacaatattatattttaataattaattgttcatcaaaggaaaagatgaag

SEQ ID NO: 83252 - DNA, 600 bp, Chicken  19866894379000_3
gcattggtttatttttatacaggaaaaaattggtctgaaaaattgcaaactcagtcagaggatttgatttcaaacttcagcacagacacagcttcayagcaaaatgaggtgttttgtatttaagaagctctctctatgaaagctgagcacagagtgggtgctatgaatccaaaagtatctgaacacgccaacatcctttttgcactaacagccaatgactataaatgaaatagatgggagaggtayaggcacattttgaaaagagctttccccttgcatccttgtttactggaagatttmagaaataacgcctccgttataattaacaattcagctatttttaacttggataaycttttatttagaatgatggaaacatcgaagatgctggacaaacattctctggaaaaccaagaatgcagaatgtccctttatcaaagggtgacagcagaacgaggctcattttatactttcaaggatttttgtgccatatgctgacaatattatattttaataattaattgttcatcaaaggaaaagatgaagaacagggatgctaaattcaaagttattcaaattgcaaaaatgaataatgcatga

SEQ ID NO: 83253 - DNA, 600 bp, Chicken  19866894379000_4
tcagaggatttgatttcaaacttcagcacagacacagcttcayagcaaaatgaggtgttttgtatttaagaagctctctctatgaaagctgagcacagagtgggtgctatgaatccaaaagtatctgaacacgccaacatcctttttgcactaacagccaatgactataaatgaaatagatgggagaggtayaggcacattttgaaaagagctttccccttgcatccttgtttactggaagatttmagaaataacgcctccgttataattaacaattcagctatttttaacttggataaycttttatttagaatgatggaaacatcgaagatgctggacaaacattctctggaaaaccaagaatgcagaatgtccctttatcaaagggtgacagcagaacgaggctcattttatactttcaaggatttttgtgccatatgctgacaatattatattttaataattaattgttcatcaaaggaaaagatgaagaacagggatgctaaattcaaagttattcaaattgcaaaaatgaataatgcatgacttttatattaaatacacaccgtattaagtagtctacatttcatccaactctgt

SEQ ID NO: 83254 - DNA, 600 bp, Chicken  19866894379001_1
tacatcgtaatggaagtatctcaaacttcttatcttggttcccagacattggtagaagatttctcatttcagttggctcttatggcattgcatctttagtcttccaagacttctagtcttatccttgatccagggcaacactgaatctattttggatacacagcaaacttttcaaaactatctgcaggtcaaggtgtagtctggctgtggtaagcctttttgttttgttgtttaaactctatctccttataatgggtaagtcacctgctcagcaattccgtcagcagatctgtccctgcwcatgctcttcagccttttacagtggcaacagaacrttaaacggaatagacagaagcaattgtatagttcattttctgccagaaaaggcaactttgaacaatttcacattaaatttgtctttacagtatcaagccatctttaactttgttcagtccactgtgaaaacagatcttcatctcgaaacactactgtcctgtgtgctttaacaaaatacaggatcatgcactctgcagcttttgacttggaatacttcagacttatttmttcaaaaactagaaagtcctgttttgtgtagaaacc

SEQ ID NO: 83255 - DNA, 600 bp, Chicken  19866894379001_2
tggttcccagacattggtagaagatttctcatttcagttggctcttatggcattgcatctttagtcttccaagacttctagtcttatccttgatccagggcaacactgaatctattttggatacacagcaaacttttcaaaactatctgcaggtcaaggtgtagtctggctgtggtaagcctttttgttttgttgtttaaactctatctccttataatgggtaagtcacctgctcagcaattccgtcagcagatctgtccctgcwcatgctcttcagccttttacagtggcaacagaacrttaaacggaatagacagaagcaattgtatagttcattttctgccagaaaaggcaactttgaacaatttcacattaaatttgtctttacagtatcaagccatctttaactttgttcagtccactgtgaaaacagatcttcatctcgaaacactactgtcctgtgtgctttaacaaaatacaggatcatgcactctgcagcttttgacttggaatacttcagacttatttmttcaaaaactagaaagtcctgttttgtgtagaaaccatcttctcataaagctgtgtttaactggagacctc

SEQ ID NO: 83256 - DNA, 600 bp, Chicken  19866894379001_3
ctgctcagcaattccgtcagcagatctgtccctgcwcatgctcttcagccttttacagtggcaacagaacrttaaacggaatagacagaagcaattgtatagttcattttctgccagaaaaggcaactttgaacaatttcacattaaatttgtctttacagtatcaagccatctttaactttgttcagtccactgtgaaaacagatcttcatctcgaaacactactgtcctgtgtgctttaacaaaatacaggatcatgcactctgcagcttttgacttggaatacttcagacttatttmttcaaaaactagaaagtcctgttttgtgtagaaaccatcttctcataaagctgtgtttaactggagacctctattccatcgagaactgctgaactccttggtgttgctgctataacatgcatgtttctagaacagaatcattcaaacatgttacacatttctcagaaaatatttggaagtctatgacaaaacatccttagtgaatagagtgtcatgaggcaaaaaggaacaccagaaaacaagacactaaagaggaccgagcacgggagaggctgcaacagaagaagtatcacaatccaa

SEQ ID NO: 83257 - DNA, 600 bp, Chicken  19866894379007_1
atatgctaaggaaagaataacaatcccttccatgaagggaggatgttctctaggcattggatggacaaaacagatgaccaagagggaagtagttactttgtgggtagggtttagcaggacaccataaagctaacgatacaactgctggtgcaaataccaatgccatcagtagcaaagctccttttataggaaagaaactgcaatgactttctgtttattaactaaaagaagggtttgctgctgttgtttttttcccttgaacacagagatctgcagaagagatgtatcagcccacttatwgtttgaattgaagagaaatttgagcttgatagtgatagaagaaaaaatcaacaatggctaatggtttctagctttaattctctgctaggtgcttgtattggcaaaggctgtccacccttggagraaagtgggtggtgatttgcatggaaaagaaggaggaagataaagttgggacataaagtagaaaaggaaattgccattaattggagaaaagtctggattcatcccagttagtttcaagtacttgaagcaggtgcctgcagtagaagatcaggcactgtagagaaaagcagctcggtg

SEQ ID NO: 83258 - DNA, 600 bp, Chicken  19866894379007_2
taaagctaacgatacaactgctggtgcaaataccaatgccatcagtagcaaagctccttttataggaaagaaactgcaatgactttctgtttattaactaaaagaagggtttgctgctgttgtttttttcccttgaacacagagatctgcagaagagatgtatcagcccacttatwgtttgaattgaagagaaatttgagcttgatagtgatagaagaaaaaatcaacaatggctaatggtttctagctttaattctctgctaggtgcttgtattggcaaaggctgtccacccttggagraaagtgggtggtgatttgcatggaaaagaaggaggaagataaagttgggacataaagtagaaaaggaaattgccattaattggagaaaagtctggattcatcccagttagtttcaagtacttgaagcaggtgcctgcagtagaagatcaggcactgtagagaaaagcagctcggtggggctcttccatgcagtggaaataccccaggagctcctctgtgcacaggggagagaggaatgagtgtccctgggcagttggtgtgcttttgggttcgctgcccctctgccttttgtgctgaccc

SEQ ID NO: 83259 - DNA, 600 bp, Chicken  19866894379010_1
gtgagaataggcaggggatggaggtggaggcaggtaacacttgggtggatttatagtggatctgtaaaggatggacacagatgcacaagatgactgggactagataatttatagggtctggaaggggaggcaggggataaatgatggatttataggagatgggatgggggcagggaacatctgagggaatcgataggcaatgtatagtggatccaatggtacacctggtggattctacagaagaatggaggagaggaagagaaagactggggagatgtgtaggagatgtacaggagatcmaagccattaaatcccttccccacccagactctcatctctccgtatccagaggctgcgggcatcgatgacaaagaagatgccgagggcaaagatgaggacagcagcccagtccctcaccactgccaccaccaggttcccacgggacaccaactcagcacctgtggrgtacaggtacttgggtgtgttcatccccagcatcacctccatggggaagggatgtgatgacactgccacccatgggtggcgctggggacaaacacatggggggcttgtacctacctgggggtgcaggtgtgggtg

SEQ ID NO: 83260 - DNA, 569 bp, Chicken  19866894379010_2
gggggcagggaacatctgagggaatcgataggcaatgtatagtggatccaatggtacacctggtggattctacagaagaatggaggagaggaagagaaagactggggagatgtgtaggagatgtacaggagatcmaagccattaaatcccttccccacccagactctcatctctccgtatccagaggctgcgggcatcgatgacaaagaagatgccgagggcaaagatgaggacagcagcccagtccctcaccactgccaccaccaggttcccacgggacaccaactcagcacctgtggrgtacaggtacttgggtgtgttcatccccagcatcacctccatggggaagggatgtgatgacactgccacccatgggtggcgctggggacaaacacatggggggcttgtacctacctgggggtgcaggtgtgggtgtcacctccagcgttacgctgtccccaaggggtgaggacagaaaggggtggttcttggggtgataggagcacctgtaggtgccactgtcagctggggtcaccccaaagagggtgaaggagactgcgccaacatca

SEQ ID NO: 83261 - DNA, 600 bp, Chicken  19866894379027_1
cagaacgagcaggagccaaatctgaacgcaacactatttaagaattgcaaagcaatttaagaagctgactcttggctgaatttacactgggaaattcatgtatacacattatcttttggcaaagaaatagccccgtgttgagatactaatatttttattcatgaggagagccttaatccatgagaagatgactatgctgtgttttggatttgtttaaaaagatagtcaggagcacgtttcttttacacagataacttatgaaatatataaatatgaaattccacaatgaaaagattatcwtcttctcttttcatgcaatatcaaaataagaggaagaaattaaaatcctgttacttaactgcctaaaatgaaattctattttcatatatttcctggttatgaaaatctcactaacaatccagatagaaacccaaattcctgctaatatattcagaagattcaagactgtatcacgcagctaggtgtttctcaaaaggcagctcaattttgacttttcaagtcttctagaaacagaaatgtaactccttacattatttagtatattttagttttagcctagggttctgaaaggtgtagcaa

SEQ ID NO: 83262 - DNA, 600 bp, Chicken  19866894379027_2
cttaactgcctaaaatgaaattctattttcatatatttcctggttatgaaaatctcactaacaatccagatagaaacccaaattcctgctaatatattcagaagattcaagactgtatcacgcagctaggtgtttctcaaaaggcagctcaattttgacttttcaagtcttctagaaacagaaatgtaactccttacattatttagtatattttagttttagcctagggttctgaaaggtgtagcaaatttagatgcggaagagcctttcacacactttccttcatttttctaatgaacrgtctcaattaaatgtcttttattgaccagccccagcagtcaaccccattctctattaataattttgctacagtttctgcagtgtcattacattccattaattgcccaatttataagagtagatcctctaaaatactgcaaacctaacagctacctaattattaatccaaagctaaattctactgttaaatcttgtcaaaacatttattccactgtaaatatttgctatggccagtaatccagctgctgatcgttagttcctcatcccactattaattgttttggcccactaagacaaagt

SEQ ID NO: 83263 - DNA, 599 bp, Chicken  19866894379029_1
  misc_feature (1)..(141): n is any nucleotide
nnnnnnnnnnnnnnnnnnnnnnnnnnnnnnnnnnnnnnnnnnnnnnnnnnnnnnnnnnnnnnnnnnnnnnnnnnnnnnnnnnnnnnnnnnnnnnnnnnnnnnnnnnnnnnnnnnnnnnnnnnnnnnnnnnnnnnnnnnnnnacgtgttatagcctcatcgttatcatttcctctagcaggaggacgtccacaatggttacaatgtcttgctcaccttctgctttttcaggacttcctgccctccttggtgtttgtgcatgcagtcttattgagggcatgggcactccagttccttggagmcactccactggacctctttcctcctcttctcttacatcgcctgcttcttctacttyaccctcctgctcttctcttacattgactgcttcctctactacagcctcctcctctttcttctgttctaactgagtggaaattcgtttcgttttccatcctcttacaggggcaacaaacattgattctggtgcctcctgcggttgatcaggttggtcagtcccgatgctcttactctccagctcggctcgaagtctatctcactcaattatgagagtgcttagttcagattcgagcttggcttg

SEQ ID NO: 83264 - DNA, 599 bp, Chicken  19866894379029_2
  misc_feature (1)..(85): n is any nucleotide
nnnnnnnnnnnnnnnnnnnnnnnnnnnnnnnnnnnnnnnnnnnnnnnnnnnnnnnnnnnnnnnnnnnnnnnnnnnnnnnnnnnnnacgtgttatagcctcatcgttatcatttcctctagcaggaggacgtccacaatggttacaatgtcttgctcaccttctgctttttcaggacttcctgccctccttggtgtttgtgcatgcagtcttattgagggcatgggcactccagttccttggagmcactccactggacctctttcctcctcttctcttacatcgcctgcttcttctacttyaccctcctgctcttctcttacattgactgcttcctctactacagcctcctcctctttcttctgttctaactgagtggaaattcgtttcgttttccatcctcttacaggggcaacaaacattgattctggtgcctcctgcggttgatcaggttggtcagtcccgatgctcttactctccagctcggctcgaagtctatctcactcaattatgagagtgcttagttcagattcgagcttggcttgatgagactgaattttggttatctcactttggagactgaattgtgcatgctggaggg

SEQ ID NO: 83265 - DNA, 402 bp, Chicken  19866894379029_3
tctatctcactcaattatgagagtgcttagttcagattcgagcttggcttgatgagactgaattttggttatctcactttggagactgaattgtgcatgctggagggcatctcgctcagttcggagtacatcccgttcagacttgagggagttcctctcggactggagtgtgtctcgctcagaccggagattctccttctcgccttggagattctctcgctcagccccggaagttatccttctcagcttggaaaccctttcgctcggcccagagactctccttctcggctaggaaaatcyttctctcaatttctagaattctttccttctctgggatagtattaaataaggcccgataagcattagccaggccccaaatcatttgtgcctcctcagatctgc

SEQ ID NO: 83266 - DNA, 600 bp, Chicken  19866894379047_1
ggaaaatgaaggatccaattcagcgctgcagtttctaaaacagtctcattagatcctgagcaaagctcatgcaagcagttctgcaaggagagactgaagtctcgagaggagcgaggggaaggatgaaggaacaaaagacagggatgctgtgcagggtttcagtccctgacattcacctgcccctctcttactgcccaagcacttttcttcgcactgcacctttggggaaggtaggaaatgggggtggggatgtttactactatcagttctctcagtagatcccgttaaataaaaagaacrggagcaaccagaaattcccaaggcgagaaaaaaaaaatccatcattaataggtgggtccccgggggggctggaacggagatgtcgagctgaattcaattacagaactggtcagaatcaggcaggagatgtggcttctttcaccgtgtcaattaacgaggtgactgggaatgatggactctctgccccgtgagtcaaagcgtgcctccatccggcgctgcctgatggccccgctgcgaacagatgggccatgggcagctcagggctgccagaaggcatccgtacagctcgggcactcactg

SEQ ID NO: 83267 - DNA, 600 bp, Chicken  19866894379047_2
ctgggaatgatggactctctgccccgtgagtcaaagcgtgcctccatccggcgctgcctgatggccccgctgcgaacagatgggccatgggcagctcagggctgccagaaggcatccgtacagctcgggcactcactgactccgagcctcgtgccctctgctgagatcgctgtgctcggcgggaaggtggcatcgttagcggtaattaatttgcagaccccccccccatccttcccttttgcactgcctgagcagaaccacacgcaccgccctgggctctgggcacggcctgcagctcgytcctgaggtttgggtgaaccactgctggagcatctgttcagcacctgycttagggagctgggaatgagtcggccacagttacccacaccctgtgaaaggattccgggcactcaaggtgcagcatcacatcccacagatcttcccgggaggtggaagcacatgcagccccatttacaccagctgccctactgaaggctggaggggacgagagcaaaaagcaggtgccaaagaacagcatagtcaacctttcccttcctgcccccaaccctgcgttggagcattcccactttccatgctttc

SEQ ID NO: 83268 - DNA, 600 bp, Chicken  19866894379047_3
cggcgctgcctgatggccccgctgcgaacagatgggccatgggcagctcagggctgccagaaggcatccgtacagctcgggcactcactgactccgagcctcgtgccctctgctgagatcgctgtgctcggcgggaaggtggcatcgttagcggtaattaatttgcagaccccccccccatccttcccttttgcactgcctgagcagaaccacacgcaccgccctgggctctgggcacggcctgcagctcgytcctgaggtttgggtgaaccactgctggagcatctgttcagcacctgycttagggagctgggaatgagtcggccacagttacccacaccctgtgaaaggattccgggcactcaaggtgcagcatcacatcccacagatcttcccgggaggtggaagcacatgcagccccatttacaccagctgccctactgaaggctggaggggacgagagcaaaaagcaggtgccaaagaacagcatagtcaacctttcccttcctgcccccaaccctgcgttggagcattcccactttccatgctttcttcatgcaatctgcagctcgagcaatgcaaaagcaaagcacatggata

SEQ ID NO: 83269 - DNA, 599 bp, Chicken  19866894379049_1
  misc_feature (1)..(258): n is any nucleotide
nnnnnnnnnnnnnnnnnnnnnnnnnnnnnnnnnnnnnnnnnnnnnnnnnnnnnnnnnnnnnnnnnnnnnnnnnnnnnnnnnnnnnnnnnnnnnnnnnnnnnnnnnnnnnnnnnnnnnnnnnnnnnnnnnnnnnnnnnnnnnnnnnnnnnnnnnnnnnnnnnnnnnnnnnnnnnnnnnnnnnnnnnnnnnnnnnnnnnnnnnnnnnnnnnnnnnnnnnnnnnnnnnnnnnnnnnnnnnnnnnnnnnnnnnnnnnnnnnnttacagtaagatgcatctttcgtataaattcctaggtcgaawgttgtcaatcagttttcacagtactgttggactgagaagttttctgaatacagactagatgaagggctatgacagaagcacagtgagtaagatatytgaggttatacagacagctttgttaagatgagcatgagcacatgggtttactttggaaaggagagccaaagagaaaaaatagtgaagaggaacagagtaggagagagtaagatgagcggggtgtggagtgaagctcaagtgaaaaggaaaggagaaatttcaagtcataagaaaacagaaagtcccatcaactgtgtcaaaca

SEQ ID NO: 83270 - DNA, 599 bp, Chicken  19866894379049_2
  misc_feature (1)..(162): n is any nucleotide
nnnnnnnnnnnnnnnnnnnnnnnnnnnnnnnnnnnnnnnnnnnnnnnnnnnnnnnnnnnnnnnnnnnnnnnnnnnnnnnnnnnnnnnnnnnnnnnnnnnnnnnnnnnnnnnnnnnnnnnnnnnnnnnnnnnnnnnnnnnnnnnnnnnnnnnnnnnnnnnnnnttacagtaagatgcatctttcgtataaattcctaggtcgaawgttgtcaatcagttttcacagtactgttggactgagaagttttctgaatacagactagatgaagggctatgacagaagcacagtgagtaagatatytgaggttatacagacagctttgttaagatgagcatgagcacatgggtttactttggaaaggagagccaaagagaaaaaatagtgaagaggaacagagtaggagagagtaagatgagcggggtgtggagtgaagctcaagtgaaaaggaaaggagaaatttcaagtcataagaaaacagaaagtcccatcaactgtgtcaaacaaagctttttctgtttttaatagaaatacttttctgttctatgggatactatgtagataatttagaggtttttccttcagatatttatagattttgt

SEQ ID NO: 83271 - DNA, 600 bp, Chicken  19866894379051_1
gtgcatccattgtaatttcattttggggtgcccttcaagtagttacaaagagatgaagaaagggaaggcagaaaattaaaggaaggattgccagtgaatctccaagagaaaacagtgcctcactgcaatgaacttaaaatctcctcctgaacagaagaggtgttcactctgctcagcatagctgggggctgaagcatcagagttcatcccaggcactgctggagttctgcatgcagctccttgggttgggtgaggggggacagagaccaggcatggggacagcagccgtggggtgtgcgktgtgtgttcgtgccggagtggtcggctgcttggcaggaatttggcacagccccacttggatgagcgtctgggctgaaaatcaatgccaggatcgctgagacaagttgtgctgctggggtcactgcacagtctatggcccgtctgctgcccggggatgtgtgctgaggaagcacaagttgctggctgggctccaggaatagttaagctgtttagttataggataaccagtttaaccaggctgcgtggggacagcagatcaccgcggcaaagccagagatgtgggtctgaggtgccctttgg

SEQ ID NO: 83272 - DNA, 599 bp, Chicken  19866894379054_1
  misc_feature (1)..(96): n is any nucleotide
nnnnnnnnnnnnnnnnnnnnnnnnnnnnnnnnnnnnnnnnnnnnnnnnnnnnnnnnnnnnnnnnnnnnnnnnnnnnnnnnnnnnnnnnnnnnnnnnttatgaagagttttaagtgcggttatcatgtcagcatctgttgcagagacatgatttctccctgagccttttcagctgcttgctttcccctttgactttccacactcaattctgcagccctgcaggaagaaggaagggcacaccaaagccacgtgacaggagtggagctcaggctccctgggatggcaatggaatcagctcaaraaggccctaaaaaagctgggggcctcagtcccactttctgccctgcctggtatgatagtgggtcacagagcaggctaatgggtggtgctcaaacaaaatgcaggatgtgcatgtaagagaagtctacggattcatgggatcgtgggatagcatagaggagatcatgagaattaatgatttcctttttctggcacattgatcccaaacaggaggtggaagaagccaaactttcttttacagctggtgaattaaactgtttctctcctccaactcagcattcctgtgctgaggcagggata

SEQ ID NO: 83273 - DNA, 600 bp, Chicken  19866894379054_2
acacacaccagcactgtacaggaagagcaggtgtgactacagtgcatcaggaagtgacgtctgggagaaatctgtaacctctcctgtgagttcacccctgaacagcacatggaatggtcagagagggaaactttgccacaggaccaacaaatggttctcttgcagtccagtcttctggcttccagacatagcatttcaaaacttttatcatcagcgcataatataaggagatacaatacttgcaaaacaggttacatagagactgaatgtttgcattcaatacttaacaagtgatagccrtctcatgccttagacttgcctgacatcacaacaacaaatgctagacgcgtgaaaagccaaggcttagaggatggataagcatttctttgtaaatttctgatgagtttgagtatatacattgctaacacatcttccagctgagatttgttggaagaaaattctttgctgcagacttttttttttttttttaatatatattcaacaactattttgtcgtaccccgtatttccaaaagaatctgagcactattctttgaaatgagatggcttaaatagactatcaatggcattttaaatgggg

SEQ ID NO: 83274 - DNA, 599 bp, Chicken  19866894379056_1
  misc_feature (1)..(131): n is any nucleotide
nnnnnnnnnnnnnnnnnnnnnnnnnnnnnnnnnnnnnnnnnnnnnnnnnnnnnnnnnnnnnnnnnnnnnnnnnnnnnnnnnnnnnnnnnnnnnnnnnnnnnnnnnnnnnnnnnnnnnnnnnnnnnnnnnnnacataccccctgctaagggtgaggagatggttctgacacgactccccgtgtctctgtttctcactaagtccgttgttggtttcaatgaatgaggaagttatatttccaactgatgaacaccctgccgtcagtttcccattctgttttgcgatgagcacgctaagggatytgggcaagctgcaaagggccttcggtgtactatttaaggtgtaattcaaagtgggaggcacttctcagaactagcataaaagttcctctcacctccacccccaaaacagagataacgtctccccagactaagcagtgttatctctaaaacaagacggtgactgctgcaaacgtggctggtagttcattatcacagtgaaatattgcatattatgaaacacaaaaatgtctgttaactgtttcactgctaatccttccagaggcaaaatattacatctgtgtgtctatcccacaacgtac

SEQ ID NO: 83275 - DNA, 600 bp, Chicken  19866894379057_1
gagaaatgatctctttttcacttcagcaaaactgaggtcaccaagagattggaaaaccaatctaaactttttgcctatgtgagaaaggttaatatgcagcttaatacactcttcagattcccagcagtgagaggaaaaggtccaaatagtgcatcgatattgatagaggtttttgcatactaaacaagcagatatttcaattcctgttactgggtcaaaaaagaacccacaattctgatgcatttccattttgttcctcagattgatatccttgaagacccggttattaagaatgtcatwgtgctacagacagttttacaagaggtcaggartcggagtgcaccagtgtacaaacgaatcagagacgtgattggaaaccctgaaaaacacttctattccttcaccaacgaacatcatcggtatggtttggaatagggtataacgttgcactgaagtttggtataagaactatgatgtgtgaattaggcagataaaatgagactgatgtgcacagcactgtatatatttaagaaatcctgttgaggaatgattggatgttacaggagctttctcattttatagctggtattagcacacaca

SEQ ID NO: 83276 - DNA, 572 bp, Chicken  19866894379057_2
tgaggtcaccaagagattggaaaaccaatctaaactttttgcctatgtgagaaaggttaatatgcagcttaatacactcttcagattcccagcagtgagaggaaaaggtccaaatagtgcatcgatattgatagaggtttttgcatactaaacaagcagatatttcaattcctgttactgggtcaaaaaagaacccacaattctgatgcatttccattttgttcctcagattgatatccttgaagacccggttattaagaatgtcatwgtgctacagacagttttacaagaggtcaggartcggagtgcaccagtgtacaaacgaatcagagacgtgattggaaaccctgaaaaacacttctattccttcaccaacgaacatcatcggtatggtttggaatagggtataacgttgcactgaagtttggtataagaactatgatgtgtgaattaggcagataaaatgagactgatgtgcacagcactgtatatatttaagaaatcctgttgaggaatgattggatgttacaggagctttctcattttatagctggtattagcacacacatctt

SEQ ID NO: 83277 - DNA, 600 bp, Chicken  19866894379063_1
ctaacattggtgcaaaagtaatgcactgtactcttgcttaaaaaaaccaccttgaatttttataatcaataacattcacatttagggaaaaaatttattttaattaatattagcttgcatggtactctcatacaattacactaagatcacagaatcacagaatgtttgatgttggaagagatctctgaaggtagtctggtccaatttccctccttaagaaggacgcctaaagcaggttgcccaggaccatgtccagatgtttttttaagaactcctatgagggagactccattacctgtytgagcagcccatgccagtgtttcatcacccacactgtagaagtgttttctgatgttgagatggaacctctggcattccaggtttgtgcccattgtctcctgtcctgtcactgaaaaaagcctggctgcaacgtcatttcatcttcctgtaagatatttgtatatactgatgaaatgtcccctgttctttctcttttccaggctgagaagtctcaacttcagttgagactcagccaactcagtctttcctcacaggataagtgctccagtctcttcaccatcttcatgacccttcattgga

SEQ ID NO: 83278 - DNA, 600 bp, Chicken  19866894379086_1
aataattcagtttttttgttgtagaaattgttacttctaatgtatttcagagttattgactctgaaagcacattgcctgtgttacattaattgtttgttccatttccatatagtaaaacagagtacctggcagttttccgttttttctaatccctcactgaatagatatcagaatgtcctacattcatttttttgaaagaagggaatgaaatatcttatgccccctgaaattttcaaaattggacttttcagccctctgctttctttaagaatttttttcctccctctcttttttttttyaatgtgtgtgtgtgttcaggcatacagtatataatgtgttccatgtatctccaagtctctgtgtctgctgaacttgtactttgtctcttttcttcttgcaaaactgaagtttttgtagatttaatagtttagatgactgttcataagtagttatactatagtatgtttgggtctttgttaagttgtgtttaccacaaatgaagggagagctgaggcaaaatacagattctggatacgttagtgataatgttttacgcaaagcggaagtgtgcaataaaaactgaaacagacaggcatgca

SEQ ID NO: 83279 - DNA, 600 bp, Chicken  19866894379089_1
ctaagtggaatgaatgaagttttggtgccaactctttaaataaaatgacaacatgattattaacaattgactggaatcagaaaagaaaaagcaacaacaaaactgactgtacttcttttttgtgtgcttggaaggcacaaatggctcattgaatttcaccaaagcacaactgtctttaatggatgcattcatcttccacttgggagctgcaatggagctgacaggagataacccatgaagatggcacaagaccccatcttgaaatatctagcaaatcttacctctcccttaggcccattytcctctgcaagacatgggtatcctgattccacaccaatttggtaacaatttctagagctgactcatctctcaactagtcaaaaccaattctttgccccaccagttcaaacaatgactacttttagggaaggaaagtgagatccactgtaagattcatggcttctactatcttctcaggaaacaatgttggtactgctgtcagcacactgaactgcacaagaaaggcattaacactccctctaaatgtttcacacagagccaactctttgctgggcaaaacaccagcagtgaaggctggaa

SEQ ID NO: 83280 - DNA, 600 bp, Chicken  19866894379096_1
aatttcctgctccaagttactctcaccgtgctgcatcagagctggctgaatcagtcacactgcattacgctacacggctgatttaactgtgcatgatgagtcactgcagtcaagcgtcagcaaagagatgtgctacttaagacaaaaaaaaaataatcagggcaggtgctgtgtggttaaaaaagttatccataacaatcatctttattttgtgcctagaagcccccagtgggactggtggcctgagcactgtgtgtttgcgtggggaagtgacaacattctctgccattacaaaacacyagaggacagaggggaaagtttgctcaaagcaggagtctggctctggattcccagcctctggactataacagacctctaaagtatcagagcagtaagaaaaaacagttttccagatgtttttaaaggaaggagaagagggaagagaagagacagaaaamgatatgggctctaccaatgaacaaggtgagcacagaagtcaagtttcagtgacctttacatctcacctgtccctcttaggcaccatttgcgtgccacggaaaagcaggagaaaaacaaacaggtcaccagcacactttggtg

SEQ ID NO: 83281 - DNA, 600 bp, Chicken  19866894379096_2
agggcaggtgctgtgtggttaaaaaagttatccataacaatcatctttattttgtgcctagaagcccccagtgggactggtggcctgagcactgtgtgtttgcgtggggaagtgacaacattctctgccattacaaaacacyagaggacagaggggaaagtttgctcaaagcaggagtctggctctggattcccagcctctggactataacagacctctaaagtatcagagcagtaagaaaaaacagttttccagatgtttttaaaggaaggagaagagggaagagaagagacagaaaamgatatgggctctaccaatgaacaaggtgagcacagaagtcaagtttcagtgacctttacatctcacctgtccctcttaggcaccatttgcgtgccacggaaaagcaggagaaaaacaaacaggtcaccagcacactttggtggaacctccatcccattctgcttgtcaaaaaggctttttggcacttgaattaatttcttgctttgcttttctaccacatttagtttgtatttcggtgctcacagatcacagcataatcccagaaaagtacataaatcattctcccaagatagatctctt

SEQ ID NO: 83282 - DNA, 600 bp, Chicken  19866894379096_3
gaagctaaaagaaatctgaaatagaaacctttaatgggagtatctctaggcagctgaacaccctagtttactaaagcgacagtttgttttcagtctgaaatgaaaagagagaaaaaagtgcaaaaacaaaatattattcactgcattctgcgtatttgtttctttccttcattattactttgcatttcccagttgaagaagccaaagatcagagttttccacatattgcaaaatctattcaagtaccacttaatcacttgccagcagctaaatgagtgctccaaaaagacccggtcctgkgctcttcacatgagcataatgtatcagaacgcaggtgcaccactcttctaaaaagcagagttcacatcaatttctcctactgttaagtctcatttaagcaatcttctaaaataagcatatactaattgaactgcttacagtacttgacacgcgtattttgctgaagaaaacttaaacgtgcattttccgttactaaaaagatggggaaaaataaaataaaagttcatccaaggccataaaagatcacagattccttcagaatgtatatgcacgatgtagacctaagtaggtaataatttt

SEQ ID NO: 83283 - DNA, 600 bp, Chicken  19866894379096_4
taaaagttcatccaaggccataaaagatcacagattccttcagaatgtatatgcacgatgtagacctaagtaggtaataatttttaaagagtatttacttacagggtatattagcagaggaaaggaaaagaattttcctttgcttcactacacactgacatgaacaagtaatcattcacatgcttttaagatatgcagtcttgctagtacaactctttggagtcacagagaaatgaatgtagattacagcagcaatagagaagctataaatacacatactctgccagtcacatctgctgkctttttttttttttaatataagttcacggtattgatatatttcttcttgtagatgatttaaacagttatttaggatgtcaagattaaaaatagccttttaaagagcaggtaaagttatgattcctaggctttctttactacgttttccggacgtatatttcacctcagaaaaaaatcagctttcttatggagtatcttggccattgatcaaacgtaaggcctttaaacaaatagaaagcttaaaataaacagtattatctgggaaaatacaatcaaataacacaccaattaatccaaaca

SEQ ID NO: 83284 - DNA, 599 bp, Chicken  19866894379112_1
  misc_feature (1)..(115): n is any nucleotide
nnnnnnnnnnnnnnnnnnnnnnnnnnnnnnnnnnnnnnnnnnnnnnnnnnnnnnnnnnnnnnnnnnnnnnnnnnnnnnnnnnnnnnnnnnnnnnnnnnnnnnnnnnnnnnnnnnnaaataatatatagctctatgcagctttatatagatttagaaattcagatctttctatttattttctacttattcctttacaaatacattgcttttgagtccaaataagttacattatatagatatacaataaattttgtgacttctactgctacctgattataatatgacacaactttgcactawtttgttatgtgctgttagaagagacttgaggactctgagtgagattcctagtagttaaaaccaaggactctgttgattttcactaatgatgccaatctactttagctgraaagctacctccttttkctgattcttcttgtgcagatcagggatttgattatccctcatcacagtctagttgtatggatacagcttattaaataatattcccttcatacagaacaagaagaaactcatgtacccaycagctgcatttattttcctttgccctctattccattttactttccagcaaataa

SEQ ID NO: 83285 - DNA, 599 bp, Chicken  19866894379112_2
  misc_feature (1)..(6): n is any nucleotide
nnnnnnaaataatatatagctctatgcagctttatatagatttagaaattcagatctttctatttattttctacttattcctttacaaatacattgcttttgagtccaaataagttacattatatagatatacaataaattttgtgacttctactgctacctgattataatatgacacaactttgcactawtttgttatgtgctgttagaagagacttgaggactctgagtgagattcctagtagttaaaaccaaggactctgttgattttcactaatgatgccaatctactttagctgraaagctacctccttttkctgattcttcttgtgcagatcagggatttgattatccctcatcacagtctagttgtatggatacagcttattaaataatattcccttcatacagaacaagaagaaactcatgtacccaycagctgcatttattttcctttgccctctattccattttactttccagcaaataaactatcaaaccctatacagagttagagcattctgcaaagaaaacactacaagtatactgtacaattgctagataatttatataaactttcaaggccacaaaagtatatt

SEQ ID NO: 83286 - DNA, 600 bp, Chicken  19866894379112_3
agctctatgcagctttatatagatttagaaattcagatctttctatttattttctacttattcctttacaaatacattgcttttgagtccaaataagttacattatatagatatacaataaattttgtgacttctactgctacctgattataatatgacacaactttgcactawtttgttatgtgctgttagaagagacttgaggactctgagtgagattcctagtagttaaaaccaaggactctgttgattttcactaatgatgccaatctactttagctgraaagctacctccttttkctgattcttcttgtgcagatcagggatttgattatccctcatcacagtctagttgtatggatacagcttattaaataatattcccttcatacagaacaagaagaaactcatgtacccaycagctgcatttattttcctttgccctctattccattttactttccagcaaataaactatcaaaccctatacagagttagagcattctgcaaagaaaacactacaagtatactgtacaattgctagataatttatataaactttcaaggccacaaaagtatattggtcctttagctccagaa

SEQ ID NO: 83287 - DNA, 600 bp, Chicken  19866894379112_4
aaattttgtgacttctactgctacctgattataatatgacacaactttgcactawtttgttatgtgctgttagaagagacttgaggactctgagtgagattcctagtagttaaaaccaaggactctgttgattttcactaatgatgccaatctactttagctgraaagctacctccttttkctgattcttcttgtgcagatcagggatttgattatccctcatcacagtctagttgtatggatacagcttattaaataatattcccttcatacagaacaagaagaaactcatgtacccaycagctgcatttattttcctttgccctctattccattttactttccagcaaataaactatcaaaccctatacagagttagagcattctgcaaagaaaacactacaagtatactgtacaattgctagataatttatataaactttcaaggccacaaaagtatattggtcctttagctccagaaaacatagttcatcattctccctttcctcaatttacagtgcccttaatccatttttttttccctctataggtttcaaaatatgcttgtaattactattcaagtccctttcctatttctag

SEQ ID NO: 83288 - DNA, 600 bp, Chicken  19866894379132_1
taatatattcagtgaatcatgtggcgcaaaaaaacaagatgtttagtgaataaaacagatgatttcaagacgatgacttgaagtccagtatttcctgatgttttttcactctgtagtttaatttttactctgtagatcggtttgttcatgctatataacttcttatgtttgtaacatagaatataaaaaaaaaaaatagaaatcccatttctgacaggcagtacatctctgtctgctgtacatgaagaggactgggaatctccctgacctctggaccaaaggattaactcatggagacartatgtttctggtctctgggaagcagtgctgtaggggaagcagtccttggctggcaagttttactaatactgatggcagaagaatactgagattcaggcctcaygtctgagtcttttgaaaagagtctgctccataaggcagagatcctacagtcatcataatgccaaatgatcctttatgcttactgtaccacttcctgctagtccttggttctgttttgcttttttcttctcttgattctttccctacttcaattttcatcacttgtgcaaccctgggttctctgtagactctgaacaa

SEQ ID NO: 83289 - DNA, 600 bp, Chicken  19866894379132_2
tttcactctgtagtttaatttttactctgtagatcggtttgttcatgctatataacttcttatgtttgtaacatagaatataaaaaaaaaaaatagaaatcccatttctgacaggcagtacatctctgtctgctgtacatgaagaggactgggaatctccctgacctctggaccaaaggattaactcatggagacartatgtttctggtctctgggaagcagtgctgtaggggaagcagtccttggctggcaagttttactaatactgatggcagaagaatactgagattcaggcctcaygtctgagtcttttgaaaagagtctgctccataaggcagagatcctacagtcatcataatgccaaatgatcctttatgcttactgtaccacttcctgctagtccttggttctgttttgcttttttcttctcttgattctttccctacttcaattttcatcacttgtgcaaccctgggttctctgtagactctgaacaaaatgtatctccttgtgagcacgactttcacctagtttctaagttcctagtatgagcatcctcaacgtacctcaaagagaaggctgaaaatattattcaacagg

SEQ ID NO: 83290 - DNA, 600 bp, Chicken  19866894379135_1
gctccagtgaaccttcaccctccttcaataccatgacacaaaataggaggcaatctataacactgcaatgcataaaatctgtgaacacattttctctgcttcccagccccaacctctcaaaggcataaacagagtcatgcttccatcctgctttctgtcagtgcagttactgcaggaatgaacagtcctcccccagattcaacagccttccttacaccacagctctggttggcttggagggagttttcaccctcccagtgctcctgtgtcctgggccacacaactacgatgtttggcttytgtaggcaggagtgggaatgcgacccaaaagcaagtttgaagaagtgtgacaaattcacccagcactgcagcccagcataattaagcagcattcttattcacgtcatctcctggctctggcatcgtttttattatagtcattatgaagacagatattacttttggattgactcacttgatgggttgatcagcactttattgtagcctccagttatagcactttttatggcatccagaagaacttaaccattagcacactattaggaagcacactggcagctgattaagttgctgaaggtc

SEQ ID NO: 83291 - DNA, 600 bp, Chicken  19866894379138_1
tcccaccaaaacccagggctccaagcagggcagcactgctccctcccctgtctttttaatagaactaaacaacttggcagtgtcacaaaaaaaaaaaggggatctttttttgcaatccaaactcagtatgccacacttgaagctgctcacagcaagtcacttaaaatatataaatgtggaagggaaatgaatcttagatttcactctggacttccaagattctgcctgcccaaagaagccctcactgctgcatgtttatatggtggaattcagcagaaattattcttgtcttttgaaatrtaaagaaaatgttcctcctgtatttgcaacagtctcttgtgtagactgtttttgtttcagctgtttctaccagtagcattgcagctctaaaaaatgtcttttcctcgggtcaggctccaactactttggagcttgagactcattctgggcacaggagagataggaaaggtaaagactgattccccacctcacttctccagactgtgccactgtgcacaaagcattcagatttgcacatacagatagagacaagaaaggagcaggacaatgtcatctgccaacacgaggggagtgaggaga

SEQ ID NO: 83292 - DNA, 600 bp, Chicken  19866894379138_2
gtttctaccagtagcattgcagctctaaaaaatgtcttttcctcgggtcaggctccaactactttggagcttgagactcattctgggcacaggagagataggaaaggtaaagactgattccccacctcacttctccagactgtgccactgtgcacaaagcattcagatttgcacatacagatagagacaagaaaggagcaggacaatgtcatctgccaacacgaggggagtgaggagaggctctgaccacagcctctgtgcatgggatagtttccgttctctatgtggtagctttaatayaaatgctgagaataggcactgtcagatacacgagcaaactcccctcagccaagactgctcacagccacagccctggcagtgacagagcctttcttggaggggttgagctcacccaggcagaggggatgctggctcctaaggttcccccaaccctgggcaagaatggtgacgctcaagcaaggcctgaggcagtgtcacttgaatgcctgtgcagagagatgcccgactctagcatgaggtctcaaaagcatgacagatggacagatcctctaggctttgtgggacagacggggccacttc

SEQ ID NO: 83293 - DNA, 600 bp, Chicken  19866894379143_1
acagtaaggagactgctgagccatggtccgattatactctttttcagcctcaaaatttggtggtcgattctgccagagctggctaagtggcttggcccaagcttctgtctcctcagcttcttcttcaggagttagttgctctgatgcctctgcaaaaagagatcgttagtcagggactatgtgttcttacatcaacatccttcttgcaaaaaacacctaaataaagcaagaagttaggaatggagatgacagaaagactggcataagttaaatttgcagaagggtgatgggagctagtarcacagmctcatttttaagctgcatctactaatcaagcaaccrtgcatcagatggaagacaggattattggcaaagaacagcatcacctccaaagcacatcaagactaaggctgttagccaaagaatgtatctattctattttttaaataatgaatatttacatcagttactggaatgctctaaaattgactcagttatggaacagcctagggtactagtttaattttcctttcagagttgtaactttctaaagcgtagtacaggaaagaaggaagtcactattagggaggaaagattaat

SEQ ID NO: 83294 - DNA, 600 bp, Chicken  19866894379143_2
aggagactgctgagccatggtccgattatactctttttcagcctcaaaatttggtggtcgattctgccagagctggctaagtggcttggcccaagcttctgtctcctcagcttcttcttcaggagttagttgctctgatgcctctgcaaaaagagatcgttagtcagggactatgtgttcttacatcaacatccttcttgcaaaaaacacctaaataaagcaagaagttaggaatggagatgacagaaagactggcataagttaaatttgcagaagggtgatgggagctagtarcacagmctcatttttaagctgcatctactaatcaagcaaccrtgcatcagatggaagacaggattattggcaaagaacagcatcacctccaaagcacatcaagactaaggctgttagccaaagaatgtatctattctattttttaaataatgaatatttacatcagttactggaatgctctaaaattgactcagttatggaacagcctagggtactagtttaattttcctttcagagttgtaactttctaaagcgtagtacaggaaagaaggaagtcactattagggaggaaagattaatgatgcg

SEQ ID NO: 83295 - DNA, 600 bp, Chicken  19866894379143_3
ttcagcctcaaaatttggtggtcgattctgccagagctggctaagtggcttggcccaagcttctgtctcctcagcttcttcttcaggagttagttgctctgatgcctctgcaaaaagagatcgttagtcagggactatgtgttcttacatcaacatccttcttgcaaaaaacacctaaataaagcaagaagttaggaatggagatgacagaaagactggcataagttaaatttgcagaagggtgatgggagctagtarcacagmctcatttttaagctgcatctactaatcaagcaaccrtgcatcagatggaagacaggattattggcaaagaacagcatcacctccaaagcacatcaagactaaggctgttagccaaagaatgtatctattctattttttaaataatgaatatttacatcagttactggaatgctctaaaattgactcagttatggaacagcctagggtactagtttaattttcctttcagagttgtaactttctaaagcgtagtacaggaaagaaggaagtcactattagggaggaaagattaatgatgcgaacacaagaatgagacaagcacctcatctgtgatgc

SEQ ID NO: 83296 - DNA, 600 bp, Chicken  19866894379144_1
tttacagctttttgtgcagaatgtgaacaaaagagtaaaatgggctaagagaccccagcaggaattagtgcatgggattgcctcaaaatgatttatcccatgtggactaatttctgttcaccctgtgaacagaattccacttcttcagactttcttctctgtgtctctggtagtggaactttaatgtgactctcagtggtttgcaagcactcactcaggtcacttcttttattgtcttcctcattatgatctacattccccacgtatagactctcatccttggatgtctgtcacgctacycattcatgcacaggttagctatagaatttgctatattaagacttaagtgtggctgctgggggaaaaggcagggtagaccttctgaaggagaggttgcttccagatctgcattgtctggtgatttactcagatgaccatctgtaaaagctgaatatctgatagcaagattggtgccaaagttctgtagagtcctgatatcttcaaaattcatcactgccctgcacaatatccgttctgatttttttgccattgccttctggcagagaagacgcaaggtgaatgcccaagttctatttctgc

SEQ ID NO: 83297 - DNA, 600 bp, Chicken  19866894379145_1
attgtattgatagcattatttgtttacttcaggaggttttttacttgcttgtgtttttgataagtcatgaccgttactgttatgttcagttcaagtccaactggatatggctttttgtttgtgtgaaatgccaggagtatcttttaagaccacctttatattgctttctcattgcagtttaaagttaattaatttacagagtataaaccaagtcaaatgcattgaagacggtgcagtctacagtacttttttttttatgatgtgttttgggttgctgaagttttaatgttttcttataayatttcttgtaaaaaagcaagaaaatgagaaaatatactaaggagaacccttatctgtttrgcaaaatcatttgtattttgtgtactactctgttattagtgagccttttgattaacayttaattttcaggcttctattttcatgatatgttctgggacaagataactttatcttttgatttggtattcctcaagtggtaagaaaattctgcaacatgacaattttaatttcctgaacctgtaaaattttgatatattacataatcagtggttgacagcttcagagaagactgaataaaaa

SEQ ID NO: 83298 - DNA, 600 bp, Chicken  19866894379145_2
taagtcatgaccgttactgttatgttcagttcaagtccaactggatatggctttttgtttgtgtgaaatgccaggagtatcttttaagaccacctttatattgctttctcattgcagtttaaagttaattaatttacagagtataaaccaagtcaaatgcattgaagacggtgcagtctacagtacttttttttttatgatgtgttttgggttgctgaagttttaatgttttcttataayatttcttgtaaaaaagcaagaaaatgagaaaatatactaaggagaacccttatctgtttrgcaaaatcatttgtattttgtgtactactctgttattagtgagccttttgattaacayttaattttcaggcttctattttcatgatatgttctgggacaagataactttatcttttgatttggtattcctcaagtggtaagaaaattctgcaacatgacaattttaatttcctgaacctgtaaaattttgatatattacataatcagtggttgacagcttcagagaagactgaataaaaatttggccacagttgcatagtttctcaaatcctgagagcttttccattgtgtttcttgtta

SEQ ID NO: 83299 - DNA, 600 bp, Chicken  19866894379145_3
ttgtgtgaaatgccaggagtatcttttaagaccacctttatattgctttctcattgcagtttaaagttaattaatttacagagtataaaccaagtcaaatgcattgaagacggtgcagtctacagtacttttttttttatgatgtgttttgggttgctgaagttttaatgttttcttataayatttcttgtaaaaaagcaagaaaatgagaaaatatactaaggagaacccttatctgtttrgcaaaatcatttgtattttgtgtactactctgttattagtgagccttttgattaacayttaattttcaggcttctattttcatgatatgttctgggacaagataactttatcttttgatttggtattcctcaagtggtaagaaaattctgcaacatgacaattttaatttcctgaacctgtaaaattttgatatattacataatcagtggttgacagcttcagagaagactgaataaaaatttggccacagttgcatagtttctcaaatcctgagagcttttccattgtgtttcttgttaatagtgtgactctagcagttctaaacaaagcaagttgaggctttgaatacttgttatt

SEQ ID NO: 83300 - DNA, 599 bp, Chicken  19866894379149_1
  misc_feature (1)..(119): n is any nucleotide
nnnnnnnnnnnnnnnnnnnnnnnnnnnnnnnnnnnnnnnnnnnnnnnnnnnnnnnnnnnnnnnnnnnnnnnnnnnnnnnnnnnnnnnnnnnnnnnnnnnnnnnnnnnnnnnnnnnnnnntcggggtgtttatgtatgtcctgtttttttttaagtctgtttattgtttatattttcttctccttaaagcattgattcttaagcacctgtctggcttcagtctgaaaaatatgagcatgggaagggttaataacacatttgtgaaggtgtaggtagcagaagaataatgagttcaggtagrgaatacgtttttgagcagccctgaagggggtgaacagttattccttgttaatcacggatgtgaaaaatccttcccttggctaatcctacatggtttaagggcaatgcagagtgcattcctcatcttagaacagggaggagatcacgaagcctgcggtgctaatcacttaccaaaagaatgtgagaccatcttacaggaattgtactggggcatctgtatttatagttaaaaaaaatactacagtaattatcctgtattagcakacttttgttgaaatagcttcagatatcttctctagr

SEQ ID NO: 83301 - DNA, 600 bp, Chicken  19866894379149_2
aggtgtaggtagcagaagaataatgagttcaggtagrgaatacgtttttgagcagccctgaagggggtgaacagttattccttgttaatcacggatgtgaaaaatccttcccttggctaatcctacatggtttaagggcaatgcagagtgcattcctcatcttagaacagggaggagatcacgaagcctgcggtgctaatcacttaccaaaagaatgtgagaccatcttacaggaattgtactggggcatctgtatttatagttaaaaaaaatactacagtaattatcctgtattagcakacttttgttgaaatagcttcagatatcttctctagraaagtttctggtaaatcagaaatagacaaagtctgtctttgaagatgattatttaaaaagagaagcagtgttgtaatagcactataaaaatcagattatatggctacgctttgattgcagaataatacaaaatatttgataaaactgttaagtctgagcgatgttcttcttytgaaatccttgtaaactttctttattatttttaatatattttactcatttgaatgtagtttctcatgggattccttttgtaggtctagaagt

SEQ ID NO: 83302 - DNA, 600 bp, Chicken  19866894379149_3
rgaatacgtttttgagcagccctgaagggggtgaacagttattccttgttaatcacggatgtgaaaaatccttcccttggctaatcctacatggtttaagggcaatgcagagtgcattcctcatcttagaacagggaggagatcacgaagcctgcggtgctaatcacttaccaaaagaatgtgagaccatcttacaggaattgtactggggcatctgtatttatagttaaaaaaaatactacagtaattatcctgtattagcakacttttgttgaaatagcttcagatatcttctctagraaagtttctggtaaatcagaaatagacaaagtctgtctttgaagatgattatttaaaaagagaagcagtgttgtaatagcactataaaaatcagattatatggctacgctttgattgcagaataatacaaaatatttgataaaactgttaagtctgagcgatgttcttcttytgaaatccttgtaaactttctttattatttttaatatattttactcatttgaatgtagtttctcatgggattccttttgtaggtctagaagtcaaattgcagtgagaagtcctgtttgctctttgcag

SEQ ID NO: 83303 - DNA, 600 bp, Chicken  19866894379149_4
aaaagaatgtgagaccatcttacaggaattgtactggggcatctgtatttatagttaaaaaaaatactacagtaattatcctgtattagcakacttttgttgaaatagcttcagatatcttctctagraaagtttctggtaaatcagaaatagacaaagtctgtctttgaagatgattatttaaaaagagaagcagtgttgtaatagcactataaaaatcagattatatggctacgctttgattgcagaataatacaaaatatttgataaaactgttaagtctgagcgatgttcttcttytgaaatccttgtaaactttctttattatttttaatatattttactcatttgaatgtagtttctcatgggattccttttgtaggtctagaagtcaaattgcagtgagaagtcctgtttgctctttgcagacctttttacaaattccagggcaggaaggctgtttatttttcccacatctgttttgtgctcatcctttgtgacactgtttgctggatgctcttctttcttgcttctactgaaatgggtaatttgcacagttgcaaaatgttgaaaccaaatcttattctacagaactgtatt

SEQ ID NO: 83304 - DNA, 599 bp, Chicken  19866894379152_1
  misc_feature (1)..(218): n is any nucleotide
nnnnnnnnnnnnnnnnnnnnnnnnnnnnnnnnnnnnnnnnnnnnnnnnnnnnnnnnnnnnnnnnnnnnnnnnnnnnnnnnnnnnnnnnnnnnnnnnnnnnnnnnnnnnnnnnnnnnnnnnnnnnnnnnnnnnnnnnnnnnnnnnnnnnnnnnnnnnnnnnnnnnnnnnnnnnnnnnnnnnnnnnnnnnnnnnnnnnnnnnnnnnnnnnnnnnnnnnnnttatgtctttcttgaaaggctggagagggtgggagaaaggaggatgggagaagcaaggggccgttcagcctttcatttaatktgtgcactgagacaggaattttgcctcagtccttgtaattttgataaaaatcaggaggaagagagatcttacactggatgtggtgaaataacgttggaaaagccacagcaatacatgaacaaaaacttctgtttctatttccaggagactgggaaggcagaaaaactgctgaaatgaccacaaatgaatcctccaaaggatttgaaaatcctgcagggcattgcaaagagaagggagtgttgctgtaactgttctgtggggtagagaacttggctggatattattttgtttgttttttt

SEQ ID NO: 83305 - DNA, 600 bp, Chicken  19866894379152_2
ccacagcaatacatgaacaaaaacttctgtttctatttccaggagactgggaaggcagaaaaactgctgaaatgaccacaaatgaatcctccaaaggatttgaaaatcctgcagggcattgcaaagagaagggagtgttgctgtaactgttctgtggggtagagaacttggctggatattattttgtttgttttttttctgagtaaccagctctccagcctgagctaggctagtgctttctgtgcttttgtaaacaaattcaattttttaattagaaaaacaaaagccttggcctgaaayggagacaaatgatagtacagcattgccatctactgaactgtaggggagaagctaggaaaaaaaagcgtcaagtttgccttcaattttcctcctctccaggaaaggaagacgtgagaagcagaacttttcaattttttctgtgtactaagcttgtgaccctttattccagtctctgagaaagctgcacagcaagattccctcaaaaggaatcaagttgaaatatctttttaactccggctatgctgaaaaatcacccttgaggtatgtggttactatgagagatcctagaaggaaatgtag

SEQ ID NO: 83306 - DNA, 568 bp, Chicken  19866894379155_1
ggagttaattttctttaacgcagatctattctctgatgtcctcagttgatctacttagatttgtttctagctataaacagcagtaagctggcatgtaataaactggtttgttctttttatctttgtgatagatatcttcattgggcattacgtaaagtgctattttagtatttgtgattttgtttatggcttaaaatacacattatatcatgaacagaataacgcagctgaaaagtctgttgtattcaaacgccatgtttttcctgcttagaatttccattttcttcctgtgagatgctktgatgtgttgtgaggcttctggttttccttactcattgggaaagtttaaatgtatgtatttatatatgtgtgtacacatacactataaagttaaaaaaaagttttgcaaacttatcagtttatgggggaaaatgtggaaacacaatttggagacaattttattgatgcatcttctctcctgcagattttatttattccacttgctttattaatgcatgaaagtaggtctctgcagaagttcataagcctctgctgttctccataaaat

SEQ ID NO: 83307 - DNA, 600 bp, Chicken  19866894379156_1
gcctgcttgccatggcaacctttgtttggttgtggtaaaaggaaaggtgtcatcatccttcacttaatgcagaatgcagcattcaagaggagaaaaaaacagcttttaaaaacgagaaagctactttctccatgaagcttgtgtgagtacagcacacatatcctgctgttcattctagacaagctgctgaaaagtttgaattttgaagagctttctttgaactctgcaaagaagcattttaagagtgaagcaacattagactcagcctatctttggtctggtgagaaacatcctgatttycccatcagtaaactaagaacgaggggacaaaatttctttcaccctttgcctcacataaaagcgctgccttacttgagccaggagtgatgtatatcttcttacaacattctgtgtaggatgtatgccttcctgtaatgttctgtgtatgttattctgtattctgtagtatctcttcgagctgctgtgaggctatgagcagcatcagcagccaggagtgtttcctactcatctttgtattttgctacaggctctggggtttacatcctcaaatcccacacccctgggaagacagataaaacc

SEQ ID NO: 83308 - DNA, 600 bp, Chicken  19866894379174_1
gtgttctgcaacactacattcttttgatgtgaaaaaactatctgaaaagatcatgcattttcctacctgggttgatttgaaaggagaagattctgtccctgaaactgtacaccatgtagttgtgattgtaaatcccaaaaccgacaaaactctgggaaaggcttggcaagaatcatatcagagtaagtagcttacaagtggaacttagattacttgttcagtatttactttatcactcagaattgaggcctagtgttataggatctctgccagctattgaaagtttagtgtatatgaaayggcttgttccatttagtcagcagcatgatattggtaatgtcataacactgtatttgaaaagctcggtcttaacttaggaaaatcctggagggatagcattgtggtttgtagtaaggaacaatggtgttggactatttattcagtcattccacagctaactgtaacctgactgtaagttcagaagagactgtaagtcattcagaagagacaggtaaacgccactgtatggatcattctgtaaagcactttttgtctctaacctgtgagatgagcaatttttagagaattaaatttcatttt

SEQ ID NO: 83309 - DNA, 600 bp, Chicken  19866894379180_1
aatgctggcgatcataatctttgagatgctgctttgcagtcacatattttcttcttacacagtggctttcatcacggatctcaaattactttttgaacactgattaatccccacctgtgagataagcattctcatacacataggagaaaacagagtgttcaacagcttatccaaggacacagagttcccgagtggtagagctggtaactgaacccggactggctggggatcacattaggtgacctccagaggaccctttcaaccttatcctattttatgtaatgttacgcaaagtcaccrctcacttaaaatagtttttatagcgtgcaatgtgcttattagatgtcagctgcaggactacaatgtgcactcaaaagctgctgaagcttcaagtctacatggaagcagtcatcccatacacccctcattggaccatggtgccgtagcaccccttgctgatgtgcatcccagtgctgagatcccaacaaatcctccactctcctagggagtttcactggatattcctctttcatggccatctgccctgctccttcctggttgatctcccacaccccttggcatgactccccaaccagacct

SEQ ID NO: 83310 - DNA, 600 bp, Chicken  19866894379185_1
ctagaactagagagaaagacttgtaaggctcctgaaacgtaatgggattcagtgaaacagctaccctttgagatttaccaaatactcattcatccatactgggttgcttcggttcaattgtcactgactatgaataaaattctgtgtttatctttcaatagcagaacccaagggacctttatatctatgcatgtgaaagtttctgtttttctaccagcaaacgtacataattcattgtgatttggaggaatttactgtgcattttacagaagcaacaaaaaaatctcccactcacaaaayatttcagcagcaatttctctttccttgaatactctggtcaggccaaatggaaagaatgaatgtgctttgatttcacaattaagaccagtattaatatgattttgctaaaaatcttaggaattgtgactgagcatgtacagagattatgctcactcatatgtagttttgtgcagacactatttcaaaataaagttttgaaaccccatgagtgggaagtctactttgtttgaaacttgaaacttcagccactttgctgcagctttcaaaaatttaaagtgagaaagtgagcttttcttccaa

SEQ ID NO: 83311 - DNA, 599 bp, Chicken  19866894379189_1
  misc_feature (1)..(28): n is any nucleotide
nnnnnnnnnnnnnnnnnnnnnnnnnnnnccacacagtcaataacaatcacagagcaaattatttgctttatctctggcttgttatctttgcacagggggccactatcatttccaggaaccgctgcttccatctcccagttgactcattccattgcagctattttctgtctcttctgaggaggaaatgaccgacagcacctgcatgtatcattcatttttttgtctgtctgaataaaagtggaagtgggtgctccgatgactgcttctttattttagacttttaagtacaccggaactatrtgagtcattctttcaaagaagctgaaatagcatattgccaggaactgggcccacaccaaagttagaccacaggcttttcttctacagagaccgcaggtgtctacctgcccaagaaggcacgaagaaccaatgacagagaaactccagctagaaatggagcctgagctccacaggctccagttcctactctcccccaccaaaaattgacaaaaattccctccaataccttatgctttcataacatgaaatgggaatagatcactgagaaaggacctctcactgaggaaggaccagaaatc

SEQ ID NO: 83312 - DNA, 599 bp, Chicken  19866894379195_1
  misc_feature (1)..(192): n is any nucleotide
nnnnnnnnnnnnnnnnnnnnnnnnnnnnnnnnnnnnnnnnnnnnnnnnnnnnnnnnnnnnnnnnnnnnnnnnnnnnnnnnnnnnnnnnnnnnnnnnnnnnnnnnnnnnnnnnnnnnnnnnnnnnnnnnnnnnnnnnnnnnnnnnnnnnnnnnnnnnnnnnnnnnnnnnnnnnnnnnnnnnnnnnnnnnnnnnttatcttttacaaaagtatctttatctatttccaagaactctgtgacagtgacacaattttttgtcaggaccaacgtttaagactgggacaagataaagtcatacttwaaaaaaaaacaccaaaaaaaaccccatatttaacattccacaacagaaaagatctggggcagctacacaaaagcaagtccaggactgccctgccaattacatacagatttaggaggttgacagtcattgcagccctatgaaatatgagaactttgcaggtgacaaaacatcagtgacagcaggaattcctcgtcggtattgaaaggcaagattttatctttccggaaaaagcagcaaacgagaaggagaaggcacacagtgcaacaaaggaggagcagagggctctgtgagaggcgtag

SEQ ID NO: 83313 - DNA, 600 bp, Chicken  19866894379215_1
aatattataaagcttctataaataagacttttatcttgttacgcattgacagaaatcctatgtaatggatacttagttctactgacaacagtaatgcaattgtgtcgtatcaccaaaaaaatgtaaaacagatataaatgctacaaaagggaaaacaaagtctagaagctgttgtgttacaacttgaaataggaaaaaaaagcagttcttcacctatctgttcatatgcacggtcgtactgcatggtcatactgcataaactcacgaatgacacagaaagataaaacagtatttttaagyaatgcaagcaaacaccctcctccccaccatsactttttttccttatattcttttcctcattgctttctcctgtcattcacrctatttctcagtgaaagaaaagcttgatagctctccttcaggagggcttctgatttttggtagctttgtacctccatgctatatgacatctcattctgcaggggcctttgtttttcattttccctctttcactctctttatcatcacttttattttctttcttttctcccccacataagaagatacagtaggcaacgaagaggtatttccattttttct

SEQ ID NO: 83314 - DNA, 600 bp, Chicken  19866894379215_2
tatcttgttacgcattgacagaaatcctatgtaatggatacttagttctactgacaacagtaatgcaattgtgtcgtatcaccaaaaaaatgtaaaacagatataaatgctacaaaagggaaaacaaagtctagaagctgttgtgttacaacttgaaataggaaaaaaaagcagttcttcacctatctgttcatatgcacggtcgtactgcatggtcatactgcataaactcacgaatgacacagaaagataaaacagtatttttaagyaatgcaagcaaacaccctcctccccaccatsactttttttccttatattcttttcctcattgctttctcctgtcattcacrctatttctcagtgaaagaaaagcttgatagctctccttcaggagggcttctgatttttggtagctttgtacctccatgctatatgacatctcattctgcaggggcctttgtttttcattttccctctttcactctctttatcatcacttttattttctttcttttctcccccacataagaagatacagtaggcaacgaagaggtatttccattttttctttttaactatgtcacatctcgctccatcagc

SEQ ID NO: 83315 - DNA, 600 bp, Chicken  19866894379215_3
ctgacaacagtaatgcaattgtgtcgtatcaccaaaaaaatgtaaaacagatataaatgctacaaaagggaaaacaaagtctagaagctgttgtgttacaacttgaaataggaaaaaaaagcagttcttcacctatctgttcatatgcacggtcgtactgcatggtcatactgcataaactcacgaatgacacagaaagataaaacagtatttttaagyaatgcaagcaaacaccctcctccccaccatsactttttttccttatattcttttcctcattgctttctcctgtcattcacrctatttctcagtgaaagaaaagcttgatagctctccttcaggagggcttctgatttttggtagctttgtacctccatgctatatgacatctcattctgcaggggcctttgtttttcattttccctctttcactctctttatcatcacttttattttctttcttttctcccccacataagaagatacagtaggcaacgaagaggtatttccattttttctttttaactatgtcacatctcgctccatcagctcaggaacttctatgaaaccattccacaattacagttccacctcaagtcc

SEQ ID NO: 83316 - DNA, 600 bp, Chicken  19866894379217_1
cggtgttttgttttttttttactattcctttgggcactataataatgaatacaatagtatgtcatctaaacataacaatggaagaagattattttagagtggacgagaattcaaatatttactgcaaggagcatctctcatttacttcagtatcagatgccacttttgacacaatcagccatcaattggtttcatcagcttaactcattattccaggatacatagggaggtcttcaattctgacacgtaggcacgcattcactcagtactgccagttccgaaacttttcattatctagayacagtagcctatcagttccattcagtatcaaaaaataaagaagtatgacctgagcgtataaaaaagctaaataacatcccaaaaacaatatgccaaatccaagtgcagaaaactgaagtctgttctggttttcatgccagtgtcatggagtggaagacaaccctgactcatgagcttttaaagctgcctaatggttttgtacattgagatctaggaagttttaaaatcttatacgtacatttttagaactgggacttcagagactttcttccttgatttttgtttttaattagatggttg

SEQ ID NO: 83317 - DNA, 600 bp, Chicken  19866894379219_1
agaaggggtagaaggagcatatttacatagccttagaatttaggtggattaccttaattttttttcagcttttacatacagagacgtaagaactgccctattgagctggataccaaataactgtaagtatattctgccaattttctagttatgtagcactatacattataattactggtatttttttcacaattaaaccattttaattttatgtacatttataaaaaatattgtcttactgttctcattatcttacatgtacttacttatcccatctgtattgtattatattgatccttmggatttcctctaaacaaagatttttatctaaaagttcatgtaggttaagagaaagatgaagacacagtcaaaagtcagtgccttaggacatacacgttccagctgactgtgtggaaatgtcctaggtggcctaagatgtggccagctgtggttttggagttgtttgcagatatctgtgaagttatgatgtacccttatcgtgaacagatctggtaagactgacttttcacgttctacaccactggcaatagtgaagtgtcagtgtttaataattggaaccactgcataaccttgtgagtg

SEQ ID NO: 83318 - DNA, 600 bp, Chicken  19866894379220_1
atagaagctgaggaaccactggcaggtgagaaaagcaatgcaggaagagcaaaccaacctgtggctggaaatgtcctctttcatttgttgcagctctcctgaactctccagctctcctgcatgcaccgcaccagtcagatttgctgctctctggatgctcttagagattccttcagtcatcttggcctttccttgactgctcagcactgttcccccctgctgctttccttccccactcacctcccaggagcacagctgagaagctcaccatctcccttccatccccaaaagcaggagttkgccagcagcacggatttgcaatctatatgttaatcgttatccacctccagggactgtgctgacctccagaaagggaggtttcattgacaaacacgccayggatgctcccagcttccatccagagaggaagtttccatgatgggtgcaaacggtgcaatgctcacagatgggggtctcactaattagcatcagcctgtgccgtgtgacagggagaagaggctgggcaggctgctctgcattccgagcctgtgctaatggtgtggcacctgatgggagagtggagaagggaagagtccaaag

SEQ ID NO: 83319 - DNA, 541 bp, Chicken  19866894379220_2
tgaactctccagctctcctgcatgcaccgcaccagtcagatttgctgctctctggatgctcttagagattccttcagtcatcttggcctttccttgactgctcagcactgttcccccctgctgctttccttccccactcacctcccaggagcacagctgagaagctcaccatctcccttccatccccaaaagcaggagttkgccagcagcacggatttgcaatctatatgttaatcgttatccacctccagggactgtgctgacctccagaaagggaggtttcattgacaaacacgccayggatgctcccagcttccatccagagaggaagtttccatgatgggtgcaaacggtgcaatgctcacagatgggggtctcactaattagcatcagcctgtgccgtgtgacagggagaagaggctgggcaggctgctctgcattccgagcctgtgctaatggtgtggcacctgatgggagagtggagaagggaagagtccaaagaggaactccagcaaagggtcggtgctcagcacacgaggag

SEQ ID NO: 83320 - DNA, 600 bp, Chicken  19866894379224_1
atgtattgccaaggagagtcctttatgcagtcctttatccacattttactgccacaagaagatgctcgctcaggtgctggatttatctagtactaagctgtaacagtactcaagaagcatggacttgttttgatgcctaatgctcattttcattgaagattttgaacgttttagcttggaatagaatacaggggtaagagatgccatttagtttttgatcaaaataaggtagaaaaactcaggctacaagtcaggcagtgtcttaacattccctattaaattgttagttgaataaactcrgtaattcactgcttgaagaacaagtaattctttttgcctgctttgtgacagaattccacaagcaagccaaggcagaaatcctctaaacattgtcagttacaacatgtttagccctgtgacaggcatgaagataatagtcattacacattagaaaggcttctttgtgtcacacattcttcttccacaagtttacataaatacttttcaaacaattatttttcccccatcatctgaaatcattacaatatctgctctgaggaagctctgaccaaatatttactactaaaagggctactgact

SEQ ID NO: 83321 - DNA, 476 bp, Chicken  19866894379225_1
  misc_feature (1)..(41): n is any nucleotide
nnnnnnnnnnnnnnnnnnnnnnnnnnnnnnnnnnnnnnnnncacacgtttagcccaggttacagttaggacttttgtagtaaccaagctggggctgggaggtgtgagtagctggcaggcatgactaacagctgagaaggagcttctttgtaaaccacatctcaagtgtgaagacaactcctatattctaagtggtaaaagacagcttcttaggctgtccaccacctcggtgttaatatgccctgctatctggctgtgagatcgaaaacagttttgcttaaaccatcgtggcttcagctgrcagcttgactttgcattgaacccagccttaaaggcttatgcacatttaaataaaaattgccttctcttgggaagtaacacctgggagtccaatccccctgctaaagcaggttccctatgataggtagcacaagtaggcrtccagatgggtcttgaatatctccatagaaggagact

SEQ ID NO: 83322 - DNA, 337 bp, Chicken  19866894379225_2
cacacgtttagcccaggttacagttaggacttttgtagtaaccaagctggggctgggaggtgtgagtagctggcaggcatgactaacagctgagaaggagcttctttgtaaaccacatctcaagtgtgaagacaactcctatattctaagtggtaaaagacagcttcttaggctgtccaccacctcggtgttaatatgccctgctatctggctgtgagatcgaaaacagttttgcttaaaccatcgtggcttcagctgrcagcttgactttgcattgaacccagccttaaaggcttatgrtccagatgggtcttgaatatctccatagaaggagact

SEQ ID NO: 83323 - DNA, 600 bp, Chicken  19866894379226_1
tccacagcttcagacgtagtatcggcgcttttgtgctggtgatggtgggacttctgatcgtggtggccctcccttttcctggcatccgtgtcaaagaagacgtgggttaacctctccaggtagtgctccagctcctcctgggtgtgctccagttgtttgccaacgttactgggaaaaaaggaagaggaaggtggtgggcttttgctttccatctctctcttggcctcctccacgtgtgggttatgcttcattagaaaaaccacgatgacaaacaagatcaggcacagatacacaacccaracttcttccatcttggtggctaatgctcgtcagtgtactcaaagggagaaagacagatgtgccaaacaccgcaggtgtgtcagtatccacgggaaagaactgttgccggtaaccaaagcactgcagtaacgtaatgtcaaagttcaattttctaaacgagtgtggcttgcaaacttcccttcagttccaagtatgaaagcagcactgtggacagcaaaagaaaatttaagtaaagaaaacagaaccgttttgtccttggagtaaaataacttcagcagaaaggcagaggatcttctgtca

SEQ ID NO: 83324 - DNA, 600 bp, Chicken  19866894379233_1
tactaactcagaggtggattccttccagatcatgtacagtatctagattatgcttgactcaggaattcccttgaatctgtttaaattgttcagttgtgttataccttgtttgaaactaaaatgccttttttgagaagtaagtacctggcttcttttttttattcattatattttaataccgaatgtatttaaaattattgataaagctcatgtgaagaactgtcattcaagagatatttacttctgcagtagcactctgaagaggatctggtacaggacaagtagcctaactatttgtcytcagtacaaaacaaggaacccaggatcaatccgttttaaagattttttgatttccctttcttttgtttgggaagctgggtgagctttccaatgttcttaaataatagaatcatcttgtagcattggcaatgtcaygaataaytgttgaatattttaacttctgtttacagggtttagagatagtatttcgagtaggtttagcactacttcagacaaaccaagcagarttgctgcaacttgacatggaagggatgttacaggtaagattataatattttaagagatatgagaaatgtgtgg

SEQ ID NO: 83325 - DNA, 600 bp, Chicken  19866894379233_2
agtaagtacctggcttcttttttttattcattatattttaataccgaatgtatttaaaattattgataaagctcatgtgaagaactgtcattcaagagatatttacttctgcagtagcactctgaagaggatctggtacaggacaagtagcctaactatttgtcytcagtacaaaacaaggaacccaggatcaatccgttttaaagattttttgatttccctttcttttgtttgggaagctgggtgagctttccaatgttcttaaataatagaatcatcttgtagcattggcaatgtcaygaataaytgttgaatattttaacttctgtttacagggtttagagatagtatttcgagtaggtttagcactacttcagacaaaccaagcagarttgctgcaacttgacatggaagggatgttacaggtaagattataatattttaagagatatgagaaatgtgtggtgtgtttatttgtggctgttaattatatgtaatcttgtactctgattgcttttagcactttcaaaaggtcattccacatcagtttgacagtggtccagacaaattaatccaagcatcttaccaagtcaaatacaa

SEQ ID NO: 83326 - DNA, 600 bp, Chicken  19866894379233_3
acctggcttcttttttttattcattatattttaataccgaatgtatttaaaattattgataaagctcatgtgaagaactgtcattcaagagatatttacttctgcagtagcactctgaagaggatctggtacaggacaagtagcctaactatttgtcytcagtacaaaacaaggaacccaggatcaatccgttttaaagattttttgatttccctttcttttgtttgggaagctgggtgagctttccaatgttcttaaataatagaatcatcttgtagcattggcaatgtcaygaataaytgttgaatattttaacttctgtttacagggtttagagatagtatttcgagtaggtttagcactacttcagacaaaccaagcagarttgctgcaacttgacatggaagggatgttacaggtaagattataatattttaagagatatgagaaatgtgtggtgtgtttatttgtggctgttaattatatgtaatcttgtactctgattgcttttagcactttcaaaaggtcattccacatcagtttgacagtggtccagacaaattaatccaagcatcttaccaagtcaaatacaatgcaaaa

SEQ ID NO: 83327 - DNA, 600 bp, Chicken  19866894379233_4
caagagatatttacttctgcagtagcactctgaagaggatctggtacaggacaagtagcctaactatttgtcytcagtacaaaacaaggaacccaggatcaatccgttttaaagattttttgatttccctttcttttgtttgggaagctgggtgagctttccaatgttcttaaataatagaatcatcttgtagcattggcaatgtcaygaataaytgttgaatattttaacttctgtttacagggtttagagatagtatttcgagtaggtttagcactacttcagacaaaccaagcagarttgctgcaacttgacatggaagggatgttacaggtaagattataatattttaagagatatgagaaatgtgtggtgtgtttatttgtggctgttaattatatgtaatcttgtactctgattgcttttagcactttcaaaaggtcattccacatcagtttgacagtggtccagacaaattaatccaagcatcttaccaagtcaaatacaatgcaaaaaagatgaaaaagtaggtataacattttgagaaaagattatactattgcttggagttactgtttgtttgttcaaaacggttacttg

SEQ ID NO: 83328 - DNA, 491 bp, Chicken  19866894379233_5
tataatattttaagagatatgagaaatgtgtggtgtgtttatttgtggctgttaattatatgtaatcttgtactctgattgcttttagcactttcaaaaggtcattccacatcagtttgacagtggtccagacaaattaatccaagcatcttaccaagtcaaatacaatgcaaaaaagatgaaaaagtaggtataacattttgagaaaagattatactattgcttggagttactgtttgtttgttcaaaacggttacttgttacttcactttgaattttctgtgtctaaattcttcgggrttttatactgtgaacagttaaaaactgaagtactgtttgcaagagaaatctactaaagtgatatttgctratcttgaatataatcaaatctcgcttaaaaactaaagcttctgaggaaagctgcatgttacagaaaattacagagcttctgtaaagtggatttgaatagaaaatccrttgtgggatggggg

SEQ ID NO: 83329 - DNA, 421 bp, Chicken  19866894379233_6
tactctgattgcttttagcactttcaaaaggtcattccacatcagtttgacagtggtccagacaaattaatccaagcatcttaccaagtcaaatacaatgcaaaaaagatgaaaaagtaggtataacattttgagaaaagattatactattgcttggagttactgtttgtttgttcaaaacggttacttgttacttcactttgaattttctgtgtctaaattcttcgggrttttatactgtgaacagttaaaaactgaagtactgtttgcaagagaaatctactaaagtgatatttgctratcttgaatataatcaaatctcgcttaaaaactaaagcttctgaggaaagctgcatgttacagaaaattacagagcttctgtaaagtggatttgaatagaaaatccrttgtgggatggggg

SEQ ID NO: 83330 - DNA, 314 bp, Chicken  19866894379233_7
gatgaaaaagtaggtataacattttgagaaaagattatactattgcttggagttactgtttgtttgttcaaaacggttacttgttacttcactttgaattttctgtgtctaaattcttcgggrttttatactgtgaacagttaaaaactgaagtactgtttgcaagagaaatctactaaagtgatatttgctratcttgaatataatcaaatctcgcttaaaaactaaagcttctgaggaaagctgcatgttacagaaaattacagagcttctgtaaagtggatttgaatagaaaatccrttgtgggatggggg

SEQ ID NO: 83331 - DNA, 600 bp, Chicken  19866894379235_1
aaactatgattcagatttcccttttccaagggcactcaagaagcagtgtttttatgctatagctcctgaaaggtaaatagaaacaaaaccaaaagtagttcctgtcagctcccatacctatgaaaagagataaccatttcatagataatctgacagagtaacaaccagaacatctcagcacagctactttttttactctggtatgtattctcttgtgatttttggatagcaagttctccagttattacatgaacattaaagtgctatatagatgacatctgaaataactgcctaactctycccaagaaatcccaagaaactgtattactaatgaataggctttagcccaggttctgggagcccaaagctcctataaggagaagcaacaagtcatcaccactgtccctgaatagtggtctgcttggtatactgcgacatcccacagtgctccacatccagctgacttgctttgagtgcatttacagaatcaagccataaaggatttggcttcttaacttttaagaatggctttaattaggagccaaaactccacaaatctggcaatatcaagagacctagtcttcaatattttaatagaac

SEQ ID NO: 83332 - DNA, 600 bp, Chicken  19866894379237_1
aaccactctatgctggtttgaaaaacagtcataagaagaccatactgagtaggaagcgtgacgtcatcctagtgtctcaactgatctagtgtatggtggcagtgaaatgaaaagtggaacaaagaaagctaataaaaacttgctattccaaactttgcaggagttcagggttcacaagtgacagtgaattaaaatgtaactggaaaggtgtaaattataaatgaaaataaatgatgtaattttgaaagctgtttttatattgtgtaactacaatattcttgctctgtagctttgtaggtrtgtgctagaagtagcagagwccagacagaagtgggctattatgcaacctgaaaggtatraaagatagaaataaaatatccatcttatcctatgatattctactctttagcctaggctttatgaattggcacaattctacaacttgcagatcaataaggcaatgactaacctgttgttgacagaaatgagaatggaaaaggtgatggtacctaatattgtggttaacttgcttatcactgtattttggtatctcttttcctttccttgagcaatttcttagaagagtaatgtatcagaaca

SEQ ID NO: 83333 - DNA, 600 bp, Chicken  19866894379237_2
aaaaacagtcataagaagaccatactgagtaggaagcgtgacgtcatcctagtgtctcaactgatctagtgtatggtggcagtgaaatgaaaagtggaacaaagaaagctaataaaaacttgctattccaaactttgcaggagttcagggttcacaagtgacagtgaattaaaatgtaactggaaaggtgtaaattataaatgaaaataaatgatgtaattttgaaagctgtttttatattgtgtaactacaatattcttgctctgtagctttgtaggtrtgtgctagaagtagcagagwccagacagaagtgggctattatgcaacctgaaaggtatraaagatagaaataaaatatccatcttatcctatgatattctactctttagcctaggctttatgaattggcacaattctacaacttgcagatcaataaggcaatgactaacctgttgttgacagaaatgagaatggaaaaggtgatggtacctaatattgtggttaacttgcttatcactgtattttggtatctcttttcctttccttgagcaatttcttagaagagtaatgtatcagaacaagaaaggttaatatgcaaat

SEQ ID NO: 83334 - DNA, 600 bp, Chicken  19866894379237_3
gacgtcatcctagtgtctcaactgatctagtgtatggtggcagtgaaatgaaaagtggaacaaagaaagctaataaaaacttgctattccaaactttgcaggagttcagggttcacaagtgacagtgaattaaaatgtaactggaaaggtgtaaattataaatgaaaataaatgatgtaattttgaaagctgtttttatattgtgtaactacaatattcttgctctgtagctttgtaggtrtgtgctagaagtagcagagwccagacagaagtgggctattatgcaacctgaaaggtatraaagatagaaataaaatatccatcttatcctatgatattctactctttagcctaggctttatgaattggcacaattctacaacttgcagatcaataaggcaatgactaacctgttgttgacagaaatgagaatggaaaaggtgatggtacctaatattgtggttaacttgcttatcactgtattttggtatctcttttcctttccttgagcaatttcttagaagagtaatgtatcagaacaagaaaggttaatatgcaaatctgacagagctgagactgtattgatacaacagtgcaggt

SEQ ID NO: 83335 - DNA, 600 bp, Chicken  19866894379238_1
ttttctctcaggctgtttctctatgaaagacatttgtgacgtgacttcttaaagctgggggaggtttacttctgggactgaaaaaattacaaactgttctgaaggtgatcttctgagcccattgtgatctctctgcttttcacctgggtgattagttttttatcggactacttaatattttttatcagattccagataaatgcatgtgaggaagatgaggagcacccaaaattgcactgtgtagggtggaaaaatcaagatttttcatcagtggcacgtggtggtaacctgtaaaacagyatgcagcctttgggaaggcagtcattgtatttagattttattctggtcgggaagcwkggcttaaatgaggcraacccaagctcacaatgaagcaagaacagtaaggagtgtagctctgggggggctgtggattgtatgtatgtagtacagagaggggacaggtatagtaaagatgtgtgacaaaaatgtgattgggttcttgtggtcttgtgggtggcacatcgttccgtttgtgtctatgttctggatttctgaggtgagtacagtgtcagaaggttgttaaacttgaatttcactgtt

SEQ ID NO: 83336 - DNA, 600 bp, Chicken  19866894379238_2
gggggaggtttacttctgggactgaaaaaattacaaactgttctgaaggtgatcttctgagcccattgtgatctctctgcttttcacctgggtgattagttttttatcggactacttaatattttttatcagattccagataaatgcatgtgaggaagatgaggagcacccaaaattgcactgtgtagggtggaaaaatcaagatttttcatcagtggcacgtggtggtaacctgtaaaacagyatgcagcctttgggaaggcagtcattgtatttagattttattctggtcgggaagcwkggcttaaatgaggcraacccaagctcacaatgaagcaagaacagtaaggagtgtagctctgggggggctgtggattgtatgtatgtagtacagagaggggacaggtatagtaaagatgtgtgacaaaaatgtgattgggttcttgtggtcttgtgggtggcacatcgttccgtttgtgtctatgttctggatttctgaggtgagtacagtgtcagaaggttgttaaacttgaatttcactgtttcaatgattattcctgtccgggtattcagggagtcaaagagcaaaggtgcatattt

SEQ ID NO: 83337 - DNA, 600 bp, Chicken  19866894379238_3
ggggaggtttacttctgggactgaaaaaattacaaactgttctgaaggtgatcttctgagcccattgtgatctctctgcttttcacctgggtgattagttttttatcggactacttaatattttttatcagattccagataaatgcatgtgaggaagatgaggagcacccaaaattgcactgtgtagggtggaaaaatcaagatttttcatcagtggcacgtggtggtaacctgtaaaacagyatgcagcctttgggaaggcagtcattgtatttagattttattctggtcgggaagcwkggcttaaatgaggcraacccaagctcacaatgaagcaagaacagtaaggagtgtagctctgggggggctgtggattgtatgtatgtagtacagagaggggacaggtatagtaaagatgtgtgacaaaaatgtgattgggttcttgtggtcttgtgggtggcacatcgttccgtttgtgtctatgttctggatttctgaggtgagtacagtgtcagaaggttgttaaacttgaatttcactgtttcaatgattattcctgtccgggtattcagggagtcaaagagcaaaggtgcatattta

SEQ ID NO: 83338 - DNA, 600 bp, Chicken  19866894379238_4
tgggactgaaaaaattacaaactgttctgaaggtgatcttctgagcccattgtgatctctctgcttttcacctgggtgattagttttttatcggactacttaatattttttatcagattccagataaatgcatgtgaggaagatgaggagcacccaaaattgcactgtgtagggtggaaaaatcaagatttttcatcagtggcacgtggtggtaacctgtaaaacagyatgcagcctttgggaaggcagtcattgtatttagattttattctggtcgggaagcwkggcttaaatgaggcraacccaagctcacaatgaagcaagaacagtaaggagtgtagctctgggggggctgtggattgtatgtatgtagtacagagaggggacaggtatagtaaagatgtgtgacaaaaatgtgattgggttcttgtggtcttgtgggtggcacatcgttccgtttgtgtctatgttctggatttctgaggtgagtacagtgtcagaaggttgttaaacttgaatttcactgtttcaatgattattcctgtccgggtattcagggagtcaaagagcaaaggtgcatatttatttgaaaggtctgac

SEQ ID NO: 83339 - DNA, 600 bp, Chicken  19866894379240_1
attctgcaggagcacactctgaatgtcgctgctgtatttaatgctcagctggatggctgagagctcaaaatggctgtcgagataagatttctcattctcagtaagtactacacctgcttaggcagagtttttcttttaataccacattgttttaggtaatattagaaatgtactaacaatataaagagcaaaaacatcagagactaaactggtgtagccaaatccatagatgagtgtccaagaaaaagaagactcccattcagaggtactgcatagggacacttaaaattgtcttccctyktatctgtgaattaatgaatattgggcacctctgaaaaatagtgtgccaagctcaggtatcagttatgggcttaatcccacgaggttggcartattagacaaaggcaacagatgtgacacaaaatgtgataggtttcatttggctcaaggaaatttatggtatttgaagaagttccaaactcaatttgtcttctcaggtctcagaaagttctccacctcctgtaagctttgaatcacagtatttaaagtcaaaaaaattttagagcaccaaatccaacctatgatgtatgaaccaagata

SEQ ID NO: 83340 - DNA, 600 bp, Chicken  19866894379240_2
ttctgcaggagcacactctgaatgtcgctgctgtatttaatgctcagctggatggctgagagctcaaaatggctgtcgagataagatttctcattctcagtaagtactacacctgcttaggcagagtttttcttttaataccacattgttttaggtaatattagaaatgtactaacaatataaagagcaaaaacatcagagactaaactggtgtagccaaatccatagatgagtgtccaagaaaaagaagactcccattcagaggtactgcatagggacacttaaaattgtcttccctyktatctgtgaattaatgaatattgggcacctctgaaaaatagtgtgccaagctcaggtatcagttatgggcttaatcccacgaggttggcartattagacaaaggcaacagatgtgacacaaaatgtgataggtttcatttggctcaaggaaatttatggtatttgaagaagttccaaactcaatttgtcttctcaggtctcagaaagttctccacctcctgtaagctttgaatcacagtatttaaagtcaaaaaaattttagagcaccaaatccaacctatgatgtatgaaccaagatat

SEQ ID NO: 83341 - DNA, 600 bp, Chicken  19866894379240_3
cattctcagtaagtactacacctgcttaggcagagtttttcttttaataccacattgttttaggtaatattagaaatgtactaacaatataaagagcaaaaacatcagagactaaactggtgtagccaaatccatagatgagtgtccaagaaaaagaagactcccattcagaggtactgcatagggacacttaaaattgtcttccctyktatctgtgaattaatgaatattgggcacctctgaaaaatagtgtgccaagctcaggtatcagttatgggcttaatcccacgaggttggcartattagacaaaggcaacagatgtgacacaaaatgtgataggtttcatttggctcaaggaaatttatggtatttgaagaagttccaaactcaatttgtcttctcaggtctcagaaagttctccacctcctgtaagctttgaatcacagtatttaaagtcaaaaaaattttagagcaccaaatccaacctatgatgtatgaaccaagatataaataacttaggggcctgtctacccggagagctcttctagactctgttcattccctttagaattacacaatctatcgtgcttaagaaaggt

SEQ ID NO: 83342 - DNA, 600 bp, Chicken  19866894379240_4
gatggatgaatgatgactgaagtagaagtcacttgtaagcatgccaaatttcaaccatcttggctgaaattgtccctgaaaggtatttctcttgggggcacttttttttttgtaataagaaaaaacttttgtcagaacaagtcatctatttccaagtgtaagtatatggaaaagacgtattttttctatgtctagaaaacttttctctattttttgctgtggaactgagtctttggaagaaggattgcatttatgttagtaacactttctactttatggggaaaatctattttgtacaarttttaggaaaaaaagaaaaacatccctgcacttccctgtaatacaaaagtaattctctaaagtgtttatcaactttggaagtggtccgtctactggctgaatgggatttgccatgcagttgctgatctgttgactttctccaagctatgcagagtttgacttccaagatgtgtaccagaatggggaccgtgaccttggtttctgtgtattgtcaatacacccccaaagctaatgcaagtaaagcagaattcaaggaaaggaaacaaagctttgaggaaaacttgagcaatgagagtaggt

SEQ ID NO: 83343 - DNA, 600 bp, Chicken  19866894379253_1
gaggtcttagtgctcaagtgcaacgtactctgcctgagaatgaagccaagcaaggtagaataagcttttaaagaggaaaggaaaaatatagctcaaacaacacggaagaaaagcttagaacagtgtgaataagaggatgatgattaaaggagcaaaagagaaggatttggtatataggaactacccaacctctggctatcactctgagtgggaaattcccacagatcattatttttacagccttcctcatcttttttctctatggagaaaagagagccaagacaggctgtgctggcaatsggaattagtaaccaaaatggaacaactttctgaagtcttgtttggagacctcacaccatcttagaggtagcagaaactgcagcaagacttgtaagaacttcagtccaggactggcaagctggagaagggaataaatagctttaccgctatgtcattgagatggggaaagagtgtcaagcatagggggcactattaattataatgcctgaagtattggaattgtaaataaaagtgcttgatgcccaaragtaggaaatgacagatagatagtatttttcctcataaagacacagaagagaa

SEQ ID NO: 83344 - DNA, 600 bp, Chicken  19866894379253_2
catcttttttctctatggagaaaagagagccaagacaggctgtgctggcaatsggaattagtaaccaaaatggaacaactttctgaagtcttgtttggagacctcacaccatcttagaggtagcagaaactgcagcaagacttgtaagaacttcagtccaggactggcaagctggagaagggaataaatagctttaccgctatgtcattgagatggggaaagagtgtcaagcatagggggcactattaattataatgcctgaagtattggaattgtaaataaaagtgcttgatgcccaaragtaggaaatgacagatagatagtatttttcctcataaagacacagaagagaaactgttttacatsactaaaactgcatgcaatattcrtatttggcagtgtaacataatatcattgtatgtttccatctatcaaaaatagttgggctgaaaagtctagacctgtttactggagaggtgtctgctggcaaacacaagaaaggaacagcagcgctgggttcagaaatagttacacaaactctaggcagaaagccaactacaaaaaggtgccaagcatctgaggccacttgacatggggaca

SEQ ID NO: 83345 - DNA, 538 bp, Chicken  19866894379253_3
aaaatggaacaactttctgaagtcttgtttggagacctcacaccatcttagaggtagcagaaactgcagcaagacttgtaagaacttcagtccaggactggcaagctggagaagggaataaatagctttaccgctatgtcattgagatggggaaagagtgtcaagcatagggggcactattaattataatgcctgaagtattggaattgtaaataaaagtgcttgatgcccaaragtaggaaatgacagatagatagtatttttcctcataaagacacagaagagaaactgttttacatsactaaaactgcatgcaatattcrtatttggcagtgtaacataatatcattgtatgtttccatctatcaaaaatagttgggctgaaaagtctagacctgtttactggagaggtgtctgctggcaaacacaagaaaggaacagcagcgctgggttcagaaatagttacacaaactctaggcagaaagccaactacaaaaaggtgccaagcatctgaggccacttgacatggggacatttg

SEQ ID NO: 83346 - DNA, 515 bp, Chicken  19866894379253_4
cttgtttggagacctcacaccatcttagaggtagcagaaactgcagcaagacttgtaagaacttcagtccaggactggcaagctggagaagggaataaatagctttaccgctatgtcattgagatggggaaagagtgtcaagcatagggggcactattaattataatgcctgaagtattggaattgtaaataaaagtgcttgatgcccaaragtaggaaatgacagatagatagtatttttcctcataaagacacagaagagaaactgttttacatsactaaaactgcatgcaatattcrtatttggcagtgtaacataatatcattgtatgtttccatctatcaaaaatagttgggctgaaaagtctagacctgtttactggagaggtgtctgctggcaaacacaagaaaggaacagcagcgctgggttcagaaatagttacacaaactctaggcagaaagccaactacaaaaaggtgccaagcatctgaggccacttgacatggggacatttg

SEQ ID NO: 83347 - DNA, 600 bp, Chicken  19866894379254_1
tagcaacctgggaggatcagtagtttttcagagagaattatattttgtcgtatttcagactatgacaacaatgtgctgtggttccaaagcttctgaactgcccagcatcttctgaattaccatactgactcctcatttttcattattttaggtattgtagatacttcccccataaaaatagggggattattttgttctcaattcattcttgctctgtaaattaaatcttttgtaagttaaagaggctgtcagagttgatgagagttggtcctacattgaaaaaatgagcaacataaaaaracacggtttctgatgaaaaatgtccgctggcttttgatgaggattattctgtcttccccccactatctagttgatgcatatcatgtattaaaaaaaatatttcactgtgtggaaagagaagcacaagctcttgttccttacattgaaacacctgcatctgcctccttgttcatagtccaatctgttgggatttcaggaagagtgtatggtgggaatttgttactgggaagctaagcttctgtgtgaaagtttttgtagcaaggtggcaggggtggtgaagagagtgttgctctgaaagct

SEQ ID NO: 83348 - DNA, 600 bp, Chicken  19866894379258_1
ataaaatttcaataactgcaggccacagttgagtaaacagttgcactgaaacttaattcctgttgacttttccctcattcttcgccaggggcacattctgattcgtagtgcaaagacaacaggggttacagctttgattaatataggacagtagaagaggattcgaacagtgaaatatgttcaacgcaaaggtctcttcttaaagaggcttgatatcaaaatgagttaattacgctgcctttccataggggcacgatggaattttccagtgctgccgcctgcccgctttgtgcacagcaktgcacagaggacacaagcacacacacacacacacagagtagggcactgcagaccagcaacrtgcagacctctgctgttcctcttatgctccctgttcctaatcctttccatagcaccagaaccacgtgtggtggctgtgttggccggtggccacctatgcaagcagtgatggagcagcaggatcactgagtggtcctgggcacagccagggctgctctgcagctccagctcctggttgctcatcctctgccagcccagtgggtgcgttccatcagctctctgttctccggtgcttaaaag

SEQ ID NO: 83349 - DNA, 600 bp, Chicken  19866894379258_2
gttgacttttccctcattcttcgccaggggcacattctgattcgtagtgcaaagacaacaggggttacagctttgattaatataggacagtagaagaggattcgaacagtgaaatatgttcaacgcaaaggtctcttcttaaagaggcttgatatcaaaatgagttaattacgctgcctttccataggggcacgatggaattttccagtgctgccgcctgcccgctttgtgcacagcaktgcacagaggacacaagcacacacacacacacacagagtagggcactgcagaccagcaacrtgcagacctctgctgttcctcttatgctccctgttcctaatcctttccatagcaccagaaccacgtgtggtggctgtgttggccggtggccacctatgcaagcagtgatggagcagcaggatcactgagtggtcctgggcacagccagggctgctctgcagctccagctcctggttgctcatcctctgccagcccagtgggtgcgttccatcagctctctgttctccggtgcttaaaagacctttatgtttttgtggttggatccttctggtaatcggttctgatgggtaactttccagt

SEQ ID NO: 83350 - DNA, 600 bp, Chicken  19866894379262_1
tcaatactaaatgcatcgtttagaaaagcccgcactaattagctgagagggacaaggctgcagaacaatagcgggtacagaattccatacccactattgttggaagggcctaaagaaacgcctgtgttcctctggaagcccagttcttaatttaaagaacatccagaaatattccactgggcgtttccctcggacaggggaacactgtgatgtccccatgcagccccggggctcagcagccccaaagcccaaaggggactccgagctgttcttatcacatggattttacttgggcatacrttraactgctgccttaaggtgagaaaacacccataagctgaagttgggcagaatgggagcagagcactttgtgaagcagaggttgggagtctgagggcactgccatcagcatgaagggcaccacagtgtctccatatggaatctcagctcagagttccatggagcggaggaaaaaatataaatagatcaagagattcttccagaatttgggaaaattccacacaaccagcaacccttataactgttgtctgaacaaggctcaaagtccacttctcgatgagaaggtttggggagatccca

SEQ ID NO: 83351 - DNA, 600 bp, Chicken  19866894379262_2
atactaaatgcatcgtttagaaaagcccgcactaattagctgagagggacaaggctgcagaacaatagcgggtacagaattccatacccactattgttggaagggcctaaagaaacgcctgtgttcctctggaagcccagttcttaatttaaagaacatccagaaatattccactgggcgtttccctcggacaggggaacactgtgatgtccccatgcagccccggggctcagcagccccaaagcccaaaggggactccgagctgttcttatcacatggattttacttgggcatacrttraactgctgccttaaggtgagaaaacacccataagctgaagttgggcagaatgggagcagagcactttgtgaagcagaggttgggagtctgagggcactgccatcagcatgaagggcaccacagtgtctccatatggaatctcagctcagagttccatggagcggaggaaaaaatataaatagatcaagagattcttccagaatttgggaaaattccacacaaccagcaacccttataactgttgtctgaacaaggctcaaagtccacttctcgatgagaaggtttggggagatcccactc

SEQ ID NO: 83352 - DNA, 600 bp, Chicken  19866894379263_1
tgtcttatgctgaactgtcaaaacctgaagagcaggattaaggagctgccagggtaatgttaaagagatataatgtttcctgaaattgcatgtctttgctagtcatgatcctaaagcaactttcagccacagctcaggtttctcttagtatgagttcaaccaaaacaaagcaggatgttacttaggatgcacctgtttttttcctgaaattaaagcacagtaatctggtgcatttcagggaagacagcggctttggcaaactaaagagaattaaaaatgttgactgtgttaaaatagtgrtttgtatctttgctttcattctcgcagatgatgcagaatttgctgctggaagagggaggcctggtacaagtggagagtgtgaatcttcaagttgccacttactcaaaatttcagccacagagtccrgattttcttgacatcaccaatcccaaggctgtgtatccttcctgtttgttgatggagcagggaagaaaagtttactcccaagttgtaacgatgcagagctatctttttgggcacagctcatgtttttatggtagtaggtagcactgctgccatttgtgaraaacaaacaaggga

SEQ ID NO: 83353 - DNA, 600 bp, Chicken  19866894379263_2
ccacagctcaggtttctcttagtatgagttcaaccaaaacaaagcaggatgttacttaggatgcacctgtttttttcctgaaattaaagcacagtaatctggtgcatttcagggaagacagcggctttggcaaactaaagagaattaaaaatgttgactgtgttaaaatagtgrtttgtatctttgctttcattctcgcagatgatgcagaatttgctgctggaagagggaggcctggtacaagtggagagtgtgaatcttcaagttgccacttactcaaaatttcagccacagagtccrgattttcttgacatcaccaatcccaaggctgtgtatccttcctgtttgttgatggagcagggaagaaaagtttactcccaagttgtaacgatgcagagctatctttttgggcacagctcatgtttttatggtagtaggtagcactgctgccatttgtgaraaacaaacaagggaaaagagcttatgttgcagaatgttgacacaaagtgtagcctgtagtgtaaattagcatgagacttagctgaaagtctcctaagtttaaaagcatcctatagaagaacaactacagaaggatttgta

SEQ ID NO: 83354 - DNA, 600 bp, Chicken  19866894379263_3
tgttaaaatagtgrtttgtatctttgctttcattctcgcagatgatgcagaatttgctgctggaagagggaggcctggtacaagtggagagtgtgaatcttcaagttgccacttactcaaaatttcagccacagagtccrgattttcttgacatcaccaatcccaaggctgtgtatccttcctgtttgttgatggagcagggaagaaaagtttactcccaagttgtaacgatgcagagctatctttttgggcacagctcatgtttttatggtagtaggtagcactgctgccatttgtgaraaacaaacaagggaaaagagcttatgttgcagaatgttgacacaaagtgtagcctgtagtgtaaattagcatgagacttagctgaaagtctcctaagtttaaaagcatcctatagaagaacaactacagaaggatttgtataccttaatgttcattaaaaggcagtcttcattactgatgacttttaaaacatgtttgagagaacaaagatcagagttttatagcatagtaactgtaaagctttgatgttttactggaaaaacaaatcttaacgtactctacagattagaaaatgcattg

SEQ ID NO: 83355 - DNA, 600 bp, Chicken  19866894379263_4
cttagctgaaagtctcctaagtttaaaagcatcctatagaagaacaactacagaaggatttgtataccttaatgttcattaaaaggcagtcttcattactgatgacttttaaaacatgtttgagagaacaaagatcagagttttatagcatagtaactgtaaagctttgatgttttactggaaaaacaaatcttaacgtactctacagattagaaaatgcattgagaagctttgcttgtctaactacaggagatgttatagccatcaattacaatgaaaaggtacagtatacagcaccawccaatgtaggtttcatttctataccatcaatctggtgaaagaaattcaggtccatgtaaagtactctgtagtttagtattgtggcagcataaatactttgactacatcttgtgagatatacatatatacatatatatatatatatatatttttttttagatgagagttagtaggcaaagcttctggcagcacacacacattgatcatttgggattgtagactaagcacaattgttgatgcctaaatagtcagcatagagctgtacaatattgttggcaaatagtcacagatggtagatag

SEQ ID NO: 83356 - DNA, 599 bp, Chicken  19866894379275_1
  misc_feature (1)..(109): n is any nucleotide
nnnnnnnnnnnnnnnnnnnnnnnnnnnnnnnnnnnnnnnnnnnnnnnnnnnnnnnnnnnnnnnnnnnnnnnnnnnnnnnnnnnnnnnnnnnnnnnnnnnnnnnnnnnnntttttgcttgacagacctattttcagtctaactgagctcattgaattgcaaaggaaactaatgagtatgagcgctgtaacactcccacagatcggctcttccacctggatgcttaactgctacacaaaaccctcacacaactctactggatttgttgaacaacagcaatgtatcagagcaacaataaacasaatttaaaaagctcttccctcatatacgtaggtgagaaaacaaaataagcaaagctgtgttcaaaaagttgagaattcttcttactgaatgtatgggaaaagaaatcaaagtacctctaaaatctgcctgtctgctatattctttttggtgtggctgctaggaagcaaacaaagtcaaatgagagtgataccatttttcctcattctgaattggctgatgtatctaatacagtaacatcaaaaggacattcacaaaagataacygggatgagtatyatcacattcctaatatacactgc

SEQ ID NO: 83357 - DNA, 542 bp, Chicken  19866894379275_2
tgaacaacagcaatgtatcagagcaacaataaacasaatttaaaaagctcttccctcatatacgtaggtgagaaaacaaaataagcaaagctgtgttcaaaaagttgagaattcttcttactgaatgtatgggaaaagaaatcaaagtacctctaaaatctgcctgtctgctatattctttttggtgtggctgctaggaagcaaacaaagtcaaatgagagtgataccatttttcctcattctgaattggctgatgtatctaatacagtaacatcaaaaggacattcacaaaagataacygggatgagtatyatcacattcctaatatacactgcttcttccacagcatcagcaggtctgactgccrcatctctgcaaattccacgttcctccccaggtgggaggactacatagcactctctaaaaggcagttagatagttaggtctatggatacgtgggaaatcagctctttggagataaagagtataaaaagtcgatggctctgggatatttcaagttgggccacatctggctatgcctg

SEQ ID NO: 83358 - DNA, 530 bp, Chicken  19866894379275_3
atgtatcagagcaacaataaacasaatttaaaaagctcttccctcatatacgtaggtgagaaaacaaaataagcaaagctgtgttcaaaaagttgagaattcttcttactgaatgtatgggaaaagaaatcaaagtacctctaaaatctgcctgtctgctatattctttttggtgtggctgctaggaagcaaacaaagtcaaatgagagtgataccatttttcctcattctgaattggctgatgtatctaatacagtaacatcaaaaggacattcacaaaagataacygggatgagtatyatcacattcctaatatacactgcttcttccacagcatcagcaggtctgactgccrcatctctgcaaattccacgttcctccccaggtgggaggactacatagcactctctaaaaggcagttagatagttaggtctatggatacgtgggaaatcagctctttggagataaagagtataaaaagtcgatggctctgggatatttcaagttgggccacatctggctatgcctg

SEQ ID NO: 83359 - DNA, 475 bp, Chicken  19866894379275_4
gtgagaaaacaaaataagcaaagctgtgttcaaaaagttgagaattcttcttactgaatgtatgggaaaagaaatcaaagtacctctaaaatctgcctgtctgctatattctttttggtgtggctgctaggaagcaaacaaagtcaaatgagagtgataccatttttcctcattctgaattggctgatgtatctaatacagtaacatcaaaaggacattcacaaaagataacygggatgagtatyatcacattcctaatatacactgcttcttccacagcatcagcaggtctgactgccrcatctctgcaaattccacgttcctccccaggtgggaggactacatagcactctctaaaaggcagttagatagttaggtctatggatacgtgggaaatcagctctttggagataaagagtataaaaagtcgatggctctgggatatttcaagttgggccacatctggctatgcctg

SEQ ID NO: 83360 - DNA, 600 bp, Chicken  19866894379278_1
ctgatgactgaagaccagtttaaagaaaggcagaggaaagatataatttcccaatcaggtaccaagctaactatattatccgtggtttgccacataacagcataatatcacagttctcttttgctttcttaggcctagggtgagacaaaagtactcaggcaaaaacagccattggtagcgagcacaactttgaaaatgaagtgaatggagtagaaggataaaaataaaccttaaaacaaacaaaaaaccaaggactagatattttgcttttagaataggagtcatgggatctagtgaatrctgctttcgagaactgagagtgctttgatgtttaattttattctagtctgacagaaatatgtgccaagagattgtaaagatgtttctgtattatccagcattgctgtggatgagagttactccacaccatcctgatggaccccaaaccatttggagagcaacaccttaccgtcagtaggtatgagtattatgaaatattcattagccccataaaagccacttattccaaccaattctgcttgtttcttttatgtagtgagagatttttctattgagaaaataatttcgatgagacgtttg

SEQ ID NO: 83361 - DNA, 599 bp, Chicken  19866894379281_1
  misc_feature (1)..(12): n is any nucleotide
nnnnnnnnnnnnaagtgctttactgagctcctggcactcccataccacttcttccttctgggtcaaaggggcaaagctcttgtatttgagggtctgcaggagtagaaagggcactgttaacatttttgcatgttcaacaaaagatcacagagcagacacctagctgacttttcccaggatcatgtattgctatttaaggaggaactgctattggcttttatcttagagggctcagacaaaactatttttacctggtatcacaatactattttgtgatttgcagtaaattgcaattgtgartttttttttcctgatatcttttttaaatacttcttaaattaagagtatatgataaactgcaatcaaagaacaacagcatacagcatcttggcccttcatttgctcttgcttcagggactccatatgtcctaaatacatccaatatcgttcttccaagcttcctcccttgcatagtattcctcatctgtggtttacccttgcaaatatctcggatgtgacaactcaaccgaacttcttgcatagaaacgcatcactctctgaagcttaactaggcagatctttcaaacactgaggtggct

SEQ ID NO: 83362 - DNA, 600 bp, Chicken  19866894379281_2
caacagcatacagcatcttggcccttcatttgctcttgcttcagggactccatatgtcctaaatacatccaatatcgttcttccaagcttcctcccttgcatagtattcctcatctgtggtttacccttgcaaatatctcggatgtgacaactcaaccgaacttcttgcatagaaacgcatcactctctgaagcttaactaggcagatctttcaaacactgaggtggctcatttcacagacaaactatatatctgaaagatttattaacaaaggccttatttatcagaagtttagagcartgtgttgaactgcattttcttaatacttgtcatatgcattttgtttttttgatgtttcagtttattttgctattagaagttcatgactttgtgttgcaataagacagactaagacttgtaaagtagcttgcaactgagatcagggttataaatcacagaatgtctcccttcatagtttattgtctttcacaactcactgacgccaatggagaaacataatttaagaaccacagaaaaatagtaaagctaggtttatggacatccagtgaaaaattttyataaaccaaagtttaaaatagg

SEQ ID NO: 83363 - DNA, 600 bp, Chicken  19866894379281_3
atttatcagaagtttagagcartgtgttgaactgcattttcttaatacttgtcatatgcattttgtttttttgatgtttcagtttattttgctattagaagttcatgactttgtgttgcaataagacagactaagacttgtaaagtagcttgcaactgagatcagggttataaatcacagaatgtctcccttcatagtttattgtctttcacaactcactgacgccaatggagaaacataatttaagaaccacagaaaaatagtaaagctaggtttatggacatccagtgaaaaattttyataaaccaaagtttaaaataggttgtgtttctatatactgcttaagcatctttaatagatacttgtttgagaagtgtaagttttatgcatttcctaatatcatagtgtcaatttattttaatgttactaaatgaagaagacaatcatgattgaaatctctcaaaatccctctaaattctgrgaaacctatgcraagggctgcaagcaatccaggggaatactggattctattgaagataataacatcctggttcaagaactggacaaaccaaccagaagtgaatcattactggaccaggt

SEQ ID NO: 83364 - DNA, 600 bp, Chicken  19866894379281_4
atgtctcccttcatagtttattgtctttcacaactcactgacgccaatggagaaacataatttaagaaccacagaaaaatagtaaagctaggtttatggacatccagtgaaaaattttyataaaccaaagtttaaaataggttgtgtttctatatactgcttaagcatctttaatagatacttgtttgagaagtgtaagttttatgcatttcctaatatcatagtgtcaatttattttaatgttactaaatgaagaagacaatcatgattgaaatctctcaaaatccctctaaattctgrgaaacctatgcraagggctgcaagcaatccaggggaatactggattctattgaagataataacatcctggttcaagaactggacaaaccaaccagaagtgaatcattactggaccaggtcctcacaagtgcagagaagatgattaaggagattaagattggagtcaatctgggctgcagtgaccatgccctgattgagataatgattttgaagtatgtgggcctgggcaaagagcaaagtcagagccctgaacttcaggagagccactatcacctgtttaaggagttattgaatagggtc

SEQ ID NO: 83365 - DNA, 600 bp, Chicken  19866894379281_5
atagtttattgtctttcacaactcactgacgccaatggagaaacataatttaagaaccacagaaaaatagtaaagctaggtttatggacatccagtgaaaaattttyataaaccaaagtttaaaataggttgtgtttctatatactgcttaagcatctttaatagatacttgtttgagaagtgtaagttttatgcatttcctaatatcatagtgtcaatttattttaatgttactaaatgaagaagacaatcatgattgaaatctctcaaaatccctctaaattctgrgaaacctatgcraagggctgcaagcaatccaggggaatactggattctattgaagataataacatcctggttcaagaactggacaaaccaaccagaagtgaatcattactggaccaggtcctcacaagtgcagagaagatgattaaggagattaagattggagtcaatctgggctgcagtgaccatgccctgattgagataatgattttgaagtatgtgggcctgggcaaagagcaaagtcagagccctgaacttcaggagagccactatcacctgtttaaggagttattgaatagggtcccatgggaaact

SEQ ID NO: 83366 - DNA, 600 bp, Chicken  19866894379282_1
catcctcagataaatcctgcttgtgcaaacacttctcaaaacagacagaatttctgagtcacacaggaaagcacgatgcacttctacagttcacctttcagccgaagctcactgcagtcaacctacatatccagggaagccagagagcaaataacatgataaacacaaagggtttatcccgggaactgagtaacagctctgtgactcacactggaattaagctgtgaggccgcacagaagcaaagttcagagagggagatatttcagagttggttaggatgaacacaagcctccttcccrtgcagaactgagcatccaaccagggccagtagttgctgttaatcctcattatttccttgtctgcctctgagggctgctggcctgctgcagctccccacaaccaccattccaaggggcaagctttctcagcacatcatctgctttttttttttttcttttttgctaagactctcacatccctgtccttaaggtagtgctgctgtttgcagtagcgctctcagcaccgcgttttactttaaataagtacaaggcacctgttgccagcctagcactttttcctatgtaaagtacatttgtcag

SEQ ID NO: 83367 - DNA, 599 bp, Chicken  19866894379305_1
  misc_feature (1)..(208): n is any nucleotide
nnnnnnnnnnnnnnnnnnnnnnnnnnnnnnnnnnnnnnnnnnnnnnnnnnnnnnnnnnnnnnnnnnnnnnnnnnnnnnnnnnnnnnnnnnnnnnnnnnnnnnnnnnnnnnnnnnnnnnnnnnnnnnnnnnnnnnnnnnnnnnnnnnnnnnnnnnnnnnnnnnnnnnnnnnnnnnnnnnnnnnnnnnnnnnnnnnnnnnnnnnnnnnnnttctcttctctgtattggtgagaataggtccagtaaggcttacctcaggtaggttcatctactacctggacctttctacttcctcctttagytctaccaccaggttgagcagatcatccaccttctcacactgcacacagatgttgtcccggctgccctcctgtagcagtgacagggccaggcattctctgcagcctgagacctgaactgcagcatggacattcatgctttcagtcagtctccacattccttttagcagcagctcgccgcggtgtggtgaccatggttgcacctcgatgtgtctagagagcaatgacctgttaagtgctaagtgctaagctccctcccataccgcaaggtggcccaccctgcctgctcgctgattcgctca

SEQ ID NO: 83368 - DNA, 600 bp, Chicken  19866894379305_2
gacctgaactgcagcatggacattcatgctttcagtcagtctccacattccttttagcagcagctcgccgcggtgtggtgaccatggttgcacctcgatgtgtctagagagcaatgacctgttaagtgctaagtgctaagctccctcccataccgcaaggtggcccaccctgcctgctcgctgattcgctcagggcttgccctgaaaatcactcgcttcacaccgagataacaaccctcccccctgtgtaggcacgcgaataagcggcttatggtttctcctcatttaaacagcctacgygattcacacaccgactcctcctgtccgtcctggtgggcagcaacatgtcgttgcatttcctgaggcttttcctaggaagggggcgtgggtacagagccattgccctggcagcagcccactccacatcagcctctctcgtgaatgctgccagcctgctccgttacctcagggttccctggatgaaggaacccaccaaaacccccctgtacttcacaatcagtcaatacctatggtcagcacaaaaagaacaagtaaagaaattatgtggatgaacagcagaattgtttgaattggtggttc

SEQ ID NO: 83369 - DNA, 600 bp, Chicken  19866894379310_1
acttattccaatccatgacttattgggtaccacttcactgacaattttgtatctgttcctatgaagtttatttcttctatgattgtacattgtgcttttccttcaagagagttttactcaaagataacaatatatttgaaaccaaaaatggtgtttatttcacagttagaaaagaaagatttattacctcttatttatctacttttttctttttttttctttcttttttattttttctgcatcaggccttagaaattgttgagaagtttcctgcagtcagaaatggtagagagagtcacrtaaaggacgcatccattctgcacatcaggaatattgcttaatagctttaacctgaagaacattattgtatggtacagcttctaacagactaccaaacttctcagcaaccctgagagcatttaatttttgtctgatcacaatcatctagtaccactgcacatgctacaatggaaactctaagacaaatacaaaattttggtatctgtgttacttgtacatatcccatagcctctggcatggtgttcaccattcttctagtttcttgctgctcatctctgaacatgagagctcgtccacttc

SEQ ID NO: 83370 - DNA, 600 bp, Chicken  19866894379338_1
ataagctgtccttgagtacttgcacacaggagacccatccaatgtcacaggtcactgagcagcagtttggagtgcgtgtccctgggctatgttgagaccaggctaccttgaagctgggtttctgcccctcattaccagcccccccagggcagttaggcctcccaggaagagagcacgcaagatcagagctctgttcctaagatgttctaaacatcttatctgtcttatctggaccctatacctctggggatctctttagaggatgcatatttggcatcaacacgcaactagctgaaatayaaagcagggctggaggcagtgttcattaggcttgcagaaagacttttttctgggttaatctatcacaacatcctcactgatgaaggccttcaaatattacacgacacacccaaggtgagaactatcatttaacattacaaacccaggaaagcggtcggtttaactgggtgcagtaggtgcgtgacctggtcagagtcaccaggtccttaaacacaggtcacccaacttggcaggcagttttgttctggcagacaagacccagtgcctggagctgatcctgaacgtgttcagactggaaga

SEQ ID NO: 83371 - DNA, 600 bp, Chicken  19866894379351_1
aagtcagtcatcccaaagccaaagttatacagcagatgcaaagaaaaaataatatcttaccaggatcatcaccagcggacaccttccaaacatcagcttcaggaggtctgggtggtgaagtactgtgtttcccctgtgaatgaaggggaatggtgcagttttttaagtttcacattaggcagctgcaaatgtcctgtaggtggaacatccctgggggggtcgcaggagactgtccatgtccaagcatcagaaggtttctgtgcaaatcagctcactgtccttagattttcatgcatataraattcaagcattygtaattattttttgacatgagggactcccagaagcactcagtgggtttgcactgaagacaacggtctcacgcagtgcacgtaagctctcatctatttggtctgcaccratcacttccagtacagcatcccacaaaagtctgagggtccagtatatgcttggtgggaatgtatgcaagcttattcaaaaccttgacaaatattttaaagggtgaatttgagctgagactgagatcaaargtgttaggctatcagactctgtgggtggcatgttaatgagttcttaact

SEQ ID NO: 83372 - DNA, 600 bp, Chicken  19866894379351_2
caaagccaaagttatacagcagatgcaaagaaaaaataatatcttaccaggatcatcaccagcggacaccttccaaacatcagcttcaggaggtctgggtggtgaagtactgtgtttcccctgtgaatgaaggggaatggtgcagttttttaagtttcacattaggcagctgcaaatgtcctgtaggtggaacatccctgggggggtcgcaggagactgtccatgtccaagcatcagaaggtttctgtgcaaatcagctcactgtccttagattttcatgcatataraattcaagcattygtaattattttttgacatgagggactcccagaagcactcagtgggtttgcactgaagacaacggtctcacgcagtgcacgtaagctctcatctatttggtctgcaccratcacttccagtacagcatcccacaaaagtctgagggtccagtatatgcttggtgggaatgtatgcaagcttattcaaaaccttgacaaatattttaaagggtgaatttgagctgagactgagatcaaargtgttaggctatcagactctgtgggtggcatgttaatgagttcttaactagtggggataagt

SEQ ID NO: 83373 - DNA, 600 bp, Chicken  19866894379351_3
actgtgtttcccctgtgaatgaaggggaatggtgcagttttttaagtttcacattaggcagctgcaaatgtcctgtaggtggaacatccctgggggggtcgcaggagactgtccatgtccaagcatcagaaggtttctgtgcaaatcagctcactgtccttagattttcatgcatataraattcaagcattygtaattattttttgacatgagggactcccagaagcactcagtgggtttgcactgaagacaacggtctcacgcagtgcacgtaagctctcatctatttggtctgcaccratcacttccagtacagcatcccacaaaagtctgagggtccagtatatgcttggtgggaatgtatgcaagcttattcaaaaccttgacaaatattttaaagggtgaatttgagctgagactgagatcaaargtgttaggctatcagactctgtgggtggcatgttaatgagttcttaactagtggggataagtgagaggttttatctacagctgaaagaaaaacggagttcagagcacaacagatattcctgagtagttctcatttatgcacttatttgatgccagtgcctacaggaatat

SEQ ID NO: 83374 - DNA, 590 bp, Chicken  19866894379351_4
aggtttctgtgcaaatcagctcactgtccttagattttcatgcatataraattcaagcattygtaattattttttgacatgagggactcccagaagcactcagtgggtttgcactgaagacaacggtctcacgcagtgcacgtaagctctcatctatttggtctgcaccratcacttccagtacagcatcccacaaaagtctgagggtccagtatatgcttggtgggaatgtatgcaagcttattcaaaaccttgacaaatattttaaagggtgaatttgagctgagactgagatcaaargtgttaggctatcagactctgtgggtggcatgttaatgagttcttaactagtggggataagtgagaggttttatctacagctgaaagaaaaacggagttcagagcacaacagatattcctgagtagttctcatttatgcacttatttgatgccagtgcctacaggaatatgcacagcacaactgtttcggaacagcccagggtatggacaagcctatagaatttggttttctagaacaacaacaaaaaaaaaaaaacagaccgacagagaggaaagtaatttcagagcat

SEQ ID NO: 83375 - DNA, 600 bp, Chicken  19866894379361_1
tggcttcgctgttatctgaagcttctcagttggcatgctgtggctgggccagcccaagggactcagcattttctctgtacaaatcctcgtagtagttcaggctgaaggagaagcaaccacagaaagatgttcatcccatcttcaaaatctaccttggtgtgagattagtcatcctttagttccctccatctttccactgactgcagaggcattggaatagtctttcttaaaacatataattgaatttcagatggctaaaattatgttaaacgaagcctaacccaaagactgagtggattrttacacctcttggtattagcagtttaatttctgtgaagtagacactacttgtagtaaccaatattttcattgtctttgtcacatacctaccaaatttgtcactgacgtattgcccagatatatttcatagttcatacaacagatatccctctcagctctttggcttctgcctacatgtcagattaaattggggtgaagaagcaattagtgccatgagatccgagttcagaattttatgccatagtgagctcaactgtgaattcaattgtggaaaacaggctaagtgttttgagtgttatt

SEQ ID NO: 83376 - DNA, 599 bp, Chicken  19866894379383_1
  misc_feature (1)..(140): n is any nucleotide
nnnnnnnnnnnnnnnnnnnnnnnnnnnnnnnnnnnnnnnnnnnnnnnnnnnnnnnnnnnnnnnnnnnnnnnnnnnnnnnnnnnnnnnnnnnnnnnnnnnnnnnnnnnnnnnnnnnnnnnnnnnnnnnnnnnnnnnnnnnnagatctgtgaatgtagagcttcgggatgtggtttagcagagaacttgtagtgttaggtgatgtctggacaagatgatctggaaggtcttttccaatctaaatgattctatgattctatgattttatattgcgcagacctgcaggtgaatgttttcaaagsaaatgcttctcagtgatttttcccatcttgtcagtacaggcaggtgcaattccaataagtgtgattttgtcaggccacatggacaaaacatattaatcctttccccttytcttccttccactccatggttgatatgtaggtatagagggaagtaacttgctgaggtctgcccttcctgccatgctgcatgctgagatattctctttccttgtccctgttacattcacaccttgyctactgtctcatgcmtgtgatgggaagctagtggcttatggagtactggggagccttagactgca

SEQ ID NO: 83377 - DNA, 599 bp, Chicken  19866894379383_2
  misc_feature (1)..(31): n is any nucleotide
nnnnnnnnnnnnnnnnnnnnnnnnnnnnnnnagatctgtgaatgtagagcttcgggatgtggtttagcagagaacttgtagtgttaggtgatgtctggacaagatgatctggaaggtcttttccaatctaaatgattctatgattctatgattttatattgcgcagacctgcaggtgaatgttttcaaagsaaatgcttctcagtgatttttcccatcttgtcagtacaggcaggtgcaattccaataagtgtgattttgtcaggccacatggacaaaacatattaatcctttccccttytcttccttccactccatggttgatatgtaggtatagagggaagtaacttgctgaggtctgcccttcctgccatgctgcatgctgagatattctctttccttgtccctgttacattcacaccttgyctactgtctcatgcmtgtgatgggaagctagtggcttatggagtactggggagccttagactgcatgcatgcagcttgcctgtttgaaagtctgggtgccatgtggcatttggcagaaaggtgccarggagaagtaggtatacagtaggaaatggaatttaacaagggaatgag

SEQ ID NO: 83378 - DNA, 600 bp, Chicken  19866894379383_3
atctaaatgattctatgattctatgattttatattgcgcagacctgcaggtgaatgttttcaaagsaaatgcttctcagtgatttttcccatcttgtcagtacaggcaggtgcaattccaataagtgtgattttgtcaggccacatggacaaaacatattaatcctttccccttytcttccttccactccatggttgatatgtaggtatagagggaagtaacttgctgaggtctgcccttcctgccatgctgcatgctgagatattctctttccttgtccctgttacattcacaccttgyctactgtctcatgcmtgtgatgggaagctagtggcttatggagtactggggagccttagactgcatgcatgcagcttgcctgtttgaaagtctgggtgccatgtggcatttggcagaaaggtgccarggagaagtaggtatacagtaggaaatggaatttaacaagggaatgaggtttctgaagtaaaaaccataaggaccagctctatcgcatgccagagcctgctgtgtgaaatgctgaaaatagtcaatcatctctgtcaatgaaactgaaaggttttgagggcttctgaagacttc

SEQ ID NO: 83379 - DNA, 600 bp, Chicken  19866894379383_4
tgattctatgattttatattgcgcagacctgcaggtgaatgttttcaaagsaaatgcttctcagtgatttttcccatcttgtcagtacaggcaggtgcaattccaataagtgtgattttgtcaggccacatggacaaaacatattaatcctttccccttytcttccttccactccatggttgatatgtaggtatagagggaagtaacttgctgaggtctgcccttcctgccatgctgcatgctgagatattctctttccttgtccctgttacattcacaccttgyctactgtctcatgcmtgtgatgggaagctagtggcttatggagtactggggagccttagactgcatgcatgcagcttgcctgtttgaaagtctgggtgccatgtggcatttggcagaaaggtgccarggagaagtaggtatacagtaggaaatggaatttaacaagggaatgaggtttctgaagtaaaaaccataaggaccagctctatcgcatgccagagcctgctgtgtgaaatgctgaaaatagtcaatcatctctgtcaatgaaactgaaaggttttgagggcttctgaagacttcatggaaatacttgtc

SEQ ID NO: 83380 - DNA, 574 bp, Chicken  19866894379383_5
tgattttgtcaggccacatggacaaaacatattaatcctttccccttytcttccttccactccatggttgatatgtaggtatagagggaagtaacttgctgaggtctgcccttcctgccatgctgcatgctgagatattctctttccttgtccctgttacattcacaccttgyctactgtctcatgcmtgtgatgggaagctagtggcttatggagtactggggagccttagactgcatgcatgcagcttgcctgtttgaaagtctgggtgccatgtggcatttggcagaaaggtgccarggagaagtaggtatacagtaggaaatggaatttaacaagggaatgaggtttctgaagtaaaaaccataaggaccagctctatcgcatgccagagcctgctgtgtgaaatgctgaaaatagtcaatcatctctgtcaatgaaactgaaaggttttgagggcttctgaagacttcatggaaatacttgtcttctttcaagactagatctgtcccatcactccctacttcttcatctttccattggaatgtctaatactttctaactaaatcattac

SEQ ID NO: 83381 - DNA, 599 bp, Chicken  19866894379393_1
  misc_feature (1)..(16): n is any nucleotide
nnnnnnnnnnnnnnnntatttcacaggcaattaaaaatacatttagatacagtcagtcagcaggtagagttcttcagaactacaaacaaaataaaactgtttttttttttcctttttctagattatgagcacgaactgataaatggctttatttcctcactgtaattatcaagggatgaaaaattctttctccccatgcacaaattctgttgacttctggttacagtggcacacaaataactgaggacatcatgcttttccactacaaattcctaaaagattctctctgacttgatacartcacaacatgctttccaacactccactgcttggaaaatagaggcaaaatgagatgagaggtcaaggacactttgtatagaaaaggtccatgggatgttttaaaaggagtgaaagtctcatccaggtgacaaacgtgtcacagtgctgtagaaacccacaagagggcagagtgaacccagcataaatgtccgatgatcttaaaggtcttttccaacctaaattactctatgattccgtgattttatgttgtctaaactgagctgtgcaaaactttttctgataaaatcctaaatgaatgg

SEQ ID NO: 83382 - DNA, 600 bp, Chicken  19866894379393_2
acccagcataaatgtccgatgatcttaaaggtcttttccaacctaaattactctatgattccgtgattttatgttgtctaaactgagctgtgcaaaactttttctgataaaatcctaaatgaatggcaaataatttgagcaaaaacatcagtaaggcacttctgaaatctgctgcttcatgcctgtaccacctgcaagatgtccactaaaccaagtgaaataaattttaagggtttcactgaaccttatagtaaatctgcgtttgaaggattcacagaatgaaatgcagcatatccaaayccaccccaaatagaacagagcaaaacccaataaatcaattgaaatagctgactactaccaaagaggaaaaaatcaacacttgagaagatgtccagtaaaatctcttctgagttctttctgtgcaaytattctataaatcccaataaatctttgggagacrtgattaaaaaacagtcagctgataattctgcttatatttttgaatatatatcagagatagttttgctgctccctggccccactgtcactacaacaggagagtcaggtgatgttcagggtaagaaagaagcctatgaccaa

SEQ ID NO: 83383 - DNA, 600 bp, Chicken  19866894379393_3
caaataatttgagcaaaaacatcagtaaggcacttctgaaatctgctgcttcatgcctgtaccacctgcaagatgtccactaaaccaagtgaaataaattttaagggtttcactgaaccttatagtaaatctgcgtttgaaggattcacagaatgaaatgcagcatatccaaayccaccccaaatagaacagagcaaaacccaataaatcaattgaaatagctgactactaccaaagaggaaaaaatcaacacttgagaagatgtccagtaaaatctcttctgagttctttctgtgcaaytattctataaatcccaataaatctttgggagacrtgattaaaaaacagtcagctgataattctgcttatatttttgaatatatatcagagatagttttgctgctccctggccccactgtcactacaacaggagagtcaggtgatgttcagggtaagaaagaagcctatgaccaaacccatgtgggactttggtaggatatggataacttttactycatattcaaataatacaagtcatttctgcttccactctctattctttcttctccattgttatcmattttgtgactttataaatct

SEQ ID NO: 83384 - DNA, 600 bp, Chicken  19866894379393_4
tctgaaatctgctgcttcatgcctgtaccacctgcaagatgtccactaaaccaagtgaaataaattttaagggtttcactgaaccttatagtaaatctgcgtttgaaggattcacagaatgaaatgcagcatatccaaayccaccccaaatagaacagagcaaaacccaataaatcaattgaaatagctgactactaccaaagaggaaaaaatcaacacttgagaagatgtccagtaaaatctcttctgagttctttctgtgcaaytattctataaatcccaataaatctttgggagacrtgattaaaaaacagtcagctgataattctgcttatatttttgaatatatatcagagatagttttgctgctccctggccccactgtcactacaacaggagagtcaggtgatgttcagggtaagaaagaagcctatgaccaaacccatgtgggactttggtaggatatggataacttttactycatattcaaataatacaagtcatttctgcttccactctctattctttcttctccattgttatcmattttgtgactttataaatctggtataaggcattctttttcaagactacactttg

SEQ ID NO: 83385 - DNA, 538 bp, Chicken  19866894379393_5
aaatagctgactactaccaaagaggaaaaaatcaacacttgagaagatgtccagtaaaatctcttctgagttctttctgtgcaaytattctataaatcccaataaatctttgggagacrtgattaaaaaacagtcagctgataattctgcttatatttttgaatatatatcagagatagttttgctgctccctggccccactgtcactacaacaggagagtcaggtgatgttcagggtaagaaagaagcctatgaccaaacccatgtgggactttggtaggatatggataacttttactycatattcaaataatacaagtcatttctgcttccactctctattctttcttctccattgttatcmattttgtgactttataaatctggtataaggcattctttttcaagactacactttggcagttccattcaggtttcaataaaccattttaaagattctttgctttctgtaaagtaaaacaaacaaaacaaaacaaacaaacccagaaatataaataaggctttttaatcaacttaa

SEQ ID NO: 83386 - DNA, 474 bp, Chicken  19866894379393_6
tctgagttctttctgtgcaaytattctataaatcccaataaatctttgggagacrtgattaaaaaacagtcagctgataattctgcttatatttttgaatatatatcagagatagttttgctgctccctggccccactgtcactacaacaggagagtcaggtgatgttcagggtaagaaagaagcctatgaccaaacccatgtgggactttggtaggatatggataacttttactycatattcaaataatacaagtcatttctgcttccactctctattctttcttctccattgttatcmattttgtgactttataaatctggtataaggcattctttttcaagactacactttggcagttccattcaggtttcaataaaccattttaaagattctttgctttctgtaaagtaaaacaaacaaaacaaaacaaacaaacccagaaatataaataaggctttttaatcaacttaa

SEQ ID NO: 83387 - DNA, 600 bp, Chicken  19866894379400_1
ctgtatcaatgttatttcaatcaataatgtatgttcctagacctgcaaaggtctcataaaaagttgtagatgatgttcattgataatccattttataagtttttttgctttagtttactgtggctgattcattcatatggagacattttacctctttaaatgacctgaagttattaataaggtttcctactttagtggtatactttccaggtcactgtgatgtgtcgttgaaacaagcccattaagatgagtgatgtgtgttgtaatttcactagtgtcattagtaatatactgcacttytctgttttctcattttgtgtgggtcaggctgactgagaattacaggcataggatcaaaagagttaaaggtgaaggtagatacttaaacaattaggctaagggctgaaatcactgttttagaggtgtaggctacaaaaccaatttgtattaaagaatgtttaagtaattgaatttcacagtatacatgaaagtgttttgggatcattatgcatgttgtggtcacacagcaataccttctgccaaagtagtggctgagttttagtttttatgtaattttcttaatgaaaacacgtttctgac

SEQ ID NO: 83388 - DNA, 600 bp, Chicken  19866894379409_1
gttatcctgttccctctccaacagcacatataccttaagacaaaatcagactgaatcagacacttggtacatttgtgacaatagccaaatccagtaccttcagagaaaggacctaaagtccataatgtatatgaaagtctcaaactacaacccattggtattctcctgaagtaaggaagccaaggtacctctgagtgccctgatcctctatcccatagacttatttttgagagaagctcctaaatgtatttttaaaaaataatctaagggtggtcatagtattaagccaaacaaagaacrttctaacttctctacagccacaattaaaaaaactactgtaacaatgaagaagagaacttgcgctataatccttaatcatcatcactgctgtgatcacttagaccactccttgctccttgtgaggatctgagcatgccgtggcagactctagccagcttcccagcagacatgtgccctgagctatctcagctcccagtgacaagtgacactaccttgccgctgcactgtggtctgaaaccccaagacctactcaggcgatgaggaacaaaggtgtgaagacacagaggtaaagtgagaagc

SEQ ID NO: 83389 - DNA, 600 bp, Chicken  19866894379423_1
cagatatctttgcctgcaccttccatgcaataaaacattgctcacagaacttagttaattttagaaacatgttaatagccaccatcacatgctgcagattccatgccccacctgcttaacagccttatatttttaaatataaggaaagttatggacagttccattttctgaatgaatgccttactttcccaatagcttttccttatttcttctgtttgataggaattatatctgcccccttcccccctgagaccttgacagttaaaggtggaagctgtcagctggaatcctgacctcatytgcactacccagctatagctcaccagcatcatctcagtgcacagatcacctcactgttcccctaccaaaactctttatctttctgtttaatcttatcaagctacagcttggtccaaagtagtgtcagcagtgctgtttaatatccaaactgctctaayttgctgagatttctttcacagggcactaactggtgtaaaggaacttaaactctagaggaaatctcactgttgagtggtgtctgcttccaagttttatttcaggcaacaccctcagacatttccattgcaagggctaccctga

SEQ ID NO: 83390 - DNA, 600 bp, Chicken  19866894379423_2
ttccattttctgaatgaatgccttactttcccaatagcttttccttatttcttctgtttgataggaattatatctgcccccttcccccctgagaccttgacagttaaaggtggaagctgtcagctggaatcctgacctcatytgcactacccagctatagctcaccagcatcatctcagtgcacagatcacctcactgttcccctaccaaaactctttatctttctgtttaatcttatcaagctacagcttggtccaaagtagtgtcagcagtgctgtttaatatccaaactgctctaayttgctgagatttctttcacagggcactaactggtgtaaaggaacttaaactctagaggaaatctcactgttgagtggtgtctgcttccaagttttatttcaggcaacaccctcagacatttccattgcaagggctaccctgatctgtagcatgtggaaaatgagacacaaagaaatgacgtctgtaactcggacaggaggaagtcatccttaaggaagaagaccacattaaaaaagaaaaatagaaatgagtgctaaccttcctctttcttcagaaacaaattggtaacaaagctctcag

SEQ ID NO: 83391 - DNA, 599 bp, Chicken  19866894379432_1
  misc_feature (1)..(81): n is any nucleotide
nnnnnnnnnnnnnnnnnnnnnnnnnnnnnnnnnnnnnnnnnnnnnnnnnnnnnnnnnnnnnnnnnnnnnnnnnnnnnnnnnattgagcattgctgcatatgtcctatgttctggactcagtaggttcattgccaccggattggcttgctttcccttcctcccggcaccagtaatcattaacatatggttctcaaacaaacacttactcctgatcagatatcaatgtgatatagtaacagggggaatcctgtgcaccacacactccctgtggcgggtgaaccctcctgtcctgctcctcaytgtggtgcatgtgtgttttctggctcctgccctcatgtagactggtgtggagtgtgtggagtcagggagattggccacagcagttgggtcccagagggccctattggattttgggtgcagtgcttcaggaaggaccagtgggaagacagccgcgtggaactgatctccaaggaagaatgaagtgagctggcagcatcaatacaaaatcaacaaaacaatgggagggctcttattttccctgggaaggggctgtcaagaataatgaatgacctgttcataagctgcagcaaggaagtttc

SEQ ID NO: 83392 - DNA, 600 bp, Chicken  19866894379432_2
ttgaggacagcgttcattttttggacgtcaccagaaagctttaagaattggttaaatgaacacctgtgaggaatgatgtcagtatgagttgattcttattctggaaaaggtggccttgagatgtttctgtatcagtttgggaacatttggagcaagaacagttgacacccagttatttgctcacgccaaaacttggagatctactggcagtgtttcatggcaagtctgacaccaagactggtaagactgcataggcaaaacaagaacatacaggaggtcaggaaatattcagacacaagygagtcccacacctctcccagctgtcagctcatgtctccactgcttgtctgcctcttgcttatggagagggaaacaagctggcaacgaagtggccgttctcctgccagcttaatgagctatagctgctcactggcttggcagaaatgggagggaaggaagatgtgctggagaggagagagctgcagtcagtcagtcagtggcagaggcagcaagctgttacatcagctcagctgtcttacttgtctgcacgcgaccgtctattgtaattttgacagcagggatgtgttcacctaaatattt

SEQ ID NO: 83393 - DNA, 600 bp, Chicken  19866894379439_1
tctgtacaaaaatgacatttgcacagtgttagtacgtctttcatcaaaacatcattcaagaaaaggggtggttttttcaaactatcttcttcagcaggcacagcctttcatatgctgtatccaatttaatttagcaaaaattatcagtgttccaaaataacacataaacattggtaaactgtgatgatagctttcatttagaataaacttaaataggctggaaattgatctgaaagaggagtagaaacagatacagcaaaagcacagcacagagcctgagattctatggcagtcgtagamaaaggacatagataagtcatagcattataatggccaactggcaatgtttaatttgtcaacagagccacctgtagctgaattatagagccccatatcttcaagaataatcaagttactatttgtgatcagagaatgattgtgcttcagtatgtcatagaaaagtctttacaggactccttagaagtatccggcacaagtaaatcagaacttctattataaagccttcctactggggtatgttactataatctacaatatgtatgcaaataggcatttgctttcctcatctgttgttttcat

SEQ ID NO: 83394 - DNA, 599 bp, Chicken  19866894379447_1
  misc_feature (1)..(92): n is any nucleotide
nnnnnnnnnnnnnnnnnnnnnnnnnnnnnnnnnnnnnnnnnnnnnnnnnnnnnnnnnnnnnnnnnnnnnnnnnnnnnnnnnnnnnnnnnnnncagagaggtgtacggggaatactagtggcggtctctaatgtcctatccaacaaagtttgttaccaattctgttgcctgccagacattcagttacctcttgaaaatatttccatatatcccctggacacaacaagtcccactagagtctgatggttccctagtaccactgcaagtttgttgctacttaaaagttgttcttgctctcctytatttctcccttaaaatgcaaatttcaatttctttaagaataggaacattttttttcccccttgctattgtacaaaagacttgccaaatgggatgccagtgcttgattagggctttaagttactataataatagaaataaatggaattaaaagtacgcagttcaatatcttgcagcactgatagtttctgaattctgcaatgaaagattaacccaatgtatgtttagayagaatctctgtgagcctatgatatccagagatatctgaaagctcatgtgatttacaawgcttttctgcag

SEQ ID NO: 83395 - DNA, 600 bp, Chicken  19866894379447_2
cactagagtctgatggttccctagtaccactgcaagtttgttgctacttaaaagttgttcttgctctcctytatttctcccttaaaatgcaaatttcaatttctttaagaataggaacattttttttcccccttgctattgtacaaaagacttgccaaatgggatgccagtgcttgattagggctttaagttactataataatagaaataaatggaattaaaagtacgcagttcaatatcttgcagcactgatagtttctgaattctgcaatgaaagattaacccaatgtatgtttagayagaatctctgtgagcctatgatatccagagatatctgaaagctcatgtgatttacaawgcttttctgcagctttctgagtttttcaaacttctgcaaaatgaattctttctaaggacaaatatcaaaagatgaacgggaagaaggtgatttatgatgaataaatctcaaaaggttcagaacctacactctaatgggatatgcaccacagagtttgaaaagctatctgaaactgaagcaaaattcatatttcatcaagaggaatgtgggggaccatagcagtctttcttgtccaaaacgaa

SEQ ID NO: 83396 - DNA, 600 bp, Chicken  19866894379447_3
tcttgctctcctytatttctcccttaaaatgcaaatttcaatttctttaagaataggaacattttttttcccccttgctattgtacaaaagacttgccaaatgggatgccagtgcttgattagggctttaagttactataataatagaaataaatggaattaaaagtacgcagttcaatatcttgcagcactgatagtttctgaattctgcaatgaaagattaacccaatgtatgtttagayagaatctctgtgagcctatgatatccagagatatctgaaagctcatgtgatttacaawgcttttctgcagctttctgagtttttcaaacttctgcaaaatgaattctttctaaggacaaatatcaaaagatgaacgggaagaaggtgatttatgatgaataaatctcaaaaggttcagaacctacactctaatgggatatgcaccacagagtttgaaaagctatctgaaactgaagcaaaattcatatttcatcaagaggaatgtgggggaccatagcagtctttcttgtccaaaacgaatctggttgtgtcattccatagaaaccatgctgtaatttaaattaatgctcatgaccga

SEQ ID NO: 83397 - DNA, 476 bp, Chicken  19866894379453_1
  misc_feature (1)..(160): n is any nucleotide
nnnnnnnnnnnnnnnnnnnnnnnnnnnnnnnnnnnnnnnnnnnnnnnnnnnnnnnnnnnnnnnnnnnnnnnnnnnnnnnnnnnnnnnnnnnnnnnnnnnnnnnnnnnnnnnnnnnnnnnnnnnnnnnnnnnnnnnnnnnnnnnnnnnnnnnnnnnnnnnnctccactccactccactccactccactccactccactcttcttggaaagaatgtagcagagcagagatctatcagagacactgtgtgtcagaaatgtatcagagagacctccttgggaagagaccagatgaccccattcrcctagaaagggccttggaggttttccacagcatccttcttcacccggaagatgctatatgaggtgacctctaaggtgatagtgcttgtaaggaaatctccactcagaggtcaaatcctaagcaccttgctgcaggggctgccagcccagcatccctctgcaggggctcacagagtt

SEQ ID NO: 83398 - DNA, 600 bp, Chicken  19866894379456_1
tggcccaagatgttttaccacagtgaagccatgtgcctctgaagtttgaatctattactgacaggcctgcccctgcagcctgcttggtgcttcttgcagccaccctacctcatcctgggggaaggaacagtagcaattagtagtgcatatcattatcatgctgtcatattttgcagaggcatgtagggtaagaaggttttcttggggttcatgcatgtttttcgagctaggaggaaggtaatgccagtatgctattgatccatccatgaaacagccatctgaatgatgactttggttagrcagagatagaggaaatcctgcgcattaagggagattgtgctgaaagtttgcaggactcaggctcagtctgaatatgagaaccagaaaaaaagcatgaaatggtaaattatggtaaattatgactgattatgaggctgacagttccagtgctcccttgtatcttcagggaaaaggaaaggatgcatctgagcagactaaacaaggaaagactctgcacagaacttttcccaacacatctctaggaagataaatctaggaagagagccaggcagtgctctaggaaagctccttccttggcag

SEQ ID NO: 83399 - DNA, 600 bp, Chicken  19866894379456_2
tattgatccatccatgaaacagccatctgaatgatgactttggttagrcagagatagaggaaatcctgcgcattaagggagattgtgctgaaagtttgcaggactcaggctcagtctgaatatgagaaccagaaaaaaagcatgaaatggtaaattatggtaaattatgactgattatgaggctgacagttccagtgctcccttgtatcttcagggaaaaggaaaggatgcatctgagcagactaaacaaggaaagactctgcacagaacttttcccaacacatctctaggaagataaarctaggaagagagccaggcagtgctctaggaaagctccttccttggcagcacaattggcagcaagagaaaaatgagtgcccactgctgtgaagaagggctgtgttaagtaccaagctatgtagacatatcctcatttcagatcacatgtgatcttgaagacttgtcctgaggatcccagacctggcaaggttactgccacttaccaactgactggtggtccatccctgtgtagtctccttatctctatgagaaatcaagagagattagcttgagcttagcttgcagaagttttatgatgaa

SEQ ID NO: 83400 - DNA, 600 bp, Chicken  19866894379464_1
tcacaggccagagcaagtgcggaaatttgtgatgggtcagaaatggctgtggtttggaaagaatttcaggcatccttcaagtgacctcctcctcctcgtgcacaattgttgcttttaaaagcaacagtgataataggagagcaacggagctgccttgcaggaattttgccctcagtcctgcaattcgtaaatcccctctttgacctgtggggagggagtagtacatacatggggtggtggggacagtgtagaagagcagagcgtatacttggggtcagcaggcagatcctgctggccctrwtctcgtgctggagcagatgacccagagcctgcagcagcactgaggcattttacaagtggtgtggctgcagcttcagaattagtcagccatgctcctgtgccatcagcagggtttgtttaatctggagcctagtcaaggcttgcatggccttgggagcagatgagacttgttcccttcacagcctgtttgaaggctagggggaaaaaaaccaaccccgttctttcttgctgactcagctggccagtgcagctggcctagttaacctcaaataaaccaattaaggctgcatagtacagata

SEQ ID NO: 83401 - DNA, 600 bp, Chicken  19866894379464_2
cacaggccagagcaagtgcggaaatttgtgatgggtcagaaatggctgtggtttggaaagaatttcaggcatccttcaagtgacctcctcctcctcgtgcacaattgttgcttttaaaagcaacagtgataataggagagcaacggagctgccttgcaggaattttgccctcagtcctgcaattcgtaaatcccctctttgacctgtggggagggagtagtacatacatggggtggtggggacagtgtagaagagcagagcgtatacttggggtcagcaggcagatcctgctggccctrwtctcgtgctggagcagatgacccagagcctgcagcagcactgaggcattttacaagtggtgtggctgcagcttcagaattagtcagccatgctcctgtgccatcagcagggtttgtttaatctggagcctagtcaaggcttgcatggccttgggagcagatgagacttgttcccttcacagcctgtttgaaggctagggggaaaaaaaccaaccccgttctttcttgctgactcagctggccagtgcagctggcctagttaacctcaaataaaccaattaaggctgcatagtacagatat

SEQ ID NO: 83402 - DNA, 600 bp, Chicken  19866894379464_3
cccagagcctgcagcagcactgaggcattttacaagtggtgtggctgcagcttcagaattagtcagccatgctcctgtgccatcagcagggtttgtttaatctggagcctagtcaaggcttgcatggccttgggagcagatgagacttgttcccttcacagcctgtttgaaggctagggggaaaaaaaccaaccccgttctttcttgctgactcagctggccagtgcagctggcctagttaacctcaaataaaccaattaaggctgcatagtacagatatctatcagtagaaggcttgcytgaataaaggctgtaagatgtagctaggggtgctgcaaattgaagcrgggcatctcctgtctggagagctaagtctgcatgtgtgcagcttcccacagcacaggctcaatagatgcaaatccattggggagcaaagtgtgggaccacgcagtgggagtgccatgcacgtgatggtgaggagaaaagctcagtgctgccaggtaagtcacgtgcacagcactctcgaaaggtgtggtgtgtcccccaattaagcatgcagttatggtaatcagagaatcctagaatcragtaggatggagg

SEQ ID NO: 83403 - DNA, 600 bp, Chicken  19866894379464_4
cagcttcagaattagtcagccatgctcctgtgccatcagcagggtttgtttaatctggagcctagtcaaggcttgcatggccttgggagcagatgagacttgttcccttcacagcctgtttgaaggctagggggaaaaaaaccaaccccgttctttcttgctgactcagctggccagtgcagctggcctagttaacctcaaataaaccaattaaggctgcatagtacagatatctatcagtagaaggcttgcytgaataaaggctgtaagatgtagctaggggtgctgcaaattgaagcrgggcatctcctgtctggagagctaagtctgcatgtgtgcagcttcccacagcacaggctcaatagatgcaaatccattggggagcaaagtgtgggaccacgcagtgggagtgccatgcacgtgatggtgaggagaaaagctcagtgctgccaggtaagtcacgtgcacagcactctcgaaaggtgtggtgtgtcccccaattaagcatgcagttatggtaatcagagaatcctagaatcragtaggatggaggrgggcttaaagatcatccagttccaactcctgctggggtcattagca

SEQ ID NO: 83404 - DNA, 570 bp, Chicken  19866894379464_5
tagaaggcttgcytgaataaaggctgtaagatgtagctaggggtgctgcaaattgaagcrgggcatctcctgtctggagagctaagtctgcatgtgtgcagcttcccacagcacaggctcaatagatgcaaatccattggggagcaaagtgtgggaccacgcagtgggagtgccatgcacgtgatggtgaggagaaaagctcagtgctgccaggtaagtcacgtgcacagcactctcgaaaggtgtggtgtgtcccccaattaagcatgcagttatggtaatcagagaatcctagaatcragtaggatggaggrgggcttaaagatcatccagttccaactcctgctggggtcattagcaaacttgctgagggtgcactcaatcccactgtctatctatgacactgataaaggtgctgaagagcaccagtcctgagatggactcctggaggacactacttgttaccagcctccacctgcatgtagaactgttgacaaccactccctaactatgcaaccaattccttatccagcccagccttccatactgtcactctctaatttagagatg

SEQ ID NO: 83405 - DNA, 556 bp, Chicken  19866894379464_6
gaataaaggctgtaagatgtagctaggggtgctgcaaattgaagcrgggcatctcctgtctggagagctaagtctgcatgtgtgcagcttcccacagcacaggctcaatagatgcaaatccattggggagcaaagtgtgggaccacgcagtgggagtgccatgcacgtgatggtgaggagaaaagctcagtgctgccaggtaagtcacgtgcacagcactctcgaaaggtgtggtgtgtcccccaattaagcatgcagttatggtaatcagagaatcctagaatcragtaggatggaggrgggcttaaagatcatccagttccaactcctgctggggtcattagcaaacttgctgagggtgcactcaatcccactgtctatctatgacactgataaaggtgctgaagagcaccagtcctgagatggactcctggaggacactacttgttaccagcctccacctgcatgtagaactgttgacaaccactccctaactatgcaaccaattccttatccagcccagccttccatactgtcactctctaatttagagatg

SEQ ID NO: 83406 - DNA, 599 bp, Chicken  19866894379471_1
  misc_feature (1)..(116): n is any nucleotide
nnnnnnnnnnnnnnnnnnnnnnnnnnnnnnnnnnnnnnnnnnnnnnnnnnnnnnnnnnnnnnnnnnnnnnnnnnnnnnnnnnnnnnnnnnnnnnnnnnnnnnnnnnnnnnnnnnnnctctttctctctctctctctctttttttttttttttctcaagcaggaagcagttcatcttctaaagtatatttcaaatgaaagctaatgtagtaaaatgcattactctaatcaaggagatgatagtattctgcaagcctaacaaagtactgaaaaaaatagtcttttaaaatagattttttttwatttttattttattattattattattttgtcaatagctttaggaagtacagctgaacaacatgtaattgaacaattaaagtaatttctgttgtcttacttatctccttcaattaaaaattttcttgattagagcaattcaattggcttaatagaggtgacagcccattacatcaaaattgatgagataaaagaacatttttaaataagatttgtcctgcatgacctgatgtctgatcttcattcacatcttatatgacctgaattgtatgagatctgaaaaagaataaacttgctggtc

SEQ ID NO: 83407 - DNA, 600 bp, Chicken  19866894379472_1
tggaagggcattatagagtctgggtttggtgcacgcgtgtaaaaccagaggggcaatcaatggcatgtctgagcaaccctacctgagactgcctcacaacgtcgctccaagatcttactttctgcttaataatgctggtgtgaactatttttgggttaccaggcaccttccgagatgaatacacagcttccatactaatcagctccaaggttagcaaaggatactgcctgctgctgctgctgcttattgaagccaatttattgaaattaagccagtttacctgctggcatacatgacgcrcactcactgtactctctaacaatccagtataatagccccggggaaagttttgagcagcaggaagaaagagccagtactatttaaagcttttctctacaaagttctcctcttgcaaggctgttcccttacagcattcagattatataytgtgctaatgggacacaacgccagtagatattccaaatcaggttccataggcatccagcatagctactgcaagtttacactggtaaatctgaaagaagagtttatccctcgcttgatgctstgaggacaatgcgagatgatcacttgaaggaa

SEQ ID NO: 83408 - DNA, 600 bp, Chicken  19866894379472_2
tttttgggttaccaggcaccttccgagatgaatacacagcttccatactaatcagctccaaggttagcaaaggatactgcctgctgctgctgctgcttattgaagccaatttattgaaattaagccagtttacctgctggcatacatgacgcrcactcactgtactctctaacaatccagtataatagccccggggaaagttttgagcagcaggaagaaagagccagtactatttaaagcttttctctacaaagttctcctcttgcaaggctgttcccttacagcattcagattatataytgtgctaatgggacacaacgccagtagatattccaaatcaggttccataggcatccagcatagctactgcaagtttacactggtaaatctgaaagaagagtttatccctcgcttgatgctstgaggacaatgcgagatgatcacttgaaggaaatacagtgcgctttttatctactggagatcaagaatatctctgttccccacatttttgaagtcctccctctgatgcaggaacacaattcccacagatacctgcagtgtgatccatgccccaattcccatcaccctggcacagtgctc

SEQ ID NO: 83409 - DNA, 597 bp, Chicken  19866894379472_3
aagccagtttacctgctggcatacatgacgcrcactcactgtactctctaacaatccagtataatagccccggggaaagttttgagcagcaggaagaaagagccagtactatttaaagcttttctctacaaagttctcctcttgcaaggctgttcccttacagcattcagattatataytgtgctaatgggacacaacgccagtagatattccaaatcaggttccataggcatccagcatagctactgcaagtttacactggtaaatctgaaagaagagtttatccctcgcttgatgctstgaggacaatgcgagatgatcacttgaaggaaatacagtgcgctttttatctactggagatcaagaatatctctgttccccacatttttgaagtcctccctctgatgcaggaacacaattcccacagatacctgcagtgtgatccatgccccaattcccatcaccctggcacagtgctctcagcaacagyggatgcagaggacaaagacagcaatgaaagtgacattatcaaagcaggtaaaacacaagaagtaagtcttaaaatatgtatgttagatgaatgggaacagaaatgat

SEQ ID NO: 83410 - DNA, 407 bp, Chicken  19866894379472_4
gacacaacgccagtagatattccaaatcaggttccataggcatccagcatagctactgcaagtttacactggtaaatctgaaagaagagtttatccctcgcttgatgctstgaggacaatgcgagatgatcacttgaaggaaatacagtgcgctttttatctactggagatcaagaatatctctgttccccacatttttgaagtcctccctctgatgcaggaacacaattcccacagatacctgcagtgtgatccatgccccaattcccatcaccctggcacagtgctctcagcaacagyggatgcagaggacaaagacagcaatgaaagtgacattatcaaagcaggtaaaacacaagaagtaagtcttaaaatatgtatgttagatgaatgggaacagaaatgat

SEQ ID NO: 83411 - DNA, 600 bp, Chicken  19866894379476_1
acacaaacaacttgaaattataagtcttaacatatgaaatatgataataaaacaatacatttattatgtaaaaagtttttatagcttgtgttcaaataaagagttgaaatcagggtgcctgatttcaagctatgtttgggttttcttggctaataccacttgtgtttattgctgacttttagatagatgtccagagggagtacctccccaagatttggcggaaaggtcagaaaggtggcatcagtgaatttggacttccttataatgtgattactaagcaacttgtctcccttaacactwgctggtgagtaacttcacagttatatttttctggagagtaactctttctgatctagtttctgtgaytgatgataaaaatttgaggtctgacacctgaaaagtaagactatttgaaaaaacaacagtcataatgtgaattaggcagtagagaaatgtttcatgttatttagtcttgtgctatttagaatacctttagatgtgccagaaaaaacattcaaggaggaaaagtgatctcccctaccacctttgctcttccctgctttgacagtgggtttgcttaattcatcttgcaccacactg

SEQ ID NO: 83412 - DNA, 600 bp, Chicken  19866894379476_2
tgtaaaaagtttttatagcttgtgttcaaataaagagttgaaatcagggtgcctgatttcaagctatgtttgggttttcttggctaataccacttgtgtttattgctgacttttagatagatgtccagagggagtacctccccaagatttggcggaaaggtcagaaaggtggcatcagtgaatttggacttccttataatgtgattactaagcaacttgtctcccttaacactwgctggtgagtaacttcacagttatatttttctggagagtaactctttctgatctagtttctgtgaytgatgataaaaatttgaggtctgacacctgaaaagtaagactatttgaaaaaacaacagtcataatgtgaattaggcagtagagaaatgtttcatgttatttagtcttgtgctatttagaatacctttagatgtgccagaaaaaacattcaaggaggaaaagtgatctcccctaccacctttgctcttccctgctttgacagtgggtttgcttaattcatcttgcaccacactgggaaatacagcaactggggaatgtgcatacttaactttagcccttgctttggacttactgcattgg

SEQ ID NO: 83413 - DNA, 600 bp, Chicken  19866894379478_1
tttgactgagaaagaagtgcagcccagagactttgcttgctttcatggccttctgctggaagtgttttatggatggcaaagcacagagaatcacttcagctgctgtgatttgggcagcctaactgctggagtggagtgggttcggtgtgagttggaccctgccagagagcgaggcaggagttggagagcacagctggaacgccccgttgccaaatgctctgcttccttgccagtcttccctcctgtgaaagaggtggaccagtagaaaggtcccgctggaccctgagggagatggagctsttttctgagtcattcccctgtccaggtttgatagaagatcccaaaatcttggcactcrgtgtgaggcaatcaggcacctttgcgtctccacttggacccatcatttttatacatctgtgtccattcttctttgagctcaggataagtttcttccatgcccagtacatggagtcacagacactgttctgtggagagctggaaaataccactgttgttgcttgagctgtgaatgctgaacgggagctggtagttctatgtttaaaacatagcagactttacagtctgtcattggacgagaac

SEQ ID NO: 83414 - DNA, 600 bp, Chicken  19866894379478_2
gaagtgttttatggatggcaaagcacagagaatcacttcagctgctgtgatttgggcagcctaactgctggagtggagtgggttcggtgtgagttggaccctgccagagagcgaggcaggagttggagagcacagctggaacgccccgttgccaaatgctctgcttccttgccagtcttccctcctgtgaaagaggtggaccagtagaaaggtcccgctggaccctgagggagatggagctsttttctgagtcattcccctgtccaggtttgatagaagatcccaaaatcttggcactcrgtgtgaggcaatcaggcacctttgcgtctccacttggacccatcatttttatacatctgtgtccattcttctttgagctcaggataagtttcttccatgcccagtacatggagtcacagacactgttctgtggagagctggaaaataccactgttgttgcttgagctgtgaatgctgaacgggagctggtagttctatgtttaaaacatagcagactttacagtctgtcattggacgagaacagaacagtcctggctgtacagaatgctacctagaatagtatttctgagttgttctcca

SEQ ID NO: 83415 - DNA, 600 bp, Chicken  19866894379480_1
tcatagagaatcagtgcttcctaagcatagctgggagataattgtacttagttcaatgaaaagttgtggatattgccaaaatacaaaaattaagaaattctgtatcagtcagaggcaagaaaagtctgctccaaacaaagcttcccgtggcctccgagggttcttccctctgctttctctgcatctggaggcaagtaatgatgtggtgatggctgtgatgaagtgtgatgatgcagatggtgatttcacggggaagcagagtttcagaaggaatcagcccattagaaaccctggcacatyatgggcacrctgcasttttttctcatacctttcaagtcctgctgcacatagcaggggaagcatccaaacctctattgcatttctgcacctcagcacgtgcatgttttctttgtatggggctttactgcaaagccttcaagactcagaggatttagggtttaacattctgcttttagtgcaggttgtaggagaaaataagaacaaagggctgatgagaacgaaccggttgttcctactcgcttttttgatcaaggaaaagtgctaccccccattaaaatctgctacagtgaatataatgta

SEQ ID NO: 83416 - DNA, 600 bp, Chicken  19866894379480_2
atcagtgcttcctaagcatagctgggagataattgtacttagttcaatgaaaagttgtggatattgccaaaatacaaaaattaagaaattctgtatcagtcagaggcaagaaaagtctgctccaaacaaagcttcccgtggcctccgagggttcttccctctgctttctctgcatctggaggcaagtaatgatgtggtgatggctgtgatgaagtgtgatgatgcagatggtgatttcacggggaagcagagtttcagaaggaatcagcccattagaaaccctggcacatyatgggcacrctgcasttttttctcatacctttcaagtcctgctgcacatagcaggggaagcatccaaacctctattgcatttctgcacctcagcacgtgcatgttttctttgtatggggctttactgcaaagccttcaagactcagaggatttagggtttaacattctgcttttagtgcaggttgtaggagaaaataagaacaaagggctgatgagaacgaaccggttgttcctactcgcttttttgatcaaggaaaagtgctaccccccattaaaatctgctacagtgaatataatgtaattgattta

SEQ ID NO: 83417 - DNA, 600 bp, Chicken  19866894379480_3
gcttcctaagcatagctgggagataattgtacttagttcaatgaaaagttgtggatattgccaaaatacaaaaattaagaaattctgtatcagtcagaggcaagaaaagtctgctccaaacaaagcttcccgtggcctccgagggttcttccctctgctttctctgcatctggaggcaagtaatgatgtggtgatggctgtgatgaagtgtgatgatgcagatggtgatttcacggggaagcagagtttcagaaggaatcagcccattagaaaccctggcacatyatgggcacrctgcasttttttctcatacctttcaagtcctgctgcacatagcaggggaagcatccaaacctctattgcatttctgcacctcagcacgtgcatgttttctttgtatggggctttactgcaaagccttcaagactcagaggatttagggtttaacattctgcttttagtgcaggttgtaggagaaaataagaacaaagggctgatgagaacgaaccggttgttcctactcgcttttttgatcaaggaaaagtgctaccccccattaaaatctgctacagtgaatataatgtaattgatttattgctc

SEQ ID NO: 83418 - DNA, 599 bp, Chicken  19866894379481_1
  misc_feature (1)..(231): n is any nucleotide
nnnnnnnnnnnnnnnnnnnnnnnnnnnnnnnnnnnnnnnnnnnnnnnnnnnnnnnnnnnnnnnnnnnnnnnnnnnnnnnnnnnnnnnnnnnnnnnnnnnnnnnnnnnnnnnnnnnnnnnnnnnnnnnnnnnnnnnnnnnnnnnnnnnnnnnnnnnnnnnnnnnnnnnnnnnnnnnnnnnnnnnnnnnnnnnnnnnnnnnnnnnnnnnnnnnnnnnnnnnnnnnnnnnnnnnctttaaaaacctctgtgttgttttgtgaggagagggaaagaactgaacggatttttctccccccaaatraaaccaaaatgagttggctgtagttctgtctttaaaagcaaagatggcattttctcttgatcgtgtggctgtcctcacaaagcagttcccctaaaagatgataaagctgttgaagtgcaagattgaggaatgttcttattgacgtgtgactttattttggctcatctgcttcccttaccagctatattgtgtgacacaaatttgttttcctagtcaataggtgcagcagattttgcrttgcccagtttttcatttagagtctacgatctcttgaaatggggtggaactaatttttcatt

SEQ ID NO: 83419 - DNA, 600 bp, Chicken  19866894379481_2
aaacctctgtgttgttttgtgaggagagggaaagaactgaacggatttttctccccccaaatraaaccaaaatgagttggctgtagttctgtctttaaaagcaaagatggcattttctcttgatcgtgtggctgtcctcacaaagcagttcccctaaaagatgataaagctgttgaagtgcaagattgaggaatgttcttattgacgtgtgactttattttggctcatctgcttcccttaccagctatattgtgtgacacaaatttgttttcctagtcaataggtgcagcagattttgcrttgcccagtttttcatttagagtctacgatctcttgaaatggggtggaactaatttttcattgaaaactttaatcccagtgtcgcttcccatccacagaagcacacacttcttaccatgacctctgaatayatgtttttgttatttggatcacttgctgtaaatacgttgtattcataacctcatgtaaaatgaggagttttcaaatataaatagtaccaatacatttcttgttgttggcctattttttgactgtagtatagcgaatgagctgtcatgctttttgtttaaaagttagcat

SEQ ID NO: 83420 - DNA, 555 bp, Chicken  19866894379481_3
ctgtcctcacaaagcagttcccctaaaagatgataaagctgttgaagtgcaagattgaggaatgttcttattgacgtgtgactttattttggctcatctgcttcccttaccagctatattgtgtgacacaaatttgttttcctagtcaataggtgcagcagattttgcrttgcccagtttttcatttagagtctacgatctcttgaaatggggtggaactaatttttcattgaaaactttaatcccagtgtcgcttcccatccacagaagcacacacttcttaccatgacctctgaatayatgtttttgttatttggatcacttgctgtaaatacgttgtattcataacctcatgtaaaatgaggagttttcaaatataaatagtaccaatacatttcttgttgttggcctattttttgactgtagtatagcgaatgagctgtcatgctttttgtttaaaagttagcattagattcatagatcttaatattttagcatttcattggttaagcaggagagggcagccagaagttcatttttccccataggaatgct

SEQ ID NO: 83421 - DNA, 599 bp, Chicken  19866894379492_1
  misc_feature (1)..(32): n is any nucleotide
nnnnnnnnnnnnnnnnnnnnnnnnnnnnnnnnacctgacaaactctcacacagttgccactgctgaaacacaccacgcatcgcctcactgtgctcacatccactgtttggtctccataaacattcagcaagtattgatgaatgtcaatgggtgccattttttccacatggaggaattgagcggcacccctttgcttcatacccgtgtccatgtcagctgccattctgtcagcctgcccctctgctgccatccgtcacacggcaatgacatgtaacgggagatttgtgggaaggttcaacstgccataccaccaacatccgcctctgatgttgtgggccagtataatgaaataagaggcattactgttggaacagacctaatagattactagaatagtactctgyaacatgcaattttttgcttttccagcaaagatgctgttatgttttgtttgaaaaaatatactgggaaaccttttactttctcctttttgacttttttgtgacatgcttacagaattgtaggtgatgacgatggaggaaagccttttacccctgaggaatacgaggcgtacaaaagaaaggtgctacccatccggc

SEQ ID NO: 83422 - DNA, 600 bp, Chicken  19866894379492_2
gtttggtctccataaacattcagcaagtattgatgaatgtcaatgggtgccattttttccacatggaggaattgagcggcacccctttgcttcatacccgtgtccatgtcagctgccattctgtcagcctgcccctctgctgccatccgtcacacggcaatgacatgtaacgggagatttgtgggaaggttcaacstgccataccaccaacatccgcctctgatgttgtgggccagtataatgaaataagaggcattactgttggaacagacctaatagattactagaatagtactctgyaacatgcaattttttgcttttccagcaaagatgctgttatgttttgtttgaaaaaatatactgggaaaccttttactttctcctttttgacttttttgtgacatgcttacagaattgtaggtgatgacgatggaggaaagccttttacccctgaggaatacgaggcgtacaaaagaaaggtgctacccatccggctgcagaaccggctgtacgtcagctggagatcccccacgggcatggactgcaagctggtgggaccagagacgctgtgcttctgtactcaccggtggggttctttgc

SEQ ID NO: 83423 - DNA, 600 bp, Chicken  19866894379492_3
aaagaaaggtgctacccatccggctgcagaaccggctgtacgtcagctggagatcccccacgggcatggactgcaagctggtgggaccagagacgctgtgcttctgtactcaccggtggggttctttgctttttttcctgcacctttgtattctttttacagcgaagaaatgtactattttctagatccaagtgcagcacaggcaagttaaattaaggtctgttttggaaaattaggttttgaatcataagaactttttaaaagccctaaatcccagtaacttttgtacagaccggagcrattctatagccatcaataaatccagcttcaaggcacgagttactgtaggtcagattgattgcgttggtggtatctgtagatgggattgattccgacattattatcaaaatgaaacataatgagctgtaatatttataaaatggatgtaaatatacctgatattaagtatctaattaaacagcagtaattagcagtaattaagataattaatgatacttcaactcaggagttgtaatctaaatcacaagtcttccgactagttttatcacacatactaacaaggttataaaagctcttatt

SEQ ID NO: 83424 - DNA, 600 bp, Chicken  19866894379499_1
gtttaattaaatcatacccatttttatgtagaactaaccaagtctactagcaatgcttgtctaaatgcttttcctggtaaaaacatatttcctttggagtaagatgttattgatccatcaggattttaacttgtgtttaaatgcattaacaatcaagtctgtttacttaatgttctcaggtgactggggttctgagcccaccaaatattttgcgttagccctcaagaaacttttttattaacgcagaacatattgatagaggtaaaaactaggagaatagaagcttgtgaaggcacagtwataggctgtcttactgatctttctgaagaggaagaaagaaaaggatatagacttttttccatattttcagttgaatgtagtcatacaattttgtctttggattgttgaaaagatagacacattatctactcattaatatcattgtccctatttctttaaatgaaatagactagatgcagcatgactctgtgacagtattacactatctctttggtttgttgaggtaaaacagctttattatatgtaaatcttcaaaagaggattctaaatataaacagtacgtgcatttggctttcaaag

SEQ ID NO: 83425 - DNA, 600 bp, Chicken  19866894379499_2
tagctgttgagctattagtgatagttctgtcgtggaaataacatagaaaaaaaagaaatccacacaacatctcctgcaatctcaggcatttcattaatatagcttttccagttttcagaggcacagattgctgtagtaactacttagaatgatcaataatttcatgcttgttttgggagatagctgggtgcatccagataatgaaccatagctcataatgctgcctctttcatctctgtgctctcttctcaggactgggtcatgttggtctttacttcaaagatgagcatttggtgtcaytgtgaactgatgctttgctgtcatcacagcagggctgtgcagtggtttcaaaaactttggccatggttagtgaaattgggggcattcatatctgagtgggataattgtggcctgaggtactcaaccctggtgcatgttctacatttgtgctttggggttgtgggaacgccacagtrgtaaagtgcaggagtgacacagttatttgtcctggtgacagagggctagataaagatcactttctgacatggatatctgtgcctgcattccataaagcctcagtcacttgtcaagagctatgta

SEQ ID NO: 83426 - DNA, 600 bp, Chicken  19866894379499_3
gagatagctgggtgcatccagataatgaaccatagctcataatgctgcctctttcatctctgtgctctcttctcaggactgggtcatgttggtctttacttcaaagatgagcatttggtgtcaytgtgaactgatgctttgctgtcatcacagcagggctgtgcagtggtttcaaaaactttggccatggttagtgaaattgggggcattcatatctgagtgggataattgtggcctgaggtactcaaccctggtgcatgttctacatttgtgctttggggttgtgggaacgccacagtrgtaaagtgcaggagtgacacagttatttgtcctggtgacagagggctagataaagatcactttctgacatggatatctgtgcctgcattccataaagcctcagtcacttgtcaagagctatgtacataatggttgctgagtgagaagggctgcacagagatccagtctgctagtcaccatttgcttactttgcaagtggcattcagaattgcccctaagaaaatagtttgctcctagaatgaggatattcagaattttattaattaagctgatatgattgctaccaccttgtcttatctg

SEQ ID NO: 83427 - DNA, 599 bp, Chicken  19866894379504_1
  misc_feature (1)..(31): n is any nucleotide
nnnnnnnnnnnnnnnnnnnnnnnnnnnnnnngcagtgacttggacagttttgtcctagcttttgcagtgctgtcatggaagtttcctgtctgcagtaccatttgccacaataccaatcctgctaaatttggtttgtgcgcattgccttatgcagtgatggcaggagcaagccaatttgtacagttgagggggtgctgaaatatgctggtctgctatttctgctgggggcttctgttcctcctcattggcactaaaaagacatccacaggcacgaaggtactagctcaggcttaggtattygtgtaatgaatcccacataggctggcctactattgagccagaggtgattaaaaaaaatccatttaaagtacctgagaggatttttttgttctagcaatatcattaacaagacagcatttgttgttgttgctgttgttctaatattatcattaagaatttgtactacagaaagaaagtttataaagccagtctggggaaaaagctcaaacaagctcagagctgcggtgaagctagaagtggttgtagtgctgagaagaccttgaaaggaatattattatgcctgtgtggtactgcatttg

SEQ ID NO: 83428 - DNA, 600 bp, Chicken  19866894379508_1
gctgtttatggccgtctggaacgtggcttgtctttcatagtgctgtcaccagtgctgaaacgaaacacctgctgtcttaatgtgctcacatcaactgtttggtctccataggaagcatcgatgaatgtcagtgggtgcaattttttccctgtagaggaattcaatgacaaacctttgcttcatacgcacttccatgtcagacaacattttaccagaatacccttctgctgccatctctcacacagcaacaaaatgtaatggaatattggcaggaaggttattccaatattgccattccarcaacattcacctccagtgttgtggaccaacataataatataggaggtattactttcagagcagtcctcgtattttcctcagcatatttaagtataacaggtttaggaatgtttagcagaatgcttggacaatgttcttattttcctgtcagcctgaacacttctgctccactgtttgaagtctaagtgtcacattgccaccaatcgggaaaacactgaaatccactgtcagtgcaccaggactagttaacaaatgctcacagagttctcttttctaccaaagcaattgaacagcactact

SEQ ID NO: 83429 - DNA, 600 bp, Chicken  19866894379511_1
ttaaaatatacaaatacttattgagttctcagaatgcatattgagcaattcagtcatatatccttgtaagaaactaattttaacatactaatttatcaaattcttagaacaaactgtatttccaatttggaagagactttcatctggctgataactcaattttcatagaatggtttgggctggaagggatattaaaggtcacccagttctaaatcctctgtcatgggcaaggttaaacttagtttttttgagatcaataagctgtaatcattggaggcacatcactttttgtatactccmstgtaaacttccacaattcaaagagtatatgtaattttactccttttaaaagaaatcttcattaaaatactagtgtcaaaatatagaataaagctgaataggagataggaggcagggcatcagccctaagcacaaaggaggaatgaagggggtaacaaaaaaaaaaaaaaagaggaataaaaaaaagaggacttacctgaccataggattcgctgccgttatcattgacagaagaccctcgctgaacagaaaataagaagtgcaatacttttactctctcaattaagagtttttcttctt

SEQ ID NO: 83430 - DNA, 600 bp, Chicken  19866894379511_2
taaaatatacaaatacttattgagttctcagaatgcatattgagcaattcagtcatatatccttgtaagaaactaattttaacatactaatttatcaaattcttagaacaaactgtatttccaatttggaagagactttcatctggctgataactcaattttcatagaatggtttgggctggaagggatattaaaggtcacccagttctaaatcctctgtcatgggcaaggttaaacttagtttttttgagatcaataagctgtaatcattggaggcacatcactttttgtatactccmstgtaaacttccacaattcaaagagtatatgtaattttactccttttaaaagaaatcttcattaaaatactagtgtcaaaatatagaataaagctgaataggagataggaggcagggcatcagccctaagcacaaaggaggaatgaagggggtaacaaaaaaaaaaaaaaagaggaataaaaaaaagaggacttacctgaccataggattcgctgccgttatcattgacagaagaccctcgctgaacagaaaataagaagtgcaatacttttactctctcaattaagagtttttcttcttt

SEQ ID NO: 83431 - DNA, 600 bp, Chicken  19866894379525_1
caaaagctctaggagagatttgctgatgtgtctttacctgatatatataagcactggttggactggctgagacaaaccaaataccaactttagatatacagctttttggaaaaatagtctcagagcttcttcattttgtgcaaacaactagaaaacttaaaaactgacacacctcagagccagacagtggatgcttattgttttgtataattatataaggtttttgtgtatgtatgtgtgtgtatatggtagccttttttgtctttcactctgtgattaattcctttagtaactgttaawagaaagatcaagtttgtttctcaagtcagttcctcagactttgagaattcttatttctgcatgtttgtgttagtgaagacagtttcaatttcaaggccgatagaaaataataaacactgagcaaaggaagttgcattaatctttagccagaatatgctaatgtgggctaaatttaaaaataaatagatttgctgacttttctatttctaaatttacaatttttggccggtgacagcttcattgtgctctcagctggaagagtaatgagggtgcttctgtcattctagcttgattgcattg

SEQ ID NO: 83432 - DNA, 600 bp, Chicken  19866894379530_1
ggctggatttgtgactgatgtttttgaaagcatcagttggacatttctgacagtacagaagactgcaagcattgcaagtacaaataattaatgaatacaacaattttcaaagtagttttcaacaattctcagtaagcaagaccaaaacaataacatcgaattccattgggctggatcatcactgtgggagagtttttgttattattatgaaatattaataacacaagcatgctgatctagctgatccagtcagctgagatttgtttaaagccttcatcccaatcttgtccatatgcaagrtaagctcttggcttttttgttcaatgtccgcamaatttccatcgattccagtgtgatcagaatttcactagcatagtggactgtctgcagaagctgacaattattcacctgtttctttattcaaactttctaagttaactgttcctgtcaaargatcaaaatgttcaattgattaattgattgaaaaaaacccacatgtttattggtttatttgaagtaatttactttgagagcattcaaggtacttcattctgatattaagcattcaaatattactaaaattacacagaaaacattctg

SEQ ID NO: 83433 - DNA, 600 bp, Chicken  19866894379530_2
cagttggacatttctgacagtacagaagactgcaagcattgcaagtacaaataattaatgaatacaacaattttcaaagtagttttcaacaattctcagtaagcaagaccaaaacaataacatcgaattccattgggctggatcatcactgtgggagagtttttgttattattatgaaatattaataacacaagcatgctgatctagctgatccagtcagctgagatttgtttaaagccttcatcccaatcttgtccatatgcaagrtaagctcttggcttttttgttcaatgtccgcamaatttccatcgattccagtgtgatcagaatttcactagcatagtggactgtctgcagaagctgacaattattcacctgtttctttattcaaactttctaagttaactgttcctgtcaaargatcaaaatgttcaattgattaattgattgaaaaaaacccacatgtttattggtttatttgaagtaatttactttgagagcattcaaggtacttcattctgatattaagcattcaaatattactaaaattacacagaaaacattctgtgtaaaaagcagtgtccatagaagacagttact

SEQ ID NO: 83434 - DNA, 550 bp, Chicken  19866894379530_3
catcgaattccattgggctggatcatcactgtgggagagtttttgttattattatgaaatattaataacacaagcatgctgatctagctgatccagtcagctgagatttgtttaaagccttcatcccaatcttgtccatatgcaagrtaagctcttggcttttttgttcaatgtccgcamaatttccatcgattccagtgtgatcagaatttcactagcatagtggactgtctgcagaagctgacaattattcacctgtttctttattcaaactttctaagttaactgttcctgtcaaargatcaaaatgttcaattgattaattgattgaaaaaaacccacatgtttattggtttatttgaagtaatttactttgagagcattcaaggtacttcattctgatattaagcattcaaatattactaaaattacacagaaaacattctgtgtaaaaagcagtgtccatagaagacagttactcttttatttttatttggtttaattgcaaatatattccatttggacctcagtaaaatctaatgcagtaaaa

SEQ ID NO: 83435 - DNA, 437 bp, Chicken  19866894379531_1
gtaagcatcacctttttgtgtccatattcaaacatttgtccttgtggtggtctatctgtacaccattacttatgattactcctagcttcaactttaacaaattctgtctaaatacaaataataataattacaaatgaaataaggggggtaggcactgaatggtcttggaaaaaaaataaaaagactattttcaatcactgtccattcaacaatgagtaactaggtaaatagtatcacttgaagtaaggttttcaagcttgttttcaaaattatttattgaatattgatgtattaaagaawacatcatctcaaacgaaaagcaaagccttgttccttcaaatctacaccgtaagctagatgtaactcctctactagtatggcttttatacacaatgtttgtagtcccttccatatgtgcatcattggagcaaaccatg

SEQ ID NO: 83436 - DNA, 600 bp, Chicken  19866894379536_1
aacgtacagttccctcctgttacaaagcataggtagccccgtgacctgggattcaaagccaacctggccgcagaaggacggcagcaataaggttgggaaaatggggcactgcaacaggggagcatctggcacctgagcggagccatgtgtgagaagtgcacccataggagcctggagggagttaatttggaagagctccacattttaggcccatgtttaggagctcctcccagctccatgttttaggcccagtactacccctggtttgcggaatgactttggccaactcctgtcttcctygtctcactttgcagatgaacaaaagcactcatgtgaagtactaacgcttgtaaatgttatgacaggatgatgtataaagtatttttaagtgctagctgggggaaggaaacgtaaggagagaaaagaaaggagagckggaacacrggccggagcaggagaaacgtcacagggccagagaaatacttttcaccagctgctacacattatttgctctgtgcatccttaacaacatttccctccaacaataaacgtgacccgtcttcctcaacaacaaaaaattaaattagctaccctgaaata

SEQ ID NO: 83437 - DNA, 600 bp, Chicken  19866894379536_2
gcggagccatgtgtgagaagtgcacccataggagcctggagggagttaatttggaagagctccacattttaggcccatgtttaggagctcctcccagctccatgttttaggcccagtactacccctggtttgcggaatgactttggccaactcctgtcttcctygtctcactttgcagatgaacaaaagcactcatgtgaagtactaacgcttgtaaatgttatgacaggatgatgtataaagtatttttaagtgctagctgggggaaggaaacgtaaggagagaaaagaaaggagagckggaacacrggccggagcaggagaaacgtcacagggccagagaaatacttttcaccagctgctacacattatttgctctgtgcatccttaacaacatttccctccaacaataaacgtgacccgtcttcctcaacaacaaaaaattaaattagctaccctgaaataagtctccaggctggaatgcttacgtttctgcatcactgtttcctacagcccgcagcccctgcgcccatgcagtccaagttttgacagatgtcagattcacatgtgtgtctattttatggccaccccgtgctggaca

SEQ ID NO: 83438 - DNA, 600 bp, Chicken  19866894379536_3
atgtgtgagaagtgcacccataggagcctggagggagttaatttggaagagctccacattttaggcccatgtttaggagctcctcccagctccatgttttaggcccagtactacccctggtttgcggaatgactttggccaactcctgtcttcctygtctcactttgcagatgaacaaaagcactcatgtgaagtactaacgcttgtaaatgttatgacaggatgatgtataaagtatttttaagtgctagctgggggaaggaaacgtaaggagagaaaagaaaggagagckggaacacrggccggagcaggagaaacgtcacagggccagagaaatacttttcaccagctgctacacattatttgctctgtgcatccttaacaacatttccctccaacaataaacgtgacccgtcttcctcaacaacaaaaaattaaattagctaccctgaaataagtctccaggctggaatgcttacgtttctgcatcactgtttcctacagcccgcagcccctgcgcccatgcagtccaagttttgacagatgtcagattcacatgtgtgtctattttatggccaccccgtgctggacagtgctaca

SEQ ID NO: 83439 - DNA, 600 bp, Chicken  19866894379545_1
acttccccacccttcctgccttgcctatcccttctaaaaaggtgatacccctttacactggtgttccagctatggaagtcatcccaccatgtttccatgatagcaaccagatcataattttccaagtacatcagggtttctagcttgtcctgcttatccatgctgtgtgcattggtgtaaagctgggctttctgacacaccatctttatagaggagcactccctcaaacctccaggaggaatcattctgtctcaaagtgcaagaacttctttcatttgttgtacttgctcagttgggaasctttttgttttatgcctttaccattagcagcaacatttgttaaaacaaaactattaacaccaaatagcaactaaccatcacttatcactgcaatcacattttgggttcacaggtactccatatgacttccaatttttaattttcattatgaaataaattgttgttgtgacatagtcacaatgaaattgatacaggctggtttgtttagcaatagggattagtatattagtttaaggacaaatatattagtttagcaaaatgaatccatgagtgctatttccaaaattttccatttcaaac

SEQ ID NO: 83440 - DNA, 600 bp, Chicken  19866894379548_1
agttatgcagcttttgccttcctgactttcatctctttgctttgttttacagttttaattggtttaacagccttttgctgtcaccagggttcctgtaattgttaggctaatagagtgcaggtggcaaagcagaggcaccagcatcaccaaaggagaggttggagggagatatgttgcctggtatgttgctgctcaaggtcacttgtacaagagctacagtcacctatcaggctctgctttcacccacgcaaattaatctagctggtgtactgaagacttagcttgtgttgagaaggcacygatgaactgaattctcttttcttgctggttacagggagttttgcccagagatttttctttcagggaacagcaagagtcaaaatggcacaaagaccttccatacaagtggagagtgggtattcccaggacgtgatcttgtcacctcatgtggacacgtcacactggatgagaggtctctcatcccacagtgcccattcctccccagtgacaacagaggatgtaggatcaccctgaaagagtaacccctctctgcaagacctcagctcagactttggttcaccaggaaaaaagataagcaaa

SEQ ID NO: 83441 - DNA, 599 bp, Chicken  19866894379554_1
  misc_feature (1)..(111): n is any nucleotide
nnnnnnnnnnnnnnnnnnnnnnnnnnnnnnnnnnnnnnnnnnnnnnnnnnnnnnnnnnnnnnnnnnnnnnnnnnnnnnnnnnnnnnnnnnnnnnnnnnnnnnnnnnnnnnnctgctcccgtggcacagctcaccctttccccacgccatcactcacgattatcatccggcagacatggccacggcagagctcagagtaggaggagtagtgcatgtaggccacccagctgcccacgaagatgcccagccacaccaccagcaggtacttcactttgatgcccgggaggcggctctgcaaggraaggaaaacgcagtgggtgaacgcagtggtgctcagcccatcggtgctgtcaaggattggactcttccaaacaaacccactgatggaaccttcagccttttttatgtatatccacccgcctattatgcaactcctgctgcaagtaggtcacttaaaattccctaaaagcagagattacagccactccccagcaaagcgctctgcaaaagtttggtgccatcgtgacccccttccccacctgaccctccttacacmtcttgcccgggtgatggaccataactggcaatactgaagcatga

SEQ ID NO: 83442 - DNA, 543 bp, Chicken  19866894379554_2
cagcaggtacttcactttgatgcccgggaggcggctctgcaaggraaggaaaacgcagtgggtgaacgcagtggtgctcagcccatcggtgctgtcaaggattggactcttccaaacaaacccactgatggaaccttcagccttttttatgtatatccacccgcctattatgcaactcctgctgcaagtaggtcacttaaaattccctaaaagcagagattacagccactccccagcaaagcgctctgcaaaagtttggtgccatcgtgacccccttccccacctgaccctccttacacmtcttgcccgggtgatggaccataactggcaatactgaagcatgaatgggcccacggtgccctctgagcccatcaaggaatcccacctctaattaacgcccgttccaagagaatccaccacgagggctgggtaaaaataaaggatggttggatttttcccatagggctgcgttgcatctacaaacccaaaggcagctcaaagcactgaaggcagatacagtgtgagaccctcacagcacagcag

SEQ ID NO: 83443 - DNA, 600 bp, Chicken  19866894379561_1
ggacagtctgagaaatgtaatagcattccctcagctgctgtgctgtgctttaatatgtagtgcggtagatgggaatgcacacggaacaaacacaagaggctctccaccatctgcaggctggatctaattttttccatgcttcctcatttctgagaataaaagtggaaagcctctgatctgcttcatgtgtttgctttgtgccacatgctggtccctgcagagcacaggcgcactgatagaaccagctcatacgtgcctgaatgattcttgttacaaaataaaacaggataagttagcccytgtagtttgacatttatcttgtgtccttctaataaaagtggatatgcttgtggttatttcatctatgctgaaagaaaatgcagtgcaaagggaactgtcattaactttcagctcattttggcagctaatggtggtgaaaacagatgggcatgaagatcggacagcaaagcagctttccccttcattcaggtatgtggcaattcgcagcctgaaggattacttctgatttgtagtgggcaccaaagaaatcagaacttcagccactgcctataaatgcctttaattattgctagcattaag

SEQ ID NO: 83444 - DNA, 600 bp, Chicken  19866894379568_1
gcaggatccgcaggaaggaacatactggatccaagcaaagtctcttccatgtcctgtctccaaacatagacggcggcagatgctcagttcattctcagtttcccacgcacgaaagtggagaaaagtactgacaaacatgacagaaaatgcacggctgccaagatcctgtaaggggagtgtatgtatatatatatatgtaaaaaaagcccacccaaacccacctgctgccaacaacagcagcaatcctccaacccacccccatttatctgctcacaggcctgctggcagggcacgtcctgrtggctctgcatggggaccccgrgcacctccttctccaacacctgagctgctcttggattacatcccccaggttttccctttgggaaaacaaaaagcaggcttgtgtgccctgcagcctgccccaactggaggagccgtgatgggaagaggtggacagaaggtgtctttattcttcaaataaccatttacttaaacaggaaaccattgcacaagtgggaattcgtgccagctcccctgcgacacgctgcagctcgcagctctttcatccgagcgcttcagcacacccaagaggcccggctc

SEQ ID NO: 83445 - DNA, 600 bp, Chicken  19866894379568_2
tactggatccaagcaaagtctcttccatgtcctgtctccaaacatagacggcggcagatgctcagttcattctcagtttcccacgcacgaaagtggagaaaagtactgacaaacatgacagaaaatgcacggctgccaagatcctgtaaggggagtgtatgtatatatatatatgtaaaaaaagcccacccaaacccacctgctgccaacaacagcagcaatcctccaacccacccccatttatctgctcacaggcctgctggcagggcacgtcctgrtggctctgcatggggaccccgrgcacctccttctccaacacctgagctgctcttggattacatcccccaggttttccctttgggaaaacaaaaagcaggcttgtgtgccctgcagcctgccccaactggaggagccgtgatgggaagaggtggacagaaggtgtctttattcttcaaataaccatttacttaaacaggaaaccattgcacaagtgggaattcgtgccagctcccctgcgacacgctgcagctcgcagctctttcatccgagcgcttcagcacacccaagaggcccggctcttgatttaatccaacagttctg

SEQ ID NO: 83446 - DNA, 600 bp, Chicken  19866894379572_1
tcagctcagaactttacttctcagctattcctaagcaaccaaagagatggcagatggatggagagaatatacaacaaactcaggggagcgggcagagagaaagcaagaagcatctattttaacataatttgaatgtcagtgcatgtgggaattgtttcatctgcaccttacgctgcacccaaatcaaagcagatagaatcctagaatggcctgggttgaaaaggaccacaatgatcagtttcaaccccttgctacgtgcagggtcaccaaccaccagagcaggctgcccagaataggaartacatcacacaaaaatactacccaacctgccccaaaaaacagcctcacaaaaagcttttagaggggaaatgaagcagaacatttattaagyaaagagtgaggagtgacctcaaagtgcactttttattacactgtgtggacygatagctgagcatggaacaccccagcagctggcaagagcctcaaagcagcacagctttaatcacagggtaacacatgtgagaataaacctcataagcacaaatgcctttaacacccaaccctgcactcttgtttgttggtcaagacttttaaaggcag

SEQ ID NO: 83447 - DNA, 600 bp, Chicken  19866894379572_2
gcagagagaaagcaagaagcatctattttaacataatttgaatgtcagtgcatgtgggaattgtttcatctgcaccttacgctgcacccaaatcaaagcagatagaatcctagaatggcctgggttgaaaaggaccacaatgatcagtttcaaccccttgctacgtgcagggtcaccaaccaccagagcaggctgcccagaataggaartacatcacacaaaaatactacccaacctgccccaaaaaacagcctcacaaaaagcttttagaggggaaatgaagcagaacatttattaagyaaagagtgaggagtgacctcaaagtgcactttttattacactgtgtggacygatagctgagcatggaacaccccagcagctggcaagagcctcaaagcagcacagctttaatcacagggtaacacatgtgagaataaacctcataagcacaaatgcctttaacacccaaccctgcactcttgtttgttggtcaagacttttaaaggcagatataacattttgcgtaagactcaacaaagaagcagagctgggaaggccgtgctggtctcttccttacaaatggcagcacggctctgtgcc

SEQ ID NO: 83448 - DNA, 600 bp, Chicken  19866894379572_3
atgtgggaattgtttcatctgcaccttacgctgcacccaaatcaaagcagatagaatcctagaatggcctgggttgaaaaggaccacaatgatcagtttcaaccccttgctacgtgcagggtcaccaaccaccagagcaggctgcccagaataggaartacatcacacaaaaatactacccaacctgccccaaaaaacagcctcacaaaaagcttttagaggggaaatgaagcagaacatttattaagyaaagagtgaggagtgacctcaaagtgcactttttattacactgtgtggacygatagctgagcatggaacaccccagcagctggcaagagcctcaaagcagcacagctttaatcacagggtaacacatgtgagaataaacctcataagcacaaatgcctttaacacccaaccctgcactcttgtttgttggtcaagacttttaaaggcagatataacattttgcgtaagactcaacaaagaagcagagctgggaaggccgtgctggtctcttccttacaaatggcagcacggctctgtgccccacgttggtcacactggggctcaaggcacttctgaagccatggccatcaa

SEQ ID NO: 83449 - DNA, 600 bp, Chicken  19866894379573_1
acctgaattctcctctaatacccatgcacttgaagcaacagagataaatcaggagatattagacatcttcctgggctttagcagtcttgaatcatcacttctagaggtgaaaaatgctaaaaagagtgcatatacttcacttcactttgtatattatgaacatctatgcagacttttaatcacattagaccaagctgctgccatcaaaataggagtaatttcaatgcagtttaccattaaataccttgtaaacatgacagatcaagagccaaacttgaacagttaattagaagtttctayaccaggttttaaacttacaaagccataaaagattaatcataattcatgagagaacattgaagaaaatctttcttcaaaaaattatttttgaagcaatgatgctagtaatgtctctgccctcatttctgaacagtcgtgaggatatggaatttggcaacattcttgtttgtctgtaaatattcaaatagcactaaatgagctagcggtatttccagcagtatatgtatatttgtcccttgataggtttcttgatgcccagcatttgtgctcccattcttcttcagctctcctatgccctgg

SEQ ID NO: 83450 - DNA, 600 bp, Chicken  19866894379574_1
ttgagaatcctaaggaatcaaagtccaggagaaatctattgtgttatgtgtatactttcaagggtctggatctgagtctgcttatgtgaactttccgatgaagaatctgattctattaaagttaatacaaaatgacttattaaattttttagcattgacaagtacaagcactctaaaccaaaaaaatgttgaaagtcttatctattatttattttccaattgtagaaaaaagaaattctcaataaataatcaatgattttcagggaaaatactgcctctttatctgctcattgaaaatakgttaattttccttaaatctatccatgtttgaaattgctctttctgtgaatttttgtttctccaccatttgtcacttcagttgtatttcttagctactataggtcacgggaggctcatataattgtttcttactctctggttggatgtgcgaggttgtagatacagagcttcagctgtgaaagctcctagaaaataaatacctgcaattgttgagcatgcaaccttaaaatatggtgtatgagatgttcatggtaataaaaagacacttcaaaaaagtatacaggaagaaaaacacaggca

SEQ ID NO: 83451 - DNA, 600 bp, Chicken  19866894379574_2
aggttgtagatacagagcttcagctgtgaaagctcctagaaaataaatacctgcaattgttgagcatgcaaccttaaaatatggtgtatgagatgttcatggtaataaaaagacacttcaaaaaagtatacaggaagaaaaacacaggcatgaaagcatccccaaatcattttttattttgtataagtatttacgggggtggtatttgctgtaatgggctagaacttacacaaacaatattttgtcttactcttcagggaagcagagaaataacataagtaaatccttccatagatgcaktttttttttgtgaaaatattatttcaatactctgaaaataggaattggtcaaaacctgatgattatgacgtaatcaataaagcrtattgagatgaaaacaagctgagaatgtaaaacagctccaataaaaagacattcttttacttaacatctccaaaatgtgcctttcaaagtcatgcatgcacttttggaagcaaaaccttttctgaccaattctttataagatagactgtaaatatatttcctgaacatatcttaaataaagcttcccacagccagaagaataaagccactgaaagg

SEQ ID NO: 83452 - DNA, 600 bp, Chicken  19866894379574_3
ggttgtagatacagagcttcagctgtgaaagctcctagaaaataaatacctgcaattgttgagcatgcaaccttaaaatatggtgtatgagatgttcatggtaataaaaagacacttcaaaaaagtatacaggaagaaaaacacaggcatgaaagcatccccaaatcattttttattttgtataagtatttacgggggtggtatttgctgtaatgggctagaacttacacaaacaatattttgtcttactcttcagggaagcagagaaataacataagtaaatccttccatagatgcatkttttttttgtgaaaatattatttcaatactctgaaaataggaattggtcaaaacctgatgattatgacgtaatcaataaagcrtattgagatgaaaacaagctgagaatgtaaaacagctccaataaaaagacattcttttacttaacatctccaaaatgtgcctttcaaagtcatgcatgcacttttggaagcaaaaccttttctgaccaattctttataagatagactgtaaatatatttcctgaacatatcttaaataaagcttcccacagccagaagaataaagccactgaaagga

SEQ ID NO: 83453 - DNA, 561 bp, Chicken  19866894379574_4
tgtatgagatgttcatggtaataaaaagacacttcaaaaaagtatacaggaagaaaaacacaggcatgaaagcatccccaaatcattttttattttgtataagtatttacgggggtggtatttgctgtaatgggctagaacttacacaaacaatattttgtcttactcttcagggaagcagagaaataacataagtaaatccttccatagatgcattttttttttgtgaaaatattatttcaatactctgaaaataggaattggtcaaaacctgatgattatgacgtaatcaataaagcrtattgagatgaaaacaagctgagaatgtaaaacagctccaataaaaagacattcttttacttaacatctccaaaatgtgcctttcaaagtcatgcatgcacttttggaagcaaaaccttttctgaccaattctttataagatagactgtaaatatatttcctgaacatatcttaaataaagcttcccacagccagaagaataaagccactgaaaggaggaggataacaggacagactgctcactctgtgtgctggcgcagg

SEQ ID NO: 83454 - DNA, 600 bp, Chicken  19866894379583_1
ctaacagcagagcttttctccattttctgggcttatttcactctttttttccaaacttccatttcttctcatgacagctcagcagttttatgagcaagtggagatattgcaggaaaacagagttgtgtttaagtgaaaccctagctgaagctgctgcagcactgccacttagcctctttataaagctgtggtcactcctgaacagctgtcagtgtataggactcacccaggaatcacatgctatcctcagaacagtatcacagcaatggcaaaaggaccagaaactggactgtgctggaraatgttgagacatgtagatgctgtactaagggacatggcttagtggggaaataccagtggtaggtgaatgattgaactgggtgatcttgcaggtctttcccaactttggcaattctatgaaataacaaaaaaaaaaaaaacaacttcagagtgcagaataaaagggaaaggctcaaaatctaaattccagcagtggggctgaaggaaagaacactggtggcagcctcactggattcagccaccctaagaacatcagcgagyacatgtagatcctccccatacctatttgctatgttgatt

SEQ ID NO: 83455 - DNA, 600 bp, Chicken  19866894379583_2
agcaatggcaaaaggaccagaaactggactgtgctggaraatgttgagacatgtagatgctgtactaagggacatggcttagtggggaaataccagtggtaggtgaatgattgaactgggtgatcttgcaggtctttcccaactttggcaattctatgaaataacaaaaaaaaaaaaaacaacttcagagtgcagaataaaagggaaaggctcaaaatctaaattccagcagtggggctgaaggaaagaacactggtggcagcctcactggattcagccaccctaagaacatcagcgagyacatgtagatcctccccatacctatttgctatgttgatttttgcacccgtcaatgactgttcttccagcaagggaagcaaggctgttccagggctgggtaaatatttgagtgccattagccgaaaggatggcagggtggtttaagactagctgagggttggccaaagaacagtccttgtcacgcgtccttgaacttctccatctcaacacctggagagccctgaaaacagacagctacgattactgccacagtgggactcaagggcctggctccttggcaggtgatgcagagatctgaaa

SEQ ID NO: 83456 - DNA, 599 bp, Chicken  19866894379584_1
  misc_feature (1)..(190): n is any nucleotide
nnnnnnnnnnnnnnnnnnnnnnnnnnnnnnnnnnnnnnnnnnnnnnnnnnnnnnnnnnnnnnnnnnnnnnnnnnnnnnnnnnnnnnnnnnnnnnnnnnnnnnnnnnnnnnnnnnnnnnnnnnnnnnnnnnnnnnnnnnnnnnnnnnnnnnnnnnnnnnnnnnnnnnnnnnnnnnnnnnnnnnnnnnnnnntgtgttttcccatagcactgagcatcagtgcccaccacggctgctctgctcccaccaccccacagctccccacgctccctccccatggcaggcacggccccgcacccctygctgcgcagagagctatcagggtacacagataatcttttactcttcagtacaaataatttattacattaaaataacgtttttaaaaaatgagtactttgggaataattcaggctcgcctgcggaggcatttttcaaagtgccataataggcacttagaaatgggtggttatttttattctccgagcctgtcaagaagctgatggatcgaattggctgatgacaaggcagctgagtgctcgtagacggagaccacagcgtgaacacggagcccgttacaaatgagcaaccagctcaggtc

SEQ ID NO: 83457 - DNA, 541 bp, Chicken  19866894379587_1
gaagaatatcaaaagtatttgagatgtccccctgtgccacggctttactctgctctcacccagctcctgaacacagggtgcaaggagagaggataaagggagaattaacagctcggatctagagagccagggccgctttgtttgatgtttctgctttgggatatagttaaagcaatgaagtggtgtgtggattttgtttttatttcattaacatatacagattttctcagagttactgaacacatttttaggaactcttcatttttatattttatctctaatttatttatgtttctattytctaaacgtgtgtttgcaatgcatyrgcggtaacaagaaactaagagaaagatcatttcttgtggtgatagttaactggataaaacagtctctgataggcaggttagaagattgaagagtccttgcagctttgaacataggaggtcaaaagtgcatgagatgcacagtatgtttgaaacggtaaagtagtgttaaagtgttcttacaacattcagccccattgtatttagaaattaccaag

SEQ ID NO: 83458 - DNA, 516 bp, Chicken  19866894379587_2
gtccccctgtgccacggctttactctgctctcacccagctcctgaacacagggtgcaaggagagaggataaagggagaattaacagctcggatctagagagccagggccgctttgtttgatgtttctgctttgggatatagttaaagcaatgaagtggtgtgtggattttgtttttatttcattaacatatacagattttctcagagttactgaacacatttttaggaactcttcatttttatattttatctctaatttatttatgtttctattytctaaacgtgtgtttgcaatgcatyrgcggtaacaagaaactaagagaaagatcatttcttgtggtgatagttaactggataaaacagtctctgataggcaggttagaagattgaagagtccttgcagctttgaacataggaggtcaaaagtgcatgagatgcacagtatgtttgaaacggtaaagtagtgttaaagtgttcttacaacattcagccccattgtatttagaaattaccaag

SEQ ID NO: 83459 - DNA, 515 bp, Chicken  19866894379587_3
tccccctgtgccacggctttactctgctctcacccagctcctgaacacagggtgcaaggagagaggataaagggagaattaacagctcggatctagagagccagggccgctttgtttgatgtttctgctttgggatatagttaaagcaatgaagtggtgtgtggattttgtttttatttcattaacatatacagattttctcagagttactgaacacatttttaggaactcttcatttttatattttatctctaatttatttatgtttctattytctaaacgtgtgtttgcaatgcatyrgcggtaacaagaaactaagagaaagatcatttcttgtggtgatagttaactggataaaacagtctctgataggcaggttagaagattgaagagtccttgcagctttgaacataggaggtcaaaagtgcatgagatgcacagtatgtttgaaacggtaaagtagtgttaaagtgttcttacaacattcagccccattgtatttagaaattaccaag

SEQ ID NO: 83460 - DNA, 482 bp, Chicken  19866894379605_1
caaacctcctattattctcatgtttcttgagtgtagaaatgcttcatgatctagtctgttcttttccttcatagttgttgacaagaaatatatgtataaatcagtaggaaatagagtaccaagaaaaaacaggttttacaggacaaataaacacccgtggaagatagccccagtactgctctttacaatctagttaatgcccagtatccatgaattatgtttgttacaactgatcttacagctcctcagcattcttcccaactcctatttttaatgcttaattcatgaagcagaggtctytgcaagcggtaatccagatgaaagggaacttttcaggctgggagtgtgcttttatgtgggtttgttgggtgttgggcatttgtttctttttcatttgccattgttttctgtggggttttttatgttttttgtttgtatgtttttgaaagcatgtgatatttatgtaagtgacattttaaata

SEQ ID NO: 83461 - DNA, 599 bp, Chicken  19866894379609_1
  misc_feature (1)..(10): n is any nucleotide
nnnnnnnnnncttcgagtcttttctgcataacggaaccgatgtactatgaagtgcactcattaaagtacagccctggaagtgctcgtgcagctggtctgtggtgagggtcatccgaaacaggagtggagtcaaggccaccaaggctaagttaccaatcacatcagaagtgacactactcatggcagcgaaaagcaaagctagagcaatgcaagccactgccagagagaatctggtttctgaaaagcatttgcaggaagactcctcataaactgatgactgctcctcagaataactggaasttctattccctggctctcgctgccacctgtctcctaccccctcctctctcccccagcttgtctgactgcccacgacatccctaggctgcagctttccagcatccaacaaagcagccaatttaattatccttttaaaatgctcctcttaatcctgtgctccttcttgcagagcctgaaggggactctcaccgaacccaagggctcttttccaggcagcctggtgggcacgcggtgctttgtgcctcctgcacagcctgtcctgcagggatctttactatctcccatttcttaaaaaaaag

SEQ ID NO: 83462 - DNA, 599 bp, Chicken  19866894379616_1
  misc_feature (1)..(22): n is any nucleotide
nnnnnnnnnnnnnnnnnnnnnnattaatctaaagtcttttttatacatccaaaattaggatgctgtcattccagcttgattttgaccatttatgaggtctgcagtccttcctcttagagctcatgttgacctttgatgggcaaaccaatgttatttcactaaatgcagagctgagctcagaaaagctgcaaatattttacattggttcttaatgagaagacccctggaacagtagcatggatcttcattaacaataaaaacctaaatcttaagttagatttacctgaaaatatttgtttraggggtagtacagataacaaayacaataatggcagttcttcatgtgcactgctgagatgttccccctcctccccataggtcgtctatgtcacagcctccttgccatactgtgttctcatcatatacctcatcagaggactgacacttcacggagctgtcaatgggttgatatacatgtttactccaaaggtatggaaaaactgcactcaatttttaactagatgttattgctgactgaatgtgtaggtttccaaaaggtgacagtgctgcctttcttcataacgcggtttttccattgg

SEQ ID NO: 83463 - DNA, 600 bp, Chicken  19866894379616_2
attaatctaaagtcttttttatacatccaaaattaggatgctgtcattccagcttgattttgaccatttatgaggtctgcagtccttcctcttagagctcatgttgacctttgatgggcaaaccaatgttatttcactaaatgcagagctgagctcagaaaagctgcaaatattttacattggttcttaatgagaagacccctggaacagtagcatggatcttcattaacaataaaaacctaaatcttaagttagatttacctgaaaatatttgtttraggggtagtacagataacaaayacaataatggcagttcttcatgtgcactgctgagatgttccccctcctccccataggtcgtctatgtcacagcctccttgccatactgtgttctcatcatatacctcatcagaggactgacacttcacggagctgtcaatgggttgatatacatgtttactccaaaggtatggaaaaactgcactcaatttttaactagatgttattgctgactgaatgtgtaggtttccaaaaggtgacagtgctgcctttcttcataacgcggtttttccattggtagccctggtgagatgtcggaaa

SEQ ID NO: 83464 - DNA, 600 bp, Chicken  19866894379621_1
ttccactcattcaaacattggtttccccacgtgcaaaacacagaatggcaccaccctggtgagatcagatgacttaagtcactttgatgatcagaagcatgctgtgaaatagatgttcctaaaacatcttatgcatactactatagatccacagcacgtttcaaagtagtgcatacgtgcctgaaagctgcagcagcaacaccttcccaagcgtatgtgcacagactcacagctgccttcataaatggaaaggagctgttgttttcccagccctagtgttaggtctttgcatacgtatcmccataaacgatggatcttctgcgcatagaggctttgaatgccccctccctggaagcattcaaggccaggctggatggggctgtgaacaacctggtccagagggaggtgtccctgcctatggcagggggttggaactagatatctgaaaggtcccttccaacccaaatcatcctgtgattttggcttgagatctgaagcaaggctcagaaagagtgtgatactggtaaaagaaggagaaaagatctgggaagaagtagaagaaaagtgtgcatgtgtgtgcatgaagcagcaatggttgtg

SEQ ID NO: 83465 - DNA, 600 bp, Chicken  19866894379626_1
gccctgagccaagatgaacatggtacatatcgaaactgtgcttactaaaatctgtagcttctgatacagcaaggaaaaagcgttttatagacttgcagccaggctgggtatatagcagcagagtaacatggcttctctgtgctgcatcttgtagcagtgactgacatttaatattgcactgttcattaagcataaggtaccagaggcggatctcataaaaagaagtaataaggatgtatttgtcatccacggttcaaatgcctgtaattgaaaaatctcaggtgttgcctgcaccttccrtatatactttcaagacactattttaaatttctgaattctatacaatctaattctatttcaaatattggattgggctgctcaaggaaatggtggagtccccatccctgacgtgtggatgtggctctaagagatatggtttagtgacaggactcaataggtcaggttgatggtgggaactgatcttgaaattcttttccaacctaaatgattctgtgattccatgaactggtattaaaactctttagagcagcatttcctcccttctctcggggatttggaccccaaatcaaggtttctatg

SEQ ID NO: 83466 - DNA, 596 bp, Chicken  19866894379626_2
atatggtttagtgacaggactcaataggtcaggttgatggtgggaactgatcttgaaattcttttccaacctaaatgattctgtgattccatgaactggtattaaaactctttagagcagcatttcctcccttctctcggggatttggaccccaaatcaaggtttctatgtatcatagaacaaaggtttgtgggattttttgcttgctagatgataaaaaatctcagcttcttggagatctcacagccttcagaaggctcgtgatcagtttagttgaggatgctgccaataacagttcawaaaagtgggcaacagacgaggkggtgaagtctgtccttgcttatttgtttattttttcatggtagagatttttgtttctgtaagtccctaaatcaattttagtttctgttatcagttgcataaaccataagtacttttcttctggactccggacctgatggtttgcagtcacagtgctggatggacagttacttgctgcaggatcttccaggtcagtttacctttaactcaatggatcgttgttaagtgtgctgcaaattcccattgtgtgtgcgagttcatcccagccagaggca

SEQ ID NO: 83467 - DNA, 574 bp, Chicken  19866894379626_3
aataggtcaggttgatggtgggaactgatcttgaaattcttttccaacctaaatgattctgtgattccatgaactggtattaaaactctttagagcagcatttcctcccttctctcggggatttggaccccaaatcaaggtttctatgtatcatagaacaaaggtttgtgggattttttgcttgctagatgataaaaaatctcagcttcttggagatctcacagccttcagaaggctcgtgatcagtttagttgaggatgctgccaataacagttcawaaaagtgggcaacagacgaggkggtgaagtctgtccttgcttatttgtttattttttcatggtagagatttttgtttctgtaagtccctaaatcaattttagtttctgttatcagttgcataaaccataagtacttttcttctggactccggacctgatggtttgcagtcacagtgctggatggacagttacttgctgcaggatcttccaggtcagtttacctttaactcaatggatcgttgttaagtgtgctgcaaattcccattgtgtgtgcgagttcatcccagccagaggca

SEQ ID NO: 83468 - DNA, 600 bp, Chicken  19866894379632_1
agaaagtactgtaaatgtgcgttatgcacagctgtgaagaatatttgttcaatttgttaaacaactgacagattgatctctctggtcacttagatgctgggttttatcatggtgccttttctgctttcaggtggagtctcctacagataaagctggaaattttttttgctcaaaccactgggaaggggaaaacctgaacactcagctctttacacatgcatctaccatggaagatgtgccagtaagtgcatgttttcacaccgccaaatgattattttacatctgttaagttcttaaaartaagagagakattttttttttatgtttgaccttcctcacaagtagatgttattcattacttctgtattgttttcctgaactaaacgtagtaatttaagtcctgctcttagttaggttgctgtgatgcctatagaaggcagctgaagttgcaatcacagcctttagtctttgcaaagtgtgtgctcttggagaacaactgcagctgtgtatagaaatgactgggctgcagagttaaaactgttaaaagaaagagaggctctgctttgttttgtgcagaggaggcctggcttacgcatgggt

SEQ ID NO: 83469 - DNA, 600 bp, Chicken  19866894379632_2
gtaaatgtgcgttatgcacagctgtgaagaatatttgttcaatttgttaaacaactgacagattgatctctctggtcacttagatgctgggttttatcatggtgccttttctgctttcaggtggagtctcctacagataaagctggaaattttttttgctcaaaccactgggaaggggaaaacctgaacactcagctctttacacatgcatctaccatggaagatgtgccagtaagtgcatgttttcacaccgccaaatgattattttacatctgttaagttcttaaaartaagagagakattttttttttatgtttgaccttcctcacaagtagatgttattcattacttctgtattgttttcctgaactaaacgtagtaatttaagtcctgctcttagttaggttgctgtgatgcctatagaaggcagctgaagttgcaatcacagcctttagtctttgcaaagtgtgtgctcttggagaacaactgcagctgtgtatagaaatgactgggctgcagagttaaaactgttaaaagaaagagaggctctgctttgttttgtgcagaggaggcctggcttacgcatgggtctgtgcctca

SEQ ID NO: 83470 - DNA, 600 bp, Chicken  19866894379632_3
taaatgtgcgttatgcacagctgtgaagaatatttgttcaatttgttaaacaactgacagattgatctctctggtcacttagatgctgggttttatcatggtgccttttctgctttcaggtggagtctcctacagataaagctggaaattttttttgctcaaaccactgggaaggggaaaacctgaacactcagctctttacacatgcatctaccatggaagatgtgccagtaagtgcatgttttcacaccgccaaatgattattttacatctgttaagttcttaaaartaagagagakkttttttttttatgtttgaccttcctcacaagtagatgttattcattacttctgtattgttttcctgaactaaacgtagtaatttaagtcctgctcttagttaggttgctgtgatgcctatagaaggcagctgaagttgcaatcacagcctttagtctttgcaaagtgtgtgctcttggagaacaactgcagctgtgtatagaaatgactgggctgcagagttaaaactgttaaaagaaagagaggctctgctttgttttgtgcagaggaggcctggcttacgcatgggtctgtgcctcac

SEQ ID NO: 83471 - DNA, 599 bp, Chicken  19866894379638_1
  misc_feature (1)..(20): n is any nucleotide
nnnnnnnnnnnnnnnnnnnnaattgccccagtgttgaaggaggaagaagagcaagggttgtgagggccactttcctgggtatggcacccttggaccgttttgcttgataaaaataatggctttcccttcaacgcagggaccagcagggacttcagacccctcttcctttcatgcatggggtcccttaagtgaaagagtagaaagagtgtaggaggtctggggaatctctgctatcctctttcagctgcccagaagcctgcaagtggagccacctggacttggaaccatttctgccagtgwtgtagaaccagttgcaaagccatgtgaaggggtgagcagcagtcagctggactgagtatggttaccaggtagctccacaaattccataactgaagataccgggattaatccttggtaaatgtcagagatcatagccagtttgttctggtaccagaaataatttgctcaaacaggtggatgtttaaaatggtacctccaaagctgtttttggatacatctgtattcagtgaggctcaaaaatccttcaacttatagttcatataaaaaccacactcctagatgagcagatatcaatgcat

SEQ ID NO: 83472 - DNA, 599 bp, Chicken  19866894379655_1
  misc_feature (1)..(111): n is any nucleotide
nnnnnnnnnnnnnnnnnnnnnnnnnnnnnnnnnnnnnnnnnnnnnnnnnnnnnnnnnnnnnnnnnnnnnnnnnnnnnnnnnnnnnnnnnnnnnnnnnnnnnnnnnnnnnnntgactttatcccttcaataggtgtgagcacctaatctatgctgacaatctaatttaccaccactgggtaaaaataaagaggtaggcactgctgatgagcagtgtatgattcagtttgcttatttagatatggtctctctgttttccctgaatatagaggatgctcagctgactagattaatataaccayttaacatttagattactggggttaatcctgcctcttgtataccataaattcagttgtacatgctggtagaccttgatgtccagtgaagtttctgaaaaggtatggacaacaggagtaatgccttagacacactgggataaaccgagagaagagttttactgttatgcaaggtacatttatcttcattattgccaatacctcaaacatgattaggtaacaatgagacctccaggaaaacaggaccagaatcctcttctactgcacaacaacctgaacatacaccctttagtagcggtatc

SEQ ID NO: 83473 - DNA, 600 bp, Chicken  19866894379658_1
acttgggctcatgaaaaaaaataaatttctgagaggtattttttcccccgcctttatagtttctgaattatcaagtaagtttctgctgtgggccccattttattcttcatccaaagtaaagctattggcacgttgcacaaaagctcctttttttcagaaataggaaatctaaaatggaaaggaactgggtctatactatgagattattaaggaaacatttatctttaaaccacctcaattcccagttcactgctgtactgtaacactaggctcattgctttctctctgcctacagcgcartaggttgtgagagtaccaaggggactaaagtaaattctttgttatgtctacacaaagtagtaaatgaagcatgcagctcaaacctctcctgcagtggccagatccttagtgcctttcctttcagagtgggggatttaatgctattttctttsccatatgcttcatctttcagcataaaaaggaaaaaagaaaaataatctaaaggcttcgttttgcactaactgctcccttcagattccgaggcatgtcctgatgaaagctaggttgtgatggagtgaaatcaaaagaggaagaaatttc

SEQ ID NO: 83474 - DNA, 600 bp, Chicken  19866894379658_2
ttcagaaataggaaatctaaaatggaaaggaactgggtctatactatgagattattaaggaaacatttatctttaaaccacctcaattcccagttcactgctgtactgtaacactaggctcattgctttctctctgcctacagcgcartaggttgtgagagtaccaaggggactaaagtaaattctttgttatgtctacacaaagtagtaaatgaagcatgcagctcaaacctctcctgcagtggccagatccttagtgcctttcctttcagagtgggggatttaatgctattttctttsccatatgcttcatctttcagcataaaaaggaaaaaagaaaaataatctaaaggcttcgttttgcactaactgctcccttcagattccgaggcatgtcctgatgaaagctaggttgtgatggagtgaaatcaaaagaggaagaaatttcaccctgtgagacgatacttaaaagaggggaaaaaaggcctcagaaaagaaagttctttactgagtaattagccataatcttagataagacaacagatcaaacacatactcttaaaagagttgcagtgggaaagaaagaatttctgcaaaggt

SEQ ID NO: 83475 - DNA, 600 bp, Chicken  19866894379664_1
gaagtgcaagggtggcccaagcttttcctggcccttgaacagctcctgttcaagaaagagatatgatgaggtgacatgggacaggacagtgcctcatggggtaggtgtgcttcctgtgcaagacgagccccagcaacaggaagataatagcatggctaccaggctttcatggcagaggagtgagatggcttggtaatctgcattcccaagctgtgccagggaaggtttcaactttatataaggaagagtttcttcatggagaaggatagtcaggcattggaatggtctgcccagggaggsagtgaattccccatccctggaggtgtttaagaaatgtgtgaacgtggtgcccgggggcatggtttagtggtgggactcggtaggtcaggctgaaatttatgatcttgaacacctttctcaacctcagcgatcctaccattccacacaccgtgcagctgcagtgggtgagcccagttcagtgcaatggtacctccctcttgtggcagccactttgcattgcaaattgctccattttagcagatttgccctctcttctggctgaggcggcacgtttgtgtatttatttattttttccttcat

SEQ ID NO: 83476 - DNA, 600 bp, Chicken  19866894379679_1
ccagcatggactaagtttagcctggcaggtggctgcccacttcagaaacttccaaatatgcgagcacaggagggaaattgctttctaaaagtgtttctactgaggtgcactgtgggccaataacaacagtggtgatgacaatgggaacatgtaacacctgtgaggaatgaaaccaagaggaaacataggttggagagagagaaagatgagagggtgttgggtggttgaacccatgtggtggccaagtacagctgacttgaagtctgatcttggaggctccagcatatatgtgtaaagagytcccaatgtattctccaggaagacttccaaattctcactgtcttttaacacyctggatggttgtaaagtgggcaaaagacctgcatctccaccatgtcttactgaaacacagcattatttattatttcaagctggatgtggtgcagatacaatgcaagragtatccagacagactttcttctgaattaggcatgttcttaataattggatgccttcactatatcttggggcatcatctactcagactagtagaaatcatcccacagaggtgttgaatattaggaaaaaattctgctctga

SEQ ID NO: 83477 - DNA, 600 bp, Chicken  19866894379679_2
caaatatgcgagcacaggagggaaattgctttctaaaagtgtttctactgaggtgcactgtgggccaataacaacagtggtgatgacaatgggaacatgtaacacctgtgaggaatgaaaccaagaggaaacataggttggagagagagaaagatgagagggtgttgggtggttgaacccatgtggtggccaagtacagctgacttgaagtctgatcttggaggctccagcatatatgtgtaaagagytcccaatgtattctccaggaagacttccaaattctcactgtcttttaacacyctggatggttgtaaagtgggcaaaagacctgcatctccaccatgtcttactgaaacacagcattatttattatttcaagctggatgtggtgcagatacaatgcaagragtatccagacagactttcttctgaattaggcatgttcttaataattggatgccttcactatatcttggggcatcatctactcagactagtagaaatcatcccacagaggtgttgaatattaggaaaaaattctgctctgaaagagtggtgatgcagtggcacaggctgcccaggaaggtggtggagtcacca

SEQ ID NO: 83478 - DNA, 532 bp, Chicken  19866894379679_3
gtgaggaatgaaaccaagaggaaacataggttggagagagagaaagatgagagggtgttgggtggttgaacccatgtggtggccaagtacagctgacttgaagtctgatcttggaggctccagcatatatgtgtaaagagytcccaatgtattctccaggaagacttccaaattctcactgtcttttaacacyctggatggttgtaaagtgggcaaaagacctgcatctccaccatgtcttactgaaacacagcattatttattatttcaagctggatgtggtgcagatacaatgcaagragtatccagacagactttcttctgaattaggcatgttcttaataattggatgccttcactatatcttggggcatcatctactcagactagtagaaatcatcccacagaggtgttgaatattaggaaaaaattctgctctgaaagagtggtgatgcagtggcacaggctgcccaggaaggtggtggagtcaccatccaaggaggtggttaggagccatggagatggggcactg

SEQ ID NO: 83479 - DNA, 600 bp, Chicken  19866894379681_1
aggttcctctgaatttgtgccctttgccccttgttttgacattgggcatcagtgaaaagagcctggctccatcatctgtgcctccttcttttactgaattgaattttattcaattttcagttttttctttttcttctttcttcttctttttttggcttgcttcacgaacatttgggaagtcataaagttggcagaattcaaggaagaaatataaattttcatcactactattttacatttttgttttacagggtgttaaggcagcaagtaacactgtttctgctgttttccattactagwttgtacagctgtttccagctttatccactgagtggaccaccacatcataccttttcaggtcattagtaccttcaggtttttgacagccaggcttatattttaatcattctccatttccacatagttgttagatgcgtgttatccaatacaaaatgtatctcaaaatgttactagactgttttgttagtaataatggattattttccaaaacaaacaagacagaagtgagctccaatgtctctgaaattattatgaaagtaattatattagttccacaagtgccaaatagcatttgtttgt

SEQ ID NO: 83480 - DNA, 600 bp, Chicken  19866894379683_1
gagacctggtccccctgctccagggcactgctccatagggaagtgcctggcagggctaagtccatgctccggcagagcagagacatctggatgtggagggagatcctcacagatccagctgcagcaactgaaaggagttgctgcactctgacaggttttatggtctcacccgagacaacagaacaagctgtgggagctctttcagcctgcagcagcaaagttaaggcagctgctgtcactgctgggcttcacctggtgccaagcaacttctaaacccacaagaaacctacaagagcacaytgcctatggcttagggggggccaaggccagcagcggcagggagaacactgcgttgttccatgagtgatttcaccacacaagctgggtgcaaagcctgcacttctctgcccaactgagagctttgaggatactcaacacactctctgcttgctgaatggagcccagagtgctttcaacaacgctacatctgttccagtgctaaactactccttcttatctagttgttatcagccttaatatgttttacttaatgtgttttagaaagtgccagaattgacaaggtcattcagaaatatttag

SEQ ID NO: 83481 - DNA, 600 bp, Chicken  19866894379685_1
tggctgagcagcagctggagggccacacttggatgtggcttcccaaagaagcaagtgatgtgcaagtttgctttggcactgctgtgaagggatgagttttctggatgcaaaacttgtcttctcttcatgccttggtgctttgcgcttccattcctggttggttgttctgctcctcagagatttcagtggatgatttcatttaattgtagaaaagattaaatttacaggcaaggatgagcgaaagagaaagaaaaggagatttagattacatgtcagggagaagtgttttactcagagggyggtgaggccctggcacagctgcctggagaagctgcggtgccccatccctgcaggcactcagggccaggttggatggggccctgggcagcctgagctgctgggtgcagccctgcccatggcagggggttggggctgggtgggctttaagggcccttccaacccaaaccgttctatgattctatgaggagtattgcttctgtccttgcccagggtgacttacggctgctcattcagctgtcctgattttgcatgaagttccagctgaattccagcctactgtgtctttctgcactgaaaaag

SEQ ID NO: 83482 - DNA, 599 bp, Chicken  19866894379688_1
  misc_feature (1)..(41): n is any nucleotide
nnnnnnnnnnnnnnnnnnnnnnnnnnnnnnnnnnnnnnnnntgttgctgtgtctttgaagtcctgtcccattcagattgcactgcagaattttctcctgcaggatcagagtgttcacatggagcatagtgaggctttatattgagttcagtctcagaatgagttggctgataaaatgggaaatctaagtgcatggtggagcacgaggacagaaaggtaggagtatgaaggttttcttaacagccctgcagactttacagaatctaaacctagctcaaatggcaacactgctggaatatartagtgtaaaagaaggggcaggagggattctagtttacaagacccaccttcaaattgctagaaagatttgggtcagtcattccaagccaataacctaagaccccagcacagagcttcacccaaggaaagaattttgctcacgtcttttgcttgtcttctttggctccattcccagtacagcactgctgactgtctcactcccatcgtctggcgactagagacaggaaattggagaggcaccacagcactgggaacataaaaggtgccagcacagtgacaaaaaggcaggagatacctcct

SEQ ID NO: 83483 - DNA, 600 bp, Chicken  19866894379697_1
gttatcagaatgtggtcttcaaagcatgacaaagggcaggctggggatcagctcactcggggaggcaaagggcacatgctgatagcaacgatggcatcacatgcattactgagtgcctctcacaccagcccagccgtgctagtgatgtactgccccaacccagcacgcctgccaagtcaaacacacccacctgctcacctctgagctacagaaggctctagaaaactgaaatccccttcgaagtaccaaaacagtgtttcaaaaagctccttctaatcagcctcacttcccagcccaagrtgactgcgctccagcagagcacagaagttgctctccctgggttctagtggaagggttcacagcagcactcgttaaccatctcccctccatctgcatgcaagatttgtatcctaaacacaaccaagctcctggcagacagygcctgctagcacctgcagcagtgcagtaaagaaatctccatttaatctcatccacatttaagtgttggtttcagaacttaccggactaggagtctccttcattttctgttcggctattttaaggttggatttgtacgtgtcgttgtctggatcaagctcc

SEQ ID NO: 83484 - DNA, 464 bp, Chicken  19866894379697_2
agtgatgtactgccccaacccagcacgcctgccaagtcaaacacacccacctgctcacctctgagctacagaaggctctagaaaactgaaatccccttcgaagtaccaaaacagtgtttcaaaaagctccttctaatcagcctcacttcccagcccaagrtgactgcgctccagcagagcacagaagttgctctccctgggttctagtggaagggttcacagcagcactcgttaaccatctcccctccatctgcatgcaagatttgtatcctaaacacaaccaagctcctggcagacagygcctgctagcacctgcagcagtgcagtaaagaaatctccatttaatctcatccacatttaagtgttggtttcagaacttaccggactaggagtctccttcattttctgttcggctattttaaggttggatttgtacgtgtcgttgtctggatcaagctccaggg

SEQ ID NO: 83485 - DNA, 600 bp, Chicken  19866894379712_1
ctatagacttttctgctttaaattagactctagaaagggagttcttttggaatatacagtgcatgccttctgctggatgcatcatgggcacaccacctgtttacagtcccagttctgggcgatgtatacacaaaggaacttggcaaagaactaccttcacttctgtaaaaccaaaatccaacctggcatggctatcacagagatggaacaaagccaaaatctttcagctgagtgtctgcttcctttgagtcttggtggtctggatacaaagaaactgagattcaattaatcctggtgatrgttttgcaaaaaaaaattggtgctgaattttggtcctgaaaaagcaaatccaaactccagtgtccttgggaaagaagaraaggactgcttcaaatagtacagtttataattttctacagcatggaacccagtggcttcactccagttcccagcggaaactttcctctgaaaccatctagctactgtcctgaataaacagggtcagtaaagcrgtgaatgctgcaggtaagattgaagcagactgacagaacaatgaagcttccacagttgcaaaagcagtcaagcctaaaatagagatgt

SEQ ID NO: 83486 - DNA, 600 bp, Chicken  19866894379712_2
catcatgggcacaccacctgtttacagtcccagttctgggcgatgtatacacaaaggaacttggcaaagaactaccttcacttctgtaaaaccaaaatccaacctggcatggctatcacagagatggaacaaagccaaaatctttcagctgagtgtctgcttcctttgagtcttggtggtctggatacaaagaaactgagattcaattaatcctggtgatrgttttgcaaaaaaaaattggtgctgaattttggtcctgaaaaagcaaatccaaactccagtgtccttgggaaagaagaraaggactgcttcaaatagtacagtttataattttctacagcatggaacccagtggcttcactccagttcccagcggaaactttcctctgaaaccatctagctactgtcctgaataaacagggtcagtaaagcrgtgaatgctgcaggtaagattgaagcagactgacagaacaatgaagcttccacagttgcaaaagcagtcaagcctaaaatagagatgtttttgcaagtccagaatggcagaagattttgaaacttcagtgcattagcactgttatacaaggactcaacagatgccag

SEQ ID NO: 83487 - DNA, 600 bp, Chicken  19866894379712_3
gccaaaatctttcagctgagtgtctgcttcctttgagtcttggtggtctggatacaaagaaactgagattcaattaatcctggtgatrgttttgcaaaaaaaaattggtgctgaattttggtcctgaaaaagcaaatccaaactccagtgtccttgggaaagaagaraaggactgcttcaaatagtacagtttataattttctacagcatggaacccagtggcttcactccagttcccagcggaaactttcctctgaaaccatctagctactgtcctgaataaacagggtcagtaaagcrgtgaatgctgcaggtaagattgaagcagactgacagaacaatgaagcttccacagttgcaaaagcagtcaagcctaaaatagagatgtttttgcaagtccagaatggcagaagattttgaaacttcagtgcattagcactgttatacaaggactcaacagatgccagttcactgagtaacctaatgagcatggcctatccctcctgctattactactgcctcacttgaagggcagttttagccagaactatgtgtgttatgagtcagatggggagcggtcatgatgctgctcgggaagcc

SEQ ID NO: 83488 - DNA, 600 bp, Chicken  19866894379713_1
ccaccaagcactggggagcaaggtcagatgctgcagggcctgctcctgccagctccacaaacagcaattctgttccttctgcaccaacagctgcctgtctgtgctgaggtttgttctggaggaagctgtcccagtggacgagaaaccaaaagaaaggtggcagaactgaactgggcatccccgtgcttttcaggatgcagaggatcccgctggtctcttttcccttgtgactgtgtggcatgtaaggaggactgtctgtcatcacctcaggttccccctgttgccccatagaatccatgyttgggttttttttcctgttgactcacttggacttctctgccttcaccaagggctgttatcatcacattattgctcacatgggtggtatgggaaacctatgaccccaaatgaatcttctgtgtcttggacaggacctgtgcccaagcaatgctgctgttgctgttactctgagccttgaaccagtccagcattcctggtataagtgggctacaatggcttcctctgaccctggagttgggaatcctcctgcagataacccaacaaggttacatgtctcagctcttgctttccctctgtagc

SEQ ID NO: 83489 - DNA, 599 bp, Chicken  19866894379714_1
  misc_feature (1)..(75): n is any nucleotide
nnnnnnnnnnnnnnnnnnnnnnnnnnnnnnnnnnnnnnnnnnnnnnnnnnnnnnnnnnnnnnnnnnnnnnnnnnnaattatgccctttgaatagttagattttgaatacttgaattatgcaactaacccacaggctaacagcttatttacagaaatgtactatttatttatcaatttataggctcattaacctggaagcttagccactggaattggagaaacatagtataatacatgtaagttttaaagtcagcacagcctgataaaatgaatacaaatgttaagcactgaagtatgaaraataaaaagtatacctttaactttaaatttcaaccatttacaaaacaayaaaaaaaacccacaatgatacataggaatacattttccattttaggtcataagtagcctttccagttcaaccagataagggcaacaaacagcatcacrgggactttaggttcattagaaaataacctagtttgtagaatggcacaataaaaacaaactgacccgggaataaagaagactatctattctactatctatttatgtacaaatctcagagaaatagcaaaatatattcaacatgtccattctgg

SEQ ID NO: 83490 - DNA, 599 bp, Chicken  19866894379714_2
  misc_feature (1)..(26): n is any nucleotide
nnnnnnnnnnnnnnnnnnnnnnnnnnaattatgccctttgaatagttagattttgaatacttgaattatgcaactaacccacaggctaacagcttatttacagaaatgtactatttatttatcaatttataggctcattaacctggaagcttagccactggaattggagaaacatagtataatacatgtaagttttaaagtcagcacagcctgataaaatgaatacaaatgttaagcactgaagtatgaaraataaaaagtatacctttaactttaaatttcaaccatttacaaaacaayaaaaaaaacccacaatgatacataggaatacattttccattttaggtcataagtagcctttccagttcaaccagataagggcaacaaacagcatcacrgggactttaggttcattagaaaataacctagtttgtagaatggcacaataaaaacaaactgacccgggaataaagaagactatctattctactatctatttatgtacaaatctcagagaaatagcaaaatatattcaacatgtccattctggcatcakcaaatcaattgtgtctctcctacctctcaggtgtacacactat

SEQ ID NO: 83491 - DNA, 600 bp, Chicken  19866894379714_3
tacagaaatgtactatttatttatcaatttataggctcattaacctggaagcttagccactggaattggagaaacatagtataatacatgtaagttttaaagtcagcacagcctgataaaatgaatacaaatgttaagcactgaagtatgaaraataaaaagtatacctttaactttaaatttcaaccatttacaaaacaayaaaaaaaacccacaatgatacataggaatacattttccattttaggtcataagtagcctttccagttcaaccagataagggcaacaaacagcatcacrgggactttaggttcattagaaaataacctagtttgtagaatggcacaataaaaacaaactgacccgggaataaagaagactatctattctactatctatttatgtacaaatctcagagaaatagcaaaatatattcaacatgtccattctggcatcakcaaatcaattgtgtctctcctacctctcaggtgtacacactataattcaaaataaaaggccgcactaccctgaattagacaagaaaatcatacttatttatgtctgtctggcagctgatttataccagattaagtctgatta

SEQ ID NO: 83492 - DNA, 576 bp, Chicken  19866894379714_4
aaagtatacctttaactttaaatttcaaccatttacaaaacaayaaaaaaaacccacaatgatacataggaatacattttccattttaggtcataagtagcctttccagttcaaccagataagggcaacaaacagcatcacrgggactttaggttcattagaaaataacctagtttgtagaatggcacaataaaaacaaactgacccgggaataaagaagactatctattctactatctatttatgtacaaatctcagagaaatagcaaaatatattcaacatgtccattctggcatcakcaaatcaattgtgtctctcctacctctcaggtgtacacactataattcaaaataaaaggccgcactaccctgaattagacaagaaaatcatacttatttatgtctgtctggcagctgatttataccagattaagtctgattaagtcttttctatctgtagagacaaaagccaactcattctttgaggactgcagaacagagaaaataaagaaaattcaacaaagagacaattttgcatttttcatatcaatgaagtattcttctgtatatccttgg

SEQ ID NO: 83493 - DNA, 600 bp, Chicken  19866894379718_1
tttagtcaacaggctgacaaactgacatgttgcaccagtgcctcttctatgagagaagaaacaaatggagaggggttcctatagaagtcagtttacagcactcaggcagtgaggagtaaccactgctgcagaagggcctttggtatggcatagggatataaatcaaagtaaacaataacggtctgaccaaagacctctgatttcggtttgttttgtttgcacacattttttcttctggaatctctgattcaatctggtgagaatatctatgtgccacccagagggtaaatataaggcagygtggatcaacaccagttccgacacccaattttgagaaacatatgttctcctcaacagatatatgggtgttatcgttggcactgctataaataaatcttaaatcatcttcagtcaaaataaggagtacyctaaggtttcactttcatcagttaacaataacacttctggaaaaacattaagcctaaaggatagaatatttattattcgacaaaaactatcttacaaaatattatgtttcrattcccagatgatttacataatagattattacagctgctataacaatcccaaagctggttt

SEQ ID NO: 83494 - DNA, 600 bp, Chicken  19866894379718_2
cagaagggcctttggtatggcatagggatataaatcaaagtaaacaataacggtctgaccaaagacctctgatttcggtttgttttgtttgcacacattttttcttctggaatctctgattcaatctggtgagaatatctatgtgccacccagagggtaaatataaggcagygtggatcaacaccagttccgacacccaattttgagaaacatatgttctcctcaacagatatatgggtgttatcgttggcactgctataaataaatcttaaatcatcttcagtcaaaataaggagtacyctaaggtttcactttcatcagttaacaataacacttctggaaaaacattaagcctaaaggatagaatatttattattcgacaaaaactatcttacaaaatattatgtttcrattcccagatgatttacataatagattattacagctgctataacaatcccaaagctggttttctttttctgagatgcctttgaatcctttaagactttgagtgtttttccaggtttcgttttattaaattagcatgtcatgacaaaatacctgcacgtcttttcctagaacccaaccggctgctayctc

SEQ ID NO: 83495 - DNA, 600 bp, Chicken  19866894379718_3
atctctgattcaatctggtgagaatatctatgtgccacccagagggtaaatataaggcagygtggatcaacaccagttccgacacccaattttgagaaacatatgttctcctcaacagatatatgggtgttatcgttggcactgctataaataaatcttaaatcatcttcagtcaaaataaggagtacyctaaggtttcactttcatcagttaacaataacacttctggaaaaacattaagcctaaaggatagaatatttattattcgacaaaaactatcttacaaaatattatgtttcrattcccagatgatttacataatagattattacagctgctataacaatcccaaagctggttttctttttctgagatgcctttgaatcctttaagactttgagtgtttttccaggtttcgttttattaaattagcatgtcatgacaaaatacctgcacgtcttttcctagaacccaaccggctgctayctctgctcgacaaaagtgggagaactcataggtgatttcaaagccacctgttgagccgagatccaaagaagaaatattccttcttccccagcccaggctctgtgcaggctgggg

SEQ ID NO: 83496 - DNA, 600 bp, Chicken  19866894379718_4
acyctaaggtttcactttcatcagttaacaataacacttctggaaaaacattaagcctaaaggatagaatatttattattcgacaaaaactatcttacaaaatattatgtttcrattcccagatgatttacataatagattattacagctgctataacaatcccaaagctggttttctttttctgagatgcctttgaatcctttaagactttgagtgtttttccaggtttcgttttattaaattagcatgtcatgacaaaatacctgcacgtcttttcctagaacccaaccggctgctayctctgctcgacaaaagtgggagaactcataggtgatttcaaagccacctgttgagccgagatccaaagaagaaatattccttcttccccagcccaggctctgtgcaggctggggggcagygagaggctttgcagggtatggatgtgtacagtgcacggccagatcagagcytcctgtcagatagagctgcaactcagccttttaatcagagccttaaaataaatggctctgccctgagtctcctctccagcaaaactcctcttgaagcatgctgggtccattgtttaattccatacacgt

SEQ ID NO: 83497 - DNA, 600 bp, Chicken  19866894379718_5
agatgatttacataatagattattacagctgctataacaatcccaaagctggttttctttttctgagatgcctttgaatcctttaagactttgagtgtttttccaggtttcgttttattaaattagcatgtcatgacaaaatacctgcacgtcttttcctagaacccaaccggctgctayctctgctcgacaaaagtgggagaactcataggtgatttcaaagccacctgttgagccgagatccaaagaagaaatattccttcttccccagcccaggctctgtgcaggctggggggcagygagaggctttgcagggtatggatgtgtacagtgcacggccagatcagagcytcctgtcagatagagctgcaactcagccttttaatcagagccttaaaataaatggctctgccctgagtctcctctccagcaaaactcctcttgaagcatgctgggtccattgtttaattccatacacgtgcggattttattttgggatgagcaaataattaatgcattaaaaggttccatgggacatccagaaagtcgccatgaaaaattattgtcagtgcagtgcagagatgctgctttatagaatta

SEQ ID NO: 83498 - DNA, 600 bp, Chicken  19866894379718_6
gttttctttttctgagatgcctttgaatcctttaagactttgagtgtttttccaggtttcgttttattaaattagcatgtcatgacaaaatacctgcacgtcttttcctagaacccaaccggctgctayctctgctcgacaaaagtgggagaactcataggtgatttcaaagccacctgttgagccgagatccaaagaagaaatattccttcttccccagcccaggctctgtgcaggctggggggcagygagaggctttgcagggtatggatgtgtacagtgcacggccagatcagagcytcctgtcagatagagctgcaactcagccttttaatcagagccttaaaataaatggctctgccctgagtctcctctccagcaaaactcctcttgaagcatgctgggtccattgtttaattccatacacgtgcggattttattttgggatgagcaaataattaatgcattaaaaggttccatgggacatccagaaagtcgccatgaaaaattattgtcagtgcagtgcagagatgctgctttatagaattagcccataaaatagtatcatgtgtaattgcattcatgttgtcactgtctctt

SEQ ID NO: 83499 - DNA, 600 bp, Chicken  19866894379719_1
gaaaatggtcttgatgacttctactggtccttcacaaccaatgtttacctgattctgtgatgtcataacaaaagaaacacttgcacacacatatccacaaatactttctcttaatatacagtcaaattaatgaataatttaaaacatgaaaaatgatataagctgaaataccattttagaaagtttgaaggtccttcttaggcattctggttttaaaaatatataccagaattcacagaaaaagtgtaaaaaataaacttctatataaatgtttagtttacagaaacagaaaaaaagatkgtatgtcttaaggcatagcccctgatctacatttatagggcaataaataaattttgcatttgatataatacaatattatgcacaacaattagaagttaaagaaataataacccctacttgaaaggaataaaatgcttagttttaaaaccatattcatttgtttaataatctttcccaagggcctaaaaggtgctgaacaactacagcctctaatgactttgtaatccaattttgcacttggcttattatagcagcttgcatttttcttctattgctcagcactgtatggtagagagatct

SEQ ID NO: 83500 - DNA, 599 bp, Chicken  19866894379721_1
  misc_feature (1)..(21): n is any nucleotide
nnnnnnnnnnnnnnnnnnnnntacattgcatgcacctgagctcccctgggctggccctgccttctcaccaggtgctctatcactccttcaggccctgactcagcatttccactacacctggtcttttgggtgtttctccaaagacgcagctgggtgctgctttgctggaatcggtgcaggctgtgtcccttaccttggagggacacaaacagccataggaaacttgctggtctctgccagtactcagtaaggatcagatgtttgggtgcaaacacagttgctttaagcaaagcctttaakgaactttattcttcaatcagttcttggaagaatgtaatttcagattctataattaaaaacactcaagatgcagtggtttcaggtgagaaaaatgtaaaccacaggcagactgaggtggctgtataaacacaatacaaytttctttagagccccagaggggagaaatgcagaggggcagaatcagatacgaagtgctctgtgtttcagtggaagcattctcccagagccccgcagcagctgctgctgttgttgagctaaataaagttcatatgggtaggtgttattctataaatgtgagg

SEQ ID NO: 83501 - DNA, 600 bp, Chicken  19866894379721_2
caaagacgcagctgggtgctgctttgctggaatcggtgcaggctgtgtcccttaccttggagggacacaaacagccataggaaacttgctggtctctgccagtactcagtaaggatcagatgtttgggtgcaaacacagttgctttaagcaaagcctttaakgaactttattcttcaatcagttcttggaagaatgtaatttcagattctataattaaaaacactcaagatgcagtggtttcaggtgagaaaaatgtaaaccacaggcagactgaggtggctgtataaacacaatacaaytttctttagagccccagaggggagaaatgcagaggggcagaatcagatacgaagtgctctgtgtttcagtggaagcattctcccagagccccgcagcagctgctgctgttgttgagctaaataaagttcatatgggtaggtgttattctataaatgtgaggttaattatgtctatataaatctaatttgagctttctttactttttaactccacttcttcagccaaatcaccagggaagtaaatctctgtgcagtcaggtgctgtgctgctctctcaccagggggctgctgcccaatgcc

SEQ ID NO: 83502 - DNA, 600 bp, Chicken  19866894379727_1
attgagcactcccagcaaaatcattccagggttcaataatcacttcatagacaacaaagctaatgcagatccttagcaacttagaagatatctagtgtgtttcatgctttccaaaccttccttgttttattttcccctagctgtttcaccacaaacaattctgttctcattacttttattttctttttacttgtcaggcctcatttttgtctctctgacttttagttttcttaatgtcatcttagaatttccttctcaaaccctctacttctaattaaatacatgttagctatggaaagygtcttgaaggattggtatgcaacattggtgattgaaaatatcattctaaatgaattacactttaacaaaaaaaaaaaaaaaaggatttgaaatacttttaatttcttcataagtttccaatttacagtttttcccatgttaaacctcaggggattttctcctacccacagattactggtgacttgctttttctgtctcttgatatctctctttggagcactaagcagtatatcagccctctggggctctggttacttctacatctttttgtacaaacaatatgtaacaggaatggaaatt

SEQ ID NO: 83503 - DNA, 600 bp, Chicken  19866894379728_1
gcactgcacagcctcttactgctgcccatacgtgctggtgacctcctacattttgtctggccattggtgccctgagcgtctccattcttggggatctggtaggactgctgctctctggagcttctcatttctcaggaatatcacactccttctcagcacattccatttccacagtttggcctagagatttctggtaactgtatctctacatgcacacatgaatgatgaaggcactctgtcatacagaaggggatgctataggaccctgtgcttcccagccacagcacagcttcctctctkcacagaacactgaagtttattgatttgtactcatgtgtgctacatgtaggaaacagaaaacatgcttatgtgctaagaaatattttgcagctttgaattttgtattcaaaaatatcttcaagtgctgacggtaaaagtttcaagtgatcccacaagaatatacaatgcattctgtatactactcctccacaatgttcactatcaacaacaaaaacaaaatgaaggaaaagacccatttattttctgagttcaacctgaattatctataaaaattaaaacatagtttaaagtaaatgtaat

SEQ ID NO: 83504 - DNA, 600 bp, Chicken  19866894379730_1
gcaatgctacccacaacagcagggttggaactagatgatcttgaaaattccctccaacctaagccattctacgattatggccctccaagtttagtctttgctttctctagtcctgttctcccaaacaactatttcagtttattgcacattactgaaccataaaggcatttctcacttacaatggttgggagtcccacgttccttattatatagcaaagaccctacccttcgacaaagggcttttcacagctctgctaaccagcttctcccccacactacacacccgttttcccatgcatrcgggcaaaaacatgaatggaggcaaaataaaatcagatgtgaaaattcaaattggagtttgtttcacttataggaaaaaagattctcagcccaaagcagcctgtggaatccaagctgtaatcaaaaatgtatcccctgaaatatttggtgccagcaagcaaccccaaagtctgctgtgagaatactgttcaagtcatagcaatgctcaaagacaacataaagataatgtgaatgattcaccatactgtgtatatacatttttgcctgcaagcaggcatgagaacaaggtttatttgctat

SEQ ID NO: 83505 - DNA, 600 bp, Chicken  19866894379741_1
aaaatacatacattccttctgctctcactctgtagtacctttagtttaattatataggtaattttaagcctgtgtgtcccaatgtacacagtaactgatttcctacttgtcaaagcagtttcttgctgtgaggtctgaacattttcataaaggctactaccagaagatacattttattaactagatgagttaacaaaaaacaaacaaacaaaaaaacaagtttatctgtattttagctctcattgttccacacaagctgtagataaaaatctccaggggagatgaaaattaagatttgartaatcggtgagaactgtgtattttagctattgtgttataatcagcttttactgtctgcatagtgaataaayggtttagctgctgagctgttaaaagttccatagagaaaattacaacatgagaattcgatctggacttgcaatttttcaattccaccacctcatctagcttttttgctgcaaaaggaaacatctgctgctcctaggtgcaaccaaggtttcacttggctcagctctgctaccagctgctctcctggttctgtaatcaggggtaatgggattataccaggggcctttatcc

SEQ ID NO: 83506 - DNA, 595 bp, Chicken  19866894379741_2
gtgtgtcccaatgtacacagtaactgatttcctacttgtcaaagcagtttcttgctgtgaggtctgaacattttcataaaggctactaccagaagatacattttattaactagatgagttaacaaaaaacaaacaaacaaaaaaacaagtttatctgtattttagctctcattgttccacacaagctgtagataaaaatctccaggggagatgaaaattaagatttgartaatcggtgagaactgtgtattttagctattgtgttataatcagcttttactgtctgcatagtgaataaayggtttagctgctgagctgttaaaagttccatagagaaaattacaacatgagaattcgatctggacttgcaatttttcaattccaccacctcatctagcttttttgctgcaaaaggaaacatctgctgctcctaggtgcaaccaaggtttcacttggctcagctctgctaccagctgctctcctggttctgtaatcaggggtaatgggattataccaggggcctttatccatcagagctgcaaaaactgtccagttaaagctactgcttcccaggtgcagctgtgcatgtgatcac

SEQ ID NO: 83507 - DNA, 600 bp, Chicken  19866894379748_1
gtatgtaagcaagtattcaagaaagcttaaatatcagcattggttccaacatggaaacatgacagccatgcattcttgtgtccagtgataaatggaaataccaaacttgatttctttctacataagcaatctgatgtttctgcctcaggaaatactattggttgttagcagtgttaaagatctgatttttgctaataaacaccacagaacatcttaagtacctgtcttctgaatgtgttttggagaggggaaaaagtcccaaattgtaagggatatggtgctttgtggttagctagtcasctagatcaaaacaagagccattcccccttctataagggcatggcaagatcaaaccaaacaggaaggagagcttaaacttgtgtaactctaggaatgggtaaaaagttaagattccaaccaaggatgtaactttactatttaaaatgcttctccttaagatacacactggtaatttggctctcaaatgagtaatgtgatgtcttgctttgttttcaaaacaatgaagttcaacttaccagaggaaatcagtcagtgatcatatccctcaatgacaaagataggtctgagcaatcacgtaag

SEQ ID NO: 83508 - DNA, 599 bp, Chicken  19866894379755_1
  misc_feature (1)..(19): n is any nucleotide
nnnnnnnnnnnnnnnnnnntttgggctttggttttgttttgtttcgtttctgtaacaggtgctatatcctctgtgtaaatccaaagggaagaatatgacctagatcactattaacaatcagatggtggcaatatcttttgctagttccttctgctaattagcatccactccagctgtggctctcagcatctccttgccatcatcccaaggagggatgggtgtgaatagggcacctcagagctggagagcttcagctgtaaggctgcctgctgccccttagcacggcaggatgggaggtcrgtcggttcccctgagcagccttctgcctatagacatgaaggcccgtggtgggccggggacaccaaaacgcccactctttggcttcaacaggttgaaaaggacggaracttgaaatgggtcaacactgcacaaagtgaaaaggattcagcttttgtcactgcagctgctgtatgcgataagggccttacgcatctgtcctcagttggataaaactccttgccgttaagtgacacggtgacgtcctaccgaaaaccagcagttcccagcattgatacgcgattaacattaacaggtcttgt

SEQ ID NO: 83509 - DNA, 600 bp, Chicken  19866894379755_2
actattaacaatcagatggtggcaatatcttttgctagttccttctgctaattagcatccactccagctgtggctctcagcatctccttgccatcatcccaaggagggatgggtgtgaatagggcacctcagagctggagagcttcagctgtaaggctgcctgctgccccttagcacggcaggatgggaggtcrgtcggttcccctgagcagccttctgcctatagacatgaaggcccgtggtgggccggggacaccaaaacgcccactctttggcttcaacaggttgaaaaggacggaracttgaaatgggtcaacactgcacaaagtgaaaaggattcagcttttgtcactgcagctgctgtatgcgataagggccttacgcatctgtcctcagttggataaaactccttgccgttaagtgacacggtgacgtcctaccgaaaaccagcagttcccagcattgatacgcgattaacattaacaggtcttgtttcagcctaaagtaaaatctcattttattatgtggagaaaaaaaaaaaaaaagctgttatgcatattttgtggatatatttaatttcagttgacaaatagttgtctg

SEQ ID NO: 83510 - DNA, 600 bp, Chicken  19866894379760_1
ctgttccccccataggaaaaaattcttcacaacataaaccatattttgctgtgaagttcaggggtcatgctctaccttttaaagaagaaaaagtgcaatcttgtgaccattaaaatgagctatggaaactgcaaaagttcttatctatttaagtggatatcccactgagcctggtggcatcttgtggctgtgaatcctgcagattcatttagtgttgatttaccccagattttaataaaatcagacaataaatgaggaaatcaataccttccttatgtaagagtattatgaaaaactgarkgttagatccgaaaactcattaacttggctgctattaagaattgcacagttgaagacaggataacggaaaagggagggggaaacctttgctaaaaattgataatgatctgtaagtatttgctccatttgaacaggatgtatattttaaaaggttcagtctagttttcatgtctttcagactgaatgaaagttctgtttagaattgatatctctaccattaggccttaccttttctaaaaattcttactcacacaatgttaatgtatcraatcaatcatatacatttacaagtaaatgtgc

SEQ ID NO: 83511 - DNA, 600 bp, Chicken  19866894379760_2
tgttccccccataggaaaaaattcttcacaacataaaccatattttgctgtgaagttcaggggtcatgctctaccttttaaagaagaaaaagtgcaatcttgtgaccattaaaatgagctatggaaactgcaaaagttcttatctatttaagtggatatcccactgagcctggtggcatcttgtggctgtgaatcctgcagattcatttagtgttgatttaccccagattttaataaaatcagacaataaatgaggaaatcaataccttccttatgtaagagtattatgaaaaactgarkgttagatccgaaaactcattaacttggctgctattaagaattgcacagttgaagacaggataacggaaaagggagggggaaacctttgctaaaaattgataatgatctgtaagtatttgctccatttgaacaggatgtatattttaaaaggttcagtctagttttcatgtctttcagactgaatgaaagttctgtttagaattgatatctctaccattaggccttaccttttctaaaaattcttactcacacaatgttaatgtatcraatcaatcatatacatttacaagtaaatgtgct

SEQ ID NO: 83512 - DNA, 600 bp, Chicken  19866894379760_3
ttccttatgtaagagtattatgaaaaactgarkgttagatccgaaaactcattaacttggctgctattaagaattgcacagttgaagacaggataacggaaaagggagggggaaacctttgctaaaaattgataatgatctgtaagtatttgctccatttgaacaggatgtatattttaaaaggttcagtctagttttcatgtctttcagactgaatgaaagttctgtttagaattgatatctctaccattaggccttaccttttctaaaaattcttactcacacaatgttaatgtatcraatcaatcatatacatttacaagtaaatgtgctttagtctttcagttgaatacagcatcacaaactttcttggtgggtattttaacttatttgaggagccctacctatgacacctcctccccatgcacacacacttttttgctccttttcctactagatatccagcctctacataccaaaccagtaatttcaaaatagaacgagcaacagatcaataaagcatgaacttttctcccattttcatttttagcaaaatagttacttcagtaaccaagcttatactacactggtttctaaggt

SEQ ID NO: 83513 - DNA, 600 bp, Chicken  19866894379760_4
tttcctttcattctggaaaaaaaaaaatgctgacaggcaccagctaaattggcatccttcctaatttaaactacagggtacaaatgtgacatatgaaactgttcttcagtagcattaacttcacacaacagatacatacacttcagcagatattcctgcttcttacttcaaagcagatatttatcattgatagcagtgcctcaaacatcagcacagacaagtaaaactgacagaataaaggtgtccccagatggatggtccctggtctgcagaaagttcttcagaaataagagcataaawttatgtagctaaagcagagtattgggaattaggagttagggacattcaagactcagtactagatttctgtgcttgcagtgataaaacatatgctcaagctcataactgagcatggtgaacttgggattcctgctcttcccacttaaaatgccagaatgtgtgaagccaatccaaaaactcttacattgtgcttaagaaatggttacctcagggtccccacaaatagatgagggaagatatgtctgcctccaaaatgtgagtttagagttgtgccagaaaaaaattaacgctctgttccac

SEQ ID NO: 83514 - DNA, 599 bp, Chicken  19866894379766_1
  misc_feature (1)..(16): n is any nucleotide
nnnnnnnnnnnnnnnntgccgagccctcagcagaacagcaagcagtagagcacccagctccacaaaagccttttcacaacgtaccctctgcagaggtgagcctgccagcactcacctggagagaaaggagcaggcatctccacatttaatattacctcactgcatcattacacgcatgtttttcccatacttttcagcagaatttatattgaagacggtgctgatacagtcaccttggaaataaaatgagtgcctcagttatttctggatttcttctaatccaatatctctgcccacccyctggcaggctccatgccttatgtgtttggaaaatggcagaaatcgttccctactctctgtctgatattgcagtgctacagccatgaattccaaagaaacacttagagatttaaaacgttctaaagaaagggactycataccataagatgcgattaagacctygttagtcaggtgctatcatgttattaactcatgacaaatgcaactgtaaagaataatatattagttttagcaagcatcatggaaccaaagcctagatttttttccgaacctccttcacagcaacttaagctgatgag

SEQ ID NO: 83515 - DNA, 600 bp, Chicken  19866894379766_2
atctccacatttaatattacctcactgcatcattacacgcatgtttttcccatacttttcagcagaatttatattgaagacggtgctgatacagtcaccttggaaataaaatgagtgcctcagttatttctggatttcttctaatccaatatctctgcccacccyctggcaggctccatgccttatgtgtttggaaaatggcagaaatcgttccctactctctgtctgatattgcagtgctacagccatgaattccaaagaaacacttagagatttaaaacgttctaaagaaagggactycataccataagatgcgattaagacctygttagtcaggtgctatcatgttattaactcatgacaaatgcaactgtaaagaataatatattagttttagcaagcatcatggaaccaaagcctagatttttttccgaacctccttcacagcaacttaagctgatgagttttagctgattgctggagagggtctaagagtacacacagacctgaaaacaatcgttagcagttaagccttaataatccaattactctggatcatgtgtaagacttgaaaagtaaaatgataataacccacgttat

SEQ ID NO: 83516 - DNA, 600 bp, Chicken  19866894379766_3
catcattacacgcatgtttttcccatacttttcagcagaatttatattgaagacggtgctgatacagtcaccttggaaataaaatgagtgcctcagttatttctggatttcttctaatccaatatctctgcccacccyctggcaggctccatgccttatgtgtttggaaaatggcagaaatcgttccctactctctgtctgatattgcagtgctacagccatgaattccaaagaaacacttagagatttaaaacgttctaaagaaagggactycataccataagatgcgattaagacctygttagtcaggtgctatcatgttattaactcatgacaaatgcaactgtaaagaataatatattagttttagcaagcatcatggaaccaaagcctagatttttttccgaacctccttcacagcaacttaagctgatgagttttagctgattgctggagagggtctaagagtacacacagacctgaaaacaatcgttagcagttaagccttaataatccaattactctggatcatgtgtaagacttgaaaagtaaaatgataataacccacgttattacagagtgccccctcagcaactcagg

SEQ ID NO: 83517 - DNA, 600 bp, Chicken  19866894379767_1
cctctcctatgaagacgggctgagagaattggggtttttcagcctgtagaagagaaggctctggagagatctcattgcaacctttctgtaccaaaggggaagaaagctggagagggacaaggactctttatcagggagtatagtgataggacaatgggtaagggctttcacctaaaagaagttagagttggatgagatataaggaggaaattatttacacagaggatggtgaggcacaggctacccagagaagctgtggatgccctatcccagggagtgttcaagaccaggctggaaggractctgggcaacctggtctagtagaaggtgtctgcctctggcaggtgggttgactgaatgatctttaaggtcccttccaacttaaacaattctacgattctatgacttgcgctagcacttctgttcaaagaaaaacagtgtttttccttttcactaaataactgaagattcagtcactgcagctgaggcagaaaaagaggaattgtttcttatttatatacttctttcttatgttactyataagatttatcaacaatrttagtattagggaatactagaggttggaagcacagctaaaga

SEQ ID NO: 83518 - DNA, 600 bp, Chicken  19866894379767_2
gctacccagagaagctgtggatgccctatcccagggagtgttcaagaccaggctggaaggractctgggcaacctggtctagtagaaggtgtctgcctctggcaggtgggttgactgaatgatctttaaggtcccttccaacttaaacaattctacgattctatgacttgcgctagcacttctgttcaaagaaaaacagtgtttttccttttcactaaataactgaagattcagtcactgcagctgaggcagaaaaagaggaattgtttcttatttatatacttctttcttatgttactyataagatttatcaacaatrttagtattagggaatactagaggttggaagcacagctaaagagctatgcagctttgtatgtatagccctccagatcaaaaagccgactgtttcctgatagcttccaatagtgcatcctgatgttttgacatgtttgaagtggcttactaaaaaactctgaagaataagcagacttaaatagttttccttatgtctacgagtagaagtctgcacagaaatgaacaataagctaatgtgaccctggtagatattgcatcaacaggatcaggactggtgatagt

SEQ ID NO: 83519 - DNA, 600 bp, Chicken  19866894379767_3
gatgccctatcccagggagtgttcaagaccaggctggaaggractctgggcaacctggtctagtagaaggtgtctgcctctggcaggtgggttgactgaatgatctttaaggtcccttccaacttaaacaattctacgattctatgacttgcgctagcacttctgttcaaagaaaaacagtgtttttccttttcactaaataactgaagattcagtcactgcagctgaggcagaaaaagaggaattgtttcttatttatatacttctttcttatgttactyataagatttatcaacaatrttagtattagggaatactagaggttggaagcacagctaaagagctatgcagctttgtatgtatagccctccagatcaaaaagccgactgtttcctgatagcttccaatagtgcatcctgatgttttgacatgtttgaagtggcttactaaaaaactctgaagaataagcagacttaaatagttttccttatgtctacgagtagaagtctgcacagaaatgaacaataagctaatgtgaccctggtagatattgcatcaacaggatcaggactggtgatagtggatgtggacatggagaag

SEQ ID NO: 83520 - DNA, 600 bp, Chicken  19866894379771_1
tagcctgttggtagatcactacaagctgagtttgattctctcatgtatcaacatctgactcaaagattttgtggatgatatctacctcctctcttcttattttcatcatctgtctactgagaatagtaattattttctacctttaaaactatgagtgtgaatcattccacaaggattcagcatgattatttccctctgcatttggcttcattcatctgaaatttgactactcctagccaaatttattaaagtctgagtgggaagcattaaagtacactctccttaactcaagctttccaytactatttctgtttgttacctcagtagtattcttccactgttttccttcttttgagtttgcaaatccaccttatcactatctgtaaaactgcatatatatgccaaggccttggcagattagatattgagctatcttgcttcaagcctgtcagaattgttctgcttatttgtttaacagtttctcccattctgtacaaacatacagaaagcataaagaaatagtctataaccccaaagcatatagacaaagcaaaaaacytagataaaacttaggatgtgaaaaattgtcacaggaatttg

SEQ ID NO: 83521 - DNA, 600 bp, Chicken  19866894379771_2
ggaagcattaaagtacactctccttaactcaagctttccaytactatttctgtttgttacctcagtagtattcttccactgttttccttcttttgagtttgcaaatccaccttatcactatctgtaaaactgcatatatatgccaaggccttggcagattagatattgagctatcttgcttcaagcctgtcagaattgttctgcttatttgtttaacagtttctcccattctgtacaaacatacagaaagcataaagaaatagtctataaccccaaagcatatagacaaagcaaaaaacytagataaaacttaggatgtgaaaaattgtcacaggaatttgaaactgctgactctaaaccctggctgctgtgcttgaggtctagccctgcaaacactggagcagtgactatgattcccctgaagccatgctctggtaattcattatttayagattttcctctgtgcgtgagtgcctactcacaaacaaacctagccacctaacctagccctggtaacagaggcactgagaaagaggagttactggatccctctttgcttcagtctttactgatgagactgcctctcaggagtcttagacc

SEQ ID NO: 83522 - DNA, 551 bp, Chicken  19866894379771_3
ttggcagattagatattgagctatcttgcttcaagcctgtcagaattgttctgcttatttgtttaacagtttctcccattctgtacaaacatacagaaagcataaagaaatagtctataaccccaaagcatatagacaaagcaaaaaacytagataaaacttaggatgtgaaaaattgtcacaggaatttgaaactgctgactctaaaccctggctgctgtgcttgaggtctagccctgcaaacactggagcagtgactatgattcccctgaagccatgctctggtaattcattatttayagattttcctctgtgcgtgagtgcctactcacaaacaaacctagccacctaacctagccctggtaacagaggcactgagaaagaggagttactggatccctctttgcttcagtctttactgatgagactgcctctcaggagtcttagacccctggtgttaagagagaaagtctagagaaaggaagacttctccttggtcaaggaggatctggtcagagattgtttaggcaaactcaatgcacacaagtcca

SEQ ID NO: 83523 - DNA, 600 bp, Chicken  19866894379773_1
tgagaacaagttttacttggttataatgaaatatgctaaatgcatgttctgaacacaggtgtaactcattgagtctgataactcctaagttgagttctgtacaagaaaaatcttttgtgctgtagctgcaaaacattttgctaaaagcaacctgatcctgtgccttgtttgttagcagcccatttactcagccactgcttccttgttcttcttacgtaaacttcctcaaagcaaaaacattggaaacattttccactgcaaatgtgtccagcagaagtcaataaacaaagaagtaaacaygggtctgtaaattcagagagccatctactggcagctaagtgaaacgaattaaattaatgaagggccaaatctctgcctctctcttgaaagtcgtttctttgaagttgaggaaccacacatgaacaaaccgtacatgcatggttatcgtttcaagaggtgtggcaagagtgaagatgttggtgttctcagggcaaggaagagcagcctcatttgcccagtgcccagattctactgggtgaatgggcaactaaggatagcagagtaaaggagtgaggagtgtgggggcgcctgtagccttcc

SEQ ID NO: 83524 - DNA, 600 bp, Chicken  19866894379773_2
atgttggtgttctcagggcaaggaagagcagcctcatttgcccagtgcccagattctactgggtgaatgggcaactaaggatagcagagtaaaggagtgaggagtgtgggggcgcctgtagccttcctcacattcctcacgtccatgctatttcttttatagacagctcaagtcaggcgtagcaaaaactaatggagccgaggtgccctatgtgtagtgtttcaaagatcagttttaaagggaacagtggtcttcattggtgccatcagaagatcagaagttacacacagcaagagagakacgctgcggctctggggactgaatttaaatcatgtcaactactgcaaaacagctgtgcataaaacagccgcctgcctagagcaaaatttcccagcccctgagcctgtcccagtggaggatcacgtttcctttcttagggacagcagtgctcttccccagcctgatcccgggatagggtatgaaaatcagtttttggacggagtgagtggtatgagcagaatcacactggtaaaatctgtggaggcaaatacctaaactgcaatgtccgcagggggccatgctcagtttgtccctttcatc

SEQ ID NO: 83525 - DNA, 600 bp, Chicken  19866894379779_1
gaaccaatatagaaaacacaatgataagccaactgaagagattctgtggatttaaaattcaattgttaagaaataaatgcttgaggcataaatccatcagatttgaaaaggattagacttatggtgattcctagaaaaagagactttggtctttgtttctcagatgaagtcagcttcacactgctcacacataacagctactacgctgttctgggcagaaacctcagtggactggagatatctgaacacaaaatcagcagacagcatttccagtaaatccttgggctccttttgaggagyggagggcgcacagaaaatgcaaaaaagaaaccccctaggaagtgttcacaggagaagccttatggttttttaatgtttcagtcaaagcaagccaaatctactatcaattttaattctgtaaataagttacggcatgcagtggcaacatttgcattaatatacgttcaacataccagtcttattaagtgagtggcatactttattataaattawgactgatgcaagaaagtcatagaataaagcagtaattatttactcgtagaacaggtttcataaccaccgagctactgaccaagtaat

SEQ ID NO: 83526 - DNA, 600 bp, Chicken  19866894379779_2
ggcagaaacctcagtggactggagatatctgaacacaaaatcagcagacagcatttccagtaaatccttgggctccttttgaggagyggagggcgcacagaaaatgcaaaaaagaaaccccctaggaagtgttcacaggagaagccttatggttttttaatgtttcagtcaaagcaagccaaatctactatcaattttaattctgtaaataagttacggcatgcagtggcaacatttgcattaatatacgttcaacataccagtcttattaagtgagtggcatactttattataaattawgactgatgcaagaaagtcatagaataaagcagtaattatttactcgtagaacaggtttcataaccaccgagctactgaccaagtaatctctctctcaaattcattttcttcactacaggtctatattcagacaagyatgtttgacrcttacaygtaaatactattaratctgctaaactacaagcatttttatactacagtctgggtatcttccaaacattgtaacgtttgtttcacatcactccagtgtaacagcagaataaatcttctctatttcctccgtgcaagaggacagccaca

SEQ ID NO: 83527 - DNA, 553 bp, Chicken  19866894379779_3
aggagaagccttatggttttttaatgtttcagtcaaagcaagccaaatctactatcaattttaattctgtaaataagttacggcatgcagtggcaacatttgcattaatatacgttcaacataccagtcttattaagtgagtggcatactttattataaattawgactgatgcaagaaagtcatagaataaagcagtaattatttactcgtagaacaggtttcataaccaccgagctactgaccaagtaatctctctctcaaattcattttcttcactacaggtctatattcagacaagyatgtttgacrcttacaygtaaatactattaratctgctaaactacaagcatttttatactacagtctgggtatcttccaaacattgtaacgtttgtttcacatcactccagtgtaacagcagaataaatcttctctatttcctccgtgcaagaggacagccacagaggtaaacatgagttactcaaagcaatctcatacttcagaagtcatcaagctcagaacgtgggtctcctaatttcacactacatcaca

SEQ ID NO: 83528 - DNA, 543 bp, Chicken  19866894379779_4
ttatggttttttaatgtttcagtcaaagcaagccaaatctactatcaattttaattctgtaaataagttacggcatgcagtggcaacatttgcattaatatacgttcaacataccagtcttattaagtgagtggcatactttattataaattawgactgatgcaagaaagtcatagaataaagcagtaattatttactcgtagaacaggtttcataaccaccgagctactgaccaagtaatctctctctcaaattcattttcttcactacaggtctatattcagacaagyatgtttgacrcttacaygtaaatactattaratctgctaaactacaagcatttttatactacagtctgggtatcttccaaacattgtaacgtttgtttcacatcactccagtgtaacagcagaataaatcttctctatttcctccgtgcaagaggacagccacagaggtaaacatgagttactcaaagcaatctcatacttcagaagtcatcaagctcagaacgtgggtctcctaatttcacactacatcaca

SEQ ID NO: 83529 - DNA, 536 bp, Chicken  19866894379779_5
tttttaatgtttcagtcaaagcaagccaaatctactatcaattttaattctgtaaataagttacggcatgcagtggcaacatttgcattaatatacgttcaacataccagtcttattaagtgagtggcatactttattataaattawgactgatgcaagaaagtcatagaataaagcagtaattatttactcgtagaacaggtttcataaccaccgagctactgaccaagtaatctctctctcaaattcattttcttcactacaggtctatattcagacaagyatgtttgacrcttacaygtaaatactattaratctgctaaactacaagcatttttatactacagtctgggtatcttccaaacattgtaacgtttgtttcacatcactccagtgtaacagcagaataaatcttctctatttcctccgtgcaagaggacagccacagaggtaaacatgagttactcaaagcaatctcatacttcagaagtcatcaagctcagaacgtgggtctcctaatttcacactacatcaca

SEQ ID NO: 83530 - DNA, 522 bp, Chicken  19866894379779_6
gtcaaagcaagccaaatctactatcaattttaattctgtaaataagttacggcatgcagtggcaacatttgcattaatatacgttcaacataccagtcttattaagtgagtggcatactttattataaattawgactgatgcaagaaagtcatagaataaagcagtaattatttactcgtagaacaggtttcataaccaccgagctactgaccaagtaatctctctctcaaattcattttcttcactacaggtctatattcagacaagyatgtttgacrcttacaygtaaatactattaratctgctaaactacaagcatttttatactacagtctgggtatcttccaaacattgtaacgtttgtttcacatcactccagtgtaacagcagaataaatcttctctatttcctccgtgcaagaggacagccacagaggtaaacatgagttactcaaagcaatctcatacttcagaagtcatcaagctcagaacgtgggtctcctaatttcacactacatcaca

SEQ ID NO: 83531 - DNA, 600 bp, Chicken  19866894379781_1
aaggtggcagcatcagcccaggggtggtacagcccagggtcactgcattgctgcccctacagggagatcatccgtgggatctcagtgaccgatgaggacaacaacgagcttgggcattccagggtgagtgttttgggagggagagcaggtactggaatggggatgcgtggacagcagcaaggctgagtagccactcttgctcacagagagcagcggtgaagggcattgcacaggtcgtggtctccaggatcactatggcagctccaggcatgagtgagtgtgggatgaggatggggaccrgatccatattgcagctctcagcttggccagtgctaatggagctgcatgggctggtggggtccctcactcttctcccctcatgcagtcattctgcccatcatcatggagcgtctggagaagcttcccttcatgcaggtgagcccctgctgctgctctgggcgtgggactgtggcagtcagctggggactgaccctgctcttcccctgcagcggatccgggttctccatgcgccgctgcaggtgctgctgtgtggtgggttgtgagtatctcaaccagtgtggctccagaggatgcctgaag

SEQ ID NO: 83532 - DNA, 600 bp, Chicken  19866894379782_1
tacatccaaccacgtcaaacagtccttaaaatctacaaatataaaacttccccttccctttcccctcccttctccaaatcagtagttaaaagatggaaagccacacagtctaagtcttgtacattaattacttgtcttacgttcacatatgaaccaagtagttcagtgttgaatgtgcagtaattgaagtatttccagatgtgttcagtgatcctacactgtttttacagcctgcagttatcatgtgttttcttttggcggctgcgttaggcacgaaagttaacaatttcatttgaaatygtggtttttgaataagaaatacccccagatgtcagagtagtgccctgataacgacggctctgatccagcaaagctctccaagccaatcttaacgtttagtatttgaatcccttcctattgactgaaatctccagaataaccacaatcagagaattccaaacgtaatgtgaatcccattaccaaattagaactgcggtaataaaacatttccagtaaaaactgctaaagaaaagttctcatttttcttttaaaatgtactagttttgctttttccccccctatcaggctatatgttatgat

SEQ ID NO: 83533 - DNA, 600 bp, Chicken  19866894379782_2
agatgtcagagtagtgccctgataacgacggctctgatccagcaaagctctccaagccaatcttaacgtttagtatttgaatcccttcctattgactgaaatctccagaataaccacaatcagagaattccaaacgtaatgtgaatcccattaccaaattagaactgcggtaataaaacatttccagtaaaaactgctaaagaaaagttctcatttttcttttaaaatgtactagttttgctttttccccccctatcaggctatatgttatgattatttctcatgcttgtgtttcacaaygcaaacaaaataccaaggactgttgatttccagacttactttgcagatgaaacaccgattatggcattttcagcacaggagtaaaatgttctcagcctcagaaaaggtgcaaagtgaaaatccaatctccaccctggcaacgcctgagcgctcctgcccaccccagcaggaaaattgccaattgagcaagcagcagagatgatagaagaggtctgtcatgcagagagatgtgctgtaagcaagagagcacggccgtaaaatccttaggatgaataaattggtgcataatgcaaaaaaaaa

SEQ ID NO: 83534 - DNA, 600 bp, Chicken  19866894379784_1
ttatatggcatgtgctatcccatttcacttaacccttgtctcttcgcagtgctgcttgctaccctattccctgctgtcccagataccctccctggtctcctccagtctccttccccttgtgctctgtagctgcctatggataccaccttttagggcccccagagtgagcccctcctgctgatttctctggcacttgtgactcagtgcaagctcatgagcctgcagaaagtcctggctcgtgttttgctcaatgtctatctgacctgtcagcagcacaggcatgcttcctaggtgaagtgygcttcagcagtggggagccagtgatgtaaaaacttagctcctcatagagtactgtgcaagaggcactggtaagtaatcagtaacgtccccttatacagatgcaagaaatgtcctgttttgcaaaggtttggaatcacctctacccacagtaagattgcagcattgcaattagaagtggggatttctgctgattctagtgtttttagtattgcagctatgacagcctgtcattagtatccttctgtttgcttgcaccattcattttccaaggttgttctacggattttctttcattttcat

SEQ ID NO: 83535 - DNA, 600 bp, Chicken  19866894379793_1
ctacaaaatgaagtatagactggaaactctaccgaaaacttgtgttcagaagaaagttaaaacttttataggctataaattacagtgagtacagcctcatctgtgttaaaggtgagcaaactgctagtggaggcagtaaggtgtgctggtaaaacatggtaggctttgccctgggatcaccccacagcttacctgttaagggcaggagctgcatgtggcacaagatagtgatgtaggttccattggcacgcttgtagctaaactccaattactcagtagggcttgagataccaactggtrgggtgacatggcaacagtggttccattttaatttgtatgaattgaacaggaggygctgtgtgtattttttttccttggttttgttatgttgaccacaggaatgtgttttcgtttaagaaatacagagtagcatttctatctgatgggtacttaggatttgctaacttaatataatgcttgattaatatttatggtcaagattacrtgtatattctccttgggtagcaaataaaaaattctgttagtgaattggaggagttctctgtggtatttcctggtcttcagggtacctggaaagta

SEQ ID NO: 83536 - DNA, 600 bp, Chicken  19866894379793_2
agttaaaacttttataggctataaattacagtgagtacagcctcatctgtgttaaaggtgagcaaactgctagtggaggcagtaaggtgtgctggtaaaacatggtaggctttgccctgggatcaccccacagcttacctgttaagggcaggagctgcatgtggcacaagatagtgatgtaggttccattggcacgcttgtagctaaactccaattactcagtagggcttgagataccaactggtrgggtgacatggcaacagtggttccattttaatttgtatgaattgaacaggaggygctgtgtgtattttttttccttggttttgttatgttgaccacaggaatgtgttttcgtttaagaaatacagagtagcatttctatctgatgggtacttaggatttgctaacttaatataatgcttgattaatatttatggtcaagattacrtgtatattctccttgggtagcaaataaaaaattctgttagtgaattggaggagttctctgtggtatttcctggtcttcagggtacctggaaagtaactggggcaagtatcaaagctagtaaaatagtttgcatctgcttaatttttagc

SEQ ID NO: 83537 - DNA, 600 bp, Chicken  19866894379793_3
gagctgcatgtggcacaagatagtgatgtaggttccattggcacgcttgtagctaaactccaattactcagtagggcttgagataccaactggtrgggtgacatggcaacagtggttccattttaatttgtatgaattgaacaggaggygctgtgtgtattttttttccttggttttgttatgttgaccacaggaatgtgttttcgtttaagaaatacagagtagcatttctatctgatgggtacttaggatttgctaacttaatataatgcttgattaatatttatggtcaagattacrtgtatattctccttgggtagcaaataaaaaattctgttagtgaattggaggagttctctgtggtatttcctggtcttcagggtacctggaaagtaactggggcaagtatcaaagctagtaaaatagtttgcatctgcttaatttttagctaatttgtattgaaaagaaaaaatcattaaaggagggctttctgagcagtagttagtactctgtccaaaatgcactggatgttaattcaaagtgtcctgtgagaagaaagctcacttaaaagtagaccatagttctgcatgaccagcttta

SEQ ID NO: 83538 - DNA, 600 bp, Chicken  19866894379794_1
cttaagctatatgaactgaaatgctgtttctataaagggagatgtttgacctgcttcaagctataaaagaagatttgtgattctcctaagtccacatgccctagattaatcttagtgtcaaagtgattctccgttaagctcatttaatgtacctttgggctgtaagatgttactttgccagcagcaaaggtcacacgttttcaggtattgacagtgcaagtaatgacaagttgtttctgtgtttgagtagatcagggtctttttagcattcattcggtggatttggcaaactgtaggctstgcccaagagggctctgtgcctttgagcatacagcagagggaattattatacctccagctctgaaatctatagcttcatttagttcagacctcccaaaggaatttttatgccttgagctaaatagcaaacaattttgaagctaactttacctatctagcagatttcttcttgatcataaagagaaattgaaggaatcatttatatatttgaaggggatagaccgttgaacacattttttgtttaaatatatttacttatagtgggtcaaactagccttacaactacagttacaaaacacc

SEQ ID NO: 83539 - DNA, 599 bp, Chicken  19866894379795_1
  misc_feature (1)..(26): n is any nucleotide
nnnnnnnnnnnnnnnnnnnnnnnnnnatagccggcgccgagccccgagacgatgcgggaggagacggagtagctgctggagcccccatggacactgggggcccggtagcccgctgcccggccacaggacagcctgctggagcccccccccagtcccttgagggaggtggaggaggagaactgccggacagtggtgctcatggtgcaggcagatgctgagcacagcgggctggcagtgcaggcagcagtgcgcgcttcccctgcccgcagccctttatagcccacgcgggaggcgttgccrctgctttttttttctgatgcattcccgatgattttcatcactcctaaaatctgagccaacttccagattcgtcatttttcctttgttctgttcatgctttttgtcatatttctctagaaagctcttatctcacgaagggcgtttttatgcttcttccgtttccaagtaaatattcaggtgtgattcaaaggaggaggctccttgctcagggctacattttaatattcctttgtagcactacctctgaaatggatctattcaggcgatgttaaaggggagtaattcagcagctcttctgt

SEQ ID NO: 83540 - DNA, 600 bp, Chicken  19866894379800_1
cagaggccagaacaccagtgtgcgtcacttgcttgatttgcctcccagttctcaccagaatccacaacctccatgcttgcctcctgcctgcagatcagtgcagtttgtcctgcctacccataaactgtgctttgtcctccctcccctccctgcttcttccatgcaaaacaaaccagcagagagaaaggctctgagggctccctagcctccctgactctttttcagatgatggcacacatagcctggggcaggccttggccattcatctccatctcttgcctcattagtgagcagctcccwctcaccacagaaggaagctggaggttgggagaggacaaggcacaaagggaagctggtgggaaagggaggcatgagggatggatctggacagaaagatgaagtggggatgggaatcaagtacccttcatacacgaccagctgcaaactggagcttctcccactctaattactatgctttatctcattagatgggttatttttccaggacaaagacagcatgctcttttgcttggtaagcactcctcttatttttggatgctacttccatacaagtacctcacactaaattatccctttcca

SEQ ID NO: 83541 - DNA, 600 bp, Chicken  19866894379801_1
tattcagtaacagaaacccataatctccctgtcattatttattgatatttttttcttcactttagcaccaaggatttttttttttctaattttgatgttattaactgataaatgccaagaactctgaaataaaatgtgacaaatgatatctttcacgaggaagatattgcgtggaaaaatattatgtttcatatatgttaaaggtgacataacttcagttctattttttcctgtcatttttagcaatgctgttgattttgttaaataatatacaaacctatctggactgttgctctaaartgaccaaaataagtttttcatctaactttgtctaaagatataatgaagtccgtcatgagacaatattctttggtagatgcragcatgtgtgraagaactctaatggatactactgctcgtgacccattgcagaaaaataatcgaaaaaatgtgttttgtaatcagacctagaagaaatacgtgaacctgtttcatgatttcacacaccaggatttgtggaaaaagcctaattctgtacgccatgaaaacactgataataatgtcacgttaaaaaagttgcttgaagtagaacagacattt

SEQ ID NO: 83542 - DNA, 600 bp, Chicken  19866894379801_2
ttttctaattttgatgttattaactgataaatgccaagaactctgaaataaaatgtgacaaatgatatctttcacgaggaagatattgcgtggaaaaatattatgtttcatatatgttaaaggtgacataacttcagttctattttttcctgtcatttttagcaatgctgttgattttgttaaataatatacaaacctatctggactgttgctctaaartgaccaaaataagtttttcatctaactttgtctaaagatataatgaagtccgtcatgagacaatattctttggtagatgcragcatgtgtgraagaactctaatggatactactgctcgtgacccattgcagaaaaataatcgaaaaaatgtgttttgtaatcagacctagaagaaatacgtgaacctgtttcatgatttcacacaccaggatttgtggaaaaagcctaattctgtacgccatgaaaacactgataataatgtcacgttaaaaaagttgcttgaagtagaacagacatttcatgaaggattatcagaatgtaagagctagtcagaacaaggtatactgcagctgtagatgtaaaagttttctgggtaaatt

SEQ ID NO: 83543 - DNA, 600 bp, Chicken  19866894379801_3
tgatgttattaactgataaatgccaagaactctgaaataaaatgtgacaaatgatatctttcacgaggaagatattgcgtggaaaaatattatgtttcatatatgttaaaggtgacataacttcagttctattttttcctgtcatttttagcaatgctgttgattttgttaaataatatacaaacctatctggactgttgctctaaartgaccaaaataagtttttcatctaactttgtctaaagatataatgaagtccgtcatgagacaatattctttggtagatgcragcatgtgtgraagaactctaatggatactactgctcgtgacccattgcagaaaaataatcgaaaaaatgtgttttgtaatcagacctagaagaaatacgtgaacctgtttcatgatttcacacaccaggatttgtggaaaaagcctaattctgtacgccatgaaaacactgataataatgtcacgttaaaaaagttgcttgaagtagaacagacatttcatgaaggattatcagaatgtaagagctagtcagaacaaggtatactgcagctgtagatgtaaaagttttctgggtaaattgctgagctttg

SEQ ID NO: 83544 - DNA, 574 bp, Chicken  19866894379806_1
  misc_feature (1)..(61): n is any nucleotide
nnnnnnnnnnnnnnnnnnnnnnnnnnnnnnnnnnnnnnnnnnnnnnnnnnnnnnnnnnnnnatgaaaatgctgtggccagggttcaatcgcaattcaggctggcacgttttcaggtcctacaatactgaaatagctgcattgggcagtttgtgtcagtgtgctgaagagttctgtttgtacgtaggagctgaatgacctgttcagaagcaggctccttagacaagcagctgtctcttcatacagcagcacagcttatgaaatgcattgacctctgattaagaacgtaaagtgctctgagkctctgccccatgtgctgtgcaactactttcatgaatgcattgtttgcccttaagggcagatctctgctttttttcttctagagaagagtggacttactttgtgctttagctctcaaagtcctgatttacttctctctgctttccagtgcctgaatgcagtacggacagtacagagcttggcttgtctggaggaggctgatcacactgttggcttcattctccagctctccaatttcacaaaggagtggcatttccacctgccacagcttatgag

SEQ ID NO: 83545 - DNA, 600 bp, Chicken  19866894379819_1
gatgctgaagcacacacggcctccaactttggacgccagcatgaaaaaccaataatacaaagcagtcttgcacatgcacacctggagggctggttgttcccttgggagctctgtcagtggctgcgctgattgcagtgagtgcagaggtggcgtgagactcagagggcattgctttctgcagggtggatgcaactactggtttaactggccaggacaaagccttctgttcactccctcccaagtgaacatcccccccccaagaatggaggttccccttcccccatgcctaccatccaaccwccacaagggaaataaaccattttggcatctgaaatgctccactactctgcagggactcacgtccacaacagcaggactttctccaaagcagagggaaagcagggaagttcagggggaacttccaactcttcatgcacctaaacatgacgtctgcaaaaagatggggggaaatcagcaacaacattttctcagggagaaaatacagagagggatatcttgcaaagcaaagtcacattctggagcctgttccaatctgaaaacttagtaccgaggagatgagctgaacgtgtactctacgtg

SEQ ID NO: 83546 - DNA, 600 bp, Chicken  19866894379819_2
agggatatcttgcaaagcaaagtcacattctggagcctgttccaatctgaaaacttagtaccgaggagatgagctgaacgtgtactctacgtgcttgcactgcgttctgctcctgccacctgctgaaattgggatgttgcatttaggaagaaaaagctaagctttcataggtttatgagagcaaatcaaggcttggtgtctgacagcagctctgagctcctgatcaaaacccctgggaagtaaaagatagccaatgtgttgttagtaaaagatagccaatgttaggaaggagacggggcrgtgcgctaaatgtgccttcccccagaaccaagcagtgggcttggttcatcagcaccaagaccaaaccctccttccacctttctctcccctccttccacacgctgtcttttattttaagaacatagagccagatgagagggaaaacaaaagctccaggacaactcagctactttattctctcccctccctttcccctgcaggtgatttccagttaacctccaagagctgcattgctgctttcctcacccttgtgtctgattcatcagtgcactcagaaattactgagaagaacacagacac

SEQ ID NO: 83547 - DNA, 488 bp, Chicken  19866894379826_1
atgcaaactctgctgtgctaggactgcctttcattccaaagcagcacctgatgctgctttttctcctgacaactaagaaacaatatgaaagcgtgattagtacacggaggaaaagtgtgagggaccattataaagaaatagctttacatatttcagaacatactctgccttgaatcagttcagccaacacaaacctgaatttattttcctgaggcatcagatttccctcattatcaattacaaatagatcgtctcctgctctgctttgacagcatcgtgacctggagtaaatgacactcratctatatattcctgtaggcttttgtttttacccatgtaactgacagatcattaatgttttcacattctgacaaactgggttcttagaagactacaaaaaaggttcttagggagctacccaaaatgtgcatctcttggcacagtacttgcctgcaaaatgtcactaagaaaaaaagcttttttgtggg

SEQ ID NO: 83548 - DNA, 600 bp, Chicken  19866894379831_1
aaaggttagaataaatgagttaagagtcatttcttgctttctctgcataacctgaaacccaaaattatcgtcctctattgcacaccctcctttttcacctttttggcatttattaattcaaacatgtgatctggtcttcataatcatgagtgtgtctgtgactaaataaaacagtctacaagtatttcctggtgtaaaattaagtcatatgatcagcagtacaggttattatattatatgattacaagattttgcatgatattcagtgtaggatttgtttgctcatgcataggcagttgstgcaaccagggatgtgtaagacttccttgtaacacatcctttaagatagccaggaaggtttggcagatccttatcatcactctgaaataacttttaggacaacatatggactctaaaatatttgtagacactaaagtttagcaaccaagtattatcatacaagccttgctgaatacagagtataactgagtaacttgatggtgttggtaggacttgtatgacccactctttgttcagaatcatggcaattgcaataataaaaccatcagcatgaggataaaaaaaatcagttttggcaag

SEQ ID NO: 83549 - DNA, 600 bp, Chicken  19866894379835_1
agtgccataatcgagaagcctcattggagctgagctcttgcagaacatgggctgtgcttcccaacagcagccgcagaggacgtggctttgtgctcctgcccagctctgatcacatcagctggagaaatcagctggaagggatctacatccatgtgcttgggggtgaaagccaagctgggattgagaagggtcagtgggtgttccctgagggctgttgtttcaggtgttcacagcaggatgctcggctgctttcccagtaggaggcgatttggggctctgttgaagggcaggacgtgggcygggtgcactcagctttagctgatggaaatgaattgccattaatccctccagccatcagttgctcagttgggcaaggctggcagcaccctgagctctcatccagcccaaaccaacctcctggcyctctccttgcccaaaacacagcgagaccctggtgcttactgtgtgcccagccatgttacaagaaccacagaatcattaaggaaccaytggaaaagatcattaagctcatgaagtccaaccccaacccatccctgctgtgcccactaaccacctccccatcctctgcccttcctgcag

SEQ ID NO: 83550 - DNA, 600 bp, Chicken  19866894379835_2
gaaatcagctggaagggatctacatccatgtgcttgggggtgaaagccaagctgggattgagaagggtcagtgggtgttccctgagggctgttgtttcaggtgttcacagcaggatgctcggctgctttcccagtaggaggcgatttggggctctgttgaagggcaggacgtgggcygggtgcactcagctttagctgatggaaatgaattgccattaatccctccagccatcagttgctcagttgggcaaggctggcagcaccctgagctctcatccagcccaaaccaacctcctggcyctctccttgcccaaaacacagcgagaccctggtgcttactgtgtgcccagccatgttacaagaaccacagaatcattaaggaaccaytggaaaagatcattaagctcatgaagtccaaccccaacccatccctgctgtgcccactaaccacctccccatcctctgcccttcctgcagctgcacaaacgagcgtgctatctcaattaacgtccatctaattaggccgtcagcatctctggaagaggggctgcatctgcagcatgggctgcagaggtctgagcattccattgccctccccat

SEQ ID NO: 83551 - DNA, 600 bp, Chicken  19866894379835_3
gctgttgtttcaggtgttcacagcaggatgctcggctgctttcccagtaggaggcgatttggggctctgttgaagggcaggacgtgggcygggtgcactcagctttagctgatggaaatgaattgccattaatccctccagccatcagttgctcagttgggcaaggctggcagcaccctgagctctcatccagcccaaaccaacctcctggcyctctccttgcccaaaacacagcgagaccctggtgcttactgtgtgcccagccatgttacaagaaccacagaatcattaaggaaccaytggaaaagatcattaagctcatgaagtccaaccccaacccatccctgctgtgcccactaaccacctccccatcctctgcccttcctgcagctgcacaaacgagcgtgctatctcaattaacgtccatctaattaggccgtcagcatctctggaagaggggctgcatctgcagcatgggctgcagaggtctgagcattccattgccctccccatgctctgccactgggccccattcatttaattacgcctggctgctgtgctcctcacccttttaattgccccggacacagagcagagtgg

SEQ ID NO: 83552 - DNA, 600 bp, Chicken  19866894379841_1
cagagatagcttcatttgttggttcatcatatgcatcttcttgaatgacatttattacttctatatcaatctatcatttcactgaaatgacttcagtcattgccacaacaaaaagttgtactgtaaggatatgcagctggtctctctttatttttcttcttaatttgctactttaagtaacactccactaaaatcagagtagcacgtgatgcttttcagagccaaaacactctacttacaacagaacttgttgccaacattgactttcacaggtgaggttttcttcttccactatacacwttctccaattaattgaatcagatgaacacaacaggaaaatctataaaacctatgactgaagcaggattagatttcagttgtgttcctttaaacttgctatcacattgtattgccctttgggaacatttttaaaagctgcagacgtgaagatagtacagaattttrgctgctgataagcaaggcattcactagggctttcagtcccacagaaccttgcatcttttctgaatagttttggacttcattcaggtgtggaggaaacaaggctgagtcttcagtatcagccacgtgaaagaggac

SEQ ID NO: 83553 - DNA, 570 bp, Chicken  19866894379841_2
tgctactttaagtaacactccactaaaatcagagtagcacgtgatgcttttcagagccaaaacactctacttacaacagaacttgttgccaacattgactttcacaggtgaggttttcttcttccactatacacwttctccaattaattgaatcagatgaacacaacaggaaaatctataaaacctatgactgaagcaggattagatttcagttgtgttcctttaaacttgctatcacattgtattgccctttgggaacatttttaaaagctgcagacgtgaagatagtacagaattttrgctgctgataagcaaggcattcactagggctttcagtcccacagaaccttgcatcttttctgaatagttttggacttcattcaggtgtggaggaaacaaggctgagtcttcagtatcagccacgtgaaagaggaccagagaaaatccagaaagaagcagtgctctggttccttttgacccaaacgaggaagcagatcaagggatccacagggtggtgctgatattacattcctgatacttccactatttgattcctttagaggccgtctt

SEQ ID NO: 83554 - DNA, 600 bp, Chicken  19866894379846_1
tctctcacccagctggctctggggtctgtacccaaaccaacatttctgtgggttgtgccagaggtgttggcaaaggaaacagttctgtcctcccccatcctcacctccatcactgcttgcaagaaaaacagctgcaagagctcaaaggaaagagtggtagagggtcaggagtgagcagccaagagtgggggaaggcgggacggtgcatttggcattggtgtcagcacacctggcttaaagtattcatcaaactagccttatccactggaatctctgggagttttgggcaagcaaaaatgyttgcaagggagacagcagtagctgctggttctaatcagagagaatttggatatgaactacatggaaaagatgtgaatttttaaattatgacagttacacagagtgggctcaactctttctatctgacatacttaactacctatcaaaatgaactggaaaacataacaggaaacatgctcacagtgaatcctgccgtggtcttgtcctgacacaaggtttccctggtatttcacagctttagcatctggaacccttaaaagttttaagaatatagtcatctccaaaagagtgttatgaaag

SEQ ID NO: 83555 - DNA, 599 bp, Chicken  19866894379853_1
  misc_feature (1)..(129): n is any nucleotide
nnnnnnnnnnnnnnnnnnnnnnnnnnnnnnnnnnnnnnnnnnnnnnnnnnnnnnnnnnnnnnnnnnnnnnnnnnnnnnnnnnnnnnnnnnnnnnnnnnnnnnnnnnnnnnnnnnnnnnnnnnnnnnnnncgctcccataaacaggtttttaatgcaatccttttcccctcacatgcctcatgttaaagattagcagaggcattttatggcaggtgataaagaacaccgatgtcaaatattttaacaagtgctgcatgggaaaagcccaacgggctctggatgtgtgtctgctctgtggtstctgtcagggagatagggagattgctgggaaaacttatctgattgtatctggggtttggaaaagagcagaaccacggtgacctccgcccacrttggctgaattggacagcagctctctgcgtttcctgagctccaaactgagggctgctgtccccatccacacctctatgggatacgcaagggagacagcagctttaggaaagcgacraattaaggtttatttgggggctgcagtttatcctcccaagcccctcctgggtgaggcatgatgatgaaagcaaacagcccccttaaaacac

SEQ ID NO: 83556 - DNA, 599 bp, Chicken  19866894379853_2
  misc_feature (1)..(37): n is any nucleotide
nnnnnnnnnnnnnnnnnnnnnnnnnnnnnnnnnnnnncgctcccataaacaggtttttaatgcaatccttttcccctcacatgcctcatgttaaagattagcagaggcattttatggcaggtgataaagaacaccgatgtcaaatattttaacaagtgctgcatgggaaaagcccaacgggctctggatgtgtgtctgctctgtggtstctgtcagggagatagggagattgctgggaaaacttatctgattgtatctggggtttggaaaagagcagaaccacggtgacctccgcccacrttggctgaattggacagcagctctctgcgtttcctgagctccaaactgagggctgctgtccccatccacacctctatgggatacgcaagggagacagcagctttaggaaagcgacraattaaggtttatttgggggctgcagtttatcctcccaagcccctcctgggtgaggcatgatgatgaaagcaaacagcccccttaaaacaccgtggggaggtaccactctccgggggacctcagccacaggacagccatggagcagacctccattccgagcacactgcggtcctgatggggac

SEQ ID NO: 83557 - DNA, 600 bp, Chicken  19866894379853_3
gcaggtgataaagaacaccgatgtcaaatattttaacaagtgctgcatgggaaaagcccaacgggctctggatgtgtgtctgctctgtggtstctgtcagggagatagggagattgctgggaaaacttatctgattgtatctggggtttggaaaagagcagaaccacggtgacctccgcccacrttggctgaattggacagcagctctctgcgtttcctgagctccaaactgagggctgctgtccccatccacacctctatgggatacgcaagggagacagcagctttaggaaagcgacraattaaggtttatttgggggctgcagtttatcctcccaagcccctcctgggtgaggcatgatgatgaaagcaaacagcccccttaaaacaccgtggggaggtaccactctccgggggacctcagccacaggacagccatggagcagacctccattccgagcacactgcggtcctgatggggacacctggagaagcatttgcacaccaaaggccctaacagggaccagtgtgcaaagcagcacttgctggcagtccccactcaccccagcatgggaggaatgcagtgcccatgtcacattg

SEQ ID NO: 83558 - DNA, 600 bp, Chicken  19866894379863_1
tgcttggacagcagaaagtaaaaacgtattggctactgtaaagtttgtctggtccaaaaaggttcagtgctattgggtactttaatttaaaatgtactaattttgtcttatcctcacagcccagaaaaggccttgaaagattcgctgcaacaatatgaggctgcttatttgtcaaaatccttatctcgactctttgatcccatcaatctcgtcttccctcctggaggtcggaatcctccctcttctgatgagcttgacagcatcattaaaacgatagccaggtatgcacatataatacaytgaaaaatgtaatctctggtgacttttttttttatgttacaacttcagaaatgagactttgttaccagtaaaacattggttcgtctttaattctataaatgattatcataaaaattaagtcggggtttctcttctgtgttcagtggttctggaacaactgaaatattcatttagtttaacagttgaagcttacaaaacatgaggaagagaaattttatacctattgtaaatgtctgatatcttcattattctgactgtatcaaagataaaataatagttacttgtctgcaaatgataacc

SEQ ID NO: 83559 - DNA, 600 bp, Chicken  19866894379867_1
agcatgtgagtacaagcttgattcttcataacatacaataacagtattactactttctacaaaccctgtattcctttcaactatacgaaataacctggcaattcactaataatttattaacagtagtattaatactttcatttaactgtaaaatggcattaatatggaagatttgttaacacagaaacattgtcatctagctgtcctgcctcacttcagtacaaaagcagttttgaattccatacctacctcactaaaaaaaaaaaatgcttcccttatcacttatggatatgatgaaawgactgcaagtacatgtgttcatgtttacaatcttatcatcttccagacagactaataaattgtgaaagagttgcctccatcactagatagccacacatgtgaattaaatattcactgctgagttactgtctgtagagacagagccactattgagactacttactagttgagcatcttcagaaaagaatattccattaaatgtacaaatgacatttattctaatcatggcatataactcacagtgcaagtaccaacttaaaagaacacagaaccttgtttacaaggaaaccaaacctcttc

SEQ ID NO: 83560 - DNA, 600 bp, Chicken  19866894379890_1
ttaacttgttgcctaatgattatgcattcatttgcgagacaaaaactggaagtctgaatcttgtcaaactggagagtgagctgaagtttcctgaatcttaagtgactactgtaaacatgcactattaaagaacgcaagtataataatgcaccttgtttatactaggaagtgtacattttataaaaacatgcagtccatcatagtgtaaacacttcctacaactgaaacactttaagccatgcctttcactgagttactacattacttacattacatcatctttaagaaattgtttttaaycatttaattgcatagaatgacatctaatcttccatgaattgcatagaaggtatattcagaagagttcatattttgtacaatttttacaatttttgtacaatttttaacaattgttcctccagttaataaaaataattattttagctgcagaatttcataaatttccaaacaaaaatatgattattcttttctgctttatggcattgtatctgaagtaaatgcaaaaaataatatttatttctactttgaaaatggaataaatcactttttgataaccaaaagttaaaggcaataatagta

SEQ ID NO: 83561 - DNA, 600 bp, Chicken  19866894379898_1
atcaatataaattaatggattttttttctccagggaagcacaggctccacacttccttctgtctttttttgctaccccaggccttttgttctctggcaaaagctccccattgaagtgcatggcattttctgggcactatatcttcagtatattctttgcagcagtgtaatttttttgatagtcacttgaataatcagcagtcagtgttaaaatacagcattgtacattgacacccttaaccctcaggaagcagcagaagatgaagagggaagcctgcagttcttactggcctcattttcyttccttgaaaactaactctttctttcctacagacaagtatcccacacagttaaagccagccctagttatctatagtcagctcttgttcctattcctaatggcacacaactgcagtaccggagctgcttaagccagtaaggcactaacaaggcttctaaggctgttgcaaaattttgcaaaacagctctccgtgctcttaacctgaacacatcctcagatgtggtgatacttaagaagagctctaaaaattgctcatttacagatttaagttaatttgttaaacattgagcacaaggctag

SEQ ID NO: 83562 - DNA, 600 bp, Chicken  19866894379910_1
ggacttctgataaagctgtcttcagagcagtgctcctaaaagtgcgatactgtcttagaaagcaattagctcatttcagcttacatccagtcaacaacacaggttaaaaaaaagtccatgcgctttcttatttgccagaacttgatcatttaagctaaatggatatgagacatggctctacatgacttagtactagccttcaagacccaactgcccacctgggagttgttagaaaacctatataataacataccatatatacattctgaaatccaacttattatgtctacttacgcccaygcacatcaactactgaatcagcatcaaactaattgtgtctgtttgttgcaatcatatgtgcataatttcatgcattacaatgctttccaaagacatcacagtcagataaaaaaaaaataccatcttcccagacaacatggaattcagagaactcttagatcccattaaaaaataaagatagaaaaagggaaatcctactacaaatcctgcaggatcacaaaacaagttgtctttctatcttattgtattttgtttgggtttttgttcgttcgtttgtttgtttataaaatgtgactgtta

SEQ ID NO: 83563 - DNA, 600 bp, Chicken  19866894379914_1
tcttcattcatgttggaaagaatatttttcaccgaaggattcctgtgaaaagagaaaaaaaacccttttacatggtagcacctttacaacgattttagaagtgattttatcagtgtttggttttatgctcagctctttgatatctacactgtattatctcagtgtttttgtagatgtctgtagatttgctttctgcttccgatcaaagttggtggatgtttcagatgggaggaaggatgtaagcatccacccattggtgcgttccagagggcacaagttgtcacaaccgatttccctttrkaactgtctgcctctgaaatcttagcggctgcttatagcatcagagagcttggatctaaatgcactgtgacgggaacaggaaatgctatcaccaagcttcttgaccttttgtgacagtaattgggatattttttgtgatggagaagtgcatttcaccaatatgaatctccgcagcttgagtatacttggaaaagtctccatgggtgttttctacagcagtgtttctctgaaggttaccagtcctccatgacagccccatcgatttcatgtgttacccaacaatggacacttacatacaac

SEQ ID NO: 83564 - DNA, 600 bp, Chicken  19866894379914_2
cttcattcatgttggaaagaatatttttcaccgaaggattcctgtgaaaagagaaaaaaaacccttttacatggtagcacctttacaacgattttagaagtgattttatcagtgtttggttttatgctcagctctttgatatctacactgtattatctcagtgtttttgtagatgtctgtagatttgctttctgcttccgatcaaagttggtggatgtttcagatgggaggaaggatgtaagcatccacccattggtgcgttccagagggcacaagttgtcacaaccgatttccctttrkaactgtctgcctctgaaatcttagcggctgcttatagcatcagagagcttggatctaaatgcactgtgacgggaacaggaaatgctatcaccaagcttcttgaccttttgtgacagtaattgggatattttttgtgatggagaagtgcatttcaccaatatgaatctccgcagcttgagtatacttggaaaagtctccatgggtgttttctacagcagtgtttctctgaaggttaccagtcctccatgacagccccatcgatttcatgtgttacccaacaatggacacttacatacaacc

SEQ ID NO: 83565 - DNA, 600 bp, Chicken  19866894379914_3
cttggaaaagtctccatgggtgttttctacagcagtgtttctctgaaggttaccagtcctccatgacagccccatcgatttcatgtgttacccaacaatggacacttacatacaacctggtctgcccaaaccttccgaggagagcacgtattatcctgcagatggatggcagaaaaaaaatacgattgcaacactgatcaaggattgcttctgtataatactgcaagaggttgcaagcaatcagattttgttgaaacaagcaagcaggaagagcgataacgcgttcataatgcgtcagcragagttgtaatcgacactaaaataaatttataggccttgtgtagaatttaatcaaattattttgaagattatggctcaacgcctcttggtaagggataaaggcagcagttccgggaatgcatactcaacatttgtcttgcagagatgttttacacgctaagcagcagagcaccttaaaattggttttgggactctcctagtaaggcagctggcatttgcagcaccagttgcaagaaaacacccaccgatgtctgcccgactctgccttgcatccattggtgttgtctgggctgccgagct

SEQ ID NO: 83566 - DNA, 600 bp, Chicken  19866894379920_1
atggaatgaaatgaagaacaaaatcagcgagtgacccgttactggctgaattcagcttccttgttttttacttccaggataagaccctcagaaaacaatatgaaaaggcttgcagaggggcacacgtgcaaagggtatgccgaaaccgacaaagccaggagacagttaccctggaatatctgaggaacaagttgaagtcagctctgacccatctacctttaataaccagtgaaggacagaaaacgtaacagaagtcagagaagaacaaattcactgttcctcctctttttgacaaagctmgtctttggaagtcatacactcaacagcttatcatctggaaagatggtagaaaatgagtcagcgagagacaggtgaaaaatgctgatgtgtaggactgcagggrgaaggccttcatactcctgctggaaggtccatgaagtgtcagaaaaacaaggacctcagtaaggtaagcatgctcatctactcatataattctgtgaaaggcattttcggtccatagttgtcatgttggtgctgctggtgaatgtaacatgggagagtgacttattgaggggctgggctgggaagctggcctttgct

SEQ ID NO: 83567 - DNA, 575 bp, Chicken  19866894379920_2
aaaggcttgcagaggggcacacgtgcaaagggtatgccgaaaccgacaaagccaggagacagttaccctggaatatctgaggaacaagttgaagtcagctctgacccatctacctttaataaccagtgaaggacagaaaacgtaacagaagtcagagaagaacaaattcactgttcctcctctttttgacaaagctmgtctttggaagtcatacactcaacagcttatcatctggaaagatggtagaaaatgagtcagcgagagacaggtgaaaaatgctgatgtgtaggactgcagggrgaaggccttcatactcctgctggaaggtccatgaagtgtcagaaaaacaaggacctcagtaaggtaagcatgctcatctactcatataattctgtgaaaggcattttcggtccatagttgtcatgttggtgctgctggtgaatgtaacatgggagagtgacttattgaggggctgggctgggaagctggcctttgctcacaggactgtagccaccctgggctaggagagttccctaatcctgcttatctgaagtatttacactcctcatagcacc

SEQ ID NO: 83568 - DNA, 600 bp, Chicken  19866894379923_1
tttattgacctacgtgctctaaataaataaataaacaaaccacataaaattatgttgtcctttaatcatctgtgaagctggttgttcatgagtaaagtctgcccgaagattagctgctgtactgtttttgccttttctgaggacagagtaaatggatttatgttttattttgtgtggagactgcctaattcttaacctcttttgttggtttgcctttagattttagatctccttcctgaggctgagggagttcagaaggttgtagcaataaaatgaaattaatgttctaaaccaaaactratgtatcaaggagctttagaggtagaggtgcctgaataatgtcttataattgcttttggatgtaggttttccttctttcatgtttacaaccattgtgtaaaacctttagatttattcataagcttgtatttgctactacacaaactccaarcagagtatttatgcttctttttagaggaaaacaaaatatgctgtgctcataaatatactgcaagcacatgtttgaaatgcaaaagcaacagtggttgtaacataaggttttccccttacaactgccattatatacatggattgatccca

SEQ ID NO: 83569 - DNA, 600 bp, Chicken  19866894379923_2
atggatttatgttttattttgtgtggagactgcctaattcttaacctcttttgttggtttgcctttagattttagatctccttcctgaggctgagggagttcagaaggttgtagcaataaaatgaaattaatgttctaaaccaaaactratgtatcaaggagctttagaggtagaggtgcctgaataatgtcttataattgcttttggatgtaggttttccttctttcatgtttacaaccattgtgtaaaacctttagatttattcataagcttgtatttgctactacacaaactccaarcagagtatttatgcttctttttagaggaaaacaaaatatgctgtgctcataaatatactgcaagcacatgtttgaaatgcaaaagcaacagtggttgtaacataaggttttccccttacaactgccattatatacatggattgatcccagcaataaggctgccttctagaaaagcacttagaaaaatgaagggtaggaaacttcttgagccagaatactgtaagcctcgttgtctgtaatgcgttgaagaaaagctttgatattatgacttaacttttgtcatctgatatatcagcgcct

SEQ ID NO: 83570 - DNA, 543 bp, Chicken  19866894379929_1
gttggctgagtcatagcaacagcatcaattaatttgtttccaggtttaaaaaactaataaatacttcacgcgatctcctaggtgcaggaggcttaaatctgttcttgatgctcacgtacactctgtacgcacagatgcccgctaccacacctttcattagagtcctacttctaaaatatgatgttaagaaagaatcatagaatggttgggttggatcggaccttaaaggtcatcaagttctaccattctgccattgggcaagatagttgaagtgaaggcgtgtttcttcttactttacayaggagaagctcatcagctgttctgtgctgcrcagagtcatagcgctcaactacagaccagtcacaattctgctttcatgtgtgctctacagtcttggatatggatgcttttatgaattattttaagacatgtatactatacagtacccctgatcctgggaaattgtctggtaattacatatatgaatcctggaatgctctgcatgtggttgtttgtactatttgtggtttgtggaaaactgat

SEQ ID NO: 83571 - DNA, 512 bp, Chicken  19866894379929_2
atttgtttccaggtttaaaaaactaataaatacttcacgcgatctcctaggtgcaggaggcttaaatctgttcttgatgctcacgtacactctgtacgcacagatgcccgctaccacacctttcattagagtcctacttctaaaatatgatgttaagaaagaatcatagaatggttgggttggatcggaccttaaaggtcatcaagttctaccattctgccattgggcaagatagttgaagtgaaggcgtgtttcttcttactttacayaggagaagctcatcagctgttctgtgctgcrcagagtcatagcgctcaactacagaccagtcacaattctgctttcatgtgtgctctacagtcttggatatggatgcttttatgaattattttaagacatgtatactatacagtacccctgatcctgggaaattgtctggtaattacatatatgaatcctggaatgctctgcatgtggttgtttgtactatttgtggtttgtggaaaactgat

SEQ ID NO: 83572 - DNA, 600 bp, Chicken  19866894379955_1
atgatctgtgaccatctaattatctgaccctaggtgtcaaagacacggtacttaaatatgaatttatgtctcggtaatcaatggatttaatctgcgttcttgtaatgtaagtcactgggagattttaagtatcagaagaaactacaggaaattagactgttagtgtatgcataaatatgtctacttgcaaaacattttcccattcagaaaatttccataattgaaacaaattctatatattctaatttgcatacaattttctgcatattttgggccataaatctgtcttatggtatatgstgctctgtatttagtatcacacaatcatccaaaaatagtaattatgtatctcacaaataaacaacctatgaagaaaactgtcatttgatcaaaacttattttaaaaaggaaaatcattagacacaactgatttatttatgcatgtattctttagtgaaagtaacttcttttttcttttgtgcatgtgctgaatgagtgagcccaaaaaaggaaattttgttacatgatattatstgtaggtagccagaatcacagataacagagttgataccaattttctgttggaaataataaataatg

SEQ ID NO: 83573 - DNA, 552 bp, Chicken  19866894379955_2
atatattctaatttgcatacaattttctgcatattttgggccataaatctgtcttatggtatatgstgctctgtatttagtatcacacaatcatccaaaaatagtaattatgtatctcacaaataaacaacctatgaagaaaactgtcatttgatcaaaacttattttaaaaaggaaaatcattagacacaactgatttatttatgcatgtattctttagtgaaagtaacttcttttttcttttgtgcatgtgctgaatgagtgagcccaaaaaaggaaattttgttacatgatattatstgtaggtagccagaatcacagataacagagttgataccaattttctgttggaaataataaataatgctgttactgttctagaggaacagtatcagagatctagaggaaccaatcagagattattattgtttcataaataataagtatcatgctttttcataagtaaatggaaccatagaatcaaagaatcacagagtggaaggggttttaaagatcaactacatcctaccccactaccacagaaagggatat

SEQ ID NO: 83574 - DNA, 600 bp, Chicken  19866894379965_1
cagcatgaagcccttgctccttatacccagtctcagtctccatctgttagctgaaaacaatctccccttgtcctgtcacgcagacactgctgaagagtccatccccttctttctcacagccccctttttttcctgggcagcagcagaggagcaccaggagctcacaggtcagctcctcgggcacgagctgatgccattcatggctggctgatggtgctgacagccacactgtggtctgcactctccttcctatggtgtctggggtgcttctgcttcaaggtgatgctggaagctgctcgyttgctgcrtgyagtgcagctggaggaaaactgccactgctttgccttgggctggcactgggctgggccctgttgccttctgacctgttggcctctgactgggctgacctgttggcctttgctccttgatgcaggcgggaaaggcagccctgctccgtgggaccggacggcaaggatgcagatgcaacctttgggatggagaaggaagaggtgaggggggcagtggtggggtgtgctcctgcagatgtgctcctgcagatgtgctctgtgtgtgttctgctgctgcagaaggtgttcagcc

SEQ ID NO: 83575 - DNA, 600 bp, Chicken  19866894379965_2
agcccttgctccttatacccagtctcagtctccatctgttagctgaaaacaatctccccttgtcctgtcacgcagacactgctgaagagtccatccccttctttctcacagccccctttttttcctgggcagcagcagaggagcaccaggagctcacaggtcagctcctcgggcacgagctgatgccattcatggctggctgatggtgctgacagccacactgtggtctgcactctccttcctatggtgtctggggtgcttctgcttcaaggtgatgctggaagctgctcgyttgctgcrtgyagtgcagctggaggaaaactgccactgctttgccttgggctggcactgggctgggccctgttgccttctgacctgttggcctctgactgggctgacctgttggcctttgctccttgatgcaggcgggaaaggcagccctgctccgtgggaccggacggcaaggatgcagatgcaacctttgggatggagaaggaagaggtgaggggggcagtggtggggtgtgctcctgcagatgtgctcctgcagatgtgctctgtgtgtgttctgctgctgcagaaggtgttcagccctgcacct

SEQ ID NO: 83576 - DNA, 600 bp, Chicken  19866894379965_3
ccttgctccttatacccagtctcagtctccatctgttagctgaaaacaatctccccttgtcctgtcacgcagacactgctgaagagtccatccccttctttctcacagccccctttttttcctgggcagcagcagaggagcaccaggagctcacaggtcagctcctcgggcacgagctgatgccattcatggctggctgatggtgctgacagccacactgtggtctgcactctccttcctatggtgtctggggtgcttctgcttcaaggtgatgctggaagctgctcgyttgctgcrtgyagtgcagctggaggaaaactgccactgctttgccttgggctggcactgggctgggccctgttgccttctgacctgttggcctctgactgggctgacctgttggcctttgctccttgatgcaggcgggaaaggcagccctgctccgtgggaccggacggcaaggatgcagatgcaacctttgggatggagaaggaagaggtgaggggggcagtggtggggtgtgctcctgcagatgtgctcctgcagatgtgctctgtgtgtgttctgctgctgcagaaggtgttcagccctgcacctgcc

SEQ ID NO: 83577 - DNA, 534 bp, Chicken  19866894379972_1
cccctcccctgacacagctccatgccgttccctcgggccctgtcactgtcaaacagagcagagctcaatgctgcccctccgctccctgtgaggagctgcagccgccatgaggcctcccctcagctcctctgctctgcactgagcacaccacagaacttcagcctcaccccagacaccttatcctccatacccataaccacatttgtaaccctcctttggatgctctctcacagttggatgtcctttttctactgtggcacctaaagctccacccagtgcaggaggtgaggccacacagaygcagagcagagtgagacaaccccggctggcagtgctgggcctgattcacctcagggtacgttttgaccctttgggctgccagggcacactgctggctcagattcaactttccatcagccagagccccctgatcacatttcgtgggggctgctctccagcctttcgtcccccagtctgtacacagatccaagggttgtcctgtcccaagtgcagttgctcttactgaatttcata

SEQ ID NO: 83578 - DNA, 599 bp, Chicken  19866894379973_1
  misc_feature (1)..(109): n is any nucleotide
nnnnnnnnnnnnnnnnnnnnnnnnnnnnnnnnnnnnnnnnnnnnnnnnnnnnnnnnnnnnnnnnnnnnnnnnnnnnnnnnnnnnnnnnnnnnnnnnnnnnnnnnnnnnngcacagctgctgtgcaaacacagacattacagacccgatgcatttgtttgtctttggaattcaaacaatagcgacattttgagagaacaacaggttttgaatttctttagggcaatatctagtaaagcacgcgcatttcaaaggatttgctaacagctggagacgtttcaaactgcacccttttccttcckttaaggcaggactggcctgtagcccctgcggtattgcagagatttgagatcaccctggagaagatatctgcttgctttgcagatttgttctaatttcagagtgaagtgcagcaggtgatctgctctccagctctgccccttgtcttttttgcttgctttttagtgtgtatttgatggttgaaggatgtgttatccttcgaggcggcgcatgtaaaaataataagctccagtagaatcaagcatgcagcatatgcaatgcccccactcagactctcaggctgcacagactctcactcatg

SEQ ID NO: 83579 - DNA, 600 bp, Chicken  19866894379974_1
gctctggttatgcctgagcagctcagctgagcagctgaagcactgctctacctccacatgcccatgggcaaggctccagaaatgccttgtaagtggcagccgcctctgtcagaaagaattaatctgctaatggtgggagatattgcaagtgattaggtgcctttttgtaacaagtgcctcgctgtaccatgttcccagactgaaggagagagattatgcaccaatggtgtgctcatgtctggggtatgtaccagctacattctgatgccctagacacctctgaaataggcctgctggctrgcaggagcaactccagccacccagcaratgtcatctccaatttgtggaagcaacaagactgaggccttctgaagaaaatgactgatctacagaaataattcaaggaagaatttagagaaggggacaaaccaggagcaaccctatgtgagaggcccgtcatatgacagttcagaggtagaagctgggcacagagttgagcagagatttttcttcaccctgcgtctcttgtctccttattgctgcattagaagttatgtggtctggtcagcactgtgtgttttatttcaaaactcaactcag

SEQ ID NO: 83580 - DNA, 600 bp, Chicken  19866894379974_2
tgagcagctgaagcactgctctacctccacatgcccatgggcaaggctccagaaatgccttgtaagtggcagccgcctctgtcagaaagaattaatctgctaatggtgggagatattgcaagtgattaggtgcctttttgtaacaagtgcctcgctgtaccatgttcccagactgaaggagagagattatgcaccaatggtgtgctcatgtctggggtatgtaccagctacattctgatgccctagacacctctgaaataggcctgctggctrgcaggagcaactccagccacccagcaratgtcatctccaatttgtggaagcaacaagactgaggccttctgaagaaaatgactgatctacagaaataattcaaggaagaatttagagaaggggacaaaccaggagcaaccctatgtgagaggcccgtcatatgacagttcagaggtagaagctgggcacagagttgagcagagatttttcttcaccctgcgtctcttgtctccttattgctgcattagaagttatgtggtctggtcagcactgtgtgttttatttcaaaactcaactcagcaagaaaagtgatgtttgagaatctga

SEQ ID NO: 83581 - DNA, 599 bp, Chicken  19866894379981_1
  misc_feature (1)..(6): n is any nucleotide
nnnnnncgttctcttgccaagatgcatctttttgactgtccttatttctttacaagtctttccaatcaaattagtacatttttctgcttgagatcacccagtttctctgcgtccacttgttccccctgagctatggttactgatgaaatctgcaagtaaactaaggatagactataggacacatattttatcagacacactgattagactatttctttgcatgttatacttaaaaaacgtagccccattctacttcacggttctttagaagctgtgccaaataatgactacattaattasagttacatatctgcactctgaagaaaatgctttttctactgtgacaccgttttcatccaccgtgatggttttttattccccaggaaagcaaaagatcagactgcttctattaacctgtttctcctgaatgcttgagtagttaaattttaggtcagtatattgattcacaaggcaacaagtaaattccttggttggtaagtatctgccagttgactaggctttatccatttccatcctgtgcctgcagcagcataatatttccattgcagtcagcttatgggtgcaaatgatcacatctg

SEQ ID NO: 83582 - DNA, 600 bp, Chicken  19866894379981_2
tggtaagtatctgccagttgactaggctttatccatttccatcctgtgcctgcagcagcataatatttccattgcagtcagcttatgggtgcaaatgatcacatctgcatcttgatttattcctcactagttggaaatatgcagtgtcaagtgttcagtgaattttgctaggtcctaatgaggattcagtataacatgattttctctggcttcagtcttgttgaaaagtttttctgcatatctgtcttttcaaatcaaaaaagagacagtgtgctggtatatagtatattttacttccartaaggtttcaggctgtgctgaagaagaaaagaactgtgcagttcaggcgtacctctaataccactgcagagctgaggggatgcagaaggaggcggctgggygactgagggctaaccctgcggtctggctgggactcgggtcagaggatggggagaggggtttacacggccctttaactctcttgaactgggagatcagttaaaaataaagggtcaggarcagaactcaggactccaaaagtctgctgtgaatcgctcaacatacaacaacctgcatgtttaagcggattgttggtccagt

SEQ ID NO: 83583 - DNA, 600 bp, Chicken  19866894379981_3
catctgcatcttgatttattcctcactagttggaaatatgcagtgtcaagtgttcagtgaattttgctaggtcctaatgaggattcagtataacatgattttctctggcttcagtcttgttgaaaagtttttctgcatatctgtcttttcaaatcaaaaaagagacagtgtgctggtatatagtatattttacttccartaaggtttcaggctgtgctgaagaagaaaagaactgtgcagttcaggcgtacctctaataccactgcagagctgaggggatgcagaaggaggcggctgggygactgagggctaaccctgcggtctggctgggactcgggtcagaggatggggagaggggtttacacggccctttaactctcttgaactgggagatcagttaaaaataaagggtcaggarcagaactcaggactccaaaagtctgctgtgaatcgctcaacatacaacaacctgcatgtttaagcggattgttggtccagtgttgttggaatgtatcgttttcttccctaaatcctctattctctgaattacgtgccggggagaggaagtgaaaagcccccttttttatggcatcgaaaggc

SEQ ID NO: 83584 - DNA, 600 bp, Chicken  19866894379981_4
gttgaaaagtttttctgcatatctgtcttttcaaatcaaaaaagagacagtgtgctggtatatagtatattttacttccartaaggtttcaggctgtgctgaagaagaaaagaactgtgcagttcaggcgtacctctaataccactgcagagctgaggggatgcagaaggaggcggctgggygactgagggctaaccctgcggtctggctgggactcgggtcagaggatggggagaggggtttacacggccctttaactctcttgaactgggagatcagttaaaaataaagggtcaggarcagaactcaggactccaaaagtctgctgtgaatcgctcaacatacaacaacctgcatgtttaagcggattgttggtccagtgttgttggaatgtatcgttttcttccctaaatcctctattctctgaattacgtgccggggagaggaagtgaaaagcccccttttttatggcatcgaaaggctctgtgtagattgataggaactgcagcagcctttgtgtatagcagggatttttcgtgatggcagagcgtctgtccctgaccaagcaattcactcatccaggcgtttgtcaggccagga

SEQ ID NO: 83585 - DNA, 600 bp, Chicken  19866894379982_1
aattaaacataaatgcaaatttttcattcaatcaccaccctggatgtgattaaatacattaatggtgtttctactgtagtaattgtttttcttaaagtcaactgatcactatagctgagttaatttaattcatgtaaacgtgcataaacactaagagtttggaatttgaggatcccccctcctgccctttgtttcatgtactgtgagtacacaaacactgatgggtacgagagaaaaaggggggagggatctaatgccatatgaatactttctgaattcattgtcatggaatttttagcrgaacacagcaaattggctatgaacatcagaaaatcatgtgcaggatgctcatttttggagtttgccctttgttttagattgtaatatatatgaaattgctgtggaaggtgaagaagaaagaatctgacgtggagcagcagggaacctgtttaaaagcatggttcaggcctcccacggtggtagggtttagttgtgcggagagaggaagcagtccaaatgcctttcttcatgaatccaagcaacagaaagggcatgacagaactgcaggcttgatttcagtgccaagggctcggcagaagc

SEQ ID NO: 83586 - DNA, 600 bp, Chicken  19866894379987_1
acaaatgagaacagcacgtaagatattaaggagacatatagaaagaagtttctttacagaatctatcaccttgtagagggaaatctgcaatgaaataaagtcatccaggtctagtagagctatggaatagaggtcatgcaaaatggaatatacgtcctcacatctttatattcttgtctcagtgacgttggactgcagttcagtaaaaccttatctcagtgtgatcaaaactgcactggaatttcaggctagttagccttcattatggaagcagagagttttgccattctcaatccagtycttttctttcttaatagagaaagttgattatttctaaatctaagaaaacatatctcaaaatatcaagcaaaagtcaagttatgctctggcttacatggtactttcttatgtttatttccctaatctcaaccaagcagactgaaatttctctcttcattatgccaggtgagttttttagatacttgggtttacagtaagggttgtttggtttgtttgttggttggttgtttggttgggtggtgttgtttttctctgaaatcctattcctatgcgttggaagccttccccaaatgttgatct

SEQ ID NO: 83587 - DNA, 600 bp, Chicken  19866894379994_1
tcccaaacaagtttttcacagctctcttgccaggtactgccgacagagaggtgccctccccgccctcccaagagcttaaaccacggaaaagaaacaaacaccaactcttaagggtttgctgctttcatatatttttttgttgcctttggaaaagcctcctgacccccagggagcgcttacaagttccttttctcctccctgttccttctcttcgtggggaaggaaaatcccaactgctgtcccatgactgcagtgaagtctggccaagcttggactctcctctttccctttggtatcccycatcctagttgagtacgggccaagctggcatttctgtggagtgttttaggtcatataatgtaaaaatctctccaggttcctatcagagcattattcgggttggaccctgcagagcttcaagcccaaccatcaccaaccaaccaccaccatgtcctgtgggctgccagtctgtggcatggcagcacgggagcaggactgcaagccaagaagcaagccctaggggaactgcacatagagaatgaattaaaccacatatacaaccagtgcctaatgaagcaggtctgctggcacatctcccca

SEQ ID NO: 83588 - DNA, 600 bp, Chicken  19866894379998_1
ataaagctggcaggtactgtcttgggagtgtgatcacttgacttaaatattgcatcctataagaaagaatagtagcacaaattctcaggagaaaagcaagaaccaagcagcagttccagcaacaccaaatgaaatctgagacaactcatatctctaagagatctggtccagaagtacctgtttgctaaataatatgcttttcacataacaaaatgcagcaaaagaaagtgccataattaaaacttatgatgaattgagaattatgctacctatcaaggagtttgctgaaagtggaaaagsaaatcttcctcttgcaattaaaaactagtttgctgcatgcttaaaaaacagctaataacacacagcagttactcacaaatcccaaccagcgcatcacctctgctcttatgccaggaaaggcactctgttgtaaaccccattattacactgtccctttcactgttccagaaaagaagtcagtgtcaccacaaagcagccactagcagtaatatcaactttggagtccaacgaaggatatatatatgaatcccttttattctaggactgtattgagctgtcggtgttaaatctttgtccaaa

SEQ ID NO: 83589 - DNA, 498 bp, Chicken  19866894380003_1
tggtgtcagccccaaagcaaacaggccccggccgctgagcgttgactacgatgagctcagtatgggaaagagacatgacgtatgaatgtttatttaataattctctaatatttccagcggagtgtggctgtgccttctggggggaggaggggaggttgaagagggaaactctaatctgttggggtgggtcataaatcaggaagacaacatcattaatcagggatgggaccaaactggaaggaggtgggactggagctgccatcctcagtgggaagggggatgtgctcttttccttttttwaaaaaaaagaacaaatcytgtttctgattctgcttggccccagcagcgctgcccacataatagcaagtccggacacatggctgtttaagtgagtatgctacctccaccataaaccttgcgatgcgagcttgccaagcattaaatccctttataattatcttctttatataacacttcatgctcatcatggttcattgg

SEQ ID NO: 83590 - DNA, 480 bp, Chicken  19866894380003_2
aaacaggccccggccgctgagcgttgactacgatgagctcagtatgggaaagagacatgacgtatgaatgtttatttaataattctctaatatttccagcggagtgtggctgtgccttctggggggaggaggggaggttgaagagggaaactctaatctgttggggtgggtcataaatcaggaagacaacatcattaatcagggatgggaccaaactggaaggaggtgggactggagctgccatcctcagtgggaagggggatgtgctcttttccttttttwaaaaaaaagaacaaatcytgtttctgattctgcttggccccagcagcgctgcccacataatagcaagtccggacacatggctgtttaagtgagtatgctacctccaccataaaccttgcgatgcgagcttgccaagcattaaatccctttataattatcttctttatataacacttcatgctcatcatggttcattgg

SEQ ID NO: 83591 - DNA, 582 bp, Chicken  19866894380004_1
ggaaaagattgttttatctgcactgaagaagtaatgtcagtcttctgaagtactaagtgtatcgatcccatgaattttaaatgaagtgaccttgaaactgaaactcatagtgctgttcctacaacctcattcttctgacggctctcttaaatatttgttgcttcaggacaaagagcaggaaactggaacataacagtaaaaagatttgaagtaagccttccttggtatttcctaatgtataccacctgcctttgtctcttgggccacaaatcccactaaatggtgcatggattggtcttrcacagtctgagatgctttggttctcaaaatctaaccaatacgtgctgtgctgcctttagtttgaaggtgactgtgcttagactaaataccttcttttacttttctacaaagctctgggagcataacagatactgccaagtaaaatggagtgaaaaactctaacgtcacttaggggttttttttttgctttcaaaggacattggtagatagagaactgaaaatttactttggtttctggtcagctcataatgggatcttccttggctccatgggacaaatacg

SEQ ID NO: 83592 - DNA, 600 bp, Chicken  19866894380007_1
gagacctgccccaaggcactctatgaactgatgctgaagtgctggagtacggagcccagtgagaggcccacatttgaggccttgtactgccagctggaggactacttcgacaatgactcctatatggacaaccgtgccaccatcaagtgaaccccaaggcagggacggaggaggaaatgtaaatgaatgtgactgaagggaaatcaatttaaccccagatggggaactggatgtgaagacaaggaggactggtaatttttcacacctgtgctggcacacaaagacacgtcatgattttaytggtggcaaatgttttgcaagactaagcatcaggaagcaggaagggtgggggcttctaaaatataaacaaccttgtatttattttttaaataacagctcacaagaatgaataaatgaaatgagtctggttcaataaaaccatagcaatttataatttccttattggaataattacgtatttagcggttactagattttcgatccctactagtttgtccttgtggagaaatttgattactctgcacagcaggatctgtgctctgaaagttctcttatactaaaaaaatatagaaactccat

SEQ ID NO: 83593 - DNA, 600 bp, Chicken  19866894380008_1
tttatgttagcagagggtctgactgtgcgcatttattctgctctgtgtaattagcaccattgcctcctggtaattattttactctccatgaaggattacacagccattaacctggaaggaagagaaaaagaagaagtaggggcatgtgggaaagactttgaacaccagattcattcactggttaggaacaaaagagcgtatttagaagcttaattaatgaaaagtctgtctcaaggcaactgcagcttactactaatagatatcatgaaaattcatcaattcactgctgcaaatgagggyttgctggctccagactgttgaacagggttcttccctctatgcttctttgcaatctaatggtaagtgatgtccagaactgagttttcctgcaggcctgtatgcaattagtgtgayttcttggcactggatgctaatgattcacctggattgagtcacacatgaggcaatgtggctctggaatkcttcccgctacaaccgctgtgctcagcaaatctgggaggtgagtacaaaggatcttgcaactgctaagccttctagggaaaaggagaggcttaagaggagttcagcagtcacctgcac

SEQ ID NO: 83594 - DNA, 600 bp, Chicken  19866894380008_2
gaaggaagagaaaaagaagaagtaggggcatgtgggaaagactttgaacaccagattcattcactggttaggaacaaaagagcgtatttagaagcttaattaatgaaaagtctgtctcaaggcaactgcagcttactactaatagatatcatgaaaattcatcaattcactgctgcaaatgagggyttgctggctccagactgttgaacagggttcttccctctatgcttctttgcaatctaatggtaagtgatgtccagaactgagttttcctgcaggcctgtatgcaattagtgtgayttcttggcactggatgctaatgattcacctggattgagtcacacatgaggcaatgtggctctggaatkcttcccgctacaaccgctgtgctcagcaaatctgggaggtgagtacaaaggatcttgcaactgctaagccttctagggaaaaggagaggcttaagaggagttcagcagtcacctgcactgatcacagccatggattttataaatcaaatctcctctgctggagaaaagtaacttctgggtatccaagatttgaagggagatgccataggtagaaggctgagcttgggaacag

SEQ ID NO: 83595 - DNA, 600 bp, Chicken  19866894380008_3
taggaacaaaagagcgtatttagaagcttaattaatgaaaagtctgtctcaaggcaactgcagcttactactaatagatatcatgaaaattcatcaattcactgctgcaaatgagggyttgctggctccagactgttgaacagggttcttccctctatgcttctttgcaatctaatggtaagtgatgtccagaactgagttttcctgcaggcctgtatgcaattagtgtgayttcttggcactggatgctaatgattcacctggattgagtcacacatgaggcaatgtggctctggaatkcttcccgctacaaccgctgtgctcagcaaatctgggaggtgagtacaaaggatcttgcaactgctaagccttctagggaaaaggagaggcttaagaggagttcagcagtcacctgcactgatcacagccatggattttataaatcaaatctcctctgctggagaaaagtaacttctgggtatccaagatttgaagggagatgccataggtagaaggctgagcttgggaacagcatgggtgttgggaaggtatcacggagctccacaaaactgagagaagccaaggagcaaagagcaacag

SEQ ID NO: 83596 - DNA, 600 bp, Chicken  19866894380012_1
ttctgttcttgtatttaaagcaacattggactttgagctgatagttattttgattaattggagattagaaattgagcctgtttagggtcaggaatagaaaatcccctttcctctgaacctgctgagctggaaaatcagttattcacacagctgcgatgcagagatgctaccccagcagctatttgagctgctgcttttgaggtggttgaagttctcttcccctgaagctttcagaagtcacattggaggagcaggtgctgtttgtgagcccctgtgatgcaggcaggaagattgcccgcstgctgcagagaccttttggaactttaatgggttgagtcacaggcaggctgcgtgccggatactttctaacccatgcagttgttgtacaggaggctgcctacacatccttcckccaattcacaaagtctcttcatgcctactcattctatcctgatcagatatgagtagtctaacatataatttcagcattttytgaaataaaactgagcctgatttctgccatgctattttttttctttttatttttttatttttttgccagaaatgactggaagggaatgtaatttatttctgttcctc

SEQ ID NO: 83597 - DNA, 600 bp, Chicken  19866894380012_2
ctgaacctgctgagctggaaaatcagttattcacacagctgcgatgcagagatgctaccccagcagctatttgagctgctgcttttgaggtggttgaagttctcttcccctgaagctttcagaagtcacattggaggagcaggtgctgtttgtgagcccctgtgatgcaggcaggaagattgcccgcstgctgcagagaccttttggaactttaatgggttgagtcacaggcaggctgcgtgccggatactttctaacccatgcagttgttgtacaggaggctgcctacacatccttcckccaattcacaaagtctcttcatgcctactcattctatcctgatcagatatgagtagtctaacatataatttcagcattttytgaaataaaactgagcctgatttctgccatgctattttttttctttttatttttttatttttttgccagaaatgactggaagggaatgtaatttatttctgttcctctaacagtagtgacaaaggcgagctttgttctgtgtgtcttcctggtgtgcctcatgagacaatgtaagtttccacaggaggcctaattgtctgtacctggtgattcccaagt

SEQ ID NO: 83598 - DNA, 600 bp, Chicken  19866894380012_3
cttttgaggtggttgaagttctcttcccctgaagctttcagaagtcacattggaggagcaggtgctgtttgtgagcccctgtgatgcaggcaggaagattgcccgcstgctgcagagaccttttggaactttaatgggttgagtcacaggcaggctgcgtgccggatactttctaacccatgcagttgttgtacaggaggctgcctacacatccttcckccaattcacaaagtctcttcatgcctactcattctatcctgatcagatatgagtagtctaacatataatttcagcattttytgaaataaaactgagcctgatttctgccatgctattttttttctttttatttttttatttttttgccagaaatgactggaagggaatgtaatttatttctgttcctctaacagtagtgacaaaggcgagctttgttctgtgtgtcttcctggtgtgcctcatgagacaatgtaagtttccacaggaggcctaattgtctgtacctggtgattcccaagttgataggatgtgcttctcttttctctgccatacctggggggagaagaatagctatttagttgcacagtgttttctcatgta

SEQ ID NO: 83599 - DNA, 600 bp, Chicken  19866894380012_4
tggaggagcaggtgctgtttgtgagcccctgtgatgcaggcaggaagattgcccgcstgctgcagagaccttttggaactttaatgggttgagtcacaggcaggctgcgtgccggatactttctaacccatgcagttgttgtacaggaggctgcctacacatccttcckccaattcacaaagtctcttcatgcctactcattctatcctgatcagatatgagtagtctaacatataatttcagcattttytgaaataaaactgagcctgatttctgccatgctattttttttctttttayttttttatttttttgccagaaatgactggaagggaatgtaatttatttctgttcctctaacagtagtgacaaaggcgagctttgttctgtgtgtcttcctggtgtgcctcatgagacaatgtaagtttccacaggaggcctaattgtctgtacctggtgattcccaagttgataggatgtgcttctcttttctctgccatacctggggggagaagaatagctatttagttgcacagtgttttctcatgtactccgttcgaagctcttgagatgctgctgacctcattgacgtgagacgaa

SEQ ID NO: 83600 - DNA, 600 bp, Chicken  19866894380012_5; identical to SEQ ID NO: 83599

SEQ ID NO: 83601 - DNA, 600 bp, Chicken  19866894380018_1
gcatccctcgttacaacagctcattaaattatcaggagagacagaaagagttcccatcacgcctcccgcagtgtacaagtccggactgtgtcattcaaaataacccactggtatctctctcatcttaggctctggctgtgtggacggatgcagagtactgcccgttggctctgacctagccaggcacaagccagctccaggctgggagcgcaccgcagcgcgtgctggctggccactgaccccgagctgtcccagcctggctggaactgcatccccacgtgctgaggagagctgccctcyrgaaggcgtctctgctgctgctgtgagaacacaatcctgatgagagaggcccagctaagcacagctcctttcagatttggccgctcagtgttttccattagcttgatacatgctgtttacatcctactgccgccagtgccagagataactgccttgggagcagctccctgcaggtattgttagcagctgctggaaacaaaggcgtttgttttagccacgtcactgtctaaacagccagaaatagattgctttttttattgctagtacgccaataaaaatcggtctggttctcctggccaa

SEQ ID NO: 83602 - DNA, 600 bp, Chicken  19866894380018_2
catccctcgttacaacagctcattaaattatcaggagagacagaaagagttcccatcacgcctcccgcagtgtacaagtccggactgtgtcattcaaaataacccactggtatctctctcatcttaggctctggctgtgtggacggatgcagagtactgcccgttggctctgacctagccaggcacaagccagctccaggctgggagcgcaccgcagcgcgtgctggctggccactgaccccgagctgtcccagcctggctggaactgcatccccacgtgctgaggagagctgccctcyrgaaggcgtctctgctgctgctgtgagaacacaatcctgatgagagaggcccagctaagcacagctcctttcagatttggccgctcagtgttttccattagcttgatacatgctgtttacatcctactgccgccagtgccagagataactgccttgggagcagctccctgcaggtattgttagcagctgctggaaacaaaggcgtttgttttagccacgtcactgtctaaacagccagaaatagattgctttttttattgctagtacgccaataaaaatcggtctggttctcctggccaaa

SEQ ID NO: 83603 - DNA, 600 bp, Chicken  19866894380023_1
ggacacaggtaaatatttgtcagctgggaaatggcagtcactgtcctaatacctgaatggcagtgctctgtttcctaatgcagacagacctggctgtgccagtatcacacagcagcttcagcacaaaacaaggcatttcagctcatcattgcagaactgggcaagaaggccaatcttcattggtatctcctagggattcgccttttgattttcctcattaagctaggcatcattcctcaaaaacaatctaacactagatttttggactaattattagtccaaactcaaaatttcaattartttttttttcattaagccatctctttcctaaaaaagagaaagttcatttctgtgaaagtttgttatttttaggggtatttttcyttttgtatctttcaaagctttgtgattttttctgacacagtttttctttcatgttttaagaataacccataagcaaatttcaaaagtctaactaggaaaaattctatgattgcatgttccacaattgaacagaagatcctacagctgatattacattaaagcttgttcaaaatgctattctgaagaaaaacatagcccatgcttggatttcagggc

SEQ ID NO: 83604 - DNA, 600 bp, Chicken  19866894380023_2
cagacctggctgtgccagtatcacacagcagcttcagcacaaaacaaggcatttcagctcatcattgcagaactgggcaagaaggccaatcttcattggtatctcctagggattcgccttttgattttcctcattaagctaggcatcattcctcaaaaacaatctaacactagatttttggactaattattagtccaaactcaaaatttcaattattttttttttcattaagccatctctttcctaaaaaagagaaagttcatttctgtgaaagtttgttatttttaggggtatttttcyttttgtatctttcaaagctttgtgattttttctgacacagtttttctttcatgttttaagaataacccataagcaaatttcaaaagtctaactaggaaaaattctatgattgcatgttccacaattgaacagaagatcctacagctgatattacattaaagcttgttcaaaatgctattctgaagaaaaacatagcccatgcttggatttcagggctaagtcgacttctggtctggctctcgggtatgtaaaaagttttacctgtccagagaaaaatttattggctaatggggaaattga

SEQ ID NO: 83605 - DNA, 600 bp, Chicken  19866894380026_1
atcaaggtccaaagcaaagaactagaggagtatactactaattacttcatgcacaaaaagaatcactgaaattataaactgtttcttctcagagtccaatatggcttccacagataacagaatagaggtagaaattctgtcactcttatgtgtactttcttactttcaactgatatcatagcaaaatgctaaactaggcattagtcttcattaaatctgtgagtataagagtcaataaagaaggcacaagaactgtgataaataaccttgttttaaagaaaatactttttctcacgctgyctttactgggcaatttttttagttttatttttaaacatacttttcttattgttattgatgcctgctcagacataccttgttctttatatgtgtttattttatcctagagaaatgtatttgtattctgtcactgaagtttatcttacaataaaaatcatgtgtatttacaaacaatcgcataaactgtccagaatcaaaagggctctgtgctgaatttcatgggaaccaaactttatctctgaagtcatattgaaggaaatgtgacctcggcaagagaaacacgctaagggtaatttcttt

SEQ ID NO: 83606 - DNA, 599 bp, Chicken  19866894380035_1
  misc_feature (1)..(112): n is any nucleotide
nnnnnnnnnnnnnnnnnnnnnnnnnnnnnnnnnnnnnnnnnnnnnnnnnnnnnnnnnnnnnnnnnnnnnnnnnnnnnnnnnnnnnnnnnnnnnnnnnnnnnnnnnnnnnnnntttaaaactcttctcagaaactcttcccatccactggctggcatcttcatgagctctgacaccccaaatgaaagagagcccataaaatcattcctggttgttcgatcccagtcccagacctctacagagagccgtcgatctttgtctgtaggttttaatttactgaaaaggagagaaatagcattctsaatgcaaaactcaaataagtgattcaacgcttaagaaattacattaaaaggggttaaacttacaatgtgaatgactcattccagtgtggattcagggtagaacggaaggtttttgttttttgtttactttcattcttgggatctgggataagtttcagtttaacataaggatctgaaagcccatttggatccatgggaattaggttttttgcttctcgcactgtcaatataaaacagagtgctgatttgcatgggattaaaaatcaccgttaacaacatagtaacaagacaaaccaaat

SEQ ID NO: 83607 - DNA, 600 bp, Chicken  19866894380035_2
aaaggggttaaacttacaatgtgaatgactcattccagtgtggattcagggtagaacggaaggtttttgttttttgtttactttcattcttgggatctgggataagtttcagtttaacataaggatctgaaagcccatttggatccatgggaattaggttttttgcttctcgcactgtcaatataaaacagagtgctgatttgcatgggattaaaaatcaccgttaacaacatagtaacaagacaaaccaaatctaaagaaatatgttgaaatataaaacaaataagatgaaaaactctygtggtcagacttggcatggaagaaaatagtaaagtaaggttgcacttgatggtatttgtaaggctggtagggaaagtgacaggagatgagagccattcccaaatggaatgaagcagctcctgggcagctcttttctggaatggaatgattaaacatccgagctcatctctatacatttctaagcagggagcatttctgtgtgcttctatttactcatcaatcttaggttctacaactaccagttgaatactataaggctgattgttggatcagaacagatttccaagaagggctgtttta

SEQ ID NO: 83608 - DNA, 600 bp, Chicken  19866894380037_1
aggagagattgattctatgattttatgattcttgattggttcaatctcatccggaagtctgctccttcacaagaaaaaaagaccatgaccttgagatctcactgttatcctaagattagctgcatttcccaagaggttagtacagctgtgtttgtaggctgtagctgtggctggaagataccatgctcttttttatcacagactactgtgatagttcatctgtgacatgatctgatgattcatctgcttgatctagcattttaagttctcttttcctcttctaaataactatttgaaaayattattgatcaaatagtattttctcacacacactctgatgttccaaagccagtctagcaggagcatatttctttaagacctaggagtggagcagagcaaggacatgggctatacactggctcccacagggctctcacagtgcaaagttccggaacactcctttatacaagcttcagttgaagaatgaactttgttgcctttgggctgatggctacagatgaggggaaatctgatcctacagttttcccttctcagagcttcacagtaagaaaagtacagatttcatgctgaattccagaa

SEQ ID NO: 83609 - DNA, 600 bp, Chicken  19866894380041_1
aatagtagataaatgtaaataagatcagagttggtgacaatatctcatgaaatctggagttcaatcaggaaacacaggttttcctgctgtgttcttgtgcttttggctaactggattataaagcattttcaaacataagatgaaagaatatggagagccggatcaccaaataattagaaagcaggcttttctatctaggacatacacacatgcactgcaggtgctgtcttgtcagagacccagtttcatccagtagccttttgtaagagagatgtagaaacatgtttgctcctactgggraatgatatgaggggttatttttgaatgattaattaaaatgaatcaatcttcattgcactgccactgacatgaaaagcaccatagctgtgcaataatcacatgcaattattcaaccacccctttggcaaggacaatgtaattagtcctggtagtgtcaagagattttctttatacctgaaaaattgttggctttaaccaagcactgctgaaaatttattgtaatgcagagaaaacaacaggtgaaagtacaaggccccagtgagtgactcctacctacaacactacaaatatacaatacta

SEQ ID NO: 83610 - DNA, 599 bp, Chicken  19866894380046_1
  misc_feature (1)..(141): n is any nucleotide
nnnnnnnnnnnnnnnnnnnnnnnnnnnnnnnnnnnnnnnnnnnnnnnnnnnnnnnnnnnnnnnnnnnnnnnnnnnnnnnnnnnnnnnnnnnnnnnnnnnnnnnnnnnnnnnnnnnnnnnnnnnnnnnnnnnnnnnnnnnnntttctatacctacaagaacccaaatggtcagtaccagatggacaattgtgcgtgattcattttattctacagtcaaacccaaagatattcgtatactcacacttatctcattcagatgtgtaccattcttattgctgagttcactatgagctacccacrtatattatgcaaaaaagggcatgcagcaattatggtgttgtgtcacttatcgactgcatatattgtcacarctcatgaatttccatcactaacttcaacacttggcaaaatcaatgtaatactgtaaatcaaaatcaattaagaaaaactgaagtaatctgtcaycttttggaatgtgtggcatttacctttctcaagggtttctctggagtcatgagaatcaaaatccatttaaaaattagaaataaaaggcaaaagtagtagttatttgggaaacatcagttattaaggagagagga

SEQ ID NO: 83611 - DNA, 599 bp, Chicken  19866894380046_2
  misc_feature (1)..(70): n is any nucleotide
nnnnnnnnnnnnnnnnnnnnnnnnnnnnnnnnnnnnnnnnnnnnnnnnnnnnnnnnnnnnnnnnnnnnnntttctatacctacaagaacccaaatggtcagtaccagatggacaattgtgcgtgattcattttattctacagtcaaacccaaagatattcgtatactcacacttatctcattcagatgtgtaccattcttattgctgagttcactatgagctacccacrtatattatgcaaaaaagggcatgcagcaattatggtgttgtgtcacttatcgactgcatatattgtcacarctcatgaatttccatcactaacttcaacacttggcaaaatcaatgtaatactgtaaatcaaaatcaattaagaaaaactgaagtaatctgtcaycttttggaatgtgtggcatttacctttctcaagggtttctctggagtcatgagaatcaaaatccatttaaaaattagaaataaaaggcaaaagtagtagttatttgggaaacatcagttattaaggagagaggaaagcattttcagcatttagtaaagcatatgtttcattgaataagtatagagytctgacactggaaaacccc

SEQ ID NO: 83612 - DNA, 600 bp, Chicken  19866894380046_3
tggtcagtaccagatggacaattgtgcgtgattcattttattctacagtcaaacccaaagatattcgtatactcacacttatctcattcagatgtgtaccattcttattgctgagttcactatgagctacccacrtatattatgcaaaaaagggcatgcagcaattatggtgttgtgtcacttatcgactgcatatattgtcacarctcatgaatttccatcactaacttcaacacttggcaaaatcaatgtaatactgtaaatcaaaatcaattaagaaaaactgaagtaatctgtcaycttttggaatgtgtggcatttacctttctcaagggtttctctggagtcatgagaatcaaaatccatttaaaaattagaaataaaaggcaaaagtagtagttatttgggaaacatcagttattaaggagagaggaaagcattttcagcatttagtaaagcatatgtttcattgaataagtatagagytctgacactggaaaacccctttgattggattttccacatcttaattttggtacttaatttytgtaaatgaactcccttaattcccataaattccacgtagatagaagagctttc

SEQ ID NO: 83613 - DNA, 471 bp, Chicken  19866894380046_4
gactgcatatattgtcacarctcatgaatttccatcactaacttcaacacttggcaaaatcaatgtaatactgtaaatcaaaatcaattaagaaaaactgaagtaatctgtcaycttttggaatgtgtggcatttacctttctcaagggtttctctggagtcatgagaatcaaaatccatttaaaaattagaaataaaaggcaaaagtagtagttatttgggaaacatcagttattaaggagagaggaaagcattttcagcatttagtaaagcatatgtttcattgaataagtatagagytctgacactggaaaacccctttgattggattttccacatcttaattttggtacttaatttytgtaaatgaactcccttaattcccataaattccacgtagatagaagagctttctggaatgggatggattaaaactcttgctgttttctgaactgatgcttatatgcactt

SEQ ID NO: 83614 - DNA, 410 bp, Chicken  19866894380046_5
aatgtaatactgtaaatcaaaatcaattaagaaaaactgaagtaatctgtcaycttttggaatgtgtggcatttacctttctcaagggtttctctggagtcatgagaatcaaaatccatttaaaaattagaaataaaaggcaaaagtagtagttatttgggaaacatcagttattaaggagagaggaaagcattttcagcatttagtaaagcatatgtttcattgaataagtatagagytctgacactggaaaacccctttgattggattttccacatcttaattttggtacttaatttytgtaaatgaactcccttaattcccataaattccacgtagatagaagagctttctggaatgggatggattaaaactcttgctgttttctgaactgatgcttatatgcactt

SEQ ID NO: 83615 - DNA, 600 bp, Chicken  19866894380056_1
ctgctgtttccacagcacgcacaaatccgttgtggctgtggcacctatttgtaatagcacatctcctctacctttgtcctgtctagcatgctgaggagctcctacagtggagaaataatctggagcttgtatcatttcttatcatcacaaacttaaaggtaaatgatgtgttaattcttttccacacagtgcaagaggtaatagcctcaagttgcatcgggggggttcaagttggatatgagggaaaatttattcttagagcacagaagcactggcgcaggctgcccagggaggtggaaktgtccccattcctggacatgttcaagcactgtggagatgtggtgtggtcagtgggcactgtggggatgtgttgtgattggagttgggggttctagaggtcttttccacccgtaatggttctgtgattctaaggttgcaataatgacacatgtagatgcagaaaggagatgtttttaaggtttgctgttctgctgcagctctagcaagggcaccagggatgtgtgggtggtaaaatggagagctagtagatgggaaatgtgcatagagagcatgtcaggacaaggggagcaaggtgcataa

SEQ ID NO: 83616 - DNA, 600 bp, Chicken  19866894380062_1
actattccataagagatagttccctatttgttttccttagaaataagacagaactatttgtgcttatccgtccttttggaattttctctcctcccagcgtgaccagtaagaaggcttctagatagtcctagtaaggatgaataaaggtgaggcacttggcttgattctgagcttgtctcagacggttactatttgctcagcagaggcctctgttgagctaactacagttcacgagagcactcatgggtattctctagctcctcccaacacttggcacagcagtcttctggactgactgarcaccagctgtaactatcagtgtcccatccgtcttccacctctagtgagctggttcctgctgctgtcctatgtatttttactgctttatttttgataaatgccaatgaactactgagaataactgcccaccaaatacgtatggttttcatttagcaaatttaacccgaagaaatagaatgaaaaaaaggaaaactaattttcaagctgaaatgaacttgctattttcatgaacttccatatatttcatccttcattctgaatgcaaattcctctcttgtaccacttcctgcagtagcctaa

SEQ ID NO: 83617 - DNA, 599 bp, Chicken  19866894380063_1
  misc_feature (1)..(187): n is any nucleotide
nnnnnnnnnnnnnnnnnnnnnnnnnnnnnnnnnnnnnnnnnnnnnnnnnnnnnnnnnnnnnnnnnnnnnnnnnnnnnnnnnnnnnnnnnnnnnnnnnnnnnnnnnnnnnnnnnnnnnnnnnnnnnnnnnnnnnnnnnnnnnnnnnnnnnnnnnnnnnnnnnnnnnnnnnnnnnnnnnnnnnnnnnnntcctatacttttattttctttttctgaaatcattgctttttaaatgattttaaactgtcagtttttgattttccaaatgagctgatttctctgtaattttaagttcagtattytttgcttgcttcccatcccaaaatttcttcttgtgtttatttttgctattgttattttttcttcctcttacaatctttacttctgctctatacacaccttggcatccactaactgagttaattctctatttaggtacctcttcaactaaattcactgttktttttagttcatatttttattcctggagctgaagatttctatcccagtaaccaagtgactggaaggacctgtatctttctctaaatctttattattggttgctgcacgtcttatggatgtgagccaggagggataacaa

SEQ ID NO: 83618 - DNA, 599 bp, Chicken  19866894380063_2
  misc_feature (1)..(27): n is any nucleotide
nnnnnnnnnnnnnnnnnnnnnnnnnnntcctatacttttattttctttttctgaaatcattgctttttaaatgattttaaactgtcagtttttgattttccaaatgagctgatttctctgtaattttaagttcagtattytttgcttgcttcccatcccaaaatttcttcttgtgtttatttttgctattgttattttttcttcctcttacaatctttacttctgctctatacacaccttggcatccactaactgagttaattctctatttaggtacctcttcaactaaattcactgttktttttagttcatatttttattcctggagctgaagatttctatcccagtaaccaagtgactggaaggacctgtatctttctctaaatctttattattggttgctgcacgtcttatggatgtgagccaggagggataacaaagcacaaaatggagaaatggttttcacatttttctgtttcaagagcaggttttagaggtttcaaccacacaaatatgtcaattccataatgcttttagcaaatattccaaggaattatcacatatttccaaagtgaaggactgaaccatctgatgagctt

SEQ ID NO: 83619 - DNA, 469 bp, Chicken  19866894380069_1
gtgctaaaatgtctttctatgacagctacagagcatgcaagaaacatttaaaggtgcagagtgtaacttagtattgacctgctagttgcacattttgatgccaaaattagcataaagccattggctttccttaaactccttttggcaaattttgaaaagtattcatagggtaggtttaatttggacaactgcaaagatttgtgttggcctattttaacaaagaccacatgtgtagcagactgatcatcagtgtgtcctgcatgctgtgcgaattcagttaggccctgcaaatctattcarttctattgcaagtctactctaatttctattcaatggggcttgaattcacacacagccatttagcagttatcacctgatagagactgcaaactctgtctgaatgtgtcaatatgttaaatgataacagatttttttgttagtgcctatatagttttaactttttgagata

SEQ ID NO: 83620 - DNA, 600 bp, Chicken  19866894380073_1
tagcctggcaagcagagttgcaacagcaccttttggacaagggaaagctgtctttcccagtaaactgttgaacagcatttgagttttgtatagcagaggactacatatgtgacacacaatgttaacaactgtaatgtctgtatgaactcttttttcttttctcccaggctaagcttcctgatctgcagccctttccttccccagatggtgacacagtgacacagcatgaagaacttgtgtggatgccaggagtcaacgactgtgacttacttatgtaccttagggcagcaaggtaattasagccaagagattcccatgtcttcagaatggacgtgtgggctgtcatatctctgcagcagttgactgtggccactcctttttgttagattttggttcagtgtggatgttaactrtgcaatacaaggatgtgctggtttggtgatcagccaacacagtcttgctgttggctgtggcttttggattgtaaacccacagccagcagcatgtgcagcatgatagagaaaacacggagtgcagatgctatagcataaaggaagtaactgctaattgtggattaactgtgacagcatagataggatc

SEQ ID NO: 83621 - DNA, 600 bp, Chicken  19866894380073_2
acacaatgttaacaactgtaatgtctgtatgaactcttttttcttttctcccaggctaagcttcctgatctgcagccctttccttccccagatggtgacacagtgacacagcatgaagaacttgtgtggatgccaggagtcaacgactgtgacttacttatgtaccttagggcagcaaggtaattasagccaagagattcccatgtcttcagaatggacgtgtgggctgtcatatctctgcagcagttgactgtggccactcctttttgttagattttggttcagtgtggatgttaactrtgcaatacaaggatgtgctggtttggtgatcagccaacacagtcttgctgttggctgtggcttttggattgtaaacccacagccagcagcatgtgcagcatgatagagaaaacacggagtgcagatgctatagcataaaggaagtaactgctaattgtggattaactgtgacagcatagataggatccctcaaagattatttttttgaatgagccttaatttgtgtttcaatcttatgcagacctctgacatgcctgctagatttaccagataaagaagtattagacttctaatgctagt

SEQ ID NO: 83622 - DNA, 600 bp, Chicken  19866894380076_1
aagcacattgcactgtatttgaacaccatacaatctaaaaaaaaataaatgcctttaggatcctgactctgacaaatgctatataactactgcatatgtaaacaatattctttaaaaataatgagtaataactagttgtttatttgattccctacatctttatgttaattcatcacttcaaatgctctttcatactggcagtttctaaagatagccagcattttgcatctgcatctcttcacatcttaagaatttttctatgatgaacagtgtgtgactcacaaatgaactgattctcayaaacattatatcgtatgttgccagctccttccgttatatgatgktttcttgctgctcaaatgtcagtacctatagaaagaaaaaaatcatcttcctgccacctgcttaactgaattataggaaaaactgtacatttgattttactgtttaaaaaattcaagcagaaaaaaaaaaaagttttaaaagcactaattgggaaacaatgcctttaggagcttgcattaggcttgataaatagcaaaggagtgaagaaaggaaaaaaagaatgaaggaacagaggaaggaagaaaggaagagaaa

SEQ ID NO: 83623 - DNA, 600 bp, Chicken  19866894380076_2
ataaatgcctttaggatcctgactctgacaaatgctatataactactgcatatgtaaacaatattctttaaaaataatgagtaataactagttgtttatttgattccctacatctttatgttaattcatcacttcaaatgctctttcatactggcagtttctaaagatagccagcattttgcatctgcatctcttcacatcttaagaatttttctatgatgaacagtgtgtgactcacaaatgaactgattctcayaaacattatatcgtatgttgccagctccttccgttatatgatgktttcttgctgctcaaatgtcagtacctatagaaagaaaaaaatcatcttcctgccacctgcttaactgaattataggaaaaactgtacatttgattttactgtttaaaaaattcaagcagaaaaaaaaaaaagttttaaaagcactaattgggaaacaatgcctttaggagcttgcattaggcttgataaatagcaaaggagtgaagaaaggaaaaaaagaatgaaggaacagaggaaggaagaaaggaagagaaaggaacagaggaataaaagcaggcaaaaagaaaaaaattaaaatt

SEQ ID NO: 83624 - DNA, 600 bp, Chicken  19866894380076_3
taattcatcacttcaaatgctctttcatactggcagtttctaaagatagccagcattttgcatctgcatctcttcacatcttaagaatttttctatgatgaacagtgtgtgactcacaaatgaactgattctcayaaacattatatcgtatgttgccagctccttccgttatatgatgktttcttgctgctcaaatgtcagtacctatagaaagaaaaaaatcatcttcctgccacctgcttaactgaattataggaaaaactgtacatttgattttactgtttaaaaaattcaagcagkaaaaaaaaaaagttttaaaagcactaattgggaaacaatgcctttaggagcttgcattaggcttgataaatagcaaaggagtgaagaaaggaaaaaaagaatgaaggaacagaggaaggaagaaaggaagagaaaggaacagaggaataaaagcaggcaaaaagaaaaaaattaaaattaaaattaaatataaactaaactaaaataaaataaagcagaacacagaggaatcagcaacaatttgtaagtaagcctggcaatttttgtcatggtggaaatatgaacataagcacgtataga

SEQ ID NO: 83625 - DNA, 600 bp, Chicken  19866894380098_1
acgcaccgaggttccccaggggtggaaggatgggagtatggggatttggtgctgcataattctcaaataacagtcataaaataaaattacaaagggtttttttcctgaataatcatcatggtccatttggtggcgataccacccgtccagccataggagctccaggcaatttagacacatatactcctctaccgccacttctaatcagtactttggtttaattaggaaaccagaagggaaggagctggcatgctgctggtgatgatggatgaagctgcaagaaggactcttgtcccttgkcagaacccaaggagaaatgaatctaaacatgcttagagctgaaatctgtgaggaatccacttrgaaaaccttttttgtcttcttttctgtacagaaacttcacatgaagaaaaaccagtttaacgtcaccctttatggtgccaacaacaaccgctgagaatcatcccaatgggcaayagaagggaatatccccagttttaccccaaacctttcagaatttgtgtctcagtgcctcagaacctcaagagagggaccttaatgaggcgttaatgaataatattaaagggaaattctgctgca

SEQ ID NO: 83626 - DNA, 600 bp, Chicken  19866894380098_2
caaataacagtcataaaataaaattacaaagggtttttttcctgaataatcatcatggtccatttggtggcgataccacccgtccagccataggagctccaggcaatttagacacatatactcctctaccgccacttctaatcagtactttggtttaattaggaaaccagaagggaaggagctggcatgctgctggtgatgatggatgaagctgcaagaaggactcttgtcccttgkcagaacccaaggagaaatgaatctaaacatgcttagagctgaaatctgtgaggaatccacttrgaaaaccttttttgtcttcttttctgtacagaaacttcacatgaagaaaaaccagtttaacgtcaccctttatggtgccaacaacaaccgctgagaatcatcccaatgggcaayagaagggaatatccccagttttaccccaaacctttcagaatttgtgtctcagtgcctcagaacctcaagagagggaccttaatgaggcgttaatgaataatattaaagggaaattctgctgcagcagaaggaccacggagctcaaagttactgacatatggatggagtatcctcgtgtcacctttg

SEQ ID NO: 83627 - DNA, 600 bp, Chicken  19866894380098_3
catatactcctctaccgccacttctaatcagtactttggtttaattaggaaaccagaagggaaggagctggcatgctgctggtgatgatggatgaagctgcaagaaggactcttgtcccttgkcagaacccaaggagaaatgaatctaaacatgcttagagctgaaatctgtgaggaatccacttrgaaaaccttttttgtcttcttttctgtacagaaacttcacatgaagaaaaaccagtttaacgtcaccctttatggtgccaacaacaaccgctgagaatcatcccaatgggcaayagaagggaatatccccagttttaccccaaacctttcagaatttgtgtctcagtgcctcagaacctcaagagagggaccttaatgaggcgttaatgaataatattaaagggaaattctgctgcagcagaaggaccacggagctcaaagttactgacatatggatggagtatcctcgtgtcacctttggggttttaattcatgactttacctgttaggtctccctgcatttgtctctccaaactgcttttgctcttggagagatcttcacttggctatgggggcaaaaaaaacaagaaaaac

SEQ ID NO: 83628 - DNA, 600 bp, Chicken  19866894380101_1
cagtcgtagttcctctcactctgcaagtaaagtgaaagaagaatccatttactgtcatcgtaggaaactacagtcatttcacaagcaaaacagttaaaaaacaagacaagattaaatagtcagctcttcctctcttctataaagtaaaattgctaaaaataaagtacctttcatcttctaagctactgcaattcccgccacatttatttttaaaccacaacgaccacaacatcctgcagcactggagatcttgacagactgaatcccagccaatcttgttttaggagattaaaatactgygtttcatctcctgtctgctctcctgcagatagggcagcaatgagtaacagcagcatagcatcttgtttgaaacacatcttaactcccatggcaactagtttttcagccaagccgctggactgtagactragaactcgcacacagtgctccatcagcagagcacagaacggtcagctctgacagaaagccagtagtgagcagaggaaggaagagggtcagagaacaagagcagcttgctacgtctgcatgtgcctagccctttgcattcctgttgccatgaaggaatgcaacagcataaag

SEQ ID NO: 83629 - DNA, 600 bp, Chicken  19866894380101_2
ctctcttctataaagtaaaattgctaaaaataaagtacctttcatcttctaagctactgcaattcccgccacatttatttttaaaccacaacgaccacaacatcctgcagcactggagatcttgacagactgaatcccagccaatcttgttttaggagattaaaatactgygtttcatctcctgtctgctctcctgcagatagggcagcaatgagtaacagcagcatagcatcttgtttgaaacacatcttaactcccatggcaactagtttttcagccaagccgctggactgtagactragaactcgcacacagtgctccatcagcagagcacagaacggtcagctctgacagaaagccagtagtgagcagaggaaggaagagggtcagagaacaagagcagcttgctacgtctgcatgtgcctagccctttgcattcctgttgccatgaaggaatgcaacagcataaagataactttcagatatttcctatactcctgcacatctttgcacacttaaactatgtcctgggatgaaaacttacacagctatgttgaagttgaaaactgtaagacaatctttaaaaaaaaaaattacacg

SEQ ID NO: 83630 - DNA, 600 bp, Chicken  19866894380108_1
tttaaatagtctaaaacaatggaaccacgagcgaaacaaagaggcagaaaaagaagactgcttagaaacaaactacagacaacagaagccaacaacaaataagagtttccgtgatatacaacgactaagagtcatatgggaaaaaattgcattcacccattacaatactcgagacacattttaaaggcccaaacaactgggcagaattcagctacacatcacctaagacagagctttggcagaactcaagcttaaaaataaggcgtttttcttcctcaagtgagtgaagaatttacgacygtacgccaacagtctacagcagcaaccaacacaaaaaatgctctgttcgccttatattggcttttttcttccctcctttctacacgtctgcttcagccccagtcatttaatctttttatttctttttttactgcgaggaaaaaacaaaatcaatactgtgtctgagcaatgtggcacagcacaaagctgttctccgcactatgcgagcacataggattagaaggcccacaatgggctcattcaggaatgcatgacctgagttttgtttgcttttaggatctgggactattctgttttgtt

SEQ ID NO: 83631 - DNA, 380 bp, Chicken  19866894380108_2
gccaacagtctacagcagcaaccaacacaaaaaatgctctgttcgccttatattggcttttttcttccctcctttctacacgtctgcttcagccccagtcatttaatctttttatttctttttttactgcgaggaaaaaacaaaatcaatactgtgtctgagcaatgtggcacagcacaaagctgttctccgcactatgcgagcacataggattagaaggcccacaatgggctcattcaggaatgcatgacctgagttttgtttgcttttaggatctgggactattctgttttgttattwttttttttttttacaatgggggaaacttaaaagcacataaatgcttacatagagtctcaatataaggcgaggggcgaagg

SEQ ID NO: 83632 - DNA, 537 bp, Chicken  19866894380109_1
ccagttcataaatgggagagacatctggaaatgtcccagtttttgtgtgacccagaaaagagattgtggtattggtacaaatccagtggaagactgaaaacattattagggacttggagcacatgaaacacaaagaggggttgagagaagcgttcatacaacccacggaaaagaagtgcagaagtggaaacctgacctttagctaccaaatggaagattatagggaagacaaactcctctcaggaataaagagaaaaaaatgaaacaagaggaatttcaattgatgaaaaaaatgatggwaaaaaaaaatcacaatgaggatgatcaartactggaacaagttactcatagaatcagaataatagattatcagaagctggaagggacttgtaatgagttcaactcctgggtccatatgaggaggaaatctgagttaaatcacatacctaggagcattgcattgtccaaaggcttcatgaacagtgacaaggtttggggaccatgactacttccctggggagccatgaccacttccct

SEQ ID NO: 83633 - DNA, 508 bp, Chicken  19866894380109_2
aatgtcccagtttttgtgtgacccagaaaagagattgtggtattggtacaaatccagtggaagactgaaaacattattagggacttggagcacatgaaacacaaagaggggttgagagaagcgttcatacaacccacggaaaagaagtgcagaagtggaaacctgacctttagctaccaaatggaagattatagggaagacaaactcctctcaggaataaagagaaaaaaatgaaacaagaggaatttcaattgatgaaaaaaatgatggaaaaaaaaaatcacaatgaggatgatcaartactggaacaagttactcatagaatcagaataatagattatcagaagctggaagggacttgtaatgagttcaactcctgggtccatatgaggaggaaatctgagttaaatcacatacctaggagcattgcattgtccaaaggcttcatgaacagtgacaaggtttggggaccatgactacttccctggggagccatgaccacttccct

SEQ ID NO: 83634 - DNA, 599 bp, Chicken  19866894380110_1
  misc_feature (1)..(165): n is any nucleotide
nnnnnnnnnnnnnnnnnnnnnnnnnnnnnnnnnnnnnnnnnnnnnnnnnnnnnnnnnnnnnnnnnnnnnnnnnnnnnnnnnnnnnnnnnnnnnnnnnnnnnnnnnnnnnnnnnnnnnnnnnnnnnnnnnnnnnnnnnnnnnnnnnnnnnnnnnnnnnnnnnnnnnttcaccccgaactgattacccgctcctgaccccaccacttccaccagcagcacaagctcagggaccacctgtctggagctggcagcagttcttggagcatcccttgccccacatgagcagtgggcccaggaccayggaggttgggccaccctttcctgcctcttttctgcacttgtgagcctgctgaattgtgctgtctgtgctgggatggagttgcaagccttgcaaggcgatctctcaacattaggaagacagtgtgcaaaagattctgtcttcttcccttttctgcccaggcaagcccttggagaaaatgaggagccaaaggaggaggctgaggaggtggaagaggagagaagcagccacaagcaggtggaagagagccggcaggtacgacagtaagacaggggaggtcctcttgcatccctaacctgtgg

SEQ ID NO: 83635 - DNA, 600 bp, Chicken  19866894380111_1
tgttccagaaacccacagcattgtctcagtacaggagtggcagcagggatagggaaggagaggtggcagtgtggtgtttggggtgtgatagccacgtcagccctttgctctctgctgtctgatggacaaatcttacgatggccattcccagccgtccgtagcctgcagacacggtctggagaaagccctgccatggggaacagatgggtttggggaacagacagatttgcagtgtgcaggagcctgcgggcacgcagacaggcacgtccgctcccaccgcgggtgccagcgctgagcagmgcagygtcccagtttgaatagcagctttgcctgtctgcatttaggattattctgatacaacgatgtgagagttgagaactaccagtgtctgcaaagcctgcggtgtcaggctgtgcttgctcaatgggaaggacagggcccgggtgtcaccgatgcatgtttaacccattcctgtgggaggcatctccttcatgtgtatgcatctcttcatgacatctgaacacctttttttgtggctgtcatagaatcacagagtggcttaggttgtagggaccttaaagatcatctagttccaaccct

SEQ ID NO: 83636 - DNA, 600 bp, Chicken  19866894380111_2
cagaaacccacagcattgtctcagtacaggagtggcagcagggatagggaaggagaggtggcagtgtggtgtttggggtgtgatagccacgtcagccctttgctctctgctgtctgatggacaaatcttacgatggccattcccagccgtccgtagcctgcagacacggtctggagaaagccctgccatggggaacagatgggtttggggaacagacagatttgcagtgtgcaggagcctgcgggcacgcagacaggcacgtccgctcccaccgcgggtgccagcgctgagcagmgcagygtcccagtttgaatagcagctttgcctgtctgcatttaggattattctgatacaacgatgtgagagttgagaactaccagtgtctgcaaagcctgcggtgtcaggctgtgcttgctcaatgggaaggacagggcccgggtgtcaccgatgcatgtttaacccattcctgtgggaggcatctccttcatgtgtatgcatctcttcatgacatctgaacacctttttttgtggctgtcatagaatcacagagtggcttaggttgtagggaccttaaagatcatctagttccaaccctctgcc

SEQ ID NO: 83637 - DNA, 600 bp, Chicken  19866894380113_1
gcttgattagtttagtctcctatggaacaagtaatttactgtattctagtgtatgatagacaggcaagttattagtactctatgtgcattcacaaattggtatctgggaaatcagtaaaatagaaataattgcagcagcaattatgtcttgtgcctagaccttctgaattaattatttctcacccactgagttcttgaaatggacatcaaacctagtaactttttcaatctacacagggaatatagaatacaccttaggtactacaaaactcttaagtctgaggtgtggtggtctcccayatttatgtagcttggcaccactgccatctctgctccatcacagctccatctcatggggcctaaccttcaggcactgctccagcacagccccacaggcagctgctaaaccttgccacrtaaatccagtatggttctacactctctttacatctttatgtgcatgtaactatatatttacatacagattctgtacacatatcagaaaggaatgtaaaatatgcataaatatatttaaacataattacactttacatatgtatatttatatacacatttatatgatatatgtgcatgtataaa

SEQ ID NO: 83638 - DNA, 600 bp, Chicken  19866894380113_2
aaatagaaataattgcagcagcaattatgtcttgtgcctagaccttctgaattaattatttctcacccactgagttcttgaaatggacatcaaacctagtaactttttcaatctacacagggaatatagaatacaccttaggtactacaaaactcttaagtctgaggtgtggtggtctcccayatttatgtagcttggcaccactgccatctctgctccatcacagctccatctcatggggcctaaccttcaggcactgctccagcacagccccacaggcagctgctaaaccttgccacrtaaatccagtatggttctacactctctttacatctttatgtgcatgtaactatatatttacatacagattctgtacacatatcagaaaggaatgtaaaatatgcataaatatatttaaacataattacactttacatatgtatatttatatacacatttatatgatatatgtgcatgtataaagattttcaaataattctaatgaggtaattaggaccatacgaaccagaagaaccagccaatgagttcatcaaatcacaaattttattttgagataaattttgagattttcacacagga

SEQ ID NO: 83639 - DNA, 568 bp, Chicken  19866894380120_1
ctaaaagaataaaacaaataaacaaactcaatgcctttggggcatggggtgaaaaggctgattaaaatgcactgcgtcttattcttccaaaggttttatcttgatgaagcagtgtttctgaaagctaaacacattaacatttcagcaaggggaaatttttttcttcctattggcttgattccagcacacatttttgcagcttccctattgcgataagcaggcaggtgtttcagtgcatgccacaggttggctagcatttctaggaagtttacagatttcacagttgcatacactgtattrcgagaaggatgctgatgaagacatatcagcttttgcagttgcaacagaaaacgtgttcatttgttagcagtttcagagggcagctctgtgctgctcaagatgccatctcctgttatgtaaacaggtttcagttgctgaaatatcagaaggactgatgtcatataccccttttctgcagatactaatggccccctcgcaacacagggagatctgtatggatgctgaggtagctccttttccaaaaacacaatggaaatctgactttgaa

SEQ ID NO: 83640 - DNA, 599 bp, Chicken  19866894380121_1
  misc_feature (1)..(6): n is any nucleotide
nnnnnnttcattaaaaataactgagcagaactgagaaagtaagagcaggatagctttaggagtcaggagctattacctgtggagagcatagataacaaccaggacagtgccactgtgcattatagccaaaatgttggtcagatggacatctatccatctctctaacaatcttgcacaatggttctacccatctctgctttcctgtggcacagaatgcagcagatgttaatgacccaataaattttgtttgtaatatccctgagttgccctggctgaaggcatgatttattgtagttttaytcataacatttagcagctaagtcctatgtctattttacccttccatgagcagctgatagtctttcttgtgtgtactcgaagtcttcatttcttccagaagcatgttatttacataccctgcataaagtcatcaaaggaacttgagagatggctggtttgcccagtttgattttctgcagaagggcaggtcctttctttaaactttggagcagcattgtacaggtgtcctctattctcccagttccctcagaatgaaaaagcctgctctgcccagtttaagacactgcttgaagtgagat

SEQ ID NO: 83641 - DNA, 600 bp, Chicken  19866894380121_2
ctgtcaaactgagctcacagccactgcctagtttaactcacttgcctcatttccttcagttcttcgctatgtatctttttatttcctgtttacatagggcctatgtgccatacacaagtctaatacaagccatgaaaagagcaaaatttacaactgagttgctgaggtatctaaagctttttccagtgtattttctgataatgaagctgatgtcttagcagagtttttgttaccccagccaggatactgaaaatacaaaatagctgtattaaagcatctttatactacaacaaagacagwtctgagattgtttccctgccatgcccttgcccataagcatgtttgactacacacgatcatcttacctccattgtgaaactatatatacccaatggcatgttcctacacgtgggcattatgctgtgggaccagatgtcaccaacacattctctcatgtcaccatgaaaagttggtggtggacaaggctgtcccttcccttccagatagcatcaggagagtgacaagctccttcttctgctcttcctgattttctagactgcttttgcaggagttattgacgttaatgggaactccagacac

SEQ ID NO: 83642 - DNA, 600 bp, Chicken  19866894380139_1
catctccatcacctctccagaagcactgctctcgaagcccgtggaacaaatggaggcgttttgctcagctgtggtcggatgttgtgttttatattcttagtggtgctggctggccttcctgcaggctggcaggtctgtgctgcttttcatgggctcctggcagcaggttaagttgataagtgctgtatctcttgtgtttttaattaggtatcaacggttgtaagtgattgttctgtttcagtcccaggtagcttattgcagtaagaagagtatccataaagcatcacactgcggtgtaawgaagagcagccttttaagtgacacaatgggcttattgatgggaatagtacacgggaaaacaagagcacaaaagaatttcagcagctgctggtgaatataggatttgtctccagtctcactgatgtgagtgcagcaccgaaagctttttgcctttggtggaagtctcctgtaggggcacagttgtaaccaacagaatttggtgcagagaggaaaaagcgtttgtacgtgtgtgcagactacagcgggcaagcaaatacgtttcttgagttccctataaacatagagtaactgcttaacttt

SEQ ID NO: 83643 - DNA, 599 bp, Chicken  19866894380142_1
  misc_feature (1)..(83): n is any nucleotide
nnnnnnnnnnnnnnnnnnnnnnnnnnnnnnnnnnnnnnnnnnnnnnnnnnnnnnnnnnnnnnnnnnnnnnnnnnnnnnnnnnntgcaagaacttactgtaagaacttactgtaaacttgagccaaagaaaagctggaaggtaactgaaatttcagaaggtcagttgctggacagatccccctggtttggcagggttcactgaagaagatacccatacgctttcagatttggatcacagaaggctactgcagttatttacgatgcaaaatggcatcagaacttccctctcccacctctgtyctcctccccaacacaagcaggagaaggaaggcccattgggttcgcttcctttgtgagatctgcgttacagcttcagacactcacaccagcatggttacggggtgcagcccggagctctctgtaggtttgctctccagtcagacaggtaagcatcgtcaccacagctgcaatgtgactcggggctgcagtgtgcacagagctccaaaacgcagcactccgggcagaagtggagcagagagggaaacaacggcagcacraagcaggacagtgagcagcaccgggtcacagtgctcacagaa

SEQ ID NO: 83644 - DNA, 600 bp, Chicken  19866894380142_2
acgatgcaaaatggcatcagaacttccctctcccacctctgtyctcctccccaacacaagcaggagaaggaaggcccattgggttcgcttcctttgtgagatctgcgttacagcttcagacactcacaccagcatggttacggggtgcagcccggagctctctgtaggtttgctctccagtcagacaggtaagcatcgtcaccacagctgcaatgtgactcggggctgcagtgtgcacagagctccaaaacgcagcactccgggcagaagtggagcagagagggaaacaacggcagcacraagcaggacagtgagcagcaccgggtcacagtgctcacagaacatccacagtggtgttcctctgctccaaacgtgccacggagtaccaacccacagcttccagcactgggagggaggggagggttaaacaagacaacaacaacaacaaaaaaaagggagggcgtctttgggtttaaaaaacgaataaatgcagagttttgccaccaaagattcaaacccgaaaggaaagggccagcagaatatggcttgctgaacatcgattttgcatactgttacactgcttcaagtttatttctaaaa

SEQ ID NO: 83645 - DNA, 600 bp, Chicken  19866894380144_1
caaatcatgttctccctcattcagaatcaaggcagcattctacctctttcagggcctttctgagcctccattagcattccaaatttgatgcagcaaaaagctgatttgttcccacaggaaaaatacagattgatttctaaaagtatggtccattatcttccttgtgccctcaaagccacatttggactacaatcagtgacgtctgctgagctagctgagcattagtcctgactgtcatttgaccattaatcctttggttgctgtatggcacaaacgttagttttgttggcctgctgaagrgttctgtgaccttcaccactgtgtgttaactctgatgtcagatagaaggcccaattgggaccttcatattcaaaagtttctacaaaaaatagcagggagaagggctaagcactgatgtttttaaggccaaattgtactccataagctacagagaagccttaatccttcactcagaggtatcacgttgtatgatgttcttcctggtcaaaattgggttacatgcaatgaaatgtttaatataaatgacagtttttaaggaagtgataatagaaatgaagaaaaaatattcctgtatagtac

SEQ ID NO: 83646 - DNA, 600 bp, Chicken  19866894380158_1
gacaaaaaaaaaaaaaaaaaagggatggggttcgtcaaactggcacaagttgtttgctcagtgctaataaggtggtgttgacagctgagcagaagaacagttacagattttttcactgttagaggcttggagaacttagttttatgttggaatactacatttaaatgagcagagagtcttgtctttgtttttgcatcatccttgtctatcttttactttcattacttgccactgcattgtttttgttgcatatacatggcctcagttttggtagctctgaggggtgtatgaagtgtcagyaaatattaacaaatcccttgcagtgctggtacctcaagggacttcattttcttttgggtatctgaaacaaccctcctcttctctctgtacctcaattacatcacatatgctgtattgataaaatactttaacttttcttttcttacttattggagccatgtctctgaaatcactttcaaatgggagaatattgcactacagttgtgatggtcctcccaagctgctgttacctgmgatgctttgtgctgctgctgctacaaaaaaaaacaggtctttgtgttgatacagtcggggaacaaa

SEQ ID NO: 83647 - DNA, 600 bp, Chicken  19866894380158_2
cattgtttttgttgcatatacatggcctcagttttggtagctctgaggggtgtatgaagtgtcagyaaatattaacaaatcccttgcagtgctggtacctcaagggacttcattttcttttgggtatctgaaacaaccctcctcttctctctgtacctcaattacatcacatatgctgtattgataaaatactttaacttttcttttcttacttattggagccatgtctctgaaatcactttcaaatgggagaatattgcactacagttgtgatggtcctcccaagctgctgttacctgmgatgctttgtgctgctgctgctacaaaaaaaaacaggtctttgtgttgatacagtcggggaacaaaccatcactttaaattgcacctgtaggcagagaggtgatctcactcaacatcactctctggctatatctgacctctgtaacacatctctgccacatggacaaaaccatggttttgcttcacatagcccagaagaactcgaggaagaagaaaccagctctgttgcactggattcaagcagccactgtctccagcttccacactgcaacatgtaaggactgctcagctgaacagcga

SEQ ID NO: 83648 - DNA, 600 bp, Chicken  19866894380159_1
ttgcactcacatactgctgtgctgaacagcacgtacctacctgcatctcatgcttctttctgagcatttaacattttgaactgataatttctaatgaactttctgacagagggtggctttccttcttctcatttcccttccctatctcccagcagcgtgtcaaatgattacaattatttcctccaaaaaaatccagacagtgacaattaaatgttttaagatttcaaactgattcataaaaactcactttttcctgtgaaacgtgcttgtcgcagaacttccctttatttaaaaaatcasttttccatcagaagaattctcatcggagagttttcctcccggcctttgattcagcatccagtcctgctaacagttcctgaggtgcaacatctgctgacttcagtcagagttgcaccccagtaattgaaagcagagttctgtctgttatttgtaagctgtgttgaatggacgaaaccttacggtgactgaagtgttaggattagcagcaaagcgatcctctcatttaatcctccactctactcacacgtatcagataagaaatgtttaataaactgcggtgtcatggtgagggtgacgtac

SEQ ID NO: 83649 - DNA, 600 bp, Chicken  19866894380160_1
gaacgttgtctaggttttgcttgtaagtaagttgtttggtagtgttttattttgtattggctttttccagaatagagcagtaggagtgtaagtaaaggtgtaacttcccaatatgtaatttacatccagcaatggtaaacagtagctgactacaggatataaaagaatattaagaatgtaccagccatgccagtcttttagcttcaaaaatctgttgcttgaggacttcacagactgctcaaaaacagtagaataatgaagtctttctgactggctttagaaatagtctgctactgaagwcagtacaaatggaaacatggtgtcagcaggtggtaaaatatgtaaatgttatcatttactttgaggagtttgttgactgtgctaatactgaagtcttggcgctgcattatttatcacagttctgctttaagcactgtcaaaaatcctttacctatgacatattatcactcaatgacagagaagaacgaccaatctaggatacgtacaaatgctcagttcaaaatgaaaaaaaaatatgtgaaaatgtgtatataattgattcccaaaacatgtttttatcttagaggtctgggagattat

SEQ ID NO: 83650 - DNA, 600 bp, Chicken  19866894380166_1
cagcttctctgggcagcctgtgccagtcctcattgccctctgagtaaaaaaaattcttcctaacatctaatctaaatcttttggcttaaaaccattccccttgtcctgtcactatcagaccatgtaaaaagccagtccacctcctgcttgtaagctcccttcaagtaccaggagtctgcagtgaggtctccctgcagccttctctaaacaagaccagctccctcagcctttcttcataggagaggtgatccagccctctggttatctttggcccacctctgaacctgttccaacagctcyacaaccttctttttctaggggcccctgtacctggatgtagtgctccagatgcttgcaagggcagagtagagggggacaatcacctcctcaccttgctgacacaccttttttgaggcagcccaggatactgttggccttcttagctgcaagagcacattggtggctcatgtccagtttttcatccaccagaacccctaagtccttctctgcagggctgctctcagagttcttctcccagtttgtactcaaatttgtgactgacacgacccaagtgcaacagtttgcacttggctctcttta

SEQ ID NO: 83651 - DNA, 600 bp, Chicken  19866894380175_1
gtacaggctgatgtcagtgttattgtggtgttacgtcagtcagaacaggctgacattggggccatcacagtgttacaacagtccatagaggccgatattggtgctgccatgctgttatgtcagtcaatacagcctgatgctgctgtcctcatggtgttctatcagtcagtacagcctgatgttggtgctgccatggggtgtcagttggaccaggctgacattggggtcctcgtggtgttacgtcagtcagaacaggctgacattggggccatcacagtgttacagcagtccatacaggcygayattggtgctgccatgctgttatgtcagtcagtacagcctgatgctgctgtcctcatggtgttatatccatcggaacagactgatgttggggtcctcatgctgttatgtcagtccttacagaccaatgttggtgtctctgtgctgtcagtccatacagactgatgttggtgttatcacagggttctatcagtgggtacagattgacattggtgttatcacagcgttatatcagtcaatgcacactgatgttggtgttattatggtgctatatcaatgggtacagactgacattggtgt

SEQ ID NO: 83652 - DNA, 600 bp, Chicken  19866894380175_2
caggctgatgtcagtgttattgtggtgttacgtcagtcagaacaggctgacattggggccatcacagtgttacaacagtccatagaggccgatattggtgctgccatgctgttatgtcagtcaatacagcctgatgctgctgtcctcatggtgttctatcagtcagtacagcctgatgttggtgctgccatggggtgtcagttggaccaggctgacattggggtcctcgtggtgttacgtcagtcagaacaggctgacattggggccatcacagtgttacagcagtccatacaggcygayattggtgctgccatgctgttatgtcagtcagtacagcctgatgctgctgtcctcatggtgttatatccatcggaacagactgatgttggggtcctcatgctgttatgtcagtccttacagaccaatgttggtgtctctgtgctgtcagtccatacagactgatgttggtgttatcacagggttctatcagtgggtacagattgacattggtgttatcacagcgttatatcagtcaatgcacactgatgttggtgttattatggtgctatatcaatgggtacagactgacattggtgttat

SEQ ID NO: 83653 - DNA, 600 bp, Chicken  19866894380202_1
aaagggaaaatagtgactaagaatagagcagagctcagagccaaagagcaaacaagaacccagaacaaatgtgattaagacctataacgtttaaactgcttccaacttccctctttcattgctgctcctcaggcgctataaacaaggaattgaaggcaggaaacacacaagctctgaaaagtagagttgatctatgtacacaatacatctagtcctgaaagagaatgtaaaagttttcatatcagctgaagactgaacagacgggagggtggagttgtcatgtgtcacagccaaagtctyaaacacttacacttaaatggttcctaattcatgtttacttttaaatgctctgaaaggtatttggcattcaggtttgaatatttaccatatttaacaaatagcaaagacctatactgcttttaaatttccttttgacgagcttgtttccatatatatttaagtaaatatggtttctctgagataaaacaaatattatcccaacatctctatatatggctaaagaatcacagctgttttaaagaaggtcgtatacaaaatttgtaagagctaagaatacaactgaactccataaacagtctt

SEQ ID NO: 83654 - DNA, 600 bp, Chicken  19866894380202_2
aacaaatattatcccaacatctctatatatggctaaagaatcacagctgttttaaagaaggtcgtatacaaaatttgtaagagctaagaatacaactgaactccataaacagtcttgaaaatgctactaaccttaacccttttattgtggacaccacaaaaaccacttgatgcactatttcttcttgtggttacccgctcactgcccagcattaccccatttcagacccacaaaggtagctgtgacaacctgactgcaacatacgatatgcgggtcttactggaaggagaagtgagaacygaagccacaagatccatgacagagggtcaataacacactggtttatatggcattaaagtgagaaagaggaaaaacacatgtattccagaagggctacaacatacgatctcacctccatacaacctagtaattagaaattcgttgcctcaaacagaaacagagacaagggaaactggtagaaaacacaacattaggcaatactcttgtatttttggatttgtggaactgaaacattttccaatgtaaatgcaggcacagtactaccacctcaggaaacttcctccccttggttgtcttttg

SEQ ID NO: 83655 - DNA, 599 bp, Chicken  19866894380208_1
  misc_feature (1)..(14): n is any nucleotide
nnnnnnnnnnnnnnactcccactatggcctccttctccttctcacaattcactacttcacttactgaccagagtattcacaatcactcggcatttcttgaaaaaagtaatacctaattgttttatcttttgcatgggaattcagggtcttcattcccgagcataccaagcaaaagcttccttggactatggaagaatgagctaccctgaacttctgccacctaaagatttccagaataaccaggtaggagtagacaaaaatacacgttaacactaactggctgaagtggaatgaagaatyttgttttgagcatgtgtatttgtcctttccccctgctttctccttgactgattgatggccaaaagatttgcagttagtgcagctgttggccattcagtctgatctttggtccaggggagcttggaaaagctttaaaaccaacagctttaaaccaaaaactgttgaagagataggaacagaaagttttgtgtcttttatgtgaaatgtggctgcctgcttatgctgcaatagaagctcttactaaatcagtaatatttcaggttaaatcatttgctaattacataatgaatagccttccc

SEQ ID NO: 83656 - DNA, 599 bp, Chicken  19866894380211_1
  misc_feature (1)..(92): n is any nucleotide
nnnnnnnnnnnnnnnnnnnnnnnnnnnnnnnnnnnnnnnnnnnnnnnnnnnnnnnnnnnnnnnnnnnnnnnnnnnnnnnnnnnnnnnnnnnnaagtgctggggaaatggagaggtacggagaaggtgtatgctgtgctaggttgaagtccaggtgtgtgagggcatgaaatcatggcttcattttaatgtgcttttaagtcaagtgggagctctttggagcaaagcgagcaactgctcaaatgctccacagtgccacagagctgtcttcttccagaagagacccccacgtgcagttaaarctcggggggcagttccacagatcatggggcacccagttaacctctygtgtggtctgttcagctgcagaacgaagaggagccaggtgaggctgcaccagtggtcagtgatgcccctccgccctacagcagcatttctgcagagaatacaggtaagtgcagcggaaaggaaggagctaggtytgctctgttgttctttcttacctccttaattgttctccatattgacagatggcattgcattatccttaccaaagcgacaaaggatgagaattgatccagagacgctattgttacttgtg

SEQ ID NO: 83657 - DNA, 599 bp, Chicken  19866894380211_2
  misc_feature (1)..(46): n is any nucleotide
nnnnnnnnnnnnnnnnnnnnnnnnnnnnnnnnnnnnnnnnnnnnnnaagtgctggggaaatggagaggtacggagaaggtgtatgctgtgctaggttgaagtccaggtgtgtgagggcatgaaatcatggcttcattttaatgtgcttttaagtcaagtgggagctctttggagcaaagcgagcaactgctcaaatgctccacagtgccacagagctgtcttcttccagaagagacccccacgtgcagttaaarctcggggggcagttccacagatcatggggcacccagttaacctctygtgtggtctgttcagctgcagaacgaagaggagccaggtgaggctgcaccagtggtcagtgatgcccctccgccctacagcagcatttctgcagagaatacaggtaagtgcagcggaaaggaaggagctaggtytgctctgttgttctttcttacctccttaattgttctccatattgacagatggcattgcattatccttaccaaagcgacaaaggatgagaattgatccagagacgctattgttacttgtggtttagaatatgcattttggctgcattcatctgatgtcatcctata

SEQ ID NO: 83658 - DNA, 600 bp, Chicken  19866894380211_3
attttaatgtgcttttaagtcaagtgggagctctttggagcaaagcgagcaactgctcaaatgctccacagtgccacagagctgtcttcttccagaagagacccccacgtgcagttaaarctcggggggcagttccacagatcatggggcacccagttaacctctygtgtggtctgttcagctgcagaacgaagaggagccaggtgaggctgcaccagtggtcagtgatgcccctccgccctacagcagcatttctgcagagaatacaggtaagtgcagcggaaaggaaggagctaggtytgctctgttgttctttcttacctccttaattgttctccatattgacagatggcattgcattatccttaccaaagcgacaaaggatgagaattgatccagagacgctattgttacttgtggtttagaatatgcattttggctgcattcatctgatgtcatcctataaagtgctgttcagttacattgcacagtgttctgagttgattgaaggcagttaaaatcaaagtgctgtgaggctttgtggttccctcatgttatttagctatggtactccttccaaaaaggacttgttacttaaaa

SEQ ID NO: 83659 - DNA, 600 bp, Chicken  19866894380211_4
gttctttcttacctccttaattgttctccatattgacagatggcattgcattatccttaccaaagcgacaaaggatgagaattgatccagagacgctattgttacttgtggtttagaatatgcattttggctgcattcatctgatgtcatcctataaagtgctgttcagttacattgcacagtgttctgagttgattgaaggcagttaaaatcaaagtgctgtgaggctttgtggttccctcatgttatttagctatggtactccttccaaaaaggacttgttacttaaaagggattaamgaattcatgatttctgcagttttcagtaactaagaacttggtcataaggtcacacttcttctgaatcatcatgctgtcatgtaactcactaatagctttgagcaaaagagattttctttgtatgctggttctgtatcggtgtgttttagcttaggtaaatgttttcattttttcccctccggaacttctgttgtcaactttaaagaagatttgtgaatcaaatgcgagtcagtatctccaataaccagccggccttggctaggagttggggggctgtgtttctaaagctgactgttggat

SEQ ID NO: 83660 - DNA, 600 bp, Chicken  19866894380211_5
caaaaaggacttgttacttaaaagggattaamgaattcatgatttctgcagttttcagtaactaagaacttggtcataaggtcacacttcttctgaatcatcatgctgtcatgtaactcactaatagctttgagcaaaagagattttctttgtatgctggttctgtatcggtgtgttttagcttaggtaaatgttttcattttttcccctccggaacttctgttgtcaactttaaagaagatttgtgaatcaaatgcgagtcagtatctccaataaccagccggccttggctaggagttmgggggctgtgtttctaaagctgactgttggatatcctgcctcagcacgctcattgtaaagatgcccctattagttccgattccttggtgtgcctgaggaactgcggctcagaaatgcgctttgatttttgtcccagtccattccttgcaccaaaaaaactgttaggagtctttctctggaaacattgcttgccagcaatctgaggctcagagtgattcttcttttgactcactcagactgtttgggattcataaatgaaactacttctgttttattgaaggacagatgtgtgtgtcattg

SEQ ID NO: 83661 - DNA, 600 bp, Chicken  19866894380214_1
ttatgctgtttttgaagggttactgtgatggaaactcagtgtggaccaacccttgtaacatacattattttctttatctcttcctcctttgtaaagttattaagtaatgcaaagtttcaatttcttataaagtcatatagtttagctgcgcatcttaaatagatatagttgtaagagtgccaatacttttaagataattacagtacagaaattctcattaaaattcatgattgagtctggaccttgagtgtcattttcatgttaatctaaccagagggattttgcaaatctggtcatccrtctctccctctacaggcagaatgtggcaaccaccaagctggttccaggtttcctgcaattggcctgrtgtgtcttaaggcataaataaataagtaaataaataaataaatgtgagagatgtatatgaacagcacaggaaaggtgaatattcatcctctgtaatactgttttatagatgatgcttcattatattataaagagtaacttcaccttttcttatgcagttgaaggmtcaggatgtcagcaccgagagggcagacaccaaacaagagaacttctctaggcagcgcatatttgaaa

SEQ ID NO: 83662 - DNA, 600 bp, Chicken  19866894380214_2
ttttctttatctcttcctcctttgtaaagttattaagtaatgcaaagtttcaatttcttataaagtcatatagtttagctgcgcatcttaaatagatatagttgtaagagtgccaatacttttaagataattacagtacagaaattctcattaaaattcatgattgagtctggaccttgagtgtcattttcatgttaatctaaccagagggattttgcaaatctggtcatccrtctctccctctacaggcagaatgtggcaaccaccaagctggttccaggtttcctgcaattggcctgrtgtgtcttaaggcataaataaataagtaaataaataaataaatgtgagagatgtatatgaacagcacaggaaaggtgaatattcatcctctgtaatactgttttatagatgatgcttcattatattataaagagtaacttcaccttttcttatgcagttgaaggmtcaggatgtcagcaccgagagggcagacaccaaacaagagaacttctctaggcagcgcatatttgaaaggagaataacagcaccacaagatgttctggaaaccagaatcaaacataaatttaaaaaggatggatt

SEQ ID NO: 83663 - DNA, 600 bp, Chicken  19866894380214_3
gagtctggaccttgagtgtcattttcatgttaatctaaccagagggattttgcaaatctggtcatccrtctctccctctacaggcagaatgtggcaaccaccaagctggttccaggtttcctgcaattggcctgrtgtgtcttaaggcataaataaataagtaaataaataaataaatgtgagagatgtatatgaacagcacaggaaaggtgaatattcatcctctgtaatactgttttatagatgatgcttcattatattataaagagtaacttcaccttttcttatgcagttgaaggmtcaggatgtcagcaccgagagggcagacaccaaacaagagaacttctctaggcagcgcatatttgaaaggagaataacagcaccacaagatgttctggaaaccagaatcaaacataaatttaaaaaggatggattattgcaagggagaaagtcccagcaagggctgttgaacacagtggtaggaatgcaacttctctttcaaaaaagcccttaagcagcagatggctgggtgggtaagctgaaggaactggctttggttctcctattccttctcacagcattggctgctaccagaggcag

SEQ ID NO: 83664 - DNA, 518 bp, Chicken  19866894380231_1
atgcatccatctgctctaagcgtggtgggctgctgggatcctgtaggagctgtggtttgggtgtgctctgcatggctgcagtgcaagcaggcaactttgcctttatgacaattgtgctcctgcctgatttgtgttttttttttttttctcttgttacctttctccttacagaacttcgaggtggaagctgatgacctggtgactatttcagagctgggcaggggggcctatggtgtggtggagaaagtgaggcatgctcagagtggcaccatcatggccgtgaaggtgaggatggcttcytcctggtggggaagaggagctgtggggtagaatggggtgtcagagatgggggcttgttggatttggcagcctcctgtgtccccttgcagcccaatgtggccctcaggtggggtcatccattatggggctgtttgtaagaggtcatctgggcacctctgggggggtgtgcaggctacagaactccacctacatcaaaacctttttttccttaatattta

SEQ ID NO: 83665 - DNA, 600 bp, Chicken  19866894380250_1
acagtgtccagctgtgtacggcagaagaagaatgtctgccataatttgcagacaaggggtatagaagtgttgctagcaggatacaatcttatgagtatgaaatctataaaggaagcacaatgcagtatcacacatccaggaagcagtagaaatttatgcggtcaagaaagtccatgacaggtccccaggtagaagtctatggaatccttagtagcagatttaaaatagggtctagctaatctatcaatttattctggagggcacagacatcaggttagctagaggtgaaaacagttagaraaggaaacacgttctcaacaaagcacaaaatcctgttgttaaatattcagtacttcctccttattccaattcctctaaatctttaagtattttttatcattataagctgttaggttaacgtcaatcacagaaggtacaggtagacttaatgtttctcatagtatgagaggaagattggatgacagaggtctttctaaagcctgagatctttctccacaatttaggttcctctactctaggagatttacctcttcttccacatttctttggggctggcaatttaattgcataagtcacaaa

SEQ ID NO: 83666 - DNA, 600 bp, Chicken  19866894380253_1
aaaatgatgcaatgtaactgagaagctgcaaacacagacctcaaatgtaagggggaaaaaaacaaagctaaacttgtgaattgaggcctatgatgtgaatcagtaccacgcagggcgttagaagaaacgttgaagggaagaataattaaacacttgggagacgggatagaatgcaacatggatgtcatgccagacatactggacatccttctctgacatacactgaggcattatttttttcccccctcaagaaagatatatatattagatctcatctatttgaatctctgcaaatctttraattgtaatcaatgacaaagaaaataaaaataaacacagaagctgtaagacaaaagggaaaacrgttattgaaaagaaaacacttcttagctatactggtaccttgcaaggttactaacccaccccataacgtagccaggatgacactgatcccaactgcacagtgcactggcatgttttacaaggcactggcaagctttactctggaatacgaggcacagcacaggtcactcaggaactcaaactgcaagagatgagccacgtgctgctgaggagaaggcagccatggaaaggccacta

SEQ ID NO: 83667 - DNA, 600 bp, Chicken  19866894380253_2
aagctaaacttgtgaattgaggcctatgatgtgaatcagtaccacgcagggcgttagaagaaacgttgaagggaagaataattaaacacttgggagacgggatagaatgcaacatggatgtcatgccagacatactggacatccttctctgacatacactgaggcattatttttttcccccctcaagaaagatatatatattagatctcatctatttgaatctctgcaaatctttraattgtaatcaatgacaaagaaaataaaaataaacacagaagctgtaagacaaaagggaaaacrgttattgaaaagaaaacacttcttagctatactggtaccttgcaaggttactaacccaccccataacgtagccaggatgacactgatcccaactgcacagtgcactggcatgttttacaaggcactggcaagctttactctggaatacgaggcacagcacaggtcactcaggaactcaaactgcaagagatgagccacgtgctgctgaggagaaggcagccatggaaaggccactagaaaacttgagctcagtgaatcccgccaaaaagacggctgtctgttgtctgtgtgagcaagcag

SEQ ID NO: 83668 - DNA, 600 bp, Chicken  19866894380259_1
ttgcagggactcaggattgagaacaatgactcggtttcttgctagcagagctaaggagatctttggcaacaagatgagtcagagtaggcagaggagtgaacatctgcctatggctgaagcaagcacagcaaagccataacctctcacactacaagaaaggcattgcatttcttggactgttataatattgatttcaacgagttctaattacgtctgtcacatcttttggcttacagaggtacaaagcacccatgattcctaggacagtcaagtgcaaactaagtgaccatgtatatattkgcgttgtaccttccaatcatattcagacaagaaaacagcataaaccacatgttcctcaaatgagaggatgtttattcatgtagatgtcatctcagacattgcaaaacatagccttcccacttcttcccagtgctgtgcaagacccatcatcctcaaagcagccaacattttctgtcttcagaatgttcctcactcaaacatgttcttggcaactctgcacagagaggtcacacgcagacaactgaccttgagcaacagtgtcacctgcagcactgtgtccagtgcacattcttctgcact

SEQ ID NO: 83669 - DNA, 599 bp, Chicken  19866894380267_1
  misc_feature (1)..(101): n is any nucleotide
nnnnnnnnnnnnnnnnnnnnnnnnnnnnnnnnnnnnnnnnnnnnnnnnnnnnnnnnnnnnnnnnnnnnnnnnnnnnnnnnnnnnnnnnnnnnnnnnnnnnnccagtgaaatcaaatttgaggatgaaaactgggcccacttttgcaaataccagtccagcatccaggagtcctggcttccgttcctccgagtgttaccagttttcttgtggaagctcaaatgctttatgccagagaaaccaatgctacaaaacactgtgaggcaatttgatgttaggaggatataacccaaactaatctyatctaggttgtgaggagtatctctttttgaaggacaagaatcttcagagagaataagatagagctttgaaggactgtaggtggaatgagggtgaaagacaaaatacttatgaagaggttccttctgatgccagcagaattacatgcgataaatgaaatgtatcataagatgaaacagatragaaaaaattaaggaacctctccccagaatttttagracgcagtatagtttctaacctttatcttttgcaatgaaaatcatgtagaatttccactctstgtagttttagaagttagtaa

SEQ ID NO: 83670 - DNA, 600 bp, Chicken  19866894380267_2
gttcctccgagtgttaccagttttcttgtggaagctcaaatgctttatgccagagaaaccaatgctacaaaacactgtgaggcaatttgatgttaggaggatataacccaaactaatctyatctaggttgtgaggagtatctctttttgaaggacaagaatcttcagagagaataagatagagctttgaaggactgtaggtggaatgagggtgaaagacaaaatacttatgaagaggttccttctgatgccagcagaattacatgcgataaatgaaatgtatcataagatgaaacagatragaaaaaattaaggaacctctccccagaatttttagracgcagtatagtttctaacctttatcttttgcaatgaaaatcatgtagaatttccactctstgtagttttagaagttagtaaaaaagtccttagccacaatgaaagcacagtgtggataaacaccttsgtttgtctggatggcagccccagctgaggtgaactgtatgtttacttaagaaggcaaagtacacacagctaatagcttctgctggagcagaagtgcataacgtgttgctcagaggcagcagctttctcctgggca

SEQ ID NO: 83671 - DNA, 600 bp, Chicken  19866894380267_3
aaatgctttatgccagagaaaccaatgctacaaaacactgtgaggcaatttgatgttaggaggatataacccaaactaatctyatctaggttgtgaggagtatctctttttgaaggacaagaatcttcagagagaataagatagagctttgaaggactgtaggtggaatgagggtgaaagacaaaatacttatgaagaggttccttctgatgccagcagaattacatgcgataaatgaaatgtatcataagatgaaacagatragaaaaaattaaggaacctctccccagaatttttagracgcagtatagtttctaacctttatcttttgcaatgaaaatcatgtagaatttccactctstgtagttttagaagttagtaaaaaagtccttagccacaatgaaagcacagtgtggataaacaccttsgtttgtctggatggcagccccagctgaggtgaactgtatgtttacttaagaaggcaaagtacacacagctaatagcttctgctggagcagaagtgcataacgtgttgctcagaggcagcagctttctcctgggcaactgtctgcatagcgtgctaacacacaagatgagaga

SEQ ID NO: 83672 - DNA, 600 bp, Chicken  19866894380267_4
ggatataacccaaactaatctyatctaggttgtgaggagtatctctttttgaaggacaagaatcttcagagagaataagatagagctttgaaggactgtaggtggaatgagggtgaaagacaaaatacttatgaagaggttccttctgatgccagcagaattacatgcgataaatgaaatgtatcataagatgaaacagatragaaaaaattaaggaacctctccccagaatttttagracgcagtatagtttctaacctttatcttttgcaatgaaaatcatgtagaatttccactctstgtagttttagaagttagtaaaaaagtccttagccacaatgaaagcacagtgtggataaacaccttsgtttgtctggatggcagccccagctgaggtgaactgtatgtttacttaagaaggcaaagtacacacagctaatagcttctgctggagcagaagtgcataacgtgttgctcagaggcagcagctttctcctgggcaactgtctgcatagcgtgctaacacacaagatgagagaatgaggactcttcaagtctttcctctacctgctccaaaaaacttcgctgaaccagggcttt

SEQ ID NO: 83673 - DNA, 600 bp, Chicken  19866894380267_5
agagagaataagatagagctttgaaggactgtaggtggaatgagggtgaaagacaaaatacttatgaagaggttccttctgatgccagcagaattacatgcgataaatgaaatgtatcataagatgaaacagatragaaaaaattaaggaacctctccccagaatttttagracgcagtatagtttctaacctttatcttttgcaatgaaaatcatgtagaatttccactctstgtagttttagaagttagtaaaaaagtccttagccacaatgaaagcacagtgtggataaacaccttsgtttgtctggatggcagccccagctgaggtgaactgtatgtttacttaagaaggcaaagtacacacagctaatagcttctgctggagcagaagtgcataacgtgttgctcagaggcagcagctttctcctgggcaactgtctgcatagcgtgctaacacacaagatgagagaatgaggactcttcaagtctttcctctacctgctccaaaaaacttcgctgaaccagggctttgttcaggaaggagaaaaaaaaaaaacgtgatgagaggtagtgagcaaacatgcagtgagctcaccat

SEQ ID NO: 83674 - DNA, 547 bp, Chicken  19866894380268_1
tcacatgtccctttcattaaatataaggatagcattgatggtatttgaaaatccagttttcagttagattgtgagaggttaggagtatgctttggctcaattccagagcaactggaaatgatgtaccattcagctacataagaaaaaaagaatcagcaagtccatttggtaggttacaggtgtggttttgtgtttaattcttttcaccttgttaatcagaaaattcattacttcaaggaggaggatacagagagaccacattgcatccagacagtcccatgtgcaacaaagctgaagcaygaaggagtgaaagaatcatagaatcatagagtcgctaaggttggagaagacccacaggatcatccagtccaaccattcgcccttcaccaatggttcttgctaaaccatgaccctcaacacaacatccaaacgctctttgaacaccaccagggcttggtgactccaccacctctctgggcagcccattccagtgcctgaccaccccttttcagagaagtagtatttcctaatgtgcagcctgaatctt

SEQ ID NO: 83675 - DNA, 600 bp, Chicken  19866894380275_1
ggaggctgcagcacacagatgtggaagcagaagagcagcagtgtttgaaaattgattctaatagatgttgtagtggtgacctgtttccagtacagaaagcgaattgctgcaaggcagcgtgtgatcgtgatagctgcctacacgtgcataccaaggaatccataaaagcaggctacttctcagtctgtttcagtatttaagttcagcctgccttatgccagtgcatgtgtacgtgctgatacagtcggatttaattcagcattgctagcagaaggaagggaagaagcctgttggccctcygcatctcttcaggcaggtgagttgggacctgtgaaccaggagtgcttgggagaggtcagcacagcctctgggtgaggtgaaacctttgtgctctgctgggaacacagctctggtttcaaagtgccaggctgtacctaagagcactgtgtgctaacgtaactatcctctactatttcagagctatcgtgtgcagtagagggtttttattcattcgtyacatcaagaatgtagctcaacagaaactgctgtcctgtcggtgccgtgaagagggggaggaagctggaatgtcatgctttaaat

SEQ ID NO: 83676 - DNA, 600 bp, Chicken  19866894380275_2
gccagtgcatgtgtacgtgctgatacagtcggatttaattcagcattgctagcagaaggaagggaagaagcctgttggccctcygcatctcttcaggcaggtgagttgggacctgtgaaccaggagtgcttgggagaggtcagcacagcctctgggtgaggtgaaacctttgtgctctgctgggaacacagctctggtttcaaagtgccaggctgtacctaagagcactgtgtgctaacgtaactatcctctactatttcagagctatcgtgtgcagtagagggtttttattcattcgtyacatcaagaatgtagctcaacagaaactgctgtcctgtcggtgccgtgaagagggggaggaagctggaatgtcatgctttaaatagggcagctgcttctgtgggcccacaaggatagggcttggacagcaaatatttaaagctgagggagagaatttacagttgttgaagctagcttcccagctacgttttcctagaagctgtgtgtttagcagtaagagatggagagcttcttttcttgcatgcaacaggacaagggaaggttgctgggtgatttcaaagtgatagctccttcagttct

SEQ ID NO: 83677 - DNA, 599 bp, Chicken  19866894380284_1
  misc_feature (1)..(51): n is any nucleotide
nnnnnnnnnnnnnnnnnnnnnnnnnnnnnnnnnnnnnnnnnnnnnnnnnnnaactggggctggatggtgggggggggggagcacactgagggaacagatgaaatgctgctgtcagcagcaacctgaggagagcaaggtccttctgagctccgtggagcactccccacgcctccagcccgggcacaattcacctccaggtttttgtgccccctccgctcggtgacagtgggcatcccaatggtgtggcactgagcaccctggagctcggcactgctggccaatggcaccagagcaatgtgrggtgacgactgagccgaggggtgtccggggacccctgtgccctgctgggagcagcagtctcaattccccatttgcaggagcrtttccttgagcccatagcagctgtagggcaccgtgatccccaaatgactttcggttcccctgcggcaccacgagtggggcagagcgacctgggcctgtgagtgggggcaccactggccatgggagcgctcggacagggcttggggcagcccgacccggtggaaggactgctgtaggacwgctgtaggactgctctacggaccccttggcacgctccc

SEQ ID NO: 83678 - DNA, 600 bp, Chicken  19866894380284_2
acactgagggaacagatgaaatgctgctgtcagcagcaacctgaggagagcaaggtccttctgagctccgtggagcactccccacgcctccagcccgggcacaattcacctccaggtttttgtgccccctccgctcggtgacagtgggcatcccaatggtgtggcactgagcaccctggagctcggcactgctggccaatggcaccagagcaatgtgrggtgacgactgagccgaggggtgtccggggacccctgtgccctgctgggagcagcagtctcaattccccatttgcaggagcrtttccttgagcccatagcagctgtagggcaccgtgatccccaaatgactttcggttcccctgcggcaccacgagtggggcagagcgacctgggcctgtgagtgggggcaccactggccatgggagcgctcggacagggcttggggcagcccgacccggtggaaggactgctgtaggacwgctgtaggactgctctacggaccccttggcacgctcccacggccaacaggaaggcggatgccgtgcaccgtggagctgtggggtcctacgccggcacggtgctgcttcagccccatttctt

SEQ ID NO: 83679 - DNA, 600 bp, Chicken  19866894380284_3
agctcggcactgctggccaatggcaccagagcaatgtgrggtgacgactgagccgaggggtgtccggggacccctgtgccctgctgggagcagcagtctcaattccccatttgcaggagcrtttccttgagcccatagcagctgtagggcaccgtgatccccaaatgactttcggttcccctgcggcaccacgagtggggcagagcgacctgggcctgtgagtgggggcaccactggccatgggagcgctcggacagggcttggggcagcccgacccggtggaaggactgctgtaggacwgctgtaggactgctctacggaccccttggcacgctcccacggccaacaggaaggcggatgccgtgcaccgtggagctgtggggtcctacgccggcacggtgctgcttcagccccatttcttggtccagcaccagatctcaattccccatttgcaggacacagggcatgccggccttcaaacagctttcacttccccccatcacttcgctgacgcctcggtcatctgattgctgcccaggtataattggaggagccccagggggagctctgtgttgtgctcagcgccgagatgggccgcag

SEQ ID NO: 83680 - DNA, 600 bp, Chicken  19866894380287_1
cctaaccctctgaaaattaatcattcagaatgtacagatttgcatgtgtcttattacctgaaagaccacagatataatccaagtgtgttgtctcaaattagagcacaaagttctctgcaatggcagatcagagctggtagttggagttaattctccaactgccaggattttaatgaggtttcatctttattctctcactgatattcaagaagaaaacttgaatgaaatgaagggctggacagagttggatatgatgggtataagagtggtgttacatgagaccatacatgtaaaaaaaaraaaaaaaaaaaaagcataaagaagaaaagcagaaaagcttaaaaaatgtgcaaagtctttctttcatttcttcccttgaagaagatgacaagaagtgacaagaagcatctgggaatagaggagtagtattgttagctggaacaatattactactaagcatctctttctgctgtttccttttatagcgtgatattggatatagctaacttgttctaagagagaagtggcaaaatgaaatatacactttccagctctatacagtttgctttattccagtccatcaaagaactatccctaaag

SEQ ID NO: 83681 - DNA, 600 bp, Chicken  19866894380287_2
gattgcaaatgcaggcaacaatgcatatgcatagagtatgcctgtatacctatatatgtcataccaatgtattcactgtctttaaaccagtaagtgctctttcacagatcattagctctctataacctctaactgcccaaattaagttttatgcattgcttttgcttttcctttcctgagcccctctagggcacaggaaaactaagagccctatattgtgagccaaagcagccattgtgtaaggcagagagctcccttggtctagccagccagaccacagacatggcagaaatctcagtyctgcttagcactgcaaccatgttcttctgttcacttggtgaaaatacacatatatatacacatgcatacatacatatcaaaagtgaaggcatcatctgataatcttacagatgaatgaagaatacaaacattattgagatatcattagattttaggtgctctggtcattgaaagagaaatacagcaatggtgtccatttcagtcattccagtttgaacacatgcaataggagatctaagttcaaactcttttttcagtatcagacagttaaaccactcttcttcacaaggatgtcctaga

SEQ ID NO: 83682 - DNA, 600 bp, Chicken  19866894380287_3
acatgcatacatacatatcaaaagtgaaggcatcatctgataatcttacagatgaatgaagaatacaaacattattgagatatcattagattttaggtgctctggtcattgaaagagaaatacagcaatggtgtccatttcagtcattccagtttgaacacatgcaataggagatctaagttcaaactcttttttcagtatcagacagttaaaccactcttcttcacaaggatgtcctagaagtgatcctgtgggggtttgttctccgcacctcttgacaaagcagagttcaaggttttstatagttcagtgctggagcaaggttgaacattattggatgtggcaatctcagctgtgaaggaaaagccctgtatccagtctgtcctacaagacagtttacacaaatgaattggtttattcaaatgaatgttttatgtgtgtatatacatatatataaatatggaactagtgtatctggattctgactgagtaggtttagttaggagacaaatgctgagtgcctgtggaaaatctcaagttgcacagaagcagtaaggaaaacgtctagaggcttttaatgctaaaaatgatacgcatcaa

SEQ ID NO: 83683 - DNA, 418 bp, Chicken  19866894380287_4
ccttagttagctttgagatgctcttgagttattaaatgaatctaatcatgatgacatttgccttctgtctgatgaaagagagaataatgaagaataaatgaacatgccagtaagacccctagtcttctgtcaatgcatttaattccatacactttaaatttaagctgacataaaaattgattttaaaaaagttaaatatagcctgacttcagcttatgagtgatagttaagttgtaaaacaaagggaaattaattgacttagtcaaatactactttaaattcacatctccaaaagaacaytgttcattcttactgttcaacaagggcttgattttgcccacacagtgtggtgctgcagagctatgacttctgctaagtggataatttgttacagctgcaataattcaaagtacagtca

SEQ ID NO: 83684 - DNA, 599 bp, Chicken  19866894380289_1
  misc_feature (1)..(174): n is any nucleotide
nnnnnnnnnnnnnnnnnnnnnnnnnnnnnnnnnnnnnnnnnnnnnnnnnnnnnnnnnnnnnnnnnnnnnnnnnnnnnnnnnnnnnnnnnnnnnnnnnnnnnnnnnnnnnnnnnnnnnnnnnnnnnnnnnnnnnnnnnnnnnnnnnnnnnnnnnnnnnnnnnnnnnnnnnnnnnncaccatggggtggcctgagagggtggggaaactagggacagtttgaccgcttgtccaaggtcacttccttccctctgcagtcatgcagcccatggctgtcattggccccacatgccatcacccacyggggcagccctgtgcctttgtttctgtgtcttgccatgccctgagcccacagggagatgcccctaatatgctccagtcgctgctgtacctgggaatgcagcccctccatgcccactaacttgggcacgagacagcagcacgcccttrttgcaaygrcaaattggtaccctgggctgttgggcaaaccgctgccccttctaaaggggcacaaccactttcctggccattccatgatggtcctgtgccccaaggagtagyggggttgtggggcagggtggcagtgctcggggatggggtgg

SEQ ID NO: 83685 - DNA, 445 bp, Chicken  19866894380289_10
ggttggggctgggaacaggggaaagacagccctgaatctggtacatgcagctcagtgatgscctggggatgtgatggggggtgcatggtggcacgggtggcacagaaccaggggtagccccaggggtggcaggaggctgcagagcacragggatgtgggggtggctgagggccgggggtggcagcagggacatggggaatgggtggcaccgggratggagggggtcagggacccaggggcratggggctgagggctgggggtgagaggtagggctggtgctggggacaccagaggagacraaggacatggggcggcatgggagaccaggtgccatgagaatgtcaccagggctggccaagggttctcctgagattatctcagggaccagaggtccccggggcaagaggtcctccagccctgccgtgtcccctcagctccccacca

SEQ ID NO: 83686 - DNA, 599 bp, Chicken  19866894380289_2
  misc_feature (1)..(27): n is any nucleotide
nnnnnnnnnnnnnnnnnnnnnnnnnnncaccatggggtggcctgagagggtggggaaactagggacagtttgaccgcttgtccaaggtcacttccttccctctgcagtcatgcagcccatggctgtcattggccccacatgccatcacccacyggggcagccctgtgcctttgtttctgtgtcttgccatgccctgagcccacagggagatgcccctaatatgctccagtcgctgctgtacctgggaatgcagcccctccatgcccactaacttgggcacgagacagcagcacgcccttrttgcaaygrcaaattggtaccctgggctgttgggcaaaccgctgccccttctaaaggggcacaaccactttcctggccattccatgatggtcctgtgccccaaggagtagyggggttgtggggcagggtggcagtgctcggggatggggtggcagtgaacaggtagcattggaaagggatcgtgggagggaatgaggtggctgaataatgggcacagggccaccctaaaaggtgatggcatctggggctaatggctggcagtggctgctgcaaggccctgtgaacatggggagaaggaa

SEQ ID NO: 83687 - DNA, 599 bp, Chicken  19866894380289_3
  misc_feature (1)..(20): n is any nucleotide
nnnnnnnnnnnnnnnnnnnncaccatggggtggcctgagagggtggggaaactagggacagtttgaccgcttgtccaaggtcacttccttccctctgcagtcatgcagcccatggctgtcattggccccacatgccatcacccacyggggcagccctgtgcctttgtttctgtgtcttgccatgccctgagcccacagggagatgcccctaatatgctccagtcgctgctgtacctgggaatgcagcccctccatgcccactaacttgggcacgagacagcagcacgcccttrttgcaaygrcaaattggtaccctgggctgttgggcaaaccgctgccccttctaaaggggcacaaccactttcctggccattccatgatggtcctgtgccccaaggagtagyggggttgtggggcagggtggcagtgctcggggatggggtggcagtgaacaggtagcattggaaagggatcgtgggagggaatgaggtggctgaataatgggcacagggccaccctaaaaggtgatggcatctggggctaatggctggcagtggctgctgcaaggccctgtgaacatggggagaaggaagtggcct

SEQ ID NO: 83688 - DNA, 599 bp, Chicken  19866894380289_4
  misc_feature (1)..(18): n is any nucleotide
nnnnnnnnnnnnnnnnnncaccatggggtggcctgagagggtggggaaactagggacagtttgaccgcttgtccaaggtcacttccttccctctgcagtcatgcagcccatggctgtcattggccccacatgccatcacccacyggggcagccctgtgcctttgtttctgtgtcttgccatgccctgagcccacagggagatgcccctaatatgctccagtcgctgctgtacctgggaatgcagcccctccatgcccactaacttgggcacgagacagcagcacgcccttrttgcaaygrcaaattggtaccctgggctgttgggcaaaccgctgccccttctaaaggggcacaaccactttcctggccattccatgatggtcctgtgccccaaggagtagyggggttgtggggcagggtggcagtgctcggggatggggtggcagtgaacaggtagcattggaaagggatcgtgggagggaatgaggtggctgaataatgggcacagggccaccctaaaaggtgatggcatctggggctaatggctggcagtggctgctgcaaggccctgtgaacatggggagaaggaagtggccttg

SEQ ID NO: 83689 - DNA, 600 bp, Chicken  19866894380289_5
gcagcccatggctgtcattggccccacatgccatcacccacyggggcagccctgtgcctttgtttctgtgtcttgccatgccctgagcccacagggagatgcccctaatatgctccagtcgctgctgtacctgggaatgcagcccctccatgcccactaacttgggcacgagacagcagcacgcccttrttgcaaygrcaaattggtaccctgggctgttgggcaaaccgctgccccttctaaaggggcacaaccactttcctggccattccatgatggtcctgtgccccaaggagtagyggggttgtggggcagggtggcagtgctcggggatggggtggcagtgaacaggtagcattggaaagggatcgtgggagggaatgaggtggctgaataatgggcacagggccaccctaaaaggtgatggcatctggggctaatggctggcagtggctgctgcaaggccctgtgaacatggggagaaggaagtggccttgggcaagcagcctaactgtccctgacccccttgtgtacctccaggccacaagcacagacagttggtggcttggggctggtgtggtgcaaggctgcaggggacat

SEQ ID NO: 83690 - DNA, 600 bp, Chicken  19866894380289_6
aacatggggagaaggaagtggccttgggcaagcagcctaactgtccctgacccccttgtgtacctccaggccacaagcacagacagttggtggcttggggctggtgtggtgcaaggctgcaggggacatgtggccccagcacccctataagggccaaggcagacagaagctcccaaccccaaggtgaggagcggggacaggaacggggacggcagggaggacacagccctgtgctgctgggttggggctgggaacaggggaaagacagccctgaatctggtacatgcagctcagtgatgscctggggatgtgatggggggtgcatggtggcacgggtggcacagaaccaggggtagccccaggggtggcaggaggctgcagagcacragggatgtgggggtggctgagggccgggggtggcagcagggacatggggaatgggtggcaccgggratggagggggtcagggacccaggggcratggggctgagggctgggggtgagaggtagggctggtgctggggacaccagaggagacraaggacatggggcggcatgggagaccaggtgccatgagaatgtcaccagggctggccaagg

SEQ ID NO: 83691 - DNA, 597 bp, Chicken  19866894380289_7
tggtggcttggggctggtgtggtgcaaggctgcaggggacatgtggccccagcacccctataagggccaaggcagacagaagctcccaaccccaaggtgaggagcggggacaggaacggggacggcagggaggacacagccctgtgctgctgggttggggctgggaacaggggaaagacagccctgaatctggtacatgcagctcagtgatgscctggggatgtgatggggggtgcatggtggcacgggtggcacagaaccaggggtagccccaggggtggcaggaggctgcagagcacragggatgtgggggtggctgagggccgggggtggcagcagggacatggggaatgggtggcaccgggratggagggggtcagggacccaggggcratggggctgagggctgggggtgagaggtagggctggtgctggggacaccagaggagacraaggacatggggcggcatgggagaccaggtgccatgagaatgtcaccagggctggccaagggttctcctgagattatctcagggaccagaggtccccggggcaagaggtcctccagccctgccgtgtcccctcagctccccacca

SEQ ID NO: 83692 - DNA, 531 bp, Chicken  19866894380289_8
ccaaggcagacagaagctcccaaccccaaggtgaggagcggggacaggaacggggacggcagggaggacacagccctgtgctgctgggttggggctgggaacaggggaaagacagccctgaatctggtacatgcagctcagtgatgscctggggatgtgatggggggtgcatggtggcacgggtggcacagaaccaggggtagccccaggggtggcaggaggctgcagagcacragggatgtgggggtggctgagggccgggggtggcagcagggacatggggaatgggtggcaccgggratggagggggtcagggacccaggggcratggggctgagggctgggggtgagaggtagggctggtgctggggacaccagaggagacraaggacatggggcggcatgggagaccaggtgccatgagaatgtcaccagggctggccaagggttctcctgagattatctcagggaccagaggtccccggggcaagaggtcctccagccctgccgtgtcccctcagctccccacca

SEQ ID NO: 83693 - DNA, 504 bp, Chicken  19866894380289_9
aaggtgaggagcggggacaggaacggggacggcagggaggacacagccctgtgctgctgggttggggctgggaacaggggaaagacagccctgaatctggtacatgcagctcagtgatgscctggggatgtgatggggggtgcatggtggcacgggtggcacagaaccaggggtagccccaggggtggcaggaggctgcagagcacragggatgtgggggtggctgagggccgggggtggcagcagggacatggggaatgggtggcaccgggratggagggggtcagggacccaggggcratggggctgagggctgggggtgagaggtagggctggtgctggggacaccagaggagacraaggacatggggcggcatgggagaccaggtgccatgagaatgtcaccagggctggccaagggttctcctgagattatctcagggaccagaggtccccggggcaagaggtcctccagccctgccgtgtcccctcagctccccacca

SEQ ID NO: 83694 - DNA, 600 bp, Chicken  19866894380296_1
taacacaatagcttatctataaattactgtatgcagaaaacctgcatggtaacagaattccttctataacaccagcaaccaactctgcattcttgtcattaaataatcacagtatgtgttgaaagaaaatactagcttggaaaaactttcttcaaaaattttcctaataactttgaattatccctgctctcaccaaactcctccctagaagaaacattcttatagaacaagtatggctaaaccagaccacatcagtgtaacaaaagcaaatttcaccaacacagctccaggctctaaaaygtatgcattaacccagtgccatcagaatctctgaagccatacctggttatcctaaactcttcttctagtgacaaaacatgcttctggaaatgatgtgagcaaaactagccaaccactgctcatcaatgagctcctycaaatgatctataaataaactttctctctaatcacctggtcctcagcctcaagtagacatacaaaagtatatcactgttcagatggaaagattttctgcatttctttaaatacccattcagtctggcattgcccacatgctctcttgtagaaagacagggataa

SEQ ID NO: 83695 - DNA, 600 bp, Chicken  19866894380296_2
ttggaaaaactttcttcaaaaattttcctaataactttgaattatccctgctctcaccaaactcctccctagaagaaacattcttatagaacaagtatggctaaaccagaccacatcagtgtaacaaaagcaaatttcaccaacacagctccaggctctaaaaygtatgcattaacccagtgccatcagaatctctgaagccatacctggttatcctaaactcttcttctagtgacaaaacatgcttctggaaatgatgtgagcaaaactagccaaccactgctcatcaatgagctcctycaaatgatctataaataaactttctctctaatcacctggtcctcagcctcaagtagacatacaaaagtatatcactgttcagatggaaagattttctgcatttctttaaatacccattcagtctggcattgcccacatgctctcttgtagaaagacagggataaacaaggattttcttggccacagtcataggctagatgctacgctagaagggtgtttgctctgattctgtcaagctgctttcagtcattcaaatttcatatgccaacatttggatagaaaagaaggaatgaatttcag

SEQ ID NO: 83696 - DNA, 390 bp, Chicken  19866894380303_1
agctgtacacattactattattttgctttaatttcaacagaaacccaccttctggcagagccctttctgtcacagcaacctttcagtcaccctttcttgtaacagtatcagatgaatcagcaaattgctacagctgtgcataattctctagggtatgtcaagccctggaagccagcagctgggagatctcttccgctcggtgtagtgctacaaatcagttctgaagctgcagattactgaaggaagtatttgcaccaccaacggtgcatggagtctctgggcaatgtgaacctgggatcygatgggagagttgcgggacagaagaagtttataaggtgatccagagatgaaactcagctgttggctttcctaatatgcagaaaatctcat

SEQ ID NO: 83697 - DNA, 600 bp, Chicken  19866894380310_1
actggtttgataatgagaacttctttgtttcatacagtacagaaaacatttaatatgaacacttacgtaatactttttttttttaagtggaatgaacattttcagtagcagttaagaaattttacaccataaggataacaatgaaatcaccaaatacattgtcagaaactaaaaatgcaccctaaaatataaaatatcattgttatatgcatggttaattttgataattgtgatcccttctccaggtaaagatacatatttaaccacaattccactaaactggtatgcctataaagttayattccaaagtaatatatgtaattaatctaacaatatgtgattataatcctgttatttctgacatgaaagtgtagaatttaaatcttccaagggaaggtcataatttttagtatattgttgattacattcagttcttcagcaagagttagcatgcattatactttctacttccttactcatatttccctattctctttcttctacaattggttcagaaacttggattatccatcagctcaaccagcagatgggaatggcacaccaagttgcttctttccttaaggactgtctctacccaga

SEQ ID NO: 83698 - DNA, 600 bp, Chicken  19866894380316_1
ttcctcagaaccaagtccagctttcacagcatcactttgacatctacaaataatagttctgttttctttctctcccttgtccacagctttgtaattactcccataaactgtgtcaaactcattgacctaaggaacaaagttttcaggaactcatggggccatggggtacccaagtattcattcaaatacagaactgcagcctctgggtgaggtaaactctcagctgcaaacagctgggaagcagcaaggtaccaccaggtgctggctctatctttccaaactttccctctgtctctctakaggtccctgctagcacccataggcaaacatggtgcagctcttcttggcttacttctaactcaggcttctcagagccattcgctttccaagaagctctggaataatgggaaaatgctgctccatcaaaataaagatcttgcaggtgtgatacatctgcttgtgccacctcagcctcctgctgttcattgctttacatagaaaatattccttgtgtgctttcaagtgctgggcttagatgcagaacctgcttgggctgtcttgccaacacaagatgggacactctgcagtgcccatcttgtt

SEQ ID NO: 83699 - DNA, 600 bp, Chicken  19866894380323_1
ccatgaatgcttagtatgtgtgtttactttctgtaatcataagagggatatgcaaatcataatgcacacattcaaatatatgacaggtggctgtctgtcaaaaacacacattctccaagagtttgtatccaaaagagttgagctttgggaggaactcggcatatggtagttaaagaaaagctgatttaaaaaaatgtactgccactacatctaaatataatccttaaaggagagagaaaaaaaatatatcagaaaccagtactgtaattatgcttaccaacctacttcatttatcaaagyacattataaaatgagcagagaatttaactcagagaayatctacaactttcaattatcagccctataaattacacaaccagtgacacgcaatgagatcaaagattctgaaccatttgattttcttacacgtgagtgagcagctactgggcacagtgataactcaccaatgctgaataactgggacaatattgaactttgtacacatggcactcctgacaatggcagagaaatgaaccggtggatactctggaggcttgttgagcaacagaaggctggtgtacagataagctaatgtctcat

SEQ ID NO: 83700 - DNA, 600 bp, Chicken  19866894380323_2
cataagagggatatgcaaatcataatgcacacattcaaatatatgacaggtggctgtctgtcaaaaacacacattctccaagagtttgtatccaaaagagttgagctttgggaggaactcggcatatggtagttaaagaaaagctgatttaaaaaaatgtactgccactacatctaaatataatccttaaaggagagagaaaaaaaatatatcagaaaccagtactgtaattatgcttaccaacctacttcatttatcaaagyacattataaaatgagcagagaatttaactcagagaayatctacaactttcaattatcagccctataaattacacaaccagtgacacgcaatgagatcaaagattctgaaccatttgattttcttacacgtgagtgagcagctactgggcacagtgataactcaccaatgctgaataactgggacaatattgaactttgtacacatggcactcctgacaatggcagagaaatgaaccggtggatactctggaggcttgttgagcaacagaaggctggtgtacagataagctaatgtctcatgaatgtgctaatgagttygccttctaaccccatcaac

SEQ ID NO: 83701 - DNA, 600 bp, Chicken  19866894380323_3
agaatttaactcagagaayatctacaactttcaattatcagccctataaattacacaaccagtgacacgcaatgagatcaaagattctgaaccatttgattttcttacacgtgagtgagcagctactgggcacagtgataactcaccaatgctgaataactgggacaatattgaactttgtacacatggcactcctgacaatggcagagaaatgaaccggtggatactctggaggcttgttgagcaacagaaggctggtgtacagataagctaatgtctcatgaatgtgctaatgagttygccttctaaccccatcaactaaaaacacgggggactgatgtattttcctttgtttctttagaatgtgtatcatctctataaattcaaatgcagtctcttgagttttctaaaaacaacttttaatttctaatctgttcaagacatcctccaaaatttggactacatcaatatcagatgttctgtaccagttcagtacatttttcttattactattcaacttcttcttaattgtatatctgaacagagaaggtaaatgttttgacaatatttgccatgtgaatttcattgaagtgttaggga

SEQ ID NO: 83702 - DNA, 600 bp, Chicken  19866894380325_1
ccgtatccccatatggaaatcgaatggctctgatgacttattaatgactgagataaataagcccagagagagctgacaccactgcagcctgagaaagatctcagaggttaaatgacaatactactccagtcgatctgctttaagtagggttggattttgctttaatagcatgtctgggctctgctgtgaaccgtgctggctggctgtgcctgtcgctacccgctttgttcacaggctccgtccctctcttttgtttagagctgactgccatctatgtacctggaaaagcaagaaaatagraacaagtaaacgaatagtttggcgtttatggtttccccaaaaaggaggtcaggtttgaatggctactttcagcctgcaattttctgtggcctctgactcctcttggccctgattgctgctgcctcccccacctaagataactgcagtacagcacacatagcagagtggcaatctgctttgtcctgttctctatttgatacctccttctgattgcttctctaattctctgttttggcarcaggagtgtatcttccagtgctgctgttggagtgcagcctcagtgtgcattgagcaaagcct

SEQ ID NO: 83703 - DNA, 600 bp, Chicken  19866894380325_2
cgtccctctcttttgtttagagctgactgccatctatgtacctggaaaagcaagaaaatagraacaagtaaacgaatagtttggcgtttatggtttccccaaaaaggaggtcaggtttgaatggctactttcagcctgcaattttctgtggcctctgactcctcttggccctgattgctgctgcctcccccacctaagataactgcagtacagcacacatagcagagtggcaatctgctttgtcctgttctctatttgatacctccttctgattgcttctctaattctctgttttggcarcaggagtgtatcttccagtgctgctgttggagtgcagcctcagtgtgcattgagcaaagcctrgaagccctttaccatgacagctgtatcggcttctggttaaacagagtgaaggcagccagtycagcagaaactaagctacttacaagtayaccaaaaacccttytcaaaagcaataagcaggtaaaaaaggaattctgttggtagagtgcaccaaaattatttgctgatgcagtttatgtaggagagttccatgtcccctcacatgatgaccaaattgcagcaccagcaccgagtggt

SEQ ID NO: 83704 - DNA, 598 bp, Chicken  19866894380325_3
acaagtaaacgaatagtttggcgtttatggtttccccaaaaaggaggtcaggtttgaatggctactttcagcctgcaattttctgtggcctctgactcctcttggccctgattgctgctgcctcccccacctaagataactgcagtacagcacacatagcagagtggcaatctgctttgtcctgttctctatttgatacctccttctgattgcttctctaattctctgttttggcarcaggagtgtatcttccagtgctgctgttggagtgcagcctcagtgtgcattgagcaaagcctrgaagccctttaccatgacagctgtatcggcttctggttaaacagagtgaaggcagccagtycagcagaaactaagctacttacaagtayaccaaaaacccttytcaaaagcaataagcaggtaaaaaaggaattctgttggtagagtgcaccaaaattatttgctgatgcagtttatgtaggagagttccatgtcccctcacatgatgaccaaattgcagcaccagcaccgagtggtgcaagggtctgaggcgctcacctggccctctcttgggccctcaccaggacctctgtctgtg

SEQ ID NO: 83705 - DNA, 537 bp, Chicken  19866894380325_4
ctactttcagcctgcaattttctgtggcctctgactcctcttggccctgattgctgctgcctcccccacctaagataactgcagtacagcacacatagcagagtggcaatctgctttgtcctgttctctatttgatacctccttctgattgcttctctaattctctgttttggcarcaggagtgtatcttccagtgctgctgttggagtgcagcctcagtgtgcattgagcaaagcctrgaagccctttaccatgacagctgtatcggcttctggttaaacagagtgaaggcagccagtycagcagaaactaagctacttacaagtayaccaaaaacccttytcaaaagcaataagcaggtaaaaaaggaattctgttggtagagtgcaccaaaattatttgctgatgcagtttatgtaggagagttccatgtcccctcacatgatgaccaaattgcagcaccagcaccgagtggtgcaagggtctgaggcgctcacctggccctctcttgggccctcaccaggacctctgtctgtg

SEQ ID NO: 83706 - DNA, 509 bp, Chicken  19866894380325_5
ctctgactcctcttggccctgattgctgctgcctcccccacctaagataactgcagtacagcacacatagcagagtggcaatctgctttgtcctgttctctatttgatacctccttctgattgcttctctaattctctgttttggcarcaggagtgtatcttccagtgctgctgttggagtgcagcctcagtgtgcattgagcaaagcctrgaagccctttaccatgacagctgtatcggcttctggttaaacagagtgaaggcagccagtycagcagaaactaagctacttacaagtayaccaaaaacccttytcaaaagcaataagcaggtaaaaaaggaattctgttggtagagtgcaccaaaattatttgctgatgcagtttatgtaggagagttccatgtcccctcacatgatgaccaaattgcagcaccagcaccgagtggtgcaagggtctgaggcgctcacctggccctctcttgggccctcaccaggacctctgtctgtg

SEQ ID NO: 83707 - DNA, 495 bp, Chicken  19866894380325_6
ggccctgattgctgctgcctcccccacctaagataactgcagtacagcacacatagcagagtggcaatctgctttgtcctgttctctatttgatacctccttctgattgcttctctaattctctgttttggcarcaggagtgtatcttccagtgctgctgttggagtgcagcctcagtgtgcattgagcaaagcctrgaagccctttaccatgacagctgtatcggcttctggttaaacagagtgaaggcagccagtycagcagaaactaagctacttacaagtayaccaaaaacccttytcaaaagcaataagcaggtaaaaaaggaattctgttggtagagtgcaccaaaattatttgctgatgcagtttatgtaggagagttccatgtcccctcacatgatgaccaaattgcagcaccagcaccgagtggtgcaagggtctgaggcgctcacctggccctctcttgggccctcaccaggacctctgtctgtg

SEQ ID NO: 83708 - DNA, 599 bp, Chicken  19866894380332_1
  misc_feature (1)..(146): n is any nucleotide
nnnnnnnnnnnnnnnnnnnnnnnnnnnnnnnnnnnnnnnnnnnnnnnnnnnnnnnnnnnnnnnnnnnnnnnnnnnnnnnnnnnnnnnnnnnnnnnnnnnnnnnnnnnnnnnnnnnnnnnnnnnnnnnnnnnnnnnnnnnnnnnnnntaactgttttaaaatatttggaggatggtattaccagaagatccgtgtcagtcactatattaggaaacaatctgaaaaaaacagtgttctctcttgaacaaaggaacagatagacagaaactctgattcaggagggcagatccctctgctaccrattgctgaaggtagaaagttaaagtagcagaactacctcacagattcccaacgctttttccctatacctttccctacaccagaacaggtggttgctgctggagagcagagaatgagctcagtaggctctttgtcttcctgagcgctgttgcttatcagtgggcaaactagattttagtgtgttcaaggcccatctatttctgctcttggtaagtgaatttactaagaagmggtattcgagaaaactgaattttaaaatgcacaatgcaaattgtttctggaaagaagcttccacgttaa

SEQ ID NO: 83709 - DNA, 600 bp, Chicken  19866894380332_2
tgttctctcttgaacaaaggaacagatagacagaaactctgattcaggagggcagatccctctgctaccrattgctgaaggtagaaagttaaagtagcagaactacctcacagattcccaacgctttttccctatacctttccctacaccagaacaggtggttgctgctggagagcagagaatgagctcagtaggctctttgtcttcctgagcgctgttgcttatcagtgggcaaactagattttagtgtgttcaaggcccatctatttctgctcttggtaagtgaatttactaagaagmggtattcgagaaaactgaattttaaaatgcacaatgcaaattgtttctggaaagaagcttccacgttaactggaaaagtctcggttgcaaagctgattctaagaattaagatccctcaatttggaaacagaaatgtactatgtgatattatcgtcataaccacagcaattccaagctcaattagtcactgagggcttcataaaacaatttagagaaaaggcactgtctgtgccttgaactgaggattctgaaaaggagtagctgtcagccacctgaagaagtggatgagaacatggcagt

SEQ ID NO: 83710 - DNA, 490 bp, Chicken  19866894380338_1
  misc_feature (1)..(24): n is any nucleotide
nnnnnnnnnnnnnnnnnnnnnnnnattgacttttccctgagttccaacaagagggaaaatataaatgagaggaaacaaaccttccaggtgccctgcagggatgtcattgtgtcattgattcaaaatgtcatttgattttcacagaagtcagtgcacaaatgagcaagacggttcaaatggaaaggtggtgtggttagtaggaatgatatcagggaaggagctgatggttttacattgcctttgttatttgtttcccttggcatgcaaactggtaacctggccctgagcctctgattttcyttccttggctctcttgactcacttttccgaagtccaatgcttcagttacagacagatatcagctttagacttcagacttcccccccaaacaggcttggtgtcacactgcagaaatgttctctgttttctctctgagctcagggtcaattcaggaagcttaaagccatcatttaagcagcccttctgactt

SEQ ID NO: 83711 - DNA, 599 bp, Chicken  19866894380346_1
  misc_feature (1)..(37): n is any nucleotide
nnnnnnnnnnnnnnnnnnnnnnnnnnnnnnnnnnnnntgctttggttttgcaccttttttaatctagaaaagttgtttatcaaaggataaaataataaggtgggaatgtgtgctgtttctttgcatctgatctttttctctcttcttttttttttttttttttttttttttgatagtagaggagggctgtctggctcaagacctggcattctagctctcaagctaaacaacctctaatagctctgcctctcaaagtcaaaatattgattggggaaactctgaataaagcacttcagaatrggactgagcagagagcatctgtgattgaaaacaagtgcccttattagttctttcatgggaactaacctacaggagatttcattgctatcaaatcagcattactatccacattctaaccccccctgacagtttagaatttggattacagcctgcagaccagccactgaaagaaaaattagcattttagcatcagatgagcaccttactttcctgtaggaaatggtttgctgcatcttaagacacagtgtgtgctttgtattttatggaagaaacacaaataatatgtggcttgccttctt

SEQ ID NO: 83712 - DNA, 599 bp, Chicken  19866894380348_1
  misc_feature (1)..(117): n is any nucleotide
nnnnnnnnnnnnnnnnnnnnnnnnnnnnnnnnnnnnnnnnnnnnnnnnnnnnnnnnnnnnnnnnnnnnnnnnnnnnnnnnnnnnnnnnnnnnnnnnnnnnnnnnnnnnnnnnnnnnncaaagcccgctgccttcattcagatatgtctggcaaggccattggcaatacttatagtgcaagaatgcaatatttcaatgtagtacacttttgtgtttttgcagacttattttttccatctgtttgttgcctgtctataagatttctgattaagatcaaggaagtaaagagcaaatcttggcyaggagggtaaaaacctagcttttatggggaacaaatgggaaaggtgaattgctcttgtaagctggtaaaaagggtaagaaactttagaaactgacaggcagggaatgcagctcagcaaacagtttacagactattcaccaaaacagaacaaaacaaaaagaaaagatcactaaactagttaytttctcttgaaagaataggtggagcagawaagtctttgaaaccctttccccttctgtttttgaagagtttactattccatgttctctgatgtgagatttctgtcccctcggtgacaa

SEQ ID NO: 83713 - DNA, 600 bp, Chicken  19866894380348_2
tgcaatatttcaatgtagtacacttttgtgtttttgcagacttattttttccatctgtttgttgcctgtctataagatttctgattaagatcaaggaagtaaagagcaaatcttggcyaggagggtaaaaacctagcttttatggggaacaaatgggaaaggtgaattgctcttgtaagctggtaaaaagggtaagaaactttagaaactgacaggcagggaatgcagctcagcaaacagtttacagactattcaccaaaacagaacaaaacaaaaagaaaagatcactaaactagttaytttctcttgaaagaataggtggagcagawaagtctttgaaaccctttccccttctgtttttgaagagtttactattccatgttctctgatgtgagatttctgtcccctcggtgacaacataactrttcagatggttgatcccrtatccctggcagagaactgcaggaggctcctraagccacttggccaggttcagaacagaaaccttcctcacctcctgagaagtccagttcctgctcctccccaccaagctcgtgctgaaggagagggcacctctggcaagcattagaaattatattt

SEQ ID NO: 83714 - DNA, 600 bp, Chicken  19866894380348_3
gtttttgcagacttattttttccatctgtttgttgcctgtctataagatttctgattaagatcaaggaagtaaagagcaaatcttggcyaggagggtaaaaacctagcttttatggggaacaaatgggaaaggtgaattgctcttgtaagctggtaaaaagggtaagaaactttagaaactgacaggcagggaatgcagctcagcaaacagtttacagactattcaccaaaacagaacaaaacaaaaagaaaagatcactaaactagttaytttctcttgaaagaataggtggagcagawaagtctttgaaaccctttccccttctgtttttgaagagtttactattccatgttctctgatgtgagatttctgtcccctcggtgacaacataactrttcagatggttgatcccrtatccctggcagagaactgcaggaggctcctraagccacttggccaggttcagaacagaaaccttcctcacctcctgagaagtccagttcctgctcctccccaccaagctcgtgctgaaggagagggcacctctggcaagcattagaaattatattttttcttacagcatttttcccccacagata

SEQ ID NO: 83715 - DNA, 600 bp, Chicken  19866894380348_4
taaaaacctagcttttatggggaacaaatgggaaaggtgaattgctcttgtaagctggtaaaaagggtaagaaactttagaaactgacaggcagggaatgcagctcagcaaacagtttacagactattcaccaaaacagaacaaaacaaaaagaaaagatcactaaactagttaytttctcttgaaagaataggtggagcagawaagtctttgaaaccctttccccttctgtttttgaagagtttactattccatgttctctgatgtgagatttctgtcccctcggtgacaacataactrttcagatggttgatcccrtatccctggcagagaactgcaggaggctcctraagccacttggccaggttcagaacagaaaccttcctcacctcctgagaagtccagttcctgctcctccccaccaagctcgtgctgaaggagagggcacctctggcaagcattagaaattatattttttcttacagcatttttcccccacagatataatttgccatttttgcttgctgccaaactgaataagtgtcatcctggggttggaattttactttctcctttctcaaaaatttgtccttgaggtgg

SEQ ID NO: 83716 - DNA, 600 bp, Chicken  19866894380348_5
ggggaacaaatgggaaaggtgaattgctcttgtaagctggtaaaaagggtaagaaactttagaaactgacaggcagggaatgcagctcagcaaacagtttacagactattcaccaaaacagaacaaaacaaaaagaaaagatcactaaactagttaytttctcttgaaagaataggtggagcagawaagtctttgaaaccctttccccttctgtttttgaagagtttactattccatgttctctgatgtgagatttctgtcccctcggtgacaacataactrttcagatggttgatcccrtatccctggcagagaactgcaggaggctcctraagccacttggccaggttcagaacagaaaccttcctcacctcctgagaagtccagttcctgctcctccccaccaagctcgtgctgaaggagagggcacctctggcaagcattagaaattatattttttcttacagcatttttcccccacagatataatttgccatttttgcttgctgccaaactgaataagtgtcatcctggggttggaattttactttctcctttctcaaaaatttgtccttgaggtggctgatttattgtgggttt

SEQ ID NO: 83717 - DNA, 600 bp, Chicken  19866894380348_6
taagctggtaaaaagggtaagaaactttagaaactgacaggcagggaatgcagctcagcaaacagtttacagactattcaccaaaacagaacaaaacaaaaagaaaagatcactaaactagttaytttctcttgaaagaataggtggagcagawaagtctttgaaaccctttccccttctgtttttgaagagtttactattccatgttctctgatgtgagatttctgtcccctcggtgacaacataactrttcagatggttgatcccrtatccctggcagagaactgcaggaggctcctraagccacttggccaggttcagaacagaaaccttcctcacctcctgagaagtccagttcctgctcctccccaccaagctcgtgctgaaggagagggcacctctggcaagcattagaaattatattttttcttacagcatttttcccccacagatataatttgccatttttgcttgctgccaaactgaataagtgtcatcctggggttggaattttactttctcctttctcaaaaatttgtccttgaggtggctgatttattgtgggtttgcattgctgtctgaactgaccagataaggttg

SEQ ID NO: 83718 - DNA, 599 bp, Chicken  19866894380351_1
  misc_feature (1)..(4): n is any nucleotide
nnnncagacattcctcgaaagactgccttaatctccaaggctgctaatgtttgcatgacatcattgtcgttacagtcctgtctcttcactcagtaatgagaaaaactgagggaaacaagaaaaaagagtttttactagcatcccactagggtgtataatttcagttgcacaaattccacttcaaaacctggacattagctcacagcaaaataggctgagaacaaaacaaaacaaattccctcatgcagtgccagccacacaacagcaatcaagcactctccttagaagtagctgttagayacctttaatttttcttcatacacctaagggaaagacttttcttcctcaaaataaggcatgtatcagaatctaacaggattacatttcttctttcattattcacattcaagtgactgaacatctttacttacagtatattgggtttttttccaaaacctgtcatcctcatactacttttgcattcaacatagttgctttatcacgaaataatgcatcaaaagggaaagacaagtaccaaaaagaaaactttctgcataaagaagtttctctgacttattgtattcataatttttaaagca

SEQ ID NO: 83719 - DNA, 600 bp, Chicken  19866894380359_1
cattccttcatgctggtggatatctctgagaggataaaattagatcagcaggagaaactccttgcattccttgcagagctttggagaaatgtatgggatagaagccttgacaaatgtggatattggctgcactgtatttgaaattcatatttaaagccactgcacattctttactgtgctttttataaatccctttggcagaaagcctaagcaaatggcccagctggagttactgattgcagctcccagaagccatatttgctgagatccagtgcctgctgtttgccttgccttgctcakttggaatggctgctgctccctgccttgtctcctgcaaagccmttgcttackttctaacagagcttctttggaatgtgaatcctaggcagtctgatggtcaatgtgaataagccctgcagagtggtcgatgggattctctgtgacacagctgaggacatgagatctgaaaagctgaagaactgagcccatctgtgatatttgtgcaattcagtggatatctgcaaagactaagttccttccatagtagagagaacaaaaaaacaacacacacccttggtttctttagacgctacctagctc

SEQ ID NO: 83720 - DNA, 600 bp, Chicken  19866894380359_2
gatcagcaggagaaactccttgcattccttgcagagctttggagaaatgtatgggatagaagccttgacaaatgtggatattggctgcactgtatttgaaattcatatttaaagccactgcacattctttactgtgctttttataaatccctttggcagaaagcctaagcaaatggcccagctggagttactgattgcagctcccagaagccatatttgctgagatccagtgcctgctgtttgccttgccttgctcakttggaatggctgctgctccctgccttgtctcctgcaaagccmttgcttackttctaacagagcttctttggaatgtgaatcctaggcagtctgatggtcaatgtgaataagccctgcagagtggtcgatgggattctctgtgacacagctgaggacatgagatctgaaaagctgaagaactgagcccatctgtgatatttgtgcaattcagtggatatctgcaaagactaagttccttccatagtagagagaacaaaaaaacaacacacacccttggtttctttagacgctacctagctctggggtcagtttggggtatatgtacagaataagctctatcta

SEQ ID NO: 83721 - DNA, 600 bp, Chicken  19866894380359_3
gagaaactccttgcattccttgcagagctttggagaaatgtatgggatagaagccttgacaaatgtggatattggctgcactgtatttgaaattcatatttaaagccactgcacattctttactgtgctttttataaatccctttggcagaaagcctaagcaaatggcccagctggagttactgattgcagctcccagaagccatatttgctgagatccagtgcctgctgtttgccttgccttgctcakttggaatggctgctgctccctgccttgtctcctgcaaagccmttgcttackttctaacagagcttctttggaatgtgaatcctaggcagtctgatggtcaatgtgaataagccctgcagagtggtcgatgggattctctgtgacacagctgaggacatgagatctgaaaagctgaagaactgagcccatctgtgatatttgtgcaattcagtggatatctgcaaagactaagttccttccatagtagagagaacaaaaaaacaacacacacccttggtttctttagacgctacctagctctggggtcagtttggggtatatgtacagaataagctctatctagtttgcctg

SEQ ID NO: 83722 - DNA, 600 bp, Chicken  19866894380366_1
gcatgagatgcaagatcagattggagctttcctttggcactgccacgtagcatttctagctatgccctgtgaacctctgcaaaaactcctcggcctccttgagatttatgtcctttaaatagaaatgcccagttaacaccttttcctgaatcctgttataaatatttattttcttaatccctctccattattcatccctagcagcccacggatgcaactttgtcattgctgctggagccctgctctgagcagatggaaattgcccatggccactgactgtactgtgatggccacatggtrtgggagcctgggctgcgtgttcctgtgacctgcacagctgcagagggcatacttactgtcttttgcatagctgcttacagctctaatttctgaaaagagaaagggagaaagctgaaatgtggccctgagtaacttggaaaaggttttctcacgaagcaagcctctaatagagaatgctayggagaaatgagtgcttcagctgatgtgacaagctagggagctttgcamagtctgcttgtcaagcagcagcttgcatctgcagttcttcaaggctctgtttagggctgtgatgaagggaaa

SEQ ID NO: 83723 - DNA, 600 bp, Chicken  19866894380366_2
ctctccattattcatccctagcagcccacggatgcaactttgtcattgctgctggagccctgctctgagcagatggaaattgcccatggccactgactgtactgtgatggccacatggtrtgggagcctgggctgcgtgttcctgtgacctgcacagctgcagagggcatacttactgtcttttgcatagctgcttacagctctaatttctgaaaagagaaagggagaaagctgaaatgtggccctgagtaacttggaaaaggttttctcacgaagcaagcctctaatagagaatgctayggagaaatgagtgcttcagctgatgtgacaagctagggagctttgcamagtctgcttgtcaagcagcagcttgcatctgcagttcttcaaggctctgtttagggctgtgatgaagggaaaatacctgcaaatatatgagctgccttcaagtgtgaggtatgtccttcagaccacgggttccatacraatgtgttttccctccatgaacggatagcctttcttaaggtcttaatgcgtgttatgtgacctgatgtcagctaaactcactatttaagtaagcagtgattgagtgcaagcttg

SEQ ID NO: 83724 - DNA, 567 bp, Chicken  19866894380366_3
ctgctggagccctgctctgagcagatggaaattgcccatggccactgactgtactgtgatggccacatggtrtgggagcctgggctgcgtgttcctgtgacctgcacagctgcagagggcatacttactgtcttttgcatagctgcttacagctctaatttctgaaaagagaaagggagaaagctgaaatgtggccctgagtaacttggaaaaggttttctcacgaagcaagcctctaatagagaatgctayggagaaatgagtgcttcagctgatgtgacaagctagggagctttgcamagtctgcttgtcaagcagcagcttgcatctgcagttcttcaaggctctgtttagggctgtgatgaagggaaaatacctgcaaatatatgagctgccttcaagtgtgaggtatgtccttcagaccacgggttccatacraatgtgttttccctccatgaacggatagcctttcttaaggtcttaatgcgtgttatgtgacctgatgtcagctaaactcactatttaagtaagcagtgattgagtgcaagcttggttccttcaaaagga

SEQ ID NO: 83725 - DNA, 429 bp, Chicken  19866894380366_4
atagctgcttacagctctaatttctgaaaagagaaagggagaaagctgaaatgtggccctgagtaacttggaaaaggttttctcacgaagcaagcctctaatagagaatgctayggagaaatgagtgcttcagctgatgtgacaagctagggagctttgcamagtctgcttgtcaagcagcagcttgcatctgcagttcttcaaggctctgtttagggctgtgatgaagggaaaatacctgcaaatatatgagctgccttcaagtgtgaggtatgtccttcagaccacgggttccatacraatgtgttttccctccatgaacggatagcctttcttaaggtcttaatgcgtgttatgtgacctgatgtcagctaaactcactatttaagtaagcagtgattgagtgcaagcttggttccttcaaaagga

SEQ ID NO: 83726 - DNA, 599 bp, Chicken  19866894380368_1
  misc_feature (1)..(137): n is any nucleotide
nnnnnnnnnnnnnnnnnnnnnnnnnnnnnnnnnnnnnnnnnnnnnnnnnnnnnnnnnnnnnnnnnnnnnnnnnnnnnnnnnnnnnnnnnnnnnnnnnnnnnnnnnnnnnnnnnnnnnnnnnnnnnnnnnnnnnnnnngaggagaagcaggtgggtaactgtgagagagcaaattgaagatctctggtctgcagttaagatggcagcgtaattcatcatgcaaatcttacagagtctccaacattatgcagaagaccaacacactccaagactaggaggaaccagagagggaatgagcacrattttgtggtgacaaggaggtagtgatctattcaaacactgatacataatgccagcatgttcacatcgcttaagttgatcataataggaaattaattgatcaataaatgtacttaagagcattaagcttcaggaaagcagtgctggaataagtatgaatggcacggcttccaagggagcctaagtgaattaggcactaacactctattacagttcaattagactcctttgaaaagccccgactaccctaatgctttgaaatccatttgtgggaagagcagacgaattcaaaaagatgcc

SEQ ID NO: 83727 - DNA, 563 bp, Chicken  19866894380368_2
agtgaaaaacgcaagggatgagcggtaaccactgtgatttcacagggacaggctgctcaaagagctcagatttaaatgaagcttttcctagtggcagtcagacacactcagagtccgtacaggcttagagaaggagaagaaaagggagcagcaggagcagaatcagcgtaggaacatgctcttagcaatacatgggaggaagaagcagcataaaaaagcagaggagatccacaaagaatatgtgggtgaagtttgcagttcattaaattcctcctgcattaatctattaatttttattartttttttaagagagataccggtcaccgaatacctactaaattatttctaacaagtttaaattcatagaaccattaaagttggaaaagaccactaagatctcccagtccaaccatcaactcgtcgccaccatgcccagtcattttaaggagctccctggccccagaccctctcagtctcttaatttctgtggctttcccaacttattttacaatgtatttacaaactgcttttcaactctcgctaaagcaatgaccttgcaaag

SEQ ID NO: 83728 - DNA, 599 bp, Chicken  19866894380379_1
  misc_feature (1)..(21): n is any nucleotide
nnnnnnnnnnnnnnnnnnnnntggacttcttggcactgacagaaccaggcctccccagccaccgccaagcaacccatgtctgctcctggacaaggcacaaagtgaagcatgaggagagcacacgccccgccatgaaatgcactgtggtcctacaggatctgaggatctgcatggcatggacagaggcagctccacagcaccttccagctacagacccctccatggacatacacacacacacacagacgtgctctaccgacataatcagctcaccttagaatggagtcaggaccttgaatrtggcactcatcagcatctgaagaaaccatatggactgtctacaattgagctttaaatatatggaaggaataagaagctaaaaaaggatggatggacccaacccagaaatagcagagacaccatatccagaagagaaggcaagccctgtaactgagcatgctcctgatgccagagatgaaagtttagaagcgatgaagattgacagccttcttctctctcaacccccagatgaccaccaagaagctacaacagaaaaaacaaacaaacaaacaaaaaaaaccccttcaaattaaaatttc
